United States Patent Application Publication US 2024/0398993 A1 - sequence listing, part 7

SEQ ID NO: 20050 - protein, 1008 aa, Homo sapiens
MDTAEDPAWLQLLQKDSSPPGPRPTAFFCPQDGSLGAGSSAMRDYCPSQQKASPAPPRHTPDQSPGMESRHRSPSGAGEGASCSDGPRGSLACPSPTCFSPQESPSKETLEAHGASISGTPEATTSGKPEPVSSVKTEPKSSDDRNPMFLEKMDFKSSKQADSTSIGKEDPGSSRKADPMFTGKAEPEILGKGDPVAPGRMDPMTVRKEDLGSLGKVDPLCSSKTYTVSPRKEDPGSLRKVDPVSSDKVDPVFPRKEEPRYSGKEHPVSSEKVAPTSAEKVDLVLSGKRDPGPSGKADPMPLESMDSASTGKTEPGLLGKLIPGSSGKNGPVSSGTGAPGSLGRLDPTCLGMADPASVGNVETVPATKEDSRFLGKMDPASSGEGRPVSGHTDTTASAKTDLTSLKNVDPMSSGKVDPVSLGKMDPMCSGKPELLSPGQAERVSVGKAGTVSPGKEDPVSSRREDPISAGSRKTSSEKVNPESSGKTNPVSSGPGDPRSLGTAGPPSAVKAEPATGGKGDPLSSEKAGLVASGKAAPTASGKAEPLAVGKEDPVSKGKADAGPSGQGDSVSIGKVVSTPGKTVPVPSGKVDPVSLGKAEAIPEGKVGSLPLEKGSPVTTTKADPRASGKAQPQSGGKAETKLPGQEGAAAPGEAGAVCLKKETPQASEKVDPGSCRKAEPLASGKGEPVSLGKADSAPSRKTESPSLGKVVPLSLEKTKPSSSSRQLDRKALGSARSPEGARGSEGRVEPKAEPVSSTEASSLGQKDLEAAGAERSPCPEAAAPPPGPRTRDNFTKAPSWEASAPPPPREDAGTQAGAQACVSVAVSPMSPQDGAGGSAFSFQAAPRAPSPPSRRDAGLQVSLGAAETRSVATGPMTPQAAAPPAFPEVRVRPGSALAAAVAPPEPAEPVRDVSWDEKGMTWEVYGAAMEVEVLGMAIQKHLERQIEEHGRQGAPAPPPAARAGPGRSGSVRTAPPDGAAKRPPGLFRALLQSVRRPRCCSRAGPTAE

SEQ ID NO: 20051 - protein, 798 aa, Homo sapiens
MDTAEDPAWLQLLQKDSSPPGPRPTAFFCPQDGSLGAGSSAMRDYCPSQQKASPAPPRHTPDQSPGMESRHRSPSGAGEGASCSDGPRGSLACPSPTCFSPQESPSKETLEAHGASISGTPEATTSGKPEPVSSVKTEPKSSDDRNPMFLEKMDFKSSKQADSTSIGKEDPGSSRKADPMFTGKAEPEILGKGDPVAPGRMDPMTVRKEDLGSLGKVDPLCSSKTYTVSPRKEDPGSLRKVDPVSSDKVDPVFPRKEEPRYSGKEHPVSSEKVAPTSAEKVDLVLSGKRDPGPSGKADPMPLESMDSASTGKTEPGLLGKLIPGSSGKNGPVSSGTGAPGSLGRLDPTCLGMADPASVGNVETVPATKEDSRFLGKMDPASSGEGRPVSGHTDTTASAKTDLTSLKNVDPMSSGKVDPVSLGKMDPMCSGKPELLSPGQAERVSVGKAGTVSPGKEDPVSSRREDPISAGSRKTSSEKVNPESSGKTNPVSSGPGDPRSLGTAGPPSAVKAEPATGGKGDPLSSEKAGLVASGKAAPTASGKAEPLAVGKEDPVSKGKADAGPSGQGDSVSIGKVVSTPGKTVPVPSGKVDPVSLGKAEAIPEGKVGSLPLEKGSPVTTTKADPRASGKAQPQSGGKAETKLPGQEGAAAPGEAGAVCLKKETPQASEKVDPGSCRKAEPLASGKGEPVSLGKADSAPSRKTESPSLGKVVPLSLEKTKPSSSSRQLDRKALGSARSPEGARGSEGRQASARPVPRAAAECAPAAVLLAGGTHGRVICPHFVRPSFRPSQAPFLITGP

SEQ ID NO: 20052 - protein, 998 aa, Homo sapiens
MAQVAMSTLPVEDEESSESRMVVTFLMSALESMCKELAKSKAEVACIAVYETDVFVVGTERGRAFVNTRKDFQKDFVKYCVEEEEKAAEMHKMKSTTQANRMSVDAVEIETLRKTVEDYFCFCYGKALGKSTVVPVPYEKMLRDQSAVVVQGLPEGVAFKHPENYDLATLKWILENKAGISFIIKRPFLEPKKHVGGRVMVTDADRSILSPGGSCGPIKVKTEPTEDSGISLEMAAVTVKEESEDPDYYQYNIQAGPSETDDVDEKQPLSKPLQGSHHSSEGNEGTEMEVPAEDSTQHVPSETSEDPEVEVTIEDDDYSPPSKRPKANELPQPPVPEPANAGKRKVREFNFEKWNARITDLRKQVEELFERKYAQAIKAKGPVTIPYPLFQSHVEDLYVEGLPEGIPFRRPSTYGIPRLERILLAKERIRFVIKKHELLNSTREDLQLDKPASGVKEEWYARITKLRKMVDQLFCKKFAEALGSTEAKAVPYQKFEAHPNDLYVEGLPENIPFRSPSWYGIPRLEKIIQVGNRIKFVIKRPELLTHSTTEVTQPRTNTPVKEDWNVRITKLRKQVEEIFNLKFAQALGLTEAVKVPYPVFESNPEFLYVEGLPEGIPFRSPTWFGIPRLERIVRGSNKIKFVVKKPELVISYLPPGMASKINTKALQSPKRPRSPGSNSKVPEIEVTVEGPNNNNPQTSAVRTPTQTNGSNVPFKPRGREFSFEAWNAKITDLKQKVENLFNEKCGEALGLKQAVKVPFALFESFPEDFYVEGLPEGVPFRRPSTFGIPRLEKILRNKAKIKFIIKKPEMFETAIKESTSSKSPPRKINSSPNVNTTASGVEDLNIIQVTIPDDDNERLSKVEKARQLREQVNDLFSRKFGEAIGMGFPVKVPYRKITINPGCVVVDGMPPGVSFKAPSYLEISSMRRILDSAEFIKFTVIRPFPGLVINNQLVDQSESEGPVIQESAEPSQLEVPATEEIKETDGSSQIKQEPDPTW

SEQ ID NO: 20053 - protein, 957 aa, Homo sapiens
MAQVAMSTLPVEDEESSESRMVVTFLMSALESMCKELAKSKAEVACIAVYETDVFVVGTERGRAFVNTRKDFQKDFVKYCVEEEEKAAEMHKMKSTTQANRMSVDAVEIETLRKTVEDYFCFCYGKALGKSTVVPVPYEKMLRDQSAVVVQGLPEGVAFKHPENYDLATLKWILENKAGISFIIKRPFLEPKKHVGGRVMVTDADRSILSPGGSCGPIKVKTEPTEDSGISLEMAAVTVKEESEDPDYYQYNIQGSHHSSEGNEGTEMEVPAEDDDYSPPSKRPKANELPQPPVPEPANAGKRKVREFNFEKWNARITDLRKQVEELFERKYAQAIKAKGPVTIPYPLFQSHVEDLYVEGLPEGIPFRRPSTYGIPRLERILLAKERIRFVIKKHELLNSTREDLQLDKPASGVKEEWYARITKLRKMVDQLFCKKFAEALGSTEAKAVPYQKFEAHPNDLYVEGLPENIPFRSPSWYGIPRLEKIIQVGNRIKFVIKRPELLTHSTTEVTQPRTNTPVKEDWNVRITKLRKQVEEIFNLKFAQALGLTEAVKVPYPVFESNPEFLYVEGLPEGIPFRSPTWFGIPRLERIVRGSNKIKFVVKKPELVISYLPPGMASKINTKALQSPKRPRSPGSNSKVPEIEVTVEGPNNNNPQTSAVRTPTQTNGSNVPFKPRGREFSFEAWNAKITDLKQKVENLFNEKCGEALGLKQAVKVPFALFESFPEDFYVEGLPEGVPFRRPSTFGIPRLEKILRNKAKIKFIIKKPEMFETAIKESTSSKSPPRKINSSPNVNTTASGVEDLNIIQVTIPDDDNERLSKVEKARQLREQVNDLFSRKFGEAIGMGFPVKVPYRKITINPGCVVVDGMPPGVSFKAPSYLEISSMRRILDSAEFIKFTVIRPFPGLVINNQLVDQSESEGPVIQESAEPSQLEVPATEEIKETDGSSQIKQEPDPTW

SEQ ID NO: 20054 - protein, 978 aa, Homo sapiens
MAQVAMSTLPVEDEESSESRMVVTFLMSALESMCKELAKSKAEVACIAVYETDVFVVGTERGRAFVNTRKDFQKDFVKYCVEEEEKAAEMHKMKSTTQANRMSVDAVEIETLRKTVEDYFCFCYGKALGKSTVVPVPYEKMLRDQSAVVVQGLPEGVAFKHPENYDLATLKWILENKAGISFIIKRPFLEPKKHVGGRVMVTDADRSILSPGGSCGPIKVKTEPTEDSGISLEMAAVTVKEESEDPDYYQYNIQGSHHSSEGNEGTEMEVPAEDSTQHVPSETSEDPEVEVTIEDDDYSPPSKRPKANELPQPPVPEPANAGKRKVREFNFEKWNARITDLRKQVEELFERKYAQAIKAKGPVTIPYPLFQSHVEDLYVEGLPEGIPFRRPSTYGIPRLERILLAKERIRFVIKKHELLNSTREDLQLDKPASGVKEEWYARITKLRKMVDQLFCKKFAEALGSTEAKAVPYQKFEAHPNDLYVEGLPENIPFRSPSWYGIPRLEKIIQVGNRIKFVIKRPELLTHSTTEVTQPRTNTPVKEDWNVRITKLRKQVEEIFNLKFAQALGLTEAVKVPYPVFESNPEFLYVEGLPEGIPFRSPTWFGIPRLERIVRGSNKIKFVVKKPELVISYLPPGMASKINTKALQSPKRPRSPGSNSKVPEIEVTVEGPNNNNPQTSAVRTPTQTNGSNVPFKPRGREFSFEAWNAKITDLKQKVENLFNEKCGEALGLKQAVKVPFALFESFPEDFYVEGLPEGVPFRRPSTFGIPRLEKILRNKAKIKFIIKKPEMFETAIKESTSSKSPPRKINSSPNVNTTASGVEDLNIIQVTIPDDDNERLSKVEKARQLREQVNDLFSRKFGEAIGMGFPVKVPYRKITINPGCVVVDGMPPGVSFKAPSYLEISSMRRILDSAEFIKFTVIRPFPGLVINNQLVDQSESEGPVIQESAEPSQLEVPATEEIKETDGSSQIKQEPDPTW

SEQ ID NO: 20055 - protein, 977 aa, Homo sapiens
MAQVAMSTLPVEDEESSESRMVVTFLMSALESMCKELAKSKAEVACIAVYETDVFVVGTERGRAFVNTRKDFQKDFVKYCVEEEEKAAEMHKMKSTTQANRMSVDAVEIETLRKTVEDYFCFCYGKALGKSTVVPVPYEKMLRDQSAVVVQGLPEGVAFKHPENYDLATLKWILENKAGISFIIKRPFLEPKKHVGGRVMVTDADRSILSPGGSCGPIKVKTEPTEDSGISLEMAAVTVKEESEDPDYYQYNIQAGPSETDDVDEKQPLSKPLQGSHHSSEGNEGTEMEVPAEDDDYSPPSKRPKANELPQPPVPEPANAGKRKVREFNFEKWNARITDLRKQVEELFERKYAQAIKAKGPVTIPYPLFQSHVEDLYVEGLPEGIPFRRPSTYGIPRLERILLAKERIRFVIKKHELLNSTREDLQLDKPASGVKEEWYARITKLRKMVDQLFCKKFAEALGSTEAKAVPYQKFEAHPNDLYVEGLPENIPFRSPSWYGIPRLEKIIQVGNRIKFVIKRPELLTHSTTEVTQPRTNTPVKEDWNVRITKLRKQVEEIFNLKFAQALGLTEAVKVPYPVFESNPEFLYVEGLPEGIPFRSPTWFGIPRLERIVRGSNKIKFVVKKPELVISYLPPGMASKINTKALQSPKRPRSPGSNSKVPEIEVTVEGPNNNNPQTSAVRTPTQTNGSNVPFKPRGREFSFEAWNAKITDLKQKVENLFNEKCGEALGLKQAVKVPFALFESFPEDFYVEGLPEGVPFRRPSTFGIPRLEKILRNKAKIKFIIKKPEMFETAIKESTSSKSPPRKINSSPNVNTTASGVEDLNIIQVTIPDDDNERLSKVEKARQLREQVNDLFSRKFGEAIGMGFPVKVPYRKITINPGCVVVDGMPPGVSFKAPSYLEISSMRRILDSAEFIKFTVIRPFPGLVINNQLVDQSESEGPVIQESAEPSQLEVPATEEIKETDGSSQIKQEPDPTW

SEQ ID NO: 20056 - protein, 274 aa, Homo sapiens
MAQVAMSTLPVEDEESSESRMVVTFLMSALESMCKELAKSKAEVACIAVYETDVFVVGTERGRAFVNTRKDFQKDFVKYCVEEEEKAAEMHKMKSTTQANRMSVDAVEIETLRKTVEDYFCFCYGKALGKSTVVPVPYEKMLRDQSAVVVQGLPEGVAFKHPENYDLATLKWILENKAGISFIIKRPFLEPKKHVGGRVMVTDADRSILSPGGSCGPIKVKTEPTEDSGISLEMAAVTVKEESEDPDYYQYNIQGSHHSSEGNEGTEMEVPAEG

SEQ ID NO: 20057 - protein, 226 aa, Homo sapiens
MGPLPRTVELFYDVLSPYSWLGFEILCRYQNIWNINLQLRPSLITGIMKDSGNKPPGLLPRKGLYMANDLKLLRHHLQIPIHFPKDFLSVMLEKGSLSAMRFLTAVNLEHPEMLEKASRELWMRVWSRNEDITEPQSILAAAEKAGMSAEQAQGLLEKIATPKVKNQLKETTEAACRYGAFGLPITVAHVDGQTHMLFGSDRMELLAHLLGEKWMGPIPPAVNARL

SEQ ID NO: 20058 - protein, 282 aa, Homo sapiens
MGPLPRTVELFYDVLSPYSWLGFEILCRYQNIWNINLQLRPSLITGIMKDSGNKPPGLLPRKGLYMANDLKLLRHHLQIPIHFPKDFLSVMLEKGSLSAMRFLTAVNLEHPEMLEKASRELWMRVWSRVSVGLWESSGRTLDDFLTFPRHVFRVMILPPPGGSTVLPVTPLSPHRLPAVFSSSQNEDITEPQSILAAAEKAGMSAEQAQGLLEKIATPKVKNQLKETTEAACRYGAFGLPITVAHVDGQTHMLFGSDRMELLAHLLGEKWMGPIPPAVNARL

SEQ ID NO: 20059 - protein, 214 aa, Homo sapiens
MGPLPRTVELFYDVLSPYSWLGFEILCRYQNIWNINLQLRPSLITGIMKDSGNKPPGLLPRKGLYMANDLKLLRHHLQIPIHFPKDFLSVMLEKGSLSAMRFLTAVNLEHPEMLEKASRELWMRVWSRAAEKAGMSAEQAQGLLEKIATPKVKNQLKETTEAACRYGAFGLPITVAHVDGQTHMLFGSDRMELLAHLLGEKWMGPIPPAVNARL

SEQ ID NO: 20060 - protein, 183 aa, Homo sapiens
MGPLPRTVELFYDVLSPYSWLGFEILCRYQNIWNINLQLRPSLITGIMKDSGSLSAMRFLTAVNLEHPEMLEKASRELWMRVWSRNEDITEPQSILAAAEKAGMSAEQAQGLLEKIATPKVKNQLKETTEAACRYGAFGLPITVAHVDGQTHMLFGSDRMELLAHLLGEKWMGPIPPAVNARL

SEQ ID NO: 20061 - protein, 458 aa, Homo sapiens
MSSSRPEPGPWAPLSPRLQPLSQSSSSLLGEGREQRPELRKTASSTVWQAQLGEASTRPQAPEEEGNPPESMKPARASGPKARPSAGGHWWSSTVGNVSTMGGSDLCRLRAPSAAAMQRSHSDLVRSTQMRGHSGARKASLSCSALGSSPVHRAQLQPGGTSGQGGQAPAGLERDLAPEDETSNSAWMLGASQLSVPPLDLGDTTAHSSSAQAEPKAAEQLATTTCHALPPAALLCGMREVRAGGCCHALPATGILAFPKLVASVSESGLQAQHGVKIHCRLSGGLPGHSHCCAHLWGPAGLVPEPGSRTKDVWTMTSANDLAPAEASPLSAQDAGVQAAPVAACKAVATSPSLEAPAALHVFPEVTLGSSLEEVPSPVRDVRWDAEGMTWEVYGAAVDLEVLGVAIQKHLEMQFEQLQRAPASEDSLSVEGRRGPLRAVMQSLRRPSCCGCSGAAPE

SEQ ID NO: 20062 - protein, 776 aa, Homo sapiens
MGTVPDPLRSAKTSLIAASGKEDDLGEPQAASPRHRPALLCKNANGFSGAPAEPDLSPRAAAEALMQVCEHETTQPDMSSPGVFNEVQKAPATFNSPGNPQLPGSSQPAASAPSSAAGRDLIHTPLTMPANQHTCQSIPGDQPNAITSSMPEDSLMRSQRTSNREQPEKPSCPVGGVLSSSKDQVSCEFPSPETIQGTVQTPVTAARVVSHSSSPVGGPEGERQGAICDSEMRSCKPLTRESGCSENKQPSVTASGPQGTTSVTPQPTPLTSEPSACPPGPEKVPLPAQRQMSRFKEASTMTNQAESEIKEVPSRAWQDAEVQAVASVESRSVSTSPSILTAFLKESRAPEHFEQEQLRVICHSSGSHTLELSDSTLAPQESSQCPGIMPQVHIQAAAAESTAFQRENKLASLPGGVLKTSSINLVSSNAQHTCKEDGRLAGMTPVREESTAKKLAGTNSSSLKATAIDQISISACSQAETSYGLGKFETRPSEFAEKTTNGHKTDPDCKLSDSCGSISKADHSGSLDPTNKGDAREKKPASPQVVKEKESTGTDTSDAKTLLLNPKSQESGGTESAANPTPSPIRKNQESTLEENRQTKTATSLSLPSDPMGDSSPGSGKKTPSRSVKASPRRPSRVSEFLKEQKLNVTAAAAQVGLTPGDKKKQLGADSKLQLKQSKRVRDVVWDEQGMTWEVYGASLDAESLGIAIQNHLQRQIREHEKLIKTQNSQTRRSISSDTSSNKKLRGRQHSVFQSMLQNFRRPNCCVRPAPSSVLD

SEQ ID NO: 20063 - protein, 1128 aa, Homo sapiens
MIAVSFKCRCQILRRLTKDESPYTKSASQTKPPDGALAVRRQSIPEEFKGSTVVELMKKEGTTLGLTVSGGIDKDGKPRVSNLRQGGIAARSDQLDVGDYIKAVNGINLAKFRHDEIISLLKNVGERVVLEVEYELPPVSVQGSSVIFRTVEVTLHKEGNTFGFVIRGGAHDDRNKSRPVVITCVRPGGPADREGTIKPGDRLLSVDGIRLLGTTHAEAMSILKQCGQEAALLIEYDVSVMDSVATASGPLLVEVAKTPGASLGVALTTSMCCNKQVIVIDKIKSASIADRCGALHVGDHILSIDGTSMEYCTLAEATQFLANTTDQVKLEILPHHQTRLALKGPDHVKIQRSDRQLTWDSWASNHSSLHTNHHYNTYHPDHCRVPALTFPKAPPPNSPPALVSSSFSPTSMSAYSLSSLNMGTLPRSLYSTSPRGTMMRRRLKKKDFKSSLSLASSTVGLAGQVVHTETTEVVLTADPVTGFGIQLQGSVFATETLSSPPLISYIEADSPAERCGVLQIGDRVMAINGIPTEDSTFEEASQLLRDSSITSKVTLEIEFDVAESVIPSSGTFHVKLPKKHNVELGITISSPSSRKPGDPLVISDIKKGSVAHRTGTLELGDKLLAIDNIRLDNCSMEDAVQILQQCEDLVKLKIRKDEDNSDEQESSGAIIYTVELKRYGGPLGITISGTEEPFDPIIISSLTKGGLAERTGAIHIGDRILAINSSSLKGKPLSEAIHLLQMAGETVTLKIKKQTDAQSASSPKKFPISSHLSDLGDVEEDSSPAQKPGKLSDMYPSTVPSVDSAVDSWDGSAIDTSYGTQGTSFQASGYNFNTYDWRSPKQRGSLSPVTKPRSQTYPDVGLSYEDWDRSTASGFAGAADSAETEQEENFWSQALEDLETCGQSGILRELEEKADRRVSLRNMTLLATIMSGSTMSLNHEAPTPRSQLGRQASFQERSSSRPHYSQTTRSNTLPSDVGRKSVTLRKMKQEIKEIMSPTPVELHKVTLYKDSDMEDFGFSVADGLLEKGVYVKNIRPAGPGDLGGLKPYDRLLQVNHVRTRDFDCCLVVPLIAESGNKLDLVISRNPLASQKSIDQQSLPGDWSEQNSAFFQQPSHGGNLETREPTNTL

SEQ ID NO: 20064 - protein, 1113 aa, Homo sapiens
MIAVSFKCRCQILRRLTKDESPYTKSASQTKPPDGALAVRRQSIPEEFKGSTVVELMKKEGTTLGLTVSGGIDKDGKPRVSNLRQGGIAARSDQLDVGDYIKAVNGINLAKFRHDEIISLLKNVGERVVLEVEYELPPVSVQGSSVIFRTVEVTLHKEGNTFGFVIRGGAHDDRNKSRPVVITCVRPGGPADREGTIKPGDRLLSVDGIRLLGTTHAEAMSILKQCGQEAALLIEYDVSVMDSVATASGPLLVEVAKTPGASLGVALTTSMCCNKQVIVIDKIKSASIADRCGALHVGDHILSIDGTSMEYCTLAEATQFLANTTDQVKLEILPHHQTRLALKGPDHVKIQRSDRQLTWDSWASNHSSLHTNHHYNTYHPDHCRVPALTFPKAPPPNSPPALVSSSFSPTSMSAYSLSSLNMGTLPRSLYSTSPRGTMMRRRLKKKDFKSSLSLASSTVGLAGQVVHTETTEVVLTADPVTGFGIQLQGSVFATETLSSPPLISYIEADSPAERCGVLQIGDRVMAINGIPTEDSTFEEASQLLRDSSITSKVTLEIEFDVAESVIPSSGTFHVKLPKKHNVELGITISSPSSRKPGDPLVISDIKKGSVAHRTGTLELGDKLLAIDNIRLDNCSMEDAVQILQQCEDLVKLKIRKDEDNSDEQESSGAIIYTVELKRYGGPLGITISGTEEPFDPIIISSLTKGGLAERTGAIHIGDRILAINSSSLKGKPLSEAIHLLQMAGETVTLKIKKQTDAQSASSPKKFPISSHLSDLGDVEEDSSPAQKPGKLSDMYPSTVPSVDSAVDSWDGSAIDTSYGTQGTSFQASGYNFNTYDWRSPKQRGSLSPVTKPRSQTYPDVGLSYEDWDRSTASGFAGAADSAETEQEENFWSQALEDLETCGQSGILRELEATIMSGSTMSLNHEAPTPRSQLGRQASFQERSSSRPHYSQTTRSNTLPSDVGRKSVTLRKMKQEIKEIMSPTPVELHKVTLYKDSDMEDFGFSVADGLLEKGVYVKNIRPAGPGDLGGLKPYDRLLQVNHVRTRDFDCCLVVPLIAESGNKLDLVISRNPLASQKSIDQQSLPGDWSEQNSAFFQQPSHGGNLETREPTNTL

SEQ ID NO: 20065 - protein, 1076 aa, Homo sapiens
MIAVSFKCRCQILRRLTKDESPYTKSASQTKPPDGALAVRRQSIPEEFKGSTVVELMKKEGTTLGLTVSGGIDKDGKPRVSNLRQGGIAARSDQLDVGDYIKAVNGINLAKFRHDEIISLLKNVGERVVLEVEYELPPVSVQGSSVIFRTVEVTLHKEGNTFGFVIRGGAHDDRNKSRPVVITCVRPGGPADREGTIKPGDRLLSVDGIRLLGTTHAEAMSILKQCGQEAALLIEYDVSVMDSVATASGPLLVEVAKTPGASLGVALTTSMCCNKQVIVIDKIKSASIADRCGALHVGDHILSIDGTSMEYCTLAEATQFLANTTDQVKLEILPHHQTRLALKGPDHAALVSSSFSPTSMSAYSLSSLNMGTLPRSLYSTSPRGTMMRRRLKKKDFKSSLSLASSTVGLAGQVVHTETTEVVLTADPVTGFGIQLQGSVFATETLSSPPLISYIEADSPAERCGVLQIGDRVMAINGIPTEDSTFEEASQLLRDSSITSKVTLEIEFDVAESVIPSSGTFHVKLPKKHNVELGITISSPSSRKPGDPLVISDIKKGSVAHRTGTLELGDKLLAIDNIRLDNCSMEDAVQILQQCEDLVKLKIRKDEDNSDEQESSGAIIYTVELKRYGGPLGITISGTEEPFDPIIISSLTKGGLAERTGAIHIGDRILAINSSSLKGKPLSEAIHLLQMAGETVTLKIKKQTDAQSASSPKKFPISSHLSDLGDVEEDSSPAQKPGKLSDMYPSTVPSVDSAVDSWDGSAIDTSYGTQGTSFQASGYNFNTYDWRSPKQRGSLSPVTKPRSQTYPDVGLSYEDWDRSTASGFAGAADSAETEQEENFWSQALEDLETCGQSGILRELEEKADRRVSLRNMTLLATIMSGSTMSLNHEAPTPRSQLGRQASFQERSSSRPHYSQTTRSNTLPSDVGRKSVTLRKMKQEIKEIMSPTPVELHKVTLYKDSDMEDFGFSVADGLLEKGVYVKNIRPAGPGDLGGLKPYDRLLQVNHVRTRDFDCCLVVPLIAESGNKLDLVISRNPLASQKSIDQQSLPGDWSEQNSAFFQQPSHGGNLETREPTNTL

SEQ ID NO: 20066 - protein, 218 aa, Homo sapiens
MPMILGYWDIRGLAHAIRLLLEYTDSSYEEKKYTMGDAPDYDRSQWLNEKFKLGLDFPNLPYLIDGAHKITQSNAILCYIARKHNLCGETEEEKIRVDILENQTMDNHMQLGMICYNPEFEKLKPKYLEELPEKLKLYSEFLGKRPWFAGNKITFVDFLVYDVLDLHRIFEPKCLDAFPNLKDFISRFEGLEKISAYMKSSRFLPRPVFSKMAVWGNK

SEQ ID NO: 20067 - protein, 181 aa, Homo sapiens
MPMILGYWDIRGLAHAIRLLLEYTDSSYEEKKYTMGDAPDYDRSQWLNEKFKLGLDFPNLPYLIDGAHKITQSNAILCYIARKHNLCGETEEEKIRVDILENQTMDNHMQLGMICYNPEFEKLKPKYLEELPEKLKLYSEFLGKRPWFAGNKGLEKISAYMKSSRFLPRPVFSKMAVWGNK

SEQ ID NO: 20068 - protein, 1043 aa, Homo sapiens
MLCGLSRETPGEADDGPYSKGGKDAGGADVSLACRRQSIPEEFRGITVVELIKKEGSTLGLTISGGTDKDGKPRVSNLRPGGLAARSDLLNIGDYIRSVNGIHLTRLRHDEIITLLKNVGERVVLEVEYELPPPAPENNPRIISKTVDVSLYKEGNSFGFVLRGGAHEDGHKSRPLVLTYVRPGGPADREGSLKVGDRLLSVDGIPLHGASHATALATLRQCSHEALFQVEYDVATPDTVANASGPLMVEIVKTPGSALGISLTTTSLRNKSVITIDRIKPASVVDRSGALHPGDHILSIDGTSMEHCSLLEATKLLASISEKVRLEILPVPQSQRPLRPSEAVKVQRSEQLHRWDPCVPSCHSPRPGHCRMPTWATPAGQDQSRSLSSTPFSSPTLNHAFSCNNPSTLPRGSQPMSPRTTMGRRRQRRREHKSSLSLASSTVGPGGQIVHTETTEVVLCGDPLSGFGLQLQGGIFATETLSSPPLVCFIEPDSPAERCGLLQVGDRVLSINGIATEDGTMEEANQLLRDAALAHKVVLEVEFDVAESVIPSSGTFHVKLPKKRSVELGITISSASRKRGEPLIISDIKKGSVAHRTGTLEPGDKLLAIDNIRLDNCPMEDAVQILRQCEDLVKLKIRKDEDNSDELETTGAVSYTVELKRYGGPLGITISGTEEPFDPIVISGLTKRGLAERTGAIHVGDRILAINNVSLKGRPLSEAIHLLQVAGETVTLKIKKQLDRPLLPRKSGSLSETSDADEDPADALKGGLPAARFSPAVPSVDSAVESWDSSATEGGFGGPGSYTPQAAARGTTPQERRPGWLRGSPPPTEPRRTSYTPTPADESFPEEEEEDDWEPPTSPAPGPAREEGFWRMFGEALEDLESCGQSELLRELEASIMTGTVQRVALEGRPGHRPWQRGREVRASPAEMEELLLPTPLEMHKVTLHKDPMRHDFGFSVSDGLLEKGVYVHTVRPDGPAHRGGLQPFDRVLQVNHVRTRDFDCCLAVPLLAEAGDVLELIISRKPHTAHSSRAPRSPGPSSPRML

SEQ ID NO: 20069 - protein, 873 aa, Homo sapiens
MLCGLSRETPGEADDGPYSKGGKDAGGADVSLACRRQSIPEEFRGITVVELIKKEGSTLGLTISGGTDKDGKPRVSNLRPGGLAARSDLLNIGDYIRSVNGIHLTRLRHDEIITLLKNVGERVVLEVEYELPPPAPENNPRIISKTVDVSLYKEGNSFGFVLRGGAHEDGHKSRPLVLTYVRPGGPADREGSLKVGDRLLSVDGIPLHGASHATALATLRQCSHEALFQVEYDVATPDTVANASGPLMVEIVKTPGSALGISLTTTSLRNKSVITIDRIKPASVVDRSGALHPGDHILSIDGTSMEHCSLLEATKLLASISEKVRLEILPVPQSQRPLRPSEAVKVQRSEQLHRWDPCVPSCHSPRPGHCRMPTWATPAGQDQSRSLSSTPFSSPTLNHAFSCNNPSTLPRGSQPMSPRTTMGRRRQRRREHKSSLSLASSTVGPGGQIVHTETTEVVLCGDPLSGFGLQLQGGIFATETLSSPPLVCFIEPDSPAERCGLLQVGDRVLSINGIATEDGTMEEANQLLRDAALAHKVVLEVEFDVAESVIPSSGTFHVKLPKKRSVELGITISSASRKRGEPLIISDIKKGSVAHRTGTLEPGDKLLAIDNIRLDNCPMEDAVQILRQCEDLVKLKIRKDEDNSDELETTGAVSYTVELKRYGGPLGITISGTEEPFDPIVISGLTKRGLAERTGAIHVGDRILAINNVSLKGRPLSEAIHLLQVAGETVTLKIKKQLDRPLLPRKSGSLSETSDADEDPADALKGGLPAARFSPAVPSVDSAVESWDSSATEGGFGGPGSYTPQAAARGTTPQERRPGWLRGSPPPTEPRRTSYTPTPADESFPEEEEEDDWEPPTRHPVSPLSTPSHLPLF

SEQ ID NO: 20070 - protein, 174 aa, Homo sapiens
QEWKRKWNSAFPSFSPADDGPYSKGGKDAGGADVSLACRRQSIPEEFRGITVVELIKKEGSTLGLTISGGTDKDGKPRVSNLRPGGLAARSDLLNIGDYIRSVNGIHLTRLRHDEIITLLKNVGERVVLEVEYELPPPGGCPWTGNFLHCLGCGWTRLPPHQGLGGRDHARWSG

SEQ ID NO: 20071 - protein, 218 aa, Homo sapiens
MPMTLGYWNIRGLAHSIRLLLEYTDSSYEEKKYTMGDAPDYDRSQWLNEKFKLGLDFPNLPYLIDGTHKITQSNAILRYIARKHNLCGESEKEQIREDILENQFMDSRMQLAKLCYDPDFEKLKPEYLQALPEMLKLYSQFLGKQPWFLGDKITFVDFIAYDVLERNQVFEPSCLDAFPNLKDFISRFEGLEKISAYMKSSRFLPRPVFTKMAVWGNK

SEQ ID NO: 20072 - protein, 191 aa, Homo sapiens
MPMTLGYWNIRGLAHSIRLLLEYTDSSYEEKKYTMGDAPDYDRSQWLNEKFKLGLDFPNLPYLIDGTHKITQSNAILRYIARKHNLCGESEKEQIREDILENQFMDSRMQLAKLCYDPDFEKLKPEYLQALPEMLKLYSQFLGKQPWFLGDKITFVDFIAYDVLERNQVFEPSCLDAFPNLKDFISRFEHS

SEQ ID NO: 20073 - protein, 149 aa, Homo sapiens
MKEALHQIVVRCSELVSSTSLPRLSVSRLQGPPDSQPLGTLGQGGWKLLGIVGSLAPETLGGLGTEFGPCTHPLPFDMVRERERDDELRQGWLLQCPQCARTLLCHCGPFLTPPSQTSSSGFQLCSLKPSGSLVTATEPLSNFAFSYFP

SEQ ID NO: 20074 - protein, 563 aa, Homo sapiens
MDFGSLETVVANSAFIAARGSFDGSSSQPSRDKKYLAKLKLPPLSKCESLRDSLSLEFESVCLEQPIGKKLFQQFLQSAEKHLPALELWKDIEDYDTADNDLQPQKAQTILAQYLDPQAKLFCSFLDEGIVAKFKEGPVEIQDGLFQPLLQATLAHLGQAPFQEYLGSLYFLRFLQWKWLEAQPMGEDWFLDFRVLGKGGFGEVSACQMKATGKLYACKKLNKKRLKKRKGYQGAMVEKKILMKVHSRFIVSLAYAFETKADLCLVMTIMNGGDIRYHIYNVNEENPGFPEPRALFYTAQIICGLEHLHQRRIVYRDLKPENVLLDNDGNVRISDLGLAVELLDGQSKTKGYAGTPGFMAPELLQGEEYDFSVDYFALGVTLYEMIAARGPFRARGEKVENKELKHRIISEPVKYPDKFSQASKDFCEALLEKDPEKRLGFRDETCDKLRAHPLFKDLNWRQLEAGMLMPPFIPDSKTVYAKDIQDVGAFSTVKGVAFDKTDTEFFQEFATGNCPIPWQEEMIETGIFGELNVWRSDGQMPDDMKGISGGSSSSSKSGMCLVS

SEQ ID NO: 20075 - protein, 225 aa, Homo sapiens
MSCESSMVLGYWDIRGLAHAIRLLLEFTDTSYEEKRYTCGEAPDYDRSQWLDVKFKLDLDFPNLPYLLDGKNKITQSNAILRYIARKHNMCGETEEEKIRVDIIENQVMDFRTQLIRLCYSSDHEKLKPQYLEELPGQLKQFSMFLGKFSWFAGEKLTFVDFLTYDILDQNRIFDPKCLDEFPNLKAFMCRFEALEKIAAYLQSDQFCKMPINNKMAQWGNKPVC

SEQ ID NO: 20076 - protein, 218 aa, Homo sapiens
MSMTLGYWDIRGLAHAIRLLLEYTDSSYEEKKYTMGDAPDYDRSQWLNEKFKLGLDFPNLPYLIDGAHKITQSNAILCYIARKHNLCGETEEEKIRVDILENQAMDVSNQLARVCYSPDFEKLKPEYLEELPTMMQHFSQFLGKRPWFVGDKITFVDFLAYDVLDLHRIFEPNCLDAFPNLKDFISRFEGLEKISAYMKSSRFLPKPLYTRVAVWGNK

SEQ ID NO: 20077 - protein, 195 aa, Homo sapiens
MSMTLGYWDIRGLAHAIRLLLEYTDSSYEEKKYTMGDAPDYDRSQWLNEKFKLGLDFPNLPYLIDGAHKITQSNAILCYIARKHNLCGETEEEKIRVDILENQAMDVSNQLARVCYSPDFEKLKPEYLEELPTMMQHFSQFLGKRPWFVGDKITFVDFLAYDVLDLHRIFEPNCLDAFPNLKDFISRFEVSCGIM

SEQ ID NO: 20078 - protein, 157 aa, Homo sapiens
MSMTLGYWDIRGLAHAIRLLLEYTDSSYEEKKYTMGDAPDYDRSQWLNEKFKLGLDFPNEKLKPEYLEELPTMMQHFSQFLGKRPWFVGDKITFVDFLAYDVLDLHRIFEPNCLDAFPNLKDFISRFEGLEKISAYMKSSRFLPKPLYTRVAVWGNK

SEQ ID NO: 20079 - protein, 578 aa, Homo sapiens [sequence omitted]

SEQ ID NO: 20080 - protein, 546 aa, Homo sapiens
MELENIVANSLLLKARQEKDYSSLCDKQPIGRRLFRQFCDTKPTLKRHIEFLDAVAEYEVADDEDRSDCGLSILDRFFNDKLAAPLPEIPPDVVTECRLGLKEENPSKKAFEECTRVAHNYLRGEPFEEYQESSYFSQFLQWKWLERQPVTKNTFRHYRVLGKGGFGEVCACQVRATGKMYACKKLQKKRIKKRKGEAMALNEKRILEKVQSRFVVSLAYAYETKDALCLVLTIMNGGDLKFHIYNLGNPGFDEQRAVFYAAELCCGLEDLQRERIVYRDLKPENILLDDRGHIRISDLGLATEIPEGQRVRGRVGTVGYMAPEVVNNEKYTFSPDWWGLGCLIYEMIQGHSPFKKYKEKVKWEEVDQRIKNDTEEYSEKFSEDAKSICRMLLTKNPSKRLGCRGEGAAGVKQHPVFKDINFRRLEANMLEPPFCPDPHAVYCKDVLDIEQFSVVKGIYLDTADEDFYARFATGCVSIPWQNEMIESGCFKDINKSESEEALPLDLDKNIHTPVSRPNRGFFYRLFRRGGCLTMVPSEKEVEPKQC

SEQ ID NO: 20081 - protein, 500 aa, Homo sapiens
MELENIVANSLLLKARQEKDYSSLCDKQPIGRRLFRQFCDTKPTLKRHIEFLDAVAEYEVADDEDRSDCGLSILDRFFNDKLAAPLPEIPPDVVTECRLGLKEENPSKKAFEECTRVAHNYLRGEPFEEYQESSYFSQFLQWKWLERQPVTKNTFRHYRVLGKGGFGEVCACQVRATGKMYACKKLQKKRIKKRKGEAMALNEKRILEKVQSRFVVSLAYAYETKDALCLVLTIMNGGDLKFHIYNLGNPGFDEQRAVFYAAELCCGLEDLQRERIVYRDLKPENILLDDRGHIRISDLGLATEIPEGQRVRGRVGTVGYMAPEVVNNEKYTFSPDWWGLGCLIYEMIQGHSPFKKYKEKVKWEEVDQRIKNDTEEYSEKFSEDAKSICRMLLTKNPSKRLGCRGEGAAGVKQHPVFKDINFRRLEANMLEPPFCPDPHAVYCKDVLDIEQFSVVKGIYLDTADEDFYARFATGCVSIPWQNEGCLTMVPSEKEVEPKQC

SEQ ID NO: 20082 - protein, 532 aa, Homo sapiens
MELENIVANSLLLKARQGGYGKKSGRSKKWKEILTLPPVSQCSELRHSIEKDYSSLCDKQPIGRRLFRQFCDTKPTLKRHIEFLDAVAEYEVADDEDRSDCGLSILDRFFNDKLAAPLPEIPPDVVTECRLGLKEENPSKKAFEECTRVAHNYLRGEPFEEYQESSYFSQFLQWKWLERQPVTKNTFRHYRVLGKGGFGEVCACQVRATGKMYACKKLQKKRIKKRKGEAMALNEKRILEKVQSRFVVSLAYAYETKDALCLVLTIMNGGDLKFHIYNLGNPGFDEQRAVFYAAELCCGLEDLQRERIVYRDLKPENILLDDRGHIRISDLGLATEIPEGQRVRGRVGTVGYMAPEVVNNEKYTFSPDWWGLGCLIYEMIQGHSPFKKYKEKVKWEEVDQRIKNDTEEYSEKFSEDAKSICRMLLTKNPSKRLGCRGEGAAGVKQHPVFKDINFRRLEANMLEPPFCPDPHAVYCKDVLDIEQFSVVKGIYLDTADEDFYARFATGCVSIPWQNEGCLTMVPSEKEVEPKQC

SEQ ID NO: 20083 - protein, 218 aa, Homo sapiens
MPMTLGYWDIRGLAHAIRLLLEYTDSSYVEKKYTLGDAPDYDRSQWLNEKFKLGLDFPNLPYLIDGAHKITQSNAILRYIARKHNLCGETEEEKIRVDILENQVMDNHMELVRLCYDPDFEKLKPKYLEELPEKLKLYSEFLGKRPWFAGDKITFVDFLAYDVLDMKRIFEPKCLDAFLNLKDFISRFEGLKKISAYMKSSQFLRGLLFGKSATWNSK

SEQ ID NO: 20084 - protein, 590 aa, Homo sapiens
MELENIVANTVLLKAREGGGGKRKGKSKKWKEILKFPHISQCEDLRRTIDRDYCSLCDKQPIGRLLFRQFCETRPGLECYIQFLDSVAEYEVTPDEKLGEKGKEIMTKYLTPKSPVFIAQVGQDLVSQTEEKLLQKPCKELFSACAQSVHEYLRGEPFHEYLDSMFFDRFLQWKWLERQPVTKNTFRQYRVLGKGGFGEVCACQVRATGKMYACKRLEKKRIKKRKGESMALNEKQILEKVNSQFVVNLAYAYETKDALCLVLTIMNGGDLKFHIYNMGNPGFEEERALFYAAEILCGLEDLHRENTVYRDLKPENILLDDYGHIRISDLGLAVKIPEGDLIRGRVGTVGYMAPEVLNNQRYGLSPDYWGLGCLIYEMIEGQSPFRGRKEKVKREEVDRRVLETEEVYSHKFSEEAKSICKMLLTKDAKQRLGCQEEGAAEVKRHPFFRNMNFKRLEAGMLDPPFVPDPRAVYCKDVLDIEQFSTVKGVNLDHTDDDFYSKFSTGSVSIPWQNEMIETECFKELNVFGPNGTLPPDLNRNHPPEPPKKGLLQRLFKRQHQNNSKSSPSSKTSFNHHINSNHVSSNSTGSS

SEQ ID NO: 20085 - protein, 576 aa, Homo sapiens
MELENIVANTVLLKAREGGGGNRKGKSKKWRQMLQFPHISQCEELRLSLERDYHSLCERQPIGRLLFREFCATRPELSRCVAFLDGVAEYEVTPDDKRKACGRQLTQNFLSHTGPDLIPEVPRQLVTNCTQRLEQGPCKDLFQELTRLTHEYLSVAPFADYLDSIYFNRFLQWKWLERQPVTKNTFRQYRVLGKGGFGEVCACQVRATGKMYACKKLEKKRIKKRKGEAMALNEKQILEKVNSRFVVSLAYAYETKDALCLVLTLMNGGDLKFHIYHMGQAGFPEARAVFYAAEICCGLEDLHRERIVYRDLKPENILLDDHGHIRISDLGLAVHVPEGQTIKGRVGTVGYMAPEVVKNERYTFSPDWWALGCLLYEMIAGQSPFQQRKKKIKREEVERLVKEVPEEYSERFSPQARSLCSQLLCKDPAERLGCRGGSAREVKEHPLFKKLNFKRLGAGMLEPPFKPDPQAIYCKDVLDIEQFSTVKGVELEPTDQDFYQKFATGSVPIPWQNEMVETECFQELNVFGLDGSVPPDLDWKGQPPAPPKKGLLQRLFSRQDCCGNCSDSEEELPTRL

SEQ ID NO: 20086 - protein, 589 aa, Homo sapiens
MELENIVANTVLLKAREGGGGNRKGKSKKWRQMLQFPHISQCEELRLSLERDYHSLCERQPIGRLLFREFCATRPELSRCVAFLDGVAEYEVTPDDKRKACGRQLTQNFLSHTGPDLIPEVPRQLVTNCTQRLEQGPCKDLFQELTRLTHEYLSVAPFADYLDSIYFNRFLQWKWLERQPVTKNTFRQYRVLGKGGFGEVCACQVRATGKMYACKKLEKKRIKKRKGEAMALNEKQILEKVNSRFVVSLAYAYETKDALCLVLTLMNGGDLKFHIYHMGQAGFPEARAVFYAAEICCGLEDLHRERIVYRDLKPENILLDDHGHIRISDLGLAVHVPEGQTIKGRVGTVGYMAPEVVKNERYTFSPDWWALGCLLYEMIAGQSPFQQRKKKIKREEVERLVKEVPEEYSERFSPQARSLCSQLLCKDPAERLGCRGGSAREVKEHPLFKKLNFKRLGAGMLEPPFKPDPQAIYCKDVLDIEQFSTVKGVELEPTDQDFYQKFATGSVPIPWQNEMVETECFQELNVFGLDGSVPPDLDWKGQPPAPPKKGLLQRLFSRQRIAVETAATARKSSPPASSPQPEAPTSSWR

SEQ ID NO: 20087 - protein, 560 aa, Homo sapiens
MELENIVANTVLLKAREGGGGNRKGKSKKWRQMLQFPHISQCEELRLSLERDYHSLCERQPIGRLLFREFCATRPELSRCVAFLDGVAEYEVTPDDKRKACGRQLTQNFLSHTGPDLIPEVPRQLVTNCTQRLEQGPCKDLFQELTRLTHEYLSVAPFADYLDSIYFNRFLQWKWLERQPVTKNTFRQYRVLGKGGFGEVCACQVRATGKMYACKKLEKKRIKKRKGEAMALNEKQILEKVNSRFVVSLAYAYETKDALCLVLTLMNGGDLKFHIYHMGQAGFPEARAVFYAAEICCGLEDLHRERIVYRDLKPENILLDDHGHIRISDLGLAVHVPEGQTIKGRVGTVGYMAPEVVKNERYTFSPDWWALGCLLYEMIAGQSPFQQRKKKIKREEVERLVKEVPEEYSERFSPQARSLCSQLLCKDPAERLGCRGGSAREVKEHPLFKKLNFKRLGAGMLEPPFKPDPQAIYCKDVLDIEQFSTVKGVELEPTDQDFYQKFATGSVPIPWQNEMVETECFQELNVFGLDGSVPPDLDWKGQPPAPPKKGLLQRLFSRQR

SEQ ID NO: 20088 - protein, 241 aa, Homo sapiens
MSGESARSLGKGSAPPGPVPEGSIRIYSMRFCPFAERTRLVLKAKGIRHEVININLKNKPEWFFKKNPFGLVPVLENSQGQLIYESAITCEYLDEAYPGKKLLPDDPYEKACQKMILELFSKVPSLVGSFIRSQNKEDYAGLKEEFRKEFTKLEEVLTNKKTTFFGGNSISMIDYLIWPWFERLEAMKLNECVDHTPKLKLWMAAMKEDPTVSALLTSEKDWQGFLELYLQNSPEACDYGL

SEQ ID NO: 20089 - protein, 208 aa, Homo sapiens
MSGESARSLGKGSAPPGPVPEGSIRIYSMRFCPFAERTRLVLKAKGIRHEVININLKNKPEWFFKKNPFGLVPVLENSQGQLIYESAITCEYLDEAYPGKKLLPDDPYEKACQKMILELFSKVLTNKKTTFFGGNSISMIDYLIWPWFERLEAMKLNECVDHTPKLKLWMAAMKEDPTVSALLTSEKDWQGFLELYLQNSPEACDYGL

SEQ ID NO: 20090 - protein, 213 aa, Homo sapiens
MRFCPFAERTRLVLKAKGIRHEVININLKNKPEWFFKKNPFGLVPVLENSQGQLIYESAITCEYLDEAYPGKKLLPDDPYEKACQKMILELFSKVPSLVGSFIRSQNKEDYAGLKEEFRKEFTKLEEVLTNKKTTFFGGNSISMIDYLIWPWFERLEAMKLNECVDHTPKLKLWMAAMKEDPTVSALLTSEKDWQGFLELYLQNSPEACDYGL

SEQ ID NO: 20091 - protein, 243 aa, Homo sapiens
MSGDATRTLGKGSQPPGPVPEGLIRIYSMRFCPYSHRTRLVLKAKDIRHEVVNINLRNKPEWYYTKHPFGHIPVLETSQCQLIYESVIACEYLDDAYPGRKLFPYDPYERARQKMLLELFCKVPHLTKECLVALRCGRECTNLKAALRQEFSNLEEILEYQNTTFFGGTCISMIDYLLWPWFERLDVYGILDCVSHTPALRLWISAMKWDPTVCALLMDKSIFQGFLNLYFQNNPNAFDFGLC

SEQ ID NO: 20092 - protein, 209 aa, Homo sapiens
MSGDATRTLGKGSQPPGPVPEGLIRIYSMRFCPYSHRTRLVLKAKDIRHEVVNINLRNKPEWYYTKHPFGHIPVLETSQCQLIYESVIACEYLDDAYPGRKLFPYDPYERARQKMLLELFCKILEYQNTTFFGGTCISMIDYLLWPWFERLDVYGILDCVSHTPALRLWISAMKWDPTVCALLMDKSIFQGFLNLYFQNNPNAFDFGLC

SEQ ID NO: 20093 - protein, 215 aa, Homo sapiens
MRFCPYSHRTRLVLKAKDIRHEVVNINLRNKPEWYYTKHPFGHIPVLETSQCQLIYESVIACEYLDDAYPGRKLFPYDPYERARQKMLLELFCKVPHLTKECLVALRCGRECTNLKAALRQEFSNLEEILEYQNTTFFGGTCISMIDYLLWPWFERLDVYGILDCVSHTPALRLWISAMKWDPTVCALLMDKSIFQGFLNLYFQNNPNAFDFGLC

SEQ ID NO: 20094 - protein, 553 aa, Homo sapiens
MVDMGALDNLIANTAYLQARKPSDCDSKELQRRRRSLALPGLQGCAELRQKLSLNFHSLCEQQPIGRRLFRDFLATVPTFRKAATFLEDVQNWELAEEGPTKDSALQGLVATCASAPAPGNPQPFLSQAVATKCQAATTEEERVAAVTLAKAEAMAFLQEQPFKDFVTSAFYDKFLQWKLFEMQPVSDKYFTEFRVLGKGGFGEVCAVQVKNTGKMYACKKLDKKRLKKKGGEKMALLEKEILEKVSSPFIVSLAYAFESKTHLCLVMSLMNGGDLKFHIYNVGTRGLDMSRVIFYSAQIACGMLHLHELGIVYRDMKPENVLLDDLGNCRLSDLGLAVEMKGGKPITQRAGTNGYMAPEILMEKVSYSYPVDWFAMGCSIYEMVAGRTPFKDYKEKVSKEDLKQRTLQDEVKFQHDNFTEEAKDICRLFLAKKPEQRLGSREKSDDPRKHHFFKTINFPRLEAGLIEPPFVPDPSVVYAKDIAEIDDFSEVRGVEFDDKDKQFFKNFATGAVPIAWQEEIIETGLFEELNDPNRPTGCEEGNSSKSGVCLLL

SEQ ID NO: 20095 - protein, 135 aa, Homo sapiens
MGNYLLRKLSCLGENQKKPKKGNPDEERKRQEMTTFERKLQDQDKKSQEVSSTSNQENENGSGSEEVCYTVINHIPHQRSSLSSNDDGYENIDSLTRKVRQFRERSETEYALLRTSVSRPCSCTHEHDYEVVFPH

SEQ ID NO: 20096 - protein, 115 aa, Homo sapiens
MGNYLLRKLRQEMTTFERKLQDQDKKSQEVSSTSNQENENGSGSEEVCYTVINHIPHQRSSLSSNDDGYENIDSLTRKVRQFRERSETEYALLRTSVSRPCSCTHEHDYEVVFPH

SEQ ID NO: 20097 - protein, 854 aa, Homo sapiens
MALRLVADFDLGKDVLPWLRAQRAVSEASGAGSGGADVLENDYESLHVLNVERNGNIIYTYKDDKGNVVFGLYDCQTRQNELLYTFEKDLQVFSCSVNSERTLLAASLVQSTKEGKRNELQPGSKCLTLLVEIHPVNNVKVLKAVDSYIWVQFLYPHIESHPLPENHLLLISEEKYIEQFRIHVAQEDGNRVVIKNSGHLPRDRIAEDFVWAQWDMSEQRLYYIDLKKSRSILKCIQFYADESYNLMFEVPLDISLSNSGFKLVNFGCDYHQYRDKFSKHLTLCVFTNHTGSLCVCYSPKCASWGQITYSVFYIHKGHSKTFTTSLENVGSHMTKGITFLNLDYYVAVYLPGHFFHLLNVQHPDLICHNLFLTGNNEMIDMLPHCPLQSLSGSLVLDCCSGKLYRALLSQSSLLQLLQNTCLDCEKMAALHCALYCGQGAQFLEAQIIQWISENVSACHSFDLIQEFIIASSYWSVYSETSNMDKLLPHSSVLTWNTEIPGITLVTEDIALPLMKVLSFKGYWEKLNSNLEYVKYAKPHFHYNNSVVRREWHNLISEEKTGKRRSAAYVRNILDNAVKVISNLEARNLGPRLTPLLQEEDSHQRLLMGLMVSELKDHFLRHLQGVEKKKIEQMVLDYISKLLDLICHIVETNWRKHNLHSWVLHFNSRGSAAEFAVFHIMTRILEATNSLFLPLPPGFHTLHTILGVQCLPLHNLLHCIDSGVLLLTETAVIRLMKDLDNTEKNEKLKFSIIVRLPPLIGQKICRLWDHPMSSNIISRNHVTRLLQNYKKQPRNSMINKSSFSVEFLPLNYFIEILTDIESSNQALYPFEGHDNVDAEFVEEAALKHTAMLLGL

SEQ ID NO: 20098 - protein, 577 aa, Homo sapiens
MALRLVADFDLGKDVLPWLRAQRAVSEASGAGSGGADVLENDYESLHVLNVERNGNIIYTYKDDKGNVVFGLYDCQTRQNELLYTFEKDLQVFSCSVNSERTLLAASLVQSTKEGKRNELQPGSKCLTLLVEIHPVNNVKVLKAVDSYIWVQFLYPHIESHPLPENHLLLISEEKYIEQFRIHVAQEDGNRVVIKNSGHLPRDRIAEDFVWAQWDMSEQRLYYIDLKKSRSILKCIQFYADESYNLMFEVPLDISLSNSGFKLVNFGCDYHQYRDKFSKHLTLCVFTNHTGSLCVCYSPKCASWGQITYSVFYIHKGHSKTFTTSLENVGSHMTKGITFLNLDYYVAVYLPGHFFHLLNVQHPDLICHNLFLTGNNEMIDMLPHCPLQSLSGSLVLDCCSGKLYRALLSQSSLLQLLQNTCLDCEKMAALHCALYCGQGAQFLEAQWRQRADLNTNRVLSDFLKIIQWISENVSACHSFDLIQEFIIASSYWSVYSETSNMDKLLPHSSVLTWNTEIPGITLVTEDIALPLMKVLSFKGYWEKLNSNLEYVKYAKPHFHYNNSVVRREWHNLISEEV

SEQ ID NO: 20099 - protein, 559 aa, Homo sapiens
MALRLVADFDLGKDVLPWLRAQRAVSEASGAGSGGADVLENDYESLHVLNVERNGNIIYTYKDDKGNVVFGLYDCQTRQNELLYTFEKDLQVFSCSVNSERTLLAASLVQSTKEGKRNELQPGSKCLTLLVEIHPVNNVKVLKAVDSYIWVQFLYPHIESHPLPENHLLLISEEKYIEQFRIHVAQEDGNRVVIKNSGHLPRDRIAEDFVWAQWDMSEQRLYYIDLKKSRSILKCIQFYADESYNLMFEVPLDISLSNSGFKLVNFGCDYHQYRDKFSKHLTLCVFTNHTGSLCVCYSPKCASWGQITYSVFYIHKGHSKTFTTSLENVGSHMTKGITFLNLDYYVAVYLPGHFFHLLNVQHPDLICHNLFLTGNNEMIDMLPHCPLQSLSGSLVLDCCSGKLYRALLSQSSLLQLLQNTCLDCEKMAALHCALYCGQGAQFLEAQIIQWISENVSACHSFDLIQEFIIASSYWSVYSETSNMDKLLPHSSVLTWNTEIPGITLVTEDIALPLMKVLSFKGYWEKLNSNLEYVKYAKPHFHYNNSVVRREWHNLISEEV

SEQ ID NO: 20100 - protein, 248 aa, Homo sapiens
MGLMVSELKDHFLRHLQGVEKKKIEQMVLDYISKLLDLICHIVETNWRKHNLHSWVLHFNSRGSAAEFAVFHIMTRILEATNSLFLPLPPGFHTLHTILGVQCLPLHNLLHCIDSGVLLLTETAVIRLMKDLDNTEKNEKLKFSIIVRLPPLIGQKICRLWDHPMSSNIISRNHVTRLLQNYKKQPRNSMINKSSFSVEFLPLNYFIEILTDIESSNQALYPFEGHDNVDAEFVEEAALKHTAMLLGL

SEQ ID NO: 20101 - protein, 163 aa, Homo sapiens
MTHPLPHDSHTSGAPPLVNKSRDLANGPPFFSPLQSLWEEFLHLLFMGTLLFYRIATKALRGKATLLKSHSKQPAQPGWEPGIRAPSPVPASSLQDHSRLTSLSRTGKEQRRTLSLIRKTSGTPTESTVATAAASTTEVPSRLPWAARAGFKRTTGVCIALPT

SEQ ID NO: 20102 - protein, 368 aa, Homo sapiens
MCSLPRGFEPQAPEDLAQRSLVELREMLKRQERLLRNEKFICKLPDKGKKIFDSFAKLKAAIAECEEVRRKSELFNPVSLDCKLRQKAIAEVDVGTDKAQNSDPILDTSSLVPGCSSVDNIKSSQTSQNQGLGRPTLEGDEETSEVEYTVNKGPASSNRDRVPPSSEASEHHPRHRVSSQAEDTSSSFDNLFIDRLQRITIADQGEQQSEENASTKNLTGLSSGTEKKPHYMEVLEMRAKNPVPQLRKFKTNVLPFRQNDSSSHCQKSGSPISSEERRRRDKQHLDDITAARLLPLHHMPTQLLSIEESLALQKQQKQNYEEMQAKLAAQKLAERLNIKMRSYNPEGESSGRYREVRDEDDDWSSDEF

SEQ ID NO: 20103 - protein, 211 aa, Homo sapiens
MCSLPRGFEPQAPEDLAQRSLVELREMLKRQERLLRNELQRITIADQGEQQSEENASTKNLTGLSSGTEKKPHYMEVLEMRAKNPVPQLRKFKTNVLPFRQNDSSSHCQKSGSPISSEERRRRDKQHLDDITAARLLPLHHMPTQLLSIEESLALQKQQKQNYEEMQAKLAAQKLAERLNIKMRSYNPEGESSGRYREVRDEDDDWSSDEF

SEQ ID NO: 20104 - protein, 363 aa, Homo sapiens
MCSLPRGFEPQAPEDLAQRSLVELREMLKRQERLLRNEKFICKLPDKGKKIFDSFAKLKAAIAECEEVRRKSELFNPVSLDCKLRQKAIAEVDVGTDKAQNSDPILDTSSLVPGCSSVDNIKSSQTSQNQGLGRPTLEGDEETSEVEYTVNKGPASSNRDRVPPSSEASEHHPRHRVSSQAEDTSSSFDNLFIDRLQRITIADQGEQQSEENASTKNLTGLSSGTEKKPHYMEVLEMRAKNPVPQLRKFKTNVLPFRQNDSSSHCQKSGSPISSEERRRRDKQHLDDITAARLLPLHHMPTQLLSIEESLALQKQQKQNYEERPFYSPQYRSSMNLLSLAAAAKDTRGSKSGKMGSLALLTKL

SEQ ID NO: 20105 - protein, 210 aa, Homo sapiens
MPPYTVVYFPVRGRCAALRMLLADQGQSWKEEVVTVETWQEGSLKASCLYGQLPKFQDGDLTLYQSNTILRHLGRTLGLYGKDQQEAALVDMVNDGVEDLRCKYISLIYTNYEAGKDDYVKALPGQLKPFETLLSQNQGGKTFIVGDQISFADYNLLDLLLIHEVLAPGCLDAFPLLSAYVGRLSARPKLKAFLASPEYVNLPINGNGKQ

SEQ ID NO: 20106 - protein, 262 aa, Homo sapiens
MRNSYRFLASSLSVVVSLLLIPEDVCEKIIGGNEVTPHSRPYMVLLSLDRKTICAGALIAKDWVLTAAHCNLNKRSQVILGAHSITREEPTKQIMLVKKEFPYPCYDPATREGDLKLLQLMEKAKINKYVTILHLPKKGDDVKPGTMCQVAGWGRTHNSASWSDTLREVNITIIDRKVCNDRNHYNFNPVIGMNMVCAGSLRGGRDSCNGDSGSPLLCEGVFRGVTSFGLENKCGDPRGPGVYILLSKKHLNWIIMTIKGAV

SEQ ID NO: 20107 - protein, 245 aa, Homo sapiens
MTKGLRDVCEKIIGGNEVTPHSRPYMVLLSLDRKTICAGALIAKDWVLTAAHCNLNKRSQVILGAHSITREEPTKQIMLVKKEFPYPCYDPATREGDLKLLQLMEKAKINKYVTILHLPKKGDDVKPGTMCQVAGWGRTHNSASWSDTLREVNITIIDRKVCNDRNHYNFNPVIGMNMVCAGSLRGGRDSCNGDSGSPLLCEGVFRGVTSFGLENKCGDPRGPGVYILLSKKHLNWIIMTIKGAV

SEQ ID NO: 20108 - protein, 247 aa, Homo sapiens
MQPILLLLAFLLLPRADAGEIIGGHEAKPHSRPYMAYLMIWDQKSLKRCGGFLIRDDFVLTAAHCWGSSINVTLGAHNIKEQEPTQQFIPVKRPIPHPAYNPKNFSNDIMLLQLERKAKRTRAVQPLRLPSNKAQVKPGQTCSVAGWGQTAPLGKHSHTLQEVKMTVQEDRKCESDLRHYYDSTIELCVGDPEIKKTSFKGDSGGPLVCNKVAQGIVSYGRNNGMPPRACTKVSSFVHWIKKTMKRY

SEQ ID NO: 20109 - protein, 246 aa, Homo sapiens
MQPFLLLLAFLLTPGAGTEEIIGGHEAKPHSRPYMAFVQFLQEKSRKRCGGILVRKDFVLTAAHCQGSSINVTLGAHNIKEQERTQQFIPVKRPIPHPAYNPKNFSNDIMLLQLERKAKWTTAVRPLRLPSSKAQVKPGQLCSVAGWGYVSMSTLATTLQEVLLTVQKDCQCERLFHGNYSRATEICVGDPKKTQTGFKGDSGGPLVCKDVAQGILSYGNKKGTPPGVYIKVSHFLPWIKRTMKRL

SEQ ID NO: 20110 - protein, 160 aa, Homo sapiens
MQPFLLLLAFLLTPGAGTEEIIGGHEAKPHSRPYMAFVQFLQEKSRKRCGGILVRKDFVLTAAHCQGSSINVTLGAHNIKEQERTQQFIPVKRPIPHPAYNPKNFSNDIMLLQGDSGGPLVCKDVAQGILSYGNKKGTPPGVYIKVSHFLPWIKRTMKRL

SEQ ID NO: 20111 - protein, 115 aa, Homo sapiens
MQPFLLLLAFLLTPGAGTEEIIGGHEAKPHSRPYMAFVQFLQEKSRKRCGGILVRKDFVLTAAHCQGSGDSGGPLVCKDVAQGILSYGNKKGTPPGVYIKVSHFLPWIKRTMKRL

SEQ ID NO: 20112 - protein, 1194 aa, Homo sapiens
MVGLLLFFFPAIFLEVSLLPRSPGRKVLLAGASSQRSVARMDGDVIIGALFSVHHQPPAEKVPERKCGEIREQYGIQRVEAMFHTLDKINADPVLLPNITLGSEIRDSCWHSSVALEQSIEFIRDSLISIRDEKDGINRCLPDGQSLPPGRTKKPIAGVIGPGSSSVAIQVQNLLQLFDIPQIAYSATSIDLSDKTLYKYFLRVVPSDTLQARAMLDIVKRYNWTYVSAVHTEGNYGESGMDAFKELAAQEGLCIAHSDKIYSNAGEKSFDRLLRKLRERLPKARVVVCFCEGMTVRGLLSAMRRLGVVGEFSLIGSDGWADRDEVIEGYEVEANGGITIKLQSPEVRSFDDYFLKLRLDTNTRNPWFPEFWQHRFQCRLPGHLLENPNFKRICTGNESLEENYVQDSKMGFVINAIYAMAHGLQNMHHALCPGHVGLCDAMKPIDGSKLLDFLIKSSFIGVSGEEVWFDEKGDAPGRYDIMNLQYTEANRYDYVHVGTWHEGVLNIDDYKIQMNKSGVVRSVCSEPCLKGQIKVIRKGEVSCCWICTACKENEYVQDEFTCKACDLGWWPNADLTGCEPIPVRYLEWSNIESIIAIAFSCLGILVTLFVTLIFVLYRDTPVVKSSSRELCYIILAGIFLGYVCPFTLIAKPTTTSCYLQRLLVGLSSAMCYSALVTKTNRIARILAGSKKKICTRKPRFMSAWAQVIIASILISVQLTLVVTLIIMEPPMPILSYPSIKEVYLICNTSNLGVVAPLGYNGLLIMSCTYYAFKTRNVPANFNEAKYIAFTMYTTCIIWLAFVPIYFGSNYKIITTCFAVSLSVTVALGCMFTPKMYIIIAKPERNVRSAFTTSDVVRMHVGDGKLPCRSNTFLNIFRRKKAGAGNANSNGKSVSWSEPGGGQVPKGQHMWHRLSVHVKTNETACNQTAVIKPLTKSYQGSGKSLTFSDTSTKTLYNVEEEEDAQPIRFSPPGSPSMVVHRRVPSAATTPPLPSHLTAEETPLFLAEPALPKGLPPPLQQQQQPPPQQKSLMDQLQGVVSNFSTAIPDFHAVLAGPGGPGNGLRSLYPPPPPPQHLQMLPLQLSTFGEELVSPPADDDDDSERFKLLQEYVYEHEREGNTEEDELEEEEEDLQAASKLTPDDSPALTPPSPFRDSVASGSSVPSSPVSESVLCTPPNVSYASVILRDYKQSSSTL

SEQ ID NO: 20113 - protein, 906 aa, Homo sapiens
MVGLLLFFFPAIFLEVSLLPRSPGRKVLLAGASSQRSVARMDGDVIIGALFSVHHQPPAEKVPERKCGEIREQYGIQRVEAMFHTLDKINADPVLLPNITLGSEIRDSCWHSSVALEQSIEFIRDSLISIRDEKDGINRCLPDGQSLPPGRTKKPIAGVIGPGSSSVAIQVQNLLQLFDIPQIAYSATSIDLSDKTLYKYFLRVVPSDTLQARAMLDIVKRYNWTYVSAVHTEGNYGESGMDAFKELAAQEGLCIAHSDKIYSNAGEKSFDRLLRKLRERLPKARVVVCFCEGMTVRGLLSAMRRLGVVGEFSLIGSDGWADRDEVIEGYEVEANGGITIKLQSPEVRSFDDYFLKLRLDTNTRNPWFPEFWQHRFQCRLPGHLLENPNFKRICTGNESLEENYVQDSKMGFVINAIYAMAHGLQNMHHALCPGHVGLCDAMKPIDGSKLLDFLIKSSFIGVSGEEVWFDEKGDAPGRYDIMNLQYTEANRYDYVHVGTWHEGVLNIDDYKIQMNKSGVVRSVCSEPCLKGQIKVIRKGEVSCCWICTACKENEYVQDEFTCKACDLGWWPNADLTGCEPIPVRYLEWSNIESIIAIAFSCLGILVTLFVTLIFVLYRDTPVVKSSSRELCYIILAGIFLGYVCPFTLIAKPTTTSCYLQRLLVGLSSAMCYSALVTKTNRIARILAGSKKKICTRKPRFMSAWAQVIIASILISVQLTLVVTLIIMEPPMPILSYPSIKEVYLICNTSNLGVVAPLGYNGLLIMSCTYYAFKTRNVPANFNEAKYIAFTMYTTCIIWLAFVPIYFGSNYKIITTCFAVSLSVTVALGCMFTPKMYIIIAKPERNVRSAFTTSDVVRMHVGDGKLPCRSNTFLNIFRRKKAGAGNAKKRQPEFSPTSQCPSAHVQL

SEQ ID NO: 20114 - protein, 908 aa, Homo sapiens
MVGLLLFFFPAIFLEVSLLPRSPGRKVLLAGASSQRSVARMDGDVIIGALFSVHHQPPAEKVPERKCGEIREQYGIQRVEAMFHTLDKINADPVLLPNITLGSEIRDSCWHSSVALEQSIEFIRDSLISIRDEKDGINRCLPDGQSLPPGRTKKPIAGVIGPGSSSVAIQVQNLLQLFDIPQIAYSATSIDLSDKTLYKYFLRVVPSDTLQARAMLDIVKRYNWTYVSAVHTEGNYGESGMDAFKELAAQEGLCIAHSDKIYSNAGEKSFDRLLRKLRERLPKARVVVCFCEGMTVRGLLSAMRRLGVVGEFSLIGSDGWADRDEVIEGYEVEANGGITIKLQSPEVRSFDDYFLKLRLDTNTRNPWFPEFWQHRFQCRLPGHLLENPNFKRICTGNESLEENYVQDSKMGFVINAIYAMAHGLQNMHHALCPGHVGLCDAMKPIDGSKLLDFLIKSSFIGVSGEEVWFDEKGDAPGRYDIMNLQYTEANRYDYVHVGTWHEGVLNIDDYKIQMNKSGVVRSVCSEPCLKGQIKVIRKGEVSCCWICTACKENEYVQDEFTCKACDLGWWPNADLTGCEPIPVRYLEWSNIESIIAIAFSCLGILVTLFVTLIFVLYRDTPVVKSSSRELCYIILAGIFLGYVCPFTLIAKPTTTSCYLQRLLVGLSSAMCYSALVTKTNRIARILAGSKKKICTRKPRFMSAWAQVIIASILISVQLTLVVTLIIMEPPMPILSYPSIKEVYLICNTSNLGVVAPLGYNGLLIMSCTYYAFKTRNVPANFNEAKYIAFTMYTTCIIWLAFVPIYFGSNYKIITTCFAVSLSVTVALGCMFTPKMYIIIAKPERNVRSAFTTSDVVRMHVGDGKLPCRSNTFLNIFRRKKAGAGNAKWRTGAQGTAYVAPPLCAREDQ

SEQ ID NO: 20115 - protein, 264 aa, Homo sapiens
MTKFSSFSLFFLIVGAYMTHVCFNMEIIGGKEVSPHSRPFMASIQYGGHHVCGGVLIDPQWVLTAAHCQYRFTKGQSPTVVLGAHSLSKNEASKQTLEIKKFIPFSRVTSDPQSNDIMLVKLQTAAKLNKHVKMLHIRSKTSLRSGTKCKVTGWGATDPDSLRPSDTLREVTVTVLSRKLCNSQSYYNGDPFITKDMVCAGDAKGQKDSCKGDSGGPLICKGVFHAIVSGGHECGVATKPGIYTLLTKKYQTWIKSNLVPPHTN

SEQ ID NO: 20116 - protein, 240 aa, Homo sapiens
MGLELYLDLLSQPCRAVYIFAKKNDIPFELRIVDLIKGQHLSDAFAQVNPLKKVPALKDGDFTLTESVAILLYLTRKYKVPDYWYPQDLQARARVDEYLAWQHTTLRRSCLRALWHKVMFPVFLGEPVSPQTLAATLAELDVTLQLLEDKFLQNKAFLTGPHISLADLVAITELMHPVGAGCQVFEGRPKLATWRQRVEAAVGEDLFQEAHEVILKAKDFPPADPTIKQKLMPWVLAMIR

SEQ ID NO: 20117 - protein, 122 aa, Homo sapiens
MFPVFLGEPVSPQTLAATLAELDVTLQLLEDKFLQNKAFLTGPHISLADLVAITELMHPVGAGCQVFEGRPKLATWRQRVEAAVGEDLFQEAHEVILKAKDFPPADPTIKQKLMPWVLAMIR

SEQ ID NO: 20118 - protein, 578 aa, Homo sapiens
MLRRLDKIRFRGHKRDDFLDLAESPNASDTECSDEIPLKVPRTSPRDSEELRDPAGPGTLIMATGVQDFNRTEFDRLNEIKGHLEIALLEKHFLQEELRKLREETNAEMLRQELDRERQRRMELEQKVQEVLKARTEEQMAQQPPKGQAQASNGAERRSQGLSSRLQKWFYERFGEYVEDFRFQPEENTVETEEPLSARRLTENMRRLKRGAKPVTNFVKNLSALSDWYSVYTSAIAFTVYMNAVWHGWAIPLFLFLAILRLSLNYLIARGWRIQWSIVPEVSEPVEPPKEDLTVSEKFQLVLDVAQKAQNLFGKMADILEKIKNLFMWVQPEITQKLYVALWAAFLASCFFPYRLVGLAVGLYAGIKFFLIDFIFKRCPRLRAKYDTPYIIWRSLPTDPQLKERSSAAVSRRLQTTSSRSYVPSAPAGLGKEEDAGRFHSTKKGNFHEIFNLTENERPLAVCENGWRCCLINRDRKMPTDYIRNGVLYVTENYLCFESSKSGSSKRNKVIKLVDITDIQKYKVLSVLPGSGMGIAVSTPSTQKPLVFGAMVHRDEAFETILSQYIKITSAAASGGDS

SEQ ID NO: 20119 - protein, 101 aa, Homo sapiens
MPTDYIRNGVLYVTENYLCFESSKSGSSKRNKVIKLVDITDIQKYKVLSVLPGSGMGIAVSTPSTQKPLVFGAMVHRDEAFETILSQYIKITSAAASGGDS

SEQ ID NO: 20120 - protein, 354 aa, Homo sapiens
MTALSRSEATEEGGNQQMHRKTASLNSPVSCKEKPDRVEEPPDYSLHWPEGLKGEEIKKCGREGITLNKYNQQYHKLFKDVPLEEVVLKVCSCALQRDFLLQGRLYISPNWLCFHASLFGKDIKVVIPVVSVQMIKKHKMARLLPNGLAITTNTSQKYIFVSLLSRDSVYDLLRRVCTHLQPSSKKSLSVREFSGEPESLEVLIPEMKWRKVCPSSRSLSLPDNIPCIPPSSVDSTDSFFPSRKPPMSEKSRAQVASENGGRWAWPMPGWGPACPKKMPNCSPTAKNAVYEEDELEEEPRSTGELRLWDYRLLKVFFVLICFLVMSSSYLAFRISRLEQQLCSLSWDDPVPGHR

SEQ ID NO: 20121 - protein, 257 aa, Homo sapiens
MEACVSSLLVLALGALSVGSSFGTQIIGGREVIPHSRPYMASLQRNGSHLCGGVLVHPKWVLTAAHCLAQRMAQLRLVLGLHTLDSPGLTFHIKAAIQHPRYKPVPALENDLALLQLDGKVKPSRTIRPLALPSKRQVVAAGTRCSMAGWGLTHQGGRLSRVLRELDLQVLDTRMCNNSRFWNGSLSPSMVCLAADSKDQAPCKGDSGGPLVCGKGRVLARVLSFSSRVCTDIFKPPVATAVAPYVSWIRKVTGRSA

SEQ ID NO: 20122 - protein, 438 aa, Homo sapiens
MHPLPGYWSCYCLLLLFSLGVQGSLGAPSAAPEQVHLSYPGEPGSMTVTWTTWVPTRSEVQFGLQPSGPLPLRAQGTFVPFVDGGILRRKLYIHRVTLRKLLPGVQYVYRCGSAQGWSRRFRFRALKNGAHWSPRLAVFGDLGADNPKAVPRLRRDTQQGMYDAVLHVGDFAYNLDQDNARVGDRFMRLIEPVAASLPYMTCPGNHEERYNFSNYKARFSMPGDNEGLWYSWDLGPAHIISFSTEVYFFLHYGRHLVQRQFRWLESDLQKANKNRAARPWIITMGHRPMYCSNADLDDCTRHESKVRKGLQGKLYGLEDLFYKYGVDLQLWAHEHSYERLWPIYNYQVFNGSREMPYTNPRGPVHIITGSAGCEERLTPFAVFPRPWSAVRVKEYGYTRLHILNGTHIHIQQVSDDQDGKIVDDVWVVRPLFGRRMYL

SEQ ID NO: 20123 - protein, 386 aa, Homo sapiens
MNPQIRNPMERMYRDTFYDNFENEPILYGRSYTWLCYEVKIKRGRSNLLWDTGVFRGPVLPKRQSNHRQEVYFRFENHAEMCFLSWFCGNRLPANRRFQITWFVSWNPCLPCVVKVTKFLAEHPNVTLTISAARLYYYRDRDWRWVLLRLHKAGARVKIMDYEDFAYCWENFVCNEGQPFMPWYKFDDNYASLHRTLKEILRNPMEAMYPHIFYFHFKNLLKACGRNESWLCFTMEVTKHHSAVFRKRGVFRNQVDPETHCHAERCFLSWFCDDILSPNTNYEVTWYTSWSPCPECAGEVAEFLARHSNVNLTIFTARLCYFWDTDYQEGLCSLSQEGASVKIMGYKDFVSCWKNFVYSDDEPFKPWKGLQTNFRLLKRRLREILQ

SEQ ID NO: 20124 - protein, 81 aa, Homo sapiens
MNVDHEVNLLVEEIHRLGSKNADGKLSVKFGVLFRDDKCANLFEALVGTLKAAKRRKIVTYPGELLLQGVHDDVDIILLQD

SEQ ID NO: 20125 - protein, 200 aa, Homo sapiens
MALLTAETFRLQFNNKRRLRRPYYPRKALLCYQLTPQNGSTPTRGYFENKKKCHAEICFINEIKSMGLDETQCYQVTCYLTWSPCSSCAWELVDFIKAHDHLNLGIFASRLYYHWCKPQQKGLRLLCGSQVPVEVMGFPEFADCWENFVDHEKPLSFNPYKMLEELDKNSRAIKRRLERIKIPGVRAQGRYMDILCDAEV

SEQ ID NO: 20126 - protein, 182 aa, Homo sapiens
MALLTAETFRLQFNNKRRLRRPYYPRKALLCYQLTPQNGSTPTRGYFENKKKCHAEICFINEIKSMGLDETQCYQVTCYLTWSPCSSCAWELVDFIKAHDHLNLGIFASRLYYHWCKPQQKGLRLLCGSQVPVEVMGFPEFADCWENFVDHEKPLSFNPYKMLEELDKNSRAIKRRLERIKS

SEQ ID NO: 20127 - protein, 183 aa, Homo sapiens
MALLTAETFRLQFNNKRRLRRPYYPRKALLCYQLTPQNGSTPTRGYFENKKKCHAEICFINEIKSMGLDETQCYQVTCYLTWSPCSSCAWELVDFIKAHDHLNLGIFASRLYYHWCKPQQKGLRLLCGSQVPVEVMGFPEFADCWENFVDHEKPLSFNPYKMLEELDKNSRAIKRRLERIKQS

SEQ ID NO: 20128 - protein, 154 aa, Homo sapiens
MALLTAETFRLQFNNKRRLRRPYYPRKALLCYQLTPQNGSTPTRGYFENKKKCHAEICFINEIKSMGLDETQCYQVTCYLTWSPCSSCAWELVDFIKAHDHLNLGIFASRLYYHWCKPQQKGLRLLCGSQVPVEVMGFPNSRGTCAGSLHGYIV

SEQ ID NO: 20129 - protein, 58 aa, Homo sapiens
MLQSIIKNIWIPMKPYYTKVYQEIWIGMGLMGFIVYKIRAADKRSKALKASAPAPGHH

SEQ ID NO: 20130 - protein, 75 aa, Homo sapiens
MKLYGTRGSDISHFQCQMLQSIIKNIWIPMKPYYTKVYQEIWIGMGLMGFIVYKIRAADKRSKALKASAPAPGHH

SEQ ID NO: 20131 - protein, 607 aa, Homo sapiens
MSSGLRAADFPRWKRHISEQLRRRDRLQRQAFEEIILQYNKLLEKSDLHSVLAQKLQAEKHDVPNRHEISPGHDGTWNDNQLQEMAQLRIKHQEELTELHKKRGELAQLVIDLNNQMQRKDREMQMNEAKIAECLQTISDLETECLDLRTKLCDLERANQTLKDEYDALQITFTALEGKLRKTTEENQELVTRWMAEKAQEANRLNAENEKDSRRRQARLQKELAEAAKEPLPVEQDDDIEVIVDETSDHTEETSPVRAISRAATKRLSQPAGGLLDSITNIFGRRSVSSFPVPQDNVDTHPGSGKEVRVPATALCVFDAHDGEVNAVQFSPGSRLLATGGMDRRVKLWEVFGEKCEFKGSLSGSNAGITSIEFDSAGSYLLAASNDFASRIWTVDDYRLRHTLTGHSGKVLSAKFLLDNARIVSGSHDRTLKLWDLRSKVCIKTVFAGSSCNDIVCTEQCVMSGHFDKKIRFWDIRSESIVREMELLGKITALDLNPERTELLSCSRDDLLKVIDLRTNAIKQTFSAPGFKCGSDWTRVVFSPDGSYVAAGSAEGSLYIWSVLTGKVEKVLSKQHSSSINAVAWSPSGSHVVSVDKGCKAVLWAQY

SEQ ID NO: 20132 - protein, 588 aa, Homo sapiens
MSSGLRAADFPRWKRHISEQLRRRDRLQRQAFEEIILQYNKLLEKSDLHSVLAQKLQAEKHDVPNRHEISPGHDGTWNDNQLQEMAQLRIKHQEELTELHKKRGELAQLVIDLNNQMQRKDREMQMNEAKIAECLQTISDLETECLDLRTKLCDLERANQTLKDEYDALQITFTALEGKLRKTTEENQELVTRWMAEKAQEANRLNAENEKDSRRRQARLQKELAEAAKEPLPVEQDDDIEVIVDETSDHTEETSPVRAISRAATRRSVSSFPVPQDNVDTHPGSGKEVRVPATALCVFDAHDGEVNAVQFSPGSRLLATGGMDRRVKLWEVFGEKCEFKGSLSGSNAGITSIEFDSAGSYLLAASNDFASRIWTVDDYRLRHTLTGHSGKVLSAKFLLDNARIVSGSHDRTLKLWDLRSKVCIKTVFAGSSCNDIVCTEQCVMSGHFDKKIRFWDIRSESIVREMELLGKITALDLNPERTELLSCSRDDLLKVIDLRTNAIKQTFSAPGFKCGSDWTRVVFSPDGSYVAAGSAEGSLYIWSVLTGKVEKVLSKQHSSSINAVAWSPSGSHVVSVDKGCKAVLWAQY

SEQ ID NO: 20133 - protein, 470 aa, Homo sapiens
MSSGLRAADFPRWKRHISEQLRRRDRLQRQAFEEIILQYNKLLEKSDLHSVLAQKLQAEKHDVPNRHEISPGHDGTWNDNQLQEMAQLRIKHQEELTELHKKRGELAQLVIDLNNQMQRKDREMQMNEAKIAECLQTISDLETECLDLRTKLCDLERANQTLKDEYDALQITFTALEGKLRKTTEENQELVTRWMAEKAQEANRLNAENEKDSRRRQARLQKELAEAAKEPLPVEQDDDIEVIVDETSDHTEETSPVRAISRAATKRLSQPAGGLLDSITNIFGRRSVSSFPVPQDNVDTHPGSGKEVRVPATALCVFDAHDGEVNAVQFSPGSRLLATGGMDRRVKLWEVFGEKCEFKGSLSGSNAGITSIEFDSAGSYLLAASNDFASRIWTVDDYRLRHTLTGHSGKVLSAKFLLDNARIVSGSHDRTLKLWDLRSKVCEEIQSLCLCICLDVSVEVCVCTSEPAFM

SEQ ID NO: 20134 - protein, 428 aa, Homo sapiens
MSSGLRAADFPRWKRHISEQLRRRDRLQRQAFEEIILQYNKLLEKSDLHSVLAQKLQAEKHDVPNRHEIRRRQARLQKELAEAAKEPLPVEQDDDIEVIVDETSDHTEETSPVRAISRAATKRLSQPAGGLLDSITNIFGRRSVSSFPVPQDNVDTHPGSGKEVRVPATALCVFDAHDGEVNAVQFSPGITSIEFDSAGSYLLAASNDFASRIWTVDDYRLRHTLTGHSGKVLSAKFLLDNARIVSGSHDRTLKLWDLRSKVCIKTVFAGSSCNDIVCTEQCVMSGHFDKKIRFWDIRSESIVREMELLGKITALDLNPERTELLSCSRDDLLKVIDLRTNAIKQTFSAPGFKCGSDWTRVVFSPDGSYVAAGSAEGSLYIWSVLTGKVEKVLSKQHSSSINAVAWSPSGSHVVSVDKGCKAVLWAQY

SEQ ID NO: 20135 - protein, 444 aa, Homo sapiens
MSSGLRAADFPRWKRHISEQLRRRDRLQRQAFEEIILQYNKLLEKSDLHSVLAQKLQAEKHDVPNRHEIRRRQARLQKELAEAAKEPLPVEQDDDIEVIVDETSDHTEETSPVRAISRAATRRSVSSFPVPQDNVDTHPGSGKEVRVPATALCVFDAHDGEVNAVQFSPGSRLLATGGMDRRVKLWEVFGEKCEFKGSLSGSNAGITSIEFDSAGSYLLAASNDFASRIWTVDDYRLRHTLTGHSGKVLSAKFLLDNARIVSGSHDRTLKLWDLRSKVCIKTVFAGSSCNDIVCTEQCVMSGHFDKKIRFWDIRSESIVREMELLGKITALDLNPERTELLSCSRDDLLKVIDLRTNAIKQTFSAPGFKCGSDWTRVVFSPDGSYVAAGSAEGSLYIWSVLTGKVEKVLSKQHSSSINAVAWSPSGSHVVSVDKGCKAVLWAQY

SEQ ID NO: 20136 - protein, 2261 aa, Homo sapiens
MACWPQLRLLLWKNLTFRRRQTCQLLLEVAWPLFIFLILISVRLSYPPYEQHECHFPNKAMPSAGTLPWVQGIICNANNPCFRYPTPGEAPGVVGNFNKSIVARLFSDARRLLLYSQKDTSMKDMRKVLRTLQQIKKSSSNLKLQDFLVDNETFSGFLYHNLSLPKSTVDKMLRADVILHKVFLQGYQLHLTSLCNGSKSEEMIQLGDQEVSELCGLPREKLAAAERVLRSNMDILKPILRTLNSTSPFPSKELAEATKTLLHSLGTLAQELFSMRSWSDMRQEVMFLTNVNSSSSSTQIYQAVSRIVCGHPEGGGLKIKSLNWYEDNNYKALFGGNGTEEDAETFYDNSTTPYCNDLMKNLESSPLSRIIWKALKPLLVGKILYTPDTPATRQVMAEVNKTFQELAVFHDLEGMWEELSPKIWTFMENSQEMDLVRMLLDSRDNDHFWEQQLDGLDWTAQDIVAFLAKHPEDVQSSNGSVYTWREAFNETNQAIRTISRFMECVNLNKLEPIATEVWLINKSMELLDERKFWAGIVFTGITPGSIELPHHVKYKIRMDIDNVERTNKIKDGYWDPGPRADPFEDMRYVWGGFAYLQDVVEQAIIRVLTGTEKKTGVYMQQMPYPCYVDDIFLRVMSRSMPLFMTLAWIYSVAVIIKGIVYEKEARLKETMRIMGLDNSILWFSWFISSLIPLLVSAGLLVVILKLGNLLPYSDPSVVFVFLSVFAVVTILQCFLISTLFSRANLAAACGGIIYFTLYLPYVLCVAWQDYVGFTLKIFASLLSPVAFGFGCEYFALFEEQGIGVQWDNLFESPVEEDGFNLTTSVSMMLFDTFLYGVMTWYIEAVFPGQYGIPRPWYFPCTKSYWFGEESDEKSHPGSNQKRISEICMEEEPTHLKLGVSIQNLVKVYRDGMKVAVDGLALNFYEGQITSFLGHNGAGKTTTMSILTGLFPPTSGTAYILGKDIRSEMSTIRQNLGVCPQHNVLFDMLTVEEHIWFYARLKGLSEKHVKAEMEQMALDVGLPSSKLKSKTSQLSGGMQRKLSVALAFVGGSKVVILDEPTAGVDPYSRRGIWELLLKYRQGRTIILSTHHMDEADVLGDRIAIISHGKLCCVGSSLFLKNQLGTGYYLTLVKKDVESSLSSCRNSSSTVSYLKKEDSVSQSSSDAGLGSDHESDTLTIDVSAISNLIRKHVSEARLVEDIGHELTYVLPYEAAKEGAFVELFHEIDDRLSDLGISSYGISETTLEEIFLKVAEESGVDAETSDGTLPARRNRRAFGDKQSCLRPFTEDDAADPNDSDIDPESRETDLLSGMDGKGSYQVKGWKLTQQQFVALLWKRLLIARRSRKGFFAQIVLPAVFVCIALVFSLIVPPFGKYPSLELQPWMYNEQYTFVSNDAPEDTGTLELLNALTKDPGFGTRCMEGNPIPDTPCQAGEEEWTTAPVPQTIMDLFQNGNWTMQNPSPACQCSSDKIKKMLPVCPPGAGGLPPPQRKQNTADILQDLTGRNISDYLVKTYVQIIAKSLKNKIWVNEFRYGGFSLGVSNTQALPPSQEVNDAIKQMKKHLKLAKDSSADRFLNSLGRFMTGLDTKNNVKVWFNNKGWHAISSFLNVINNAILRANLQKGENPSHYGITAFNHPLNLTKQQLSEVALMTTSVDVLVSICVIFAMSFVPASFVVFLIQERVSKAKHLQFISGVKPVIYWLSNFVWDMCNYVVPATLVIIIFICFQQKSYVSSTNLPVLALLLLLYGWSITPLMYPASFVFKIPSTAYVVLTSVNLFIGINGSVATFVLELFTDNKLNNINDILKSVFLIFPHFCLGRGLIDMVKNQAMADALERFGENRFVSPLSWDLVGRNLFAMAVEGVVFFLITVLIQYRFFIRPRPVNAKLSPLNDEDEDVRRERQRILDGGGQNDILEIKELTKIYRRKRKPAVDRICVGIPPGECFGLLGVNGAGKSSTFKMLTGDTTVTRGDAFLNKNSILSNIHEVHQNMGYCPQFDAITELLTGREHVEFFALLRGVPEKEVGKVGEWAIRKLGLVKYGEKYAGNYSGGNKRKLSTAMALIGGPPVVFLDEPTTGMDPKARRFLWNCALSVVKEGRSVVLTSHSMEECEALCTRMAIMVNGRFRCLGSVQHLKNRFGDGYTIVVRIAGSNPDLKPVQDFFGLAFPGSVLKEKHRNMLQYQLPSSLSSLARIFSILSQSKKRLHIEDYSVSQTTLDQVFVNFAKDQSDDDHLKDLSLHKNQTVVDVAVLTSFLQDEKVKESYV

SEQ ID NO: 20137 - protein, 212 aa, Homo sapiens
MEVLRRSSVFAAEIMDAFDRSPTDKELVAQAKALGREYVHARLLRAGLSWSAPERAAPVPGRLAEVCAVLLRLGDELEMIRPSVYRNVARQLHISLQSEPVVTDAFLAVAGHIFSAGITWGKVVSLYAVAAGLAVDCVRQAQPAMVHALVDCLGEFVRKTLATWLRRRGGWTDVLKCVVSTDPGLRSHWLVAALCSFGRFLKAAFFVLLPER

SEQ ID NO: 20138 - protein, 134 aa, Homo sapiens
MIRPSVYRNVARQLHISLQSEPVVTDAFLAVAGHIFSAGITWGKVVSLYAVAAGLAVDCVRQAQPAMVHALVDCLGEFVRKTLATWLRRRGGWTDVLKCVVSTDPGLRSHWLVAALCSFGRFLKAAFFVLLPER

SEQ ID NO: 20139 - protein, 701 aa, Homo sapiens
MMKRQLHRMRQLAQTGSLGRTPETAEFLGEDLLQVEQRLEPAKRAAHNIHKRLQACLQGQSGADMDKRVKKLPLMALSTTMAESFKELDPDSSMGKALEMSCAIQNQLARILAEFEMTLERDVLQPLSRLSEEELPAILKHKKSLQKLVSDWNTLKSRLSQATKNSGSSQGLGGSPGSHSHTTMANKVETLKEEEEELKRKVEQCRDEYLADLYHFVTKEDSYANYFIRLLEIQADYHRRSLSSLDTALAELRENHGQADHSPSMTATHFPRVYGVSLATHLQELGREIALPIEACVMMLLSEGMKEEGLFRLAAGASVLKRLKQTMASDPHSLEEFCSDPHAVAGALKSYLRELPEPLMTFDLYDDWMRAASLKEPGARLQALQEVCSRLPPENLSNLRYLMKFLARLAEEQEVNKMTPSNIAIVLGPNLLWPPEKEGDQAQLDAASVSSIQVVGVVEALIQSADTLFPGDINFNVSGLFSAVTLQDTVSDRLASEELPSTAVPTPATTPAPAPAPAPAPAPALASAATKERTESEVPPRPASPKVTRSPPETAAPVEDMARRTKRPAPARPTMPPPQVSGSRSSPPAPPLPPGSGSPGTPQALPRRLVGSSLRAPTVPPPLPPTPPQPARRQSRRSPASPSPASPGPASPSPVSLSNPAQVDLGAATAEGGAPEAISGVPTPPAIPPQPRPRSLASETN

SEQ ID NO: 20140 - protein, 452 aa, Homo sapiens
MMKRQLHRMRQLAQTGSLGRTPETAEFLGEDLLQVEQRLEPAKRAAHNIHKRLQACLQGQSGADMDKRVKKLPLMALSTTMAESFKELDPDSSMGKALEMSCAIQNQLARILAEFEMTLERDVLQPLSRLSEEELPAILKHKKSLQKLVSDWNTLKSRLSQATKNSGSSQGLGGSPGSHSHTTMANKVETLKEEEEELKRKVEQCRDEYLADLYHFVTKEDSYANYFIRLLEIQADYHRRSLSSLDTALAELRENHGQADHSPSMTATHFPRVYGVSLATHLQELGREIALPIEACVMMLLSEGMKEEGLFRLAAGASVLKRLKQTMASDPHSLEEFCSDPHAVAGALKSYLRELPEPLMTFDLYDDWMRAASLKEPGARLQALQEVCSRLPPENLSNLRYLMKFLARLAEEQEVNKMTPSNIAIVLGPNLLWPPEKEGTEPARELGSQTLC

SEQ ID NO: 20141 - protein, 393 aa, Homo sapiens [sequence omitted]

SEQ ID NO: 20142 - protein, 361 aa, Homo sapiens
MYQVPDRQESFWQSPYLLSFPECLTSFPWEELEHLNQASEEINQVELQLDEARTTYRRILQESARKLNTQGSHLGSCIEKARPYYEARRLAKEAQQETQKAALRYERAVSMHNAAREMVFVAEQGVMADKNRLDPTWQEMLNHATCKVNEAEEERLRGEREHQRVTRLCQQAEARVQALQKTLRRAIGKSRPYFELKAQFSQILEEHKAKVTELEQQVAQAKTRYSVALRNLEQISEQIHARRRGGLPPHPLGPRRSSPVGAEAGPEDMEDGDSGIEGAEGAGLEEGSSLGPGPAPDTDTLSLLSLRTVASDLQKCDSVEHLRGLSDHVSLDGQELGTRSGGRRGSDGGARGGRHQRSVSL

SEQ ID NO: 20143 - protein, 247 aa, Homo sapiens
MVDREQLVQKARLAEQAERYDDMAAAMKNVTELNEPLSNEERNLLSVAYKNVVGARRSSWRVISSIEQKTSADGNEKKIEMVRAYREKIEKELEAVCQDVLSLLDNYLIKNCSETQYESKVFYLKMKGDYYRYLAEVATGEKRATVVESSEKAYSEAHEISKEHMQPTHPIRLGLALNYSVFYYEIQNAPEQACHLAKTAFDDAIAELDTLNEDSYKDSTLIMQLLRDNLTLWTSDQQDDDGGEGNN

SEQ ID NO: 20144 - protein, 761 aa, Homo sapiens
MNWRFVELLYFLFIWGRISVQPSHQEPAGTDQHVSKEFDWLISDRGPFHHSRSYLSFVERHRQGFTTRYKIYREFARWKVRNTAIERRDLVRHPVPLMPEFQRSIRLLGRRPTTQQFIDTIIKKYGTHLLISATLGGEEALTMYMDKSRLDRKSGNATQSVEALHQLASSYFVDRDGTMRRLHEIQISTGAIKVTETRTGPLGCNSYDNLDSVSSVLLQSTESKLHLQGLQIIFPQYLQEKFVQSALSYIMCNGEGEYLCQNSQCRCQCAEEFPQCNCPITDIQIMEYTLANMAKSWAEAYKDLENSDEFKSFMKRLPSNHFLTIGSIHQHWGNDWDLQNRYKLLQSATEAQRQKIQRTARKLFGLSVRCRHNPNHQLPRERTIQQWLARVQSLLYCNENGFWGTFLESQRSCVCHGSTTLCQRPIPCVIGGNNSCAMCSLANISLCGSCNKGYKLYRGRCEPQNVDSERSEQFISFETDLDFQDLELKYLLQKMDSRLYVHTTFISNEIRLDTFFDPRWRKRMSLTLKSNKNRMDFIHMVIGMSMRICQMRNSSLDPMFFVYVNPFSGSHSEGWNMPFGEFGYPRWEKIRLQNSQCYNWTLLLGNRWKTFFETVHIYLRSRTRLPTLLRNETGQGPVDLSDPSKRQFYIKISDVQVFGYSLRFNADLLRSAVQQVNQSYTQGGQFYSSSSVMLLLLDIRDRINRLAPPVAPGKPQLDLFSCMLKHRLKLTNSEIIRVNHALDLYNTEILKQSDQMTAKLC

SEQ ID NO: 20145 - protein, 320 aa, Homo sapiens
MNWRFVELLYFLFIWGRISVQPSHQEPAGTDQHVSKEFDWLISDRGPFHHSRSYLSFVERHRQGFTTRYKIYREFARWKVRNTAIERRDLVRHPVPLMPEFQRSIRLLGRRPTTQQFIDTIIKKYGTHLLISATLGGEEALTMYMDKSRLDRKSGNATQSVEALHQLASSYFVDRDGTMRRLHEIQISTGAIKVTETRTGPLGCNSYDNLDSVSSVLLQSTESKLHLQGLQIIFPQYLQEKFVQSALSYIMCNGEGEYLCQNSQCRCQCAEEFPQCNCPITDIQIMEYTLANMAKSWAEAYKDLENSGRESHSVPLHEWP

SEQ ID NO: 20146 - protein, 476 aa, Homo sapiens
MEYTLANMAKSWAEAYKDLENSDEFKSFMKRLPSNHFLTIGSIHQHWGNDWDLQNRYKLLQSATEAQRQKIQRTARKLFGLSVRCRHNPNHQLPRERTIQQWLARVQSLLYCNENGFWGTFLESQRSCVCHGSTTLCQRPIPCVIGGNNSCAMCSLANISLCGSCNKGYKLYRGRCEPQNVDSERSEQFISFETDLDFQDLELKYLLQKMDSRLYVHTTFISNEIRLDTFFDPRWRKRMSLTLKSNKNRMDFIHMVIGMSMRICQMRNSSLDPMFFVYVNPFSGSHSEGWNMPFGEFGYPRWEKIRLQNSQCYNWTLLLGNRWKTFFETVHIYLRSRTRLPTLLRNETGQGPVDLSDPSKRQFYIKISDVQVFGYSLRFNADLLRSAVQQVNQSYTQGGQFYSSSSVMLLLLDIRDRINRLAPPVAPGKPQLDLFSCMLKHRLKLTNSEIIRVNHALDLYNTEILKQSDQMTAKLC

SEQ ID NO: 20147 - protein, 1560 aa, Homo sapiens [sequence omitted]

SEQ ID NO: 20148 - protein, 1318 aa, Homo sapiens
MALNTPTSQLLAKQVPVSGYLASAAGPSEPVTLASAGVSPQGAGLVIQKNLSAAVATTLNGNSVFGGAGAASAPTGTPSGQPLAVAPGLGSSPLVPAPNVILHRTPTPIQPKPAGVLPPKLYQLTPKPFAPAGATLTIQGEPGALPQQPKAPQNLTFMAAGKAGQNVVLSGFPAPALQANVFKQPPATTTGAAPPQPPGALSKPMSVHLLNQGSSIVIPAQHMLPGQNQFLLPGAPAVQLPQQLSALPANVGGQILAAAAPHTGGQLIANPILTNQNLAGPLSLGPVLAPHSGAHSAHILSAAPIQVGQPALFQMPVSLAAGSLPTQSQPAPAGPAATTVLQGVTLPPSAVAMLNTPDGLVQPATPAAATGEAAPVLTVQPAPQAPPAVSTPLPLGLQQPQAQQPPQAPTPQAAAPPQATTPQPSPGLASSPEKIVLGQPPSATPTAILTQDSLQMFLPQERSQQPLSAEGPHLSVPASVIVSAPPPAQDPAPATPVAKGAGLGPQAPDSQASPAPAPQIPAAAPLKGPGPSSSPSLPHQAPLGDSPHLPSPHPTRPPSRPPSRPQSVSRPPSEPPLHPCPPPQAPPTLPGIFVIQNQLGVPPPASNPAPTAPGPPQPPLRPQSQPPEGPLPPAPHLPPSSTSSAVASSSETSSRLPAPTPSDFQLQFPPSQGPHKSPTPPPTLHLVPEPAAPPPPPPRTFQMVTTPFPALPQPKALLERFHQVPSGIILQNKAGGAPAAPQTSTSLGPLTSPAASVLVSGQAPSGTPTAPSHAPAPAPMAATGLPPLLPAENKAFASNLPTLNVAKAASSGPGKPSGLQYESKLSGLKKPPTLQPSKEACFLEHLHKHQGSVLHPDYKTAFPSFEDALHRLLPYHVYQGALPSPSDYHKVDEEFETVSTQLLKRTQAMLNKYRLLLLEESRRVSPSAEMVMIDRMFIQEEKTTLALDKQLAKEKPDEYVSSSRSLGLPIAASSEGHRLPGHGPLSSSAPGASTQPPPHLPTKLVIRHGGAGGSPSVTWARASSSLSSSSSSSSAASSLDADEDGPMPSRNRPPIKTYEARSRIGLKLKIKQEAGLSKVVHNTALDPVHQPPPPPATLKVAEPPPRPPPPPPPTGQMNGTVDHPPPAAPERKPLGTAPHCPRLPLRKTYRENVGGPGAPEGTPAGRARGGSPAPLPAKVDEATSGLIRELAAVEDELYQRMLKGPPPEPAASAAQGTGDPDWEAPGLPPAKRRKSESPDVDQASFSSDSPQDDTLTEHLQSAIDSILNLQQAPGRTPAPSYPHAASAGTPASPPPLHRPEAYPPSSHNGGLGARTLTR

SEQ ID NO: 20149 - protein, 985 aa, Homo sapiens
MDRRSMGETESGDAFLDLKKPPASKCPHRYTKEELLDIKELPHSKQRPSCLSEKYDSDGVWDPEKWHASLYPASGRSSPVESLKKELDTDRPSLVRRIVDPRERVKEDDLDVVLSPQRRSFGGGCHVTAAVSSRRSGSPLEKDSDGLRLLGGRRIGSGRIISARTFEKDHRLSDKDLRDLRDRDRERDFKDKRFRREFGDSKRVFGERRRNDSYTEEEPEWFSAGPTSQSETIELTGFDDKILEEDHKGRKRTRRRTASVKEGIVECNGGVAEEDEVEVILAQEPAADQEVPRDAVLPEQSPGDFDFNEFFNLDKVPCLASMIEDVLGEGSVSASRFSRWFSNPSRSGSRSSSLGSTPHEELERLAGLEQAILSPGQNSGNYFAPIPLEDHAENKVDILEMLQKAKVDLKPLLSSLSANKEKLKESSHSGVVLSVEEVEAGLKGLKVDQQVKNSTPFMAEHLEETLSAVTNNRQLKKDGDMTAFNKLVSTMKASGTLPSQPKVSRNLESHLMSPAEIPGQPVPKNILQELLGQPVQRPASSNLLSGLMGSLEPTTSLLGQRAPSPPLSQVFQTRAASADYLRPRIPSPIGFTPGPQQLLGDPFQGMRKPMSPITAQMSQLELQQAALEGLALPHDLAVQAANFYQPGFGKPQVDRTRDGFRNRQQRVTKSPAPVHRGNSSSPAPAASITSMLSPSFTPTSVIRKMYESKEKSKEEPASGKAALGDSKEDTQKASEENLLSSSSVPSADRDSSPTTNSKLSALQRSSCSTPLSQANRYTKEQDYRPKATGRKTPTLASPVPTTPFLRPVHQVPLVPHVPMVRPAHQLHPGLVQRMLAQGVHPQHLPSLLQTGVLPPGMDLSHLQGISGPILGQPFYPLPAASHPLLNPRPGTPLHLAMVQQQLQRSVLHPPGSGSHAAAVSVQTTPQNVPSRSGLPHMHSQLEHRPSQRSSSPVGLAKWFGSDVLQQPLPSMPAKVISVDELEYRQ

SEQ ID NO: 20150 - protein, 811 aa, Homo sapiens
MDRRSMGETESGDAFLDLKKPPASKCPHRYTKEELLDIKELPHSKQRPSCLSEKYDSDGVWDPEKWHASLYPASGRSSPVESLKKELDTDRPSLVRRIVGIVECNGGVAEEDEVEVILAQEPAADQEVPRDAVLPEQSPGDFDFNEFFNLDKVPCLASMIEDVLGEGSVSASRFSRWFSNPSRSGSRSSSLGSTPHEELERLAGLEQAILSPGQNSGNYFAPIPLEDHAENKVDILEMLQKAKVDLKPLLSSLSANKEKLKESSHSGVVLSVEEVEAGLKGLKVDQQVKNSTPFMAEHLEETLSAVTNNRQLKKDGDMTAFNKLVSTMKRNLESHLMSPAEIPGQPVPKNILQELLGQPVQRPASSNLLSGLMGSLEPTTSLLGQRAPSPPLSQVFQTRAASADYLRPRIPSPIGFTPGPQQLLGDPFQGMRKPMSPITAQQMSQLELQQAALEGLALPHDLAVQAANFYQPGFGKPQVDRTRDGFRNRQQRVTKSPAPVHRGNSSSPAPAASITSMLSPSFTPTSVIRKMYESKEKSKEEPASGKAALGDSKEDTQKASEENLLSSSSVPSADRDSSPTTNSKLSALQRSSCSTPLSQANRYTKEQDYRPKATGRKTPTLASPVPTTPFLRPVHQVPLVPHVPMVRPAHQLHPGLVQRMLAQGVHPQHLPSLLQTGVLPPGMDLSHLQGISGPILGQPFYPLPAASHPLLNPRPGTPLHLAMVQQQLQRSVLHPPGSGSHAAAVSVQTTPQNVPSRSGLPHMHSQLEHRPSQRSSSPVGLAKWFGSDVLQQPLPSMPAKVISVDELEYRQ

SEQ ID NO: 20151 - protein, 986 aa, Homo sapiens
MDRRSMGETESGDAFLDLKKPPASKCPHRYTKEELLDIKELPHSKQRPSCLSEKYDSDGVWDPEKWHASLYPASGRSSPVESLKKELDTDRPSLVRRIVDPRERVKEDDLDVVLSPQRRSFGGGCHVTAAVSSRRSGSPLEKDSDGLRLLGGRRIGSGRIISARTFEKDHRLSDKDLRDLRDRDRERDFKDKRFRREFGDSKRVFGERRRNDSYTEEEPEWFSAGPTSQSETIELTGFDDKILEEDHKGRKRTRRRTASVKEGIVECNGGVAEEDEVEVILAQEPAADQEVPRDAVLPEQSPGDFDFNEFFNLDKVPCLASMIEDVLGEGSVSASRFSRWFSNPSRSGSRSSSLGSTPHEELERLAGLEQAILSPGQNSGNYFAPIPLEDHAENKVDILEMLQKAKVDLKPLLSSLSANKEKLKESSHSGVVLSVEEVEAGLKGLKVDQQVKNSTPFMAEHLEETLSAVTNNRQLKKDGDMTAFNKLVSTMKASGTLPSQPKVSRNLESHLMSPAEIPGQPVPKNILQELLGQPVQRPASSNLLSGLMGSLEPTTSLLGQRAPSPPLSQVFQTRAASADYLRPRIPSPIGFTPGPQQLLGDPFQGMRKPMSPITAQQMSQLELQQAALEGLALPHDLAVQAANFYQPGFGKPQVDRTRDGFRNRQQRVTKSPAPVHRGNSSSPAPAASITSMLSPSFTPTSVIRKMYESKEKSKEEPASGKAALGDSKEDTQKASEENLLSSSSVPSADRDSSPTTNSKLSALQRSSCSTPLSQANRYTKEQDYRPKATGRKTPTLASPVPTTPFLRPVHQVPLVPHVPMVRPAHQLHPGLVQRMLAQGVHPQHLPSLLQTGVLPPGMDLSHLQGISGPILGQPFYPLPAASHPLLNPRPGTPLHLAMVQQQLQRSVLHPPGSGSHAAAVSVQTTPQNVPSRSGLPHMHSQLEHRPSQRSSSPVGLAKWFGSDVLQQPLPSMPAKVISVDELEYRQ

SEQ ID NO: 20152 - protein, 770 aa, Homo sapiens
MLPGLALLLLAAWTARALEVPTDGNAGLLAEPQIAMFCGRLNMHMNVQNGKWDSDPSGTKTCIDTKEGILQYCQEVYPELQITNVVEANQPVTIQNWCKRGRKQCKTHPHFVIPYRCLVGEFVSDALLVPDKCKFLHQERMDVCETHLHWHTVAKETCSEKSTNLHDYGMLLPCGIDKFRGVEFVCCPLAEESDNVDSADAEEDDSDVWWGGADTDYADGSEDKVVEVAEEEEVAEVEEEEADDDEDDEDGDEVEEEAEEPYEEATERTTSIATTTTTTTESVEEVVREVCSEQAETGPCRAMISRWYFDVTEGKCAPFFYGGCGGNRNNFDTEEYCMAVCGSAMSQSLLKTTQEPLARDPVKLPTTAASTPDAVDKYLETPGDENEHAHFQKAKERLEAKHRERMSQVMREWEEAERQAKNLPKADKKAVIQHFQEKVESLEQEAANERQQLVETHMARVEAMLNDRRRLALENYITALQAVPPRPRHVFNMLKKYVRAEQKDRQHTLKHFEHVRMVDPKKAAQIRSQVMTHLRVIYERMNQSLSLLYNVPAVAEEIQDEVDELLQKEQNYSDDVLANMISEPRISYGNDALMPSLTETKTTVELLPVNGEFSLDDLQPWHSFGADSVPANTENEVEPVDARPAADRGLTTRPGSGLTNIKTEEISEVKMDAEFRHDSGYEVHHQKLVFFAEDVGSNKGAIIGLMVGGVVIATVIVITLVMLKKKQYTSIHHGVVEVDAAVTPEERHLSKMQQNGYENPTYKFFEQMQN

SEQ ID NO: 20153 - protein, 305 aa, Homo sapiens
MLPGLALLLLAAWTARALEVPTDGNAGLLAEPQIAMFCGRLNMHMNVQNGKWDSDPSGTKTCIDTKEGILQYCQEVYPELQITNVVEANQPVTIQNWCKRGRKQCKTHPHFVIPYRCLVGEFVSDALLVPDKCKFLHQERMDVCETHLHWHTVAKETCSEKSTNLHDYGMLLPCGIDKFRGVEFVCCPLAEESDNVDSADAEEDDSDVWWGGADTDYADGSEDKVVEVAEEEEVAEVEEEEADDDEDDEDGDEVEEEAEEPYEEATERTTSIATTTTTTTESVEEVVREKWYKEVHSGQARWLML

SEQ ID NO: 20154 - protein, 677 aa, Homo sapiens
MLPGLALLLLAAWTARALEVPTDGNAGLLAEPQIAMFCGRLNMHMNVQNGKWDSDPSGTKTCIDTKEGILQYCQEVYPELQITNVVEANQPVTIQNWCKRGRKQCKTHPHFVIPYRCLVGEFVSDALLVPDKCKFLHQERMDVCETHLHWHTVAKETCSEKSTNLHDYGMLLPCGIDKFRGVEFVCCPLAEESDNVDSADAEEDDSDVWWGGADTDYADGSEDKVVEVAEEEEVAEVEEEEADDDEDDEDGDEVEEEAEEPYEEATERTTSIATTTTTTTESVEEVVRVPTTAASTPDAVDKYLETPGDENEHAHFQKAKERLEAKHRERMSQVMREWEEAERQAKNLPKADKKAVIQHFQEKVESLEQEAANERQQLVETHMARVEAMLNDRRRLALENYITALQAVPPRPRHVFNMLKKYVRAEQKDRQHTLKHFEHVRMVDPKKAAQIRSQVMTHLRVIYERMNQSLSLLYNVPAVAEEIQDEVDELLQKEQNYSDDVLANMISEPRISYGNDALMPSLTETKTTVELLPVNGEFSLDDLQPWHSFGADSVPANTENEGSGLTNIKTEEISEVKMDAEFRHDSGYEVHHQKLVFFAEDVGSNKGAIIGLMVGGVVIATVIVITLVMLKKKQYTSIHHGVVEVDAAVTPEERHLSKMQQNGYENPTYKFFEQMQN

SEQ ID NO: 20155 - protein, 695 aa, Homo sapiens
MLPGLALLLLAAWTARALEVPTDGNAGLLAEPQIAMFCGRLNMHMNVQNGKWDSDPSGTKTCIDTKEGILQYCQEVYPELQITNVVEANQPVTIQNWCKRGRKQCKTHPHFVIPYRCLVGEFVSDALLVPDKCKFLHQERMDVCETHLHWHTVAKETCSEKSTNLHDYGMLLPCGIDKFRGVEFVCCPLAEESDNVDSADAEEDDSDVWWGGADTDYADGSEDKVVEVAEEEEVAEVEEEEADDDEDDEDGDEVEEEAEEPYEEATERTTSIATTTTTTTESVEEVVRVPTTAASTPDAVDKYLETPGDENEHAHFQKAKERLEAKHRERMSQVMREWEEAERQAKNLPKADKKAVIQHFQEKVESLEQEAANERQQLVETHMARVEAMLNDRRRLALENYITALQAVPPRPRHVFNMLKKYVRAEQKDRQHTLKHFEHVRMVDPKKAAQIRSQVMTHLRVIYERMNQSLSLLYNVPAVAEEIQDEVDELLQKEQNYSDDVLANMISEPRISYGNDALMPSLTETKTTVELLPVNGEFSLDDLQPWHSFGADSVPANTENEVEPVDARPAADRGLTTRPGSGLTNIKTEEISEVKMDAEFRHDSGYEVHHQKLVFFAEDVGSNKGAIIGLMVGGVVIATVIVITLVMLKKKQYTSIHHGVVEVDAAVTPEERHLSKMQQNGYENPTYKFFEQMQN

SEQ ID NO: 20156 - protein, 696 aa, Homo sapiens
MLPGLALLLLAAWTARALEVPTDGNAGLLAEPQIAMFCGRLNMHMNVQNGKWDSDPSGTKTCIDTKEGILQYCQEVYPELQITNVVEANQPVTIQNWCKRGRKQCKTHPHFVIPYRCLVGEFVSDALLVPDKCKFLHQERMDVCETHLHWHTVAKETCSEKSTNLHDYGMLLPCGIDKFRGVEFVCCPLAEESDNVDSADAEEDDSDVWWGGADTDYADGSEDKVVEVAEEEEVAEVEEEEADDDEDDEDGDEVEEEAEEPYEEATERTTSIATTTTTTTESVEEVVRVSQSLLKTTQEPLARDPVKLPTTAASTPDAVDKYLETPGDENEHAHFQKAKERLEAKHRERMSQVMREWEEAERQAKNLPKADKKAVIQHFQEKVESLEQEAANERQQLVETHMARVEAMLNDRRRLALENYITALQAVPPRPRHVFNMLKKYVRAEQKDRQHTLKHFEHVRMVDPKKAAQIRSQVMTHLRVIYERMNQSLSLLYNVPAVAEEIQDEVDELLQKEQNYSDDVLANMISEPRISYGNDALMPSLTETKTTVELLPVNGEFSLDDLQPWHSFGADSVPANTENEGSGLTNIKTEEISEVKMDAEFRHDSGYEVHHQKLVFFAEDVGSNKGAIIGLMVGGVVIATVIVITLVMLKKKQYTSIHHGVVEVDAAVTPEERHLSKMQQNGYENPTYKFFEQMQN

SEQ ID NO: 20157 - protein, 714 aa, Homo sapiens
MLPGLALLLLAAWTARALEVPTDGNAGLLAEPQIAMFCGRLNMHMNVQNGKWDSDPSGTKTCIDTKEGILQYCQEVYPELQITNVVEANQPVTIQNWCKRGRKQCKTHPHFVIPYRCLVGEFVSDALLVPDKCKFLHQERMDVCETHLHWHTVAKETCSEKSTNLHDYGMLLPCGIDKFRGVEFVCCPLAEESDNVDSADAEEDDSDVWWGGADTDYADGSEDKVVEVAEEEEVAEVEEEEADDDEDDEDGDEVEEEAEEPYEEATERTTSIATTTTTTTESVEEVVRVSQSLLKTTQEPLARDPVKLPTTAASTPDAVDKYLETPGDENEHAHFQKAKERLEAKHRERMSQVMREWEEAERQAKNLPKADKKAVIQHFQEKVESLEQEAANERQQLVETHMARVEAMLNDRRRLALENYITALQAVPPRPRHVFNMLKKYVRAEQKDRQHTLKHFEHVRMVDPKKAAQIRSQVMTHLRVIYERMNQSLSLLYNVPAVAEEIQDEVDELLQKEQNYSDDVLANMISEPRISYGNDALMPSLTETKTTVELLPVNGEFSLDDLQPWHSFGADSVPANTENEVEPVDARPAADRGLTTRPGSGLTNIKTEEISEVKMDAEFRHDSGYEVHHQKLVFFAEDVGSNKGAIIGLMVGGVVIATVIVITLVMLKKKQYTSIHHGVVEVDAAVTPEERHLSKMQQNGYENPTYKFFEQMQN

SEQ ID NO: 20158 - protein, 733 aa, Homo sapiens
MLPGLALLLLAAWTARALEVPTDGNAGLLAEPQIAMFCGRLNMHMNVQNGKWDSDPSGTKTCIDTKEGILQYCQEVYPELQITNVVEANQPVTIQNWCKRGRKQCKTHPHFVIPYRCLVGEFVSDALLVPDKCKFLHQERMDVCETHLHWHTVAKETCSEKSTNLHDYGMLLPCGIDKFRGVEFVCCPLAEESDNVDSADAEEDDSDVWWGGADTDYADGSEDKVVEVAEEEEVAEVEEEEADDDEDDEDGDEVEEEAEEPYEEATERTTSIATTTTTTTESVEEVVREVCSEQAETGPCRAMISRWYFDVTEGKCAPFFYGGCGGNRNNFDTEEYCMAVCGSAIPTTAASTPDAVDKYLETPGDENEHAHFQKAKERLEAKHRERMSQVMREWEEAERQAKNLPKADKKAVIQHFQEKVESLEQEAANERQQLVETHMARVEAMLNDRRRLALENYITALQAVPPRPRHVFNMLKKYVRAEQKDRQHTLKHFEHVRMVDPKKAAQIRSQVMTHLRVIYERMNQSLSLLYNVPAVAEEIQDEVDELLQKEQNYSDDVLANMISEPRISYGNDALMPSLTETKTTVELLPVNGEFSLDDLQPWHSFGADSVPANTENEGSGLTNIKTEEISEVKMDAEFRHDSGYEVHHQKLVFFAEDVGSNKGAIIGLMVGGVVIATVIVITLVMLKKKQYTSIHHGVVEVDAAVTPEERHLSKMQQNGYENPTYKFFEQMQN

SEQ ID NO: 20159 - protein, 751 aa, Homo sapiens
MLPGLALLLLAAWTARALEVPTDGNAGLLAEPQIAMFCGRLNMHMNVQNGKWDSDPSGTKTCIDTKEGILQYCQEVYPELQITNVVEANQPVTIQNWCKRGRKQCKTHPHFVIPYRCLVGEFVSDALLVPDKCKFLHQERMDVCETHLHWHTVAKETCSEKSTNLHDYGMLLPCGIDKFRGVEFVCCPLAEESDNVDSADAEEDDSDVWWGGADTDYADGSEDKVVEVAEEEEVAEVEEEEADDDEDDEDGDEVEEEAEEPYEEATERTTSIATTTTTTTESVEEVVREVCSEQAETGPCRAMISRWYFDVTEGKCAPFFYGGCGGNRNNFDTEEYCMAVCGSAIPTTAASTPDAVDKYLETPGDENEHAHFQKAKERLEAKHRERMSQVMREWEEAERQAKNLPKADKKAVIQHFQEKVESLEQEAANERQQLVETHMARVEAMLNDRRRLALENYITALQAVPPRPRHVFNMLKKYVRAEQKDRQHTLKHFEHVRMVDPKKAAQIRSQVMTHLRVIYERMNQSLSLLYNVPAVAEEIQDEVDELLQKEQNYSDDVLANMISEPRISYGNDALMPSLTETKTTVELLPVNGEFSLDDLQPWHSFGADSVPANTENEVEPVDARPAADRGLTTRPGSGLTNIKTEEISEVKMDAEFRHDSGYEVHHQKLVFFAEDVGSNKGAIIGLMVGGVVIATVIVITLVMLKKKQYTSIHHGVVEVDAAVTPEERHLSKMQQNGYENPTYKFFEQMQN

SEQ ID NO: 20160 - protein, 752 aa, Homo sapiens
MLPGLALLLLAAWTARALEVPTDGNAGLLAEPQIAMFCGRLNMHMNVQNGKWDSDPSGTKTCIDTKEGILQYCQEVYPELQITNVVEANQPVTIQNWCKRGRKQCKTHPHFVIPYRCLVGEFVSDALLVPDKCKFLHQERMDVCETHLHWHTVAKETCSEKSTNLHDYGMLLPCGIDKFRGVEFVCCPLAEESDNVDSADAEEDDSDVWWGGADTDYADGSEDKVVEVAEEEEVAEVEEEEADDDEDDEDGDEVEEEAEEPYEEATERTTSIATTTTTTTESVEEVVREVCSEQAETGPCRAMISRWYFDVTEGKCAPFFYGGCGGNRNNFDTEEYCMAVCGSAMSQSLLKTTQEPLARDPVKLPTTAASTPDAVDKYLETPGDENEHAHFQKAKERLEAKHRERMSQVMREWEEAERQAKNLPKADKKAVIQHFQEKVESLEQEAANERQQLVETHMARVEAMLNDRRRLALENYITALQAVPPRPRHVFNMLKKYVRAEQKDRQHTLKHFEHVRMVDPKKAAQIRSQVMTHLRVIYERMNQSLSLLYNVPAVAEEIQDEVDELLQKEQNYSDDVLANMISEPRISYGNDALMPSLTETKTTVELLPVNGEFSLDDLQPWHSFGADSVPANTENEGSGLTNIKTEEISEVKMDAEFRHDSGYEVHHQKLVFFAEDVGSNKGAIIGLMVGGVVIATVIVITLVMLKKKQYTSIHHGVVEVDAAVTPEERHLSKMQQNGYENPTYKFFEQMQN

SEQ ID NO: 20161 - protein, 639 aa, Homo sapiens
MLPGLALLLLAAWTARALEVYPELQITNVVEANQPVTIQNWCKRGRKQCKTHPHFVIPYRCLVGEFVSDALLVPDKCKFLHQERMDVCETHLHWHTVAKETCSEKSTNLHDYGMLLPCGIDKFRGVEFVCCPLAEESDNVDSADAEEDDSDVWWGGADTDYADGSEDKVVEVAEEEEVAEVEEEEADDDEDDEDGDEVEEEAEEPYEEATERTTSIATTTTTTTESVEEVVRVPTTAASTPDAVDKYLETPGDENEHAHFQKAKERLEAKHRERMSQVMREWEEAERQAKNLPKADKKAVIQHFQEKVESLEQEAANERQQLVETHMARVEAMLNDRRRLALENYITALQAVPPRPRHVFNMLKKYVRAEQKDRQHTLKHFEHVRMVDPKKAAQIRSQVMTHLRVIYERMNQSLSLLYNVPAVAEEIQDEVDELLQKEQNYSDDVLANMISEPRISYGNDALMPSLTETKTTVELLPVNGEFSLDDLQPWHSFGADSVPANTENEVEPVDARPAADRGLTTRPGSGLTNIKTEEISEVKMDAEFRHDSGYEVHHQKLVFFAEDVGSNKGAIIGLMVGGVVIATVIVITLVMLKKKQYTSIHHGVVEVDAAVTPEERHLSKMQQNGYENPTYKFFEQMQN

SEQ ID NO: 20162 - protein, 746 aa, Homo sapiens
MDQLEDLLVLFINYVPTDGNAGLLAEPQIAMFCGRLNMHMNVQNGKWDSDPSGTKTCIDTKEGILQYCQEVYPELQITNVVEANQPVTIQNWCKRGRKQCKTHPHFVIPYRCLVGEFVSDALLVPDKCKFLHQERMDVCETHLHWHTVAKETCSEKSTNLHDYGMLLPCGIDKFRGVEFVCCPLAEESDNVDSADAEEDDSDVWWGGADTDYADGSEDKVVEVAEEEEVAEVEEEEADDDEDDEDGDEVEEEAEEPYEEATERTTSIATTTTTTTESVEEVVREVCSEQAETGPCRAMISRWYFDVTEGKCAPFFYGGCGGNRNNFDTEEYCMAVCGSAIPTTAASTPDAVDKYLETPGDENEHAHFQKAKERLEAKHRERMSQVMREWEEAERQAKNLPKADKKAVIQHFQEKVESLEQEAANERQQLVETHMARVEAMLNDRRRLALENYITALQAVPPRPRHVFNMLKKYVRAEQKDRQHTLKHFEHVRMVDPKKAAQIRSQVMTHLRVIYERMNQSLSLLYNVPAVAEEIQDEVDELLQKEQNYSDDVLANMISEPRISYGNDALMPSLTETKTTVELLPVNGEFSLDDLQPWHSFGADSVPANTENEVEPVDARPAADRGLTTRPGSGLTNIKTEEISEVKMDAEFRHDSGYEVHHQKLVFFAEDVGSNKGAIIGLMVGGVVIATVIVITLVMLKKKQYTSIHHGVVEVDAAVTPEERHLSKMQQNGYENPTYKFFEQMQN

SEQ ID NO: 20163 - protein, 422 aa, Homo sapiens
MDVLSPGQGNNTTSPPAPFETGGNTTGISDVTVSYQVITSLLLGTLIFCAVLGNACVVAAIALERSLQNVANYLIGSLAVTDLMVSVLVLPMAALYQVLNKWTLGQVTCDLFIALDVLCCTSSILHLCAIALDRYWAITDPIDYVNKRTPRRAAALISLTWLIGFLISIPPMLGWRTPEDRSDPDACTISKDHGYTIYSTFGAFYIPLLLMLVLYGRIFRAARFRIRKTVKKVEKTGADTRHGASPAPQPKKSVNGESGSRNWRLGVESKAGGALCANGAVRQGDDGAALEVIEVHRVGNSKEHLPLPSEAGPTPCAPASFERKNERNAEAKRKMALARERKTVKTLGIIMGTFILCWLPFFIVALVLPFCESSCHMPTLLGAIINWLGYSNSLLNPVIYAYFNKDFQNAFKKIIKCKFCRQ

SEQ ID NO: 20164 - protein, 362 aa, Homo sapiens
MDAQDCQAAASPEPPGPPARSCVAAWWDMVDRNLRYFPHSCSMLGRKIAALYDSFTSKSLKEHVFLPLIDMLIYFNFFKAPFLVDLKKPELKIPHTVNFYLRVEPGVMLGIWHTVPSCRGEDAKGKDCCWYEAALRDGNPIIVYLHGSAEHRAASHRLKLVKVLSDGGFHVLSVDYRGFGDSTGKPTEEGLTTDAICVYEWTKARSGITPVCLWGHSLGTGVATNAAKVLEEKGCPVDAIVLEAPFTNMWVASINYPLLKIYRNIPGFLRTLMDALRKDKIIFPNDENVKFLSSPLLILHGEDDRTVPLEYGKKLYEIARNAYRNKERVKMVIFPPGFQHNLLCKSPTLLITVRDFLSKQWS

SEQ ID NO: 20165 - protein, 285 aa, Homo sapiens
MDAQDCQAAASPEPPGPPARSCVAAWWDMVDRNLRHTVPSCRGEDAKGKDCCWYEAALRDGNPIIVYLHGSAEHRAASHRLKLVKVLSDGGFHVLSVDYRGFGDSTGKPTEEGLTTDAICVYEWTKARSGITPVCLWGHSLGTGVATNAAKVLEEKGCPVDAIVLEAPFTNMWVASINYPLLKIYRNIPGFLRTLMDALRKDKIIFPNDENVKFLSSPLLILHGEDDRTVPLEYGKKLYEIARNAYRNKERVKMVIFPPGFQHNLLCKSPTLLITVRDFLSKQWS

SEQ ID NO: 20166 - protein, 60 aa, Homo sapiens
MDAQDCQAAASPEPPGPPARSCVAAWWDMVDRNLRQSPISCGFKETRVKDSSHSELLPES

SEQ ID NO: 20167 - protein, 235 aa, Homo sapiens
MDAQDCQAAASPEPPGPPARSCVAAWWDMVDRNLRHTVPSCRGEDAKGKDCCWYEAALRDGNPIIVYLHGSAEHRAASHRLKLVKVLSDGGFHVLSVDYRGFGDSTGKPTEEGLTTDAICVYEWTKARSGITPVCLWGHSLGTGVATNAAKVLEEKGCPVDAIVLEAPFTNMWVASINYPLLKSLALSSRLECSGVISAHCKLRFPGSRHSPASASRVAGTTGARHHAWLIFLCF

SEQ ID NO: 20168 - protein, 258 aa, Homo sapiens
MAAPAPGLISVFSSSQELGAALAQLVAQRAACCLAGARARFALGLSGGSLVSMLARELPAAVAPAGPASLARWTLGFCDERLVPFDHAESTYGLYRTHLLSRLPIPESQVITINPELPVEEAAEDYAKKLRQAFQGDSIPVFDLLILGVGPDGHTCSLFPDHPLLQEREKIVAPISDSPKPPPQRVTLTLPVLNAARTVIFVATGEGKAAVLKRILEDQEENPLPAALVQPHTGKLCWFLDEAAARLLTVPFEKHSTL

SEQ ID NO: 20169 - protein, 961 aa, Homo sapiens
MKKFFDSRREQGGSGLGSGSSGGGGSTSGLGSGYIGRVFGIGRQQVTVDEVLAEGGFAIVFLVRTSNGMKCALKRMFVNNEHDLQVCKREIQIMRDLSGHKNIVGYIDSSINNVSSGDVWEVLILMDFCRGGQVVNLMNQRLQTGFTENEVLQIFCDTCEAVARLHQCKTPIIHRDLKVENILLHDRGHYVLCDFGSATNKFQNPQTEGVNAVEDEIKKYTTLSYRAPEMVNLYSGKIITTKADIWALGCLLYKLCYFTLPFGESQVAICDGNFTIPDNSRYSQDMHCLIRYMLEPDPDKRPDIYQVSYFSFKLLKKECPIPNVQNSPIPAKLPEPVKASEAAAKKTQPKARLTDPIPTTETSIAPRQRPKAGQTQPNPGILPIQPALTPRKRATVQPPPQAAGSSNQPGLLASVPQPKPQAPPSQPLPQTQAKQPQAPPTPQQTPSTQAQGLPAQAQATPQHQQQLFLKQQQQQQQPPPAQQQPAGTFYQQQQAQTQQFQAVHPATQKPAIAQFPVVSQGGSQQQLMQNFYQQQQQQQQQQQQQQLATALHQQQLMTQQAALQQKPTMAAGQQPQPQPAAAPQPAPAQEPAIQAPVRQQPKVQTTPPPAVQGQKVGSLTPPSSPKTQRAGHRRILSDVTHSAVFGVPASKSTQLLQAAAAEASLNKSKSATTTPSGSPRTSQQNVYNPSEGSTWNPFDDDNFSKLTAEELLNKDFAKLGEGKHPEKLGGSAESLIPGFQSTQGDAFATTSFSAGTAEKRKGGQTVDSGLPLLSVSDPFIPLQVPDAPEKLIEGLKSPDTSLLLPDLLPMTDPFGSTSDAVIEKADVAVESLIPGLEPPVPQRLPSQTESVTSNRTDSLTGEDSLLDCSLLSNPTTDLLEEFAPTAISAPVHKAAEDSNLISGFDVPEGSDKVAEDEFDPIPVLITKNPQGGHSRNSSGSSESSLPNLARSLLLVDQLIDL

SEQ ID NO: 20170 - protein, 863 aa, Homo sapiens
MKKFFDSRREQGGSGLGSGSSGGGGSTSGLGSGYIGRVFGIGRQQVTVDEVLAEGGFAIVFLVRTSNGMKCALKRMFVNNEHDLQVCKREIQIMRDLSGHKNIVGYIDSSINNVSSGDVWEVLILMDFCRGGQVVNLMNQRLQTGFTENEVLQIFCDTCEAVARLHQCKTPIIHRDLKVENILLHDRGHYVLCDFGSATNKFQNPQTEGVNAVEDEIKKYTTLSYRAPEMVNLYSGKIITTKADIWALGCLLYKLCYFTLPFGESQVAICDGNFTIPDNSRYSQDMHCLIRYMLEPDPDKRPDIYQVSYFSFKLLKKECPIPNVQNSPIPAKLPEPVKASEAAAKKTQPKARLTDPIPTTETSIAPRQRPKAGQTQPNPGILPIQPALTPRKRATVQPPPQAAGSSNQPGLLASVPQPKPQAPPSQPLPQTQAKQPQAPPTPQQTPSTQAQGLPAQAQATPQHQQQLFLKQQQQQQQPPPAQQQPAGTFYQQQQAQTQQFQAVHPATQKPAIAQFPVVSQGGSQQQLMQNFYQQQQQQQQQQQQQQLATALHQQQLMTQQAALQQKPTMAAGQQPQPQPAAAPQPAPAQEPAIQAPVRQQPKVQTTPPPAVQGQKVGSLTPPSSPKTQRAGHRRILSDVTHSAVFGVPASKSTQLLQAAAAEASLNKSKSATTTPSGSPRTSQQNVYNPSEGSTWNPFDDDNFSKLTAEELLNKDFAKLGEGKHPEKLGGSAESLIPGFQSTQGDAFATTSFSAGTAEKRKGGQTVDSGLPLLSVSDPFIPLQVPDAPEKLIEGLKSPDTSLLLPDLLPMTDPFGSTSDAVIGKVIISVSSVMHDMCACFKNDKYLVNQSLGNSPATPEAKAI

SEQ ID NO: 20171 - protein, 471 aa, Homo sapiens
MDILCEENTSLSSTTNSLMQLNDDTRLYSNDFNSGEANTSDAFNWTVDSENRTNLSCEGCLSPSCLSLLHLQEKNWSALLTAVVIILTIAGNILVIMAVSLEKKLQNATNYFLMSLAIADMLLGFLVMPVSMLTILYGYRWPLPSKLCAVWIYLDVLFSTASIMHLCAISLDRYVAIQNPIHHSRFNSRTKAFLKIIAVWTISVGISMPIPVFGLQDDSKVFKEGSCLLADDNFVLIGSFVSFFIPLTIMVITYFLTIKSLQKEATLCVSDLGTRAKLASFSFLPQSSLSSEKLFQRSIHREPGSYTGRRTMQSISNEQKACKVLGIVFFLFVVMWCPFFITNIMAVICKESCNEDVIGALLNVFVWIGYLSSAVNPLVYTLFNKTYRSAFSRYIQCQYKENKKPLQLILVNTIPALAYKSSQLQMGQKKNSKQDAKTTDNDCSMVALGKQHSEEASKDNSDGVNEKVSCV

SEQ ID NO: 20172 - protein, 387 aa, Homo sapiens
MQFLKSAKQKPNYYHIMLVEDQEEGTLHQFNYCERCSESQNNKCISCVDPEDKWYRWPLPSKLCAVWIYLDVLFSTASIMHLCAISLDRYVAIQNPIHHSRFNSRTKAFLKIIAVWTISVGISMPIPVFGLQDDSKVFKEGSCLLADDNFVLIGSFVSFFIPLTIMVITYFLTIKSLQKEATLCVSDLGTRAKLASFSFLPQSSLSSEKLFQRSIHREPGSYTGRRTMQSISNEQKACKVLGIVFFLFVVMWCPFFITNIMAVICKESCNEDVIGALLNVFVWIGYLSSAVNPLVYTLFNKTYRSAFSRYIQCQYKENKKPLQLILVNTIPALAYKSSQLQMGQKKNSKQDAKTTDNDCSMVALGKQHSEEASKDNSDGVNEKVSCV

SEQ ID NO: 20173 - protein, 481 aa, Homo sapiens
MALSYRVSELQSTIPEHILQSTFVHVISSNWSGLQTESIPEEMKQIVEEQGNKLHWAALLILMVIIPTIGGNTLVILAVSLEKKLQYATNYFLMSLAVADLLVGLFVMPIALLTIMFEAMWPLPLVLCPAWLFLDVLFSTASIMHLCAISVDRYIAIKKPIQANQYNSRATAFIKITVVWLISIGIAIPVPIKGIETDVDNPNNITCVLTKERFGDFMLFGSLAAFFTPLAIMIVTYFLTIHALQKKAYLVKNKPPQRLTWLTVSTVFQRDETPCSSPEKVAMLDGSRKDKALPNSGDETLMRRTSTIGKKSVQTISNEQRASKVLGIVFFLFLLMWCPFFITNITLVLCDSCNQTTLQMLLEIFVWIGYVSSGVNPLVYTLFNKTFRDAFGRYITCNYRATKSVKTLRKRSSKIYFRNPMAENSKFFKKHGIRNGINPAMYQSPMRLRSSTIQSSSIILLDTLLLTENEGDKTEEQVSYV

SEQ ID NO: 20174 - protein, 336 aa, Homo sapiens
MRAPSMDRAAVARVGAVASASVCALVAGVVLAQYIFTLKRKTGRKTKIIEMMPEFQKSSVRIKNPTRVEEIICGLIKGGAAKLQIITDFDMTLSRFSYKGKRCPTCHNIIDNCKLVTDECRKKLLQLKEKYYAIEVDPVLTVEEKYPYMVEWYTKSHGLLVQQALPKAKLKEIVAESDVMLKEGYENFFDKLQQHSIPVFIFSAGIGDVLEEVIRQAGVYHPNVKVVSNFMDFDETGVLKGFKGELIHVFNKHDGALRNTEYFNQLKDNSNIILLGDSQGDLRMADGVANVEHILKIGYLNDRVDELLEKYMDSYDIVLVQDESLEVANSILQKIL

SEQ ID NO: 20175 - protein, 297 aa, Homo sapiens
MTNQESAVHVKMMPEFQKSSVRIKNPTRVEEIICGLIKGGAAKLQIITDFDMTLSRFSYKGKRCPTCHNIIDNCKLVTDECRKKLLQLKEKYYAIEVDPVLTVEEKYPYMVEWYTKSHGLLVQQALPKAKLKEIVAESDVMLKEGYENFFDKLQQHSIPVFIFSAGIGDVLEEVIRQAGVYHPNVKVVSNFMDFDETGVLKGFKGELIHVFNKHDGALRNTEYFNQLKDNSNIILLGDSQGDLRMADGVANVEHILKIGYLNDRVDELLEKYMDSYDIVLVQDESLEVANSILQKIL

SEQ ID NO: 20176 - protein, 286 aa, Homo sapiens
MMPEFQKSSVRIKNPTRVEEIICGLIKGGAAKLQIITDFDMTLSRFSYKGKRCPTCHNIIDNCKLVTDECRKKLLQLKEKYYAIEVDPVLTVEEKYPYMVEWYTKSHGLLVQQALPKAKLKEIVAESDVMLKEGYENFFDKLQQHSIPVFIFSAGIGDVLEEVIRQAGVYHPNVKVVSNFMDFDETGVLKGFKGELIHVFNKHDGALRNTEYFNQLKDNSNIILLGDSQGDLRMADGVANVEHILKIGYLNDRVDELLEKYMDSYDIVLVQDESLEVANSILQKIL

SEQ ID NO: 20177 - protein, 285 aa, Homo sapiens
MPEFQKSSVRIKNPTRVEEIICGLIKGGAAKLQIITDFDMTLSRFSYKGKRCPTCHNIIDNCKLVTDECRKKLLQLKEKYYAIEVDPVLTVEEKYPYMVEWYTKSHGLLVQQALPKAKLKEIVAESDVMLKEGYENFFDKLQQHSIPVFIFSAGIGDVLEEVIRQAGVYHPNVKVVSNFMDFDETGVLKGFKGELIHVFNKHDGALRNTEYFNQLKDNSNIILLGDSQGDLRMADGVANVEHILKIGYLNDRVDELLEKYMDSYDIVLVQDESLEVANSILQKIL

SEQ ID NO: 20178 - protein, 205 aa, Homo sapiens
MAAPGERGRFHGGNLFFLPGGARSEMMDDLATDARGRGAGRRDAAASASTPAQAPTSDSPVAEDASRRRPCRACVDFKTWMRTQQKRDTKFREDCPPDREELGRHSWAVLHTLAAYYPDLPTPEQQQDMAQFIHLFSKFYPCEECAEDLRKRLCRNHPDTRTRACFTQWLCHLHNEVNRKLGKPDFDCSKVDERWRDGWKDGSCD

SEQ ID NO: 20179 - protein, 125 aa, Homo sapiens
MRTQQKRDTKFREDCPPDREELGRHSWAVLHTLAAYYPDLPTPEQQQDMAQFIHLFSKFYPCEECAEDLRKRLCRNHPDTRTRACFTQWLCHLHNEVNRKLGKPDFDCSKVDERWRDGWKDGSCD

SEQ ID NO: 20180 - protein, 210 aa, Homo sapiens
MDNCLAAAALNGVDRRSLQRSARLALEVLERAKRRAVDWHALERPKGCMGVLAREAPHLEKQPAAGPQRVLPGEREERPPTLSASFRTMAEFMDYTSSQCGKYYSSVPEEGGATHVYRYHRGESKLHMCLDIGNGQRKDRKKTSLGPGGSYQISEHAPEASQPAENISKDLYIEVYPGTYSVTVGSNDLTKKTHVVAVDSGQSVDLVFPV

SEQ ID NO: 20181 - protein, 183 aa, Homo sapiens
MDNCLAAAALNGVDRRSLQRSARLALEVLERAKRRAVDWHALERPKGCMGVLAREAPHLEKQPAAGPQRVLPGEREERPPTLSASFRTMAEFMDYTSSQCGKYYSSVPEEGGATHVYRYHRGESKLHMCLDIGNGQAENISKDLYIEVYPGTYSVTVGSNDLTKKTHVVAVDSGQSVDLVFPV

SEQ ID NO: 20182 - protein, 183 aa, Homo sapiens
MDNCLAAAALNGVDRRSLQRSARLALEVLERAKRRAVDWHALERPKGCMGVLAREAPHLEKQPAAGPQRVLPGEKYYSSVPEEGGATHVYRYHRGESKLHMCLDIGNGQRKDRKKTSLGPGGSYQISEHAPEASQPAENISKDLYIEVYPGTYSVTVGSNDLTKKTHVVAVDSGQSVDLVFPV

SEQ ID NO: 20183 - protein, 1089 aa, Homo sapiens
MGNTTTKFRKALINGDENLACQIYENNPQLKESLDPNTSYGEPYQHNTPLHYAARHGMNKILGTFLGRDGNPNKRNVHNETSMHLLCMGPQIMISEGALHPRLARPTEDDFRRADCLQMILKWKGAKLDQGEYERAAIDAVDNKKNTPLHYAAASGMKACVELLVKHGGDLFAENENKDTPCDCAEKQHHKDLALNLESQMVFSRDPEAEEIEAEYAALDKREPYEGLRPQDLRRLKDMLIVETADMLQAPLFTAEALLRAHDWDREKLLEAWMSNPENCCQRSGVQMPTPPPSGYNAWDTLPSPRTPRTTRSSVTSPDEISLSPGDLDTSLCDICMCSISVFEDPVDMPCGHDFCRGCWESFLNLKIQEGEAHNIFCPAYDCFQLVPVDIIESVVSKEMDKRYLQFDIKAFVENNPAIKWCPTPGCDRAVRLTKQGSNTSGSDTLSFPLLRAPAVDCGKGHLFCWECLGEAHEPCDCQTWKNWLQKITEMKPEELVGVSEAYEDAANCLWLLTNSKPCANCKSPIQKNEGCNHMQCAKCKYDFCWICLEEWKKHSSSTGGYYRCTRYEVIQHVEEQSKEMTVEAEKKHKRFQELDRFMHYYTRFKNHEHSYQLEQRLLKTAKEKMEQLSRALKETEGGCPDTTFIEDAVHVLLKTRRILKCSYPYGFFLEPKSTKKEIFELMQTDLEMVTEDLAQKVNRPYLRTPRHKIIKAACLVQQKRQEFLASVARGVAPADSPEAPRRSFAGGTWDWEYLGFASPEEYAEFQYRRRHRQRRRGDVHSLLSNPPDPDEPSESTLDIPEGGSSSRRPGTSVVSSASMSVLHSSSLRDYTPASRSENQDSLQALSSLDEDDPNILLAIQLSLQESGLALDEETRDFLSNEASLGAIGTSLPSRLDSVPRNTDSPRAALSSSELLELGDSLMRLGAENDPFSTDTLSSHPLSEARSDFCPSSSDPDSAGQDPNINDNLLGNIMAWFHDMNPQSIALIPPATTEISADSQLPCIKDGSEGVKDVELVLPEDSMFEDASVSEGRGTQIEENPLEENILAGEAASQAGDSGNEAANRGDGSDVSSQTPQTSSDWLEQVHLV

SEQ ID NO: 20184 - protein, 517 aa, Homo sapiens
MLRAAARFGPRLGRRLLSAAATQAVPAPNQQPEVFCNQIFINNEWHDAVSRKTFPTVNPSTGEVICQVAEGDKEDVDKAVKAARAAFQLGSPWRRMDASHRGRLLNRLADLIERDRTYLAALETLDNGKPYVISYLVDLDMVLKCLRYYAGWADKYHGKTIPIDGDFFSYTRHEPVGVCGQIIPWNFPLLMQAWKLGPALATGNVVVMKVAEQTPLTALYVANLIKEAGFPPGVVNIVPGFGPTAGAAIASHEDVDKVAFTGSTEIGRVIQVAAGSSNLKRVTLELGGKSPNIIMSDADMDWAVEQAHFALFFNQGQCCCAGSRTFVQEDIYDEFVERSVARAKSRVVGNPFDSKTEQGPQVDETQFKKILGYINTGKQEGAKLLCGGGIAADRGYFIQPTVFGDVQDGMTIAKEEIFGPVMQILKFKTIEEVVGRANNSTYGLAAAVFTKDLDKANYLSQALQAGTVWVNCYDVFGAQSPFGGYKMSGSGRELGEYGLQAYTEVKTVTVKVPQKNS

SEQ ID NO: 20185 - protein, 470 aa, Homo sapiens
MLRAAARFGPRLGRRLLSAAATQAVPAPNQQPEVFCNQIFINNEWHDAVSRKTFPTVNPSTGEVICQVAEGDKALETLDNGKPYVISYLVDLDMVLKCLRYYAGWADKYHGKTIPIDGDFFSYTRHEPVGVCGQIIPWNFPLLMQAWKLGPALATGNVVVMKVAEQTPLTALYVANLIKEAGFPPGVVNIVPGFGPTAGAAIASHEDVDKVAFTGSTEIGRVIQVAAGSSNLKRVTLELGGKSPNIIMSDADMDWAVEQAHFALFFNQGQCCCAGSRTFVQEDIYDEFVERSVARAKSRVVGNPFDSKTEQGPQVDETQFKKILGYINTGKQEGAKLLCGGGIAADRGYFIQPTVFGDVQDGMTIAKEEIFGPVMQILKFKTIEEVVGRANNSTYGLAAAVFTKDLDKANYLSQALQAGTVWVNCYDVFGAQSPFGGYKMSGSGRELGEYGLQAYTEVKTVTVKVPQKNS

SEQ ID NO: 20186 - protein, 836 aa, Homo sapiens
MDEADFSEHTTYKQEDLPYDGDLSQIKIGNDYSFTSKKDGLEVLNQIIFIADDPQEKAMHSETCGNTAVTIPLGKITENAANKKDEKEKQCTAALHIPANEGDASKSSISDILLHHLSKEPFLRGQGIDCETLPEISNADSFEEEAIIKSIISCYNKNSWPKEQTPELTDQLNPKRDGENSNKPGSATTTEENTSDLEGPVAAGDSSHQENVNVLTKTKGPGDKQKSYQGQSPQKQQTEKANSGNTFKYGQGQVHYQLPDFSKIAPKVKIPKNKIINKPLAIAKQASFSSKSRDKPTLVQDSLETTPESNCVEKQHQEQKGKITEPSQQIQMEPIVHIHQELLTGIESEASLSKLSPTSQKGTSSSSSYIFQKISQGKQMCQKLKEQTDQLKTKVQEFSKRIKQDSPYHLQDKKLVLEKLQGHLELLEQNFLATKDKHLTLQQQVHKHESTIVGDFDPERKVEGEIFKLEMLLEDVKEKMDESKYTSAPSLPVSSPVTLDDLASTFSSLSNEIPKEHPGHPSGPRGSGGSEVTGTPQGGPQEAPNEELCELAPQTYLNGHYGDAAAQNKPDQVAMRLSSNSGEDPNGTPRRQDCAEMTAPSPSCAFCRRLLEWKQNVEKKGHGRINCGRFSIVLHEKAPHSDSTPNSDTGHSFCSDSGTEMQSNKCQDCGTKIPTSRRACRKEPTKEFHYRYNTPGQNYSNHSKRGAFVQPHSLDESKNSSPSFLKPKRICSQRVNSKSFKGEHEPTPGKKKLQAFMTYSSDPATPSPHFYSCRISGSKSLCDFDSTEEIKSEILNSALDHALRTATILKETTDQMIKTIAEDLAKAQRWRNRLKY

SEQ ID NO: 20187 - protein, 415 aa, Homo sapiens
MDEADFSEHTTYKQEDLPYDGDLSQIKIGNDYSFTSKKDGLEVLNQIIFIADDPQEKAMHSETCGNTAVTIPLGKITENAANKKDEKEKQCTAALHIPANEGDASKSSISDILLHHLSKEPFLRGQGIDCETLPEISNADSFEEEAIIKSIISCYNKNSWPKEQTPELTDQLNPKRDGENSNKPGSATTTEENTSDLEGPVAAGDSSHQENVNVLTKTKGPGDKQKSYQGQSPQKQQTEKANSGNTFKYGQGQVHYQLPDFSKIAPKVKIPKNKIINKPLAIAKQASFSSKSRDKPTLVQDSLETTPESNCVEKQHQEQKGKITEPSQQIQMEPIVHIHQELLTGIESEASLSKLSPTSQKGTSSSSSYIFQKISQGKQMCQKLKEQTDQLKTKVQEFSKRIKQDSPYHLQDKKL

SEQ ID NO: 20188 - protein, 652 aa, Homo sapiens
MDEADFSEHTTYKQEDLPYDGDLSQIKIGNDYSFTSKKDGLEVLNQIIFIADDPQEKAMHSETCGNTAVTIPLGKITENAANKKDEKEKQCTAALHIPANEGDASKSSISDILLHHLSKEPFLRGQGIDCETLPEISNADSFEEEAIIKSIISCYNKNSWPKEQTPELTDQLNPKRDGENSNKPGSATTTEENTSDLEGPVAAGDSSHQENVNVLTKTKGPGDKQKSYQGQSPQKQQTEKANSGNTFKYGQGQVHYQLPDFSKIAPKVKIPKNKIINKPLAIAKQASFSSKSRDKPTLVQDSLETTPESNCVEKQHQEQKGKITEPSQQIQMEPIVHIHQELLTGIESEASLSKLSPTSQKGTSSSSSYIFQKISQGKQMCQKLKEQTDQLKTKVQEFSKRIKQDSPYHLQDKKLVLEKLQGHLELLEQNFLATKDKHLTLQQQVHKHESTIVGDFDPERKVEGEIFKLEMLLEDVKEKMDESKYTSAPSLPVSSPVTLDDLASTFSSLSNEEDPNGTPRRQDCAEMTAPSPSCAFCRRLLEWKQNVEKKGHGRINCGRFSIVLHEKAPHSDSTPNSDTGHSFCSDSGTEMQSNKCQDCGTKIPTSRRACRKEPTKEFHYRYNTPGQNYSNHSKRGAFVQPHSLDESKNSSP

SEQ ID NO: 20189 - protein, 761 aa, Homo sapiens
MDEADFSEHTTYKQEDLPYDGDLSQIKIGNDYSFTSKKDGLEVLNQIIFIADDPQEKAMHSETCGNTAVTIPLGKITENAANKKDEKEKQCTAALHIPANEGDASKSSISDILLHHLSKEPFLRGQGIDCETLPEISNADSFEEEAIIKSIISCYNKNSWPKEQTPELTDQLNPKRDGENSNKPGSATTTEENTSDLEGPVAAGDSSHQENVNVLTKTKGPGDKQKSYQGQSPQKQQTEKANSGNTFKYGQGQVHYQLPDFSKIAPKVKIPKNKIINKPLAIAKQASFSSKSRDKPTLVQDSLETTPESNCVEKQHQEQKGKITEPSQQIQMEPIVHIHQELLTGIESEASLSKLSPTSQKGTSSSSSYIFQKISQGKQMCQKLKEQTDQLKTKVQEFSKRIKQDSPYHLQDKKLVLEKLQGHLELLEQNFLATKDKHLTLQQQVHKHESTIVGDFDPERKVEGEIFKLEMLLEDVKEKMDESKYTSAPSLPVSSPVTLDDLASTFSSLSNEIPKEHPGHPSGPRGSGGSEVTGTPQGGPQEAPNEELCELAPQTYLNGHYGDAAAQNKPDQVAMRLSSNSGEDPNGTPRRQDCAEMTAPSPSCAFCRRLLEWKQNVEKKGHGRINCGRFSIVLHEKAPHSDSTPNSDTGHSFCSDSGTEMQSNKCQDCGTKIPTSRRACRKEPTKEFHYRYNTPGQNYSNHSKRGAFVQPHSLDESKNSSPSLASPFCCPGLVHSPDTSKSSPTSGWQEAELGLENMKSQ

SEQ ID NO: 20190 - protein, 375 aa, Homo sapiens
MSTAGKVIKCKAAVLWELKKPFSIEEVEVAPPKAHEVRIKMVAAGICRSDEHVVSGNLVTPLPVILGHEAAGIVESVGEGVTTVKPGDKVIPLFTPQCGKCRICKNPESNYCLKNDLGNPRGTLQDGTRRFTCSGKPIHHFVGVSTFSQYTVVDENAVAKIDAASPLEKVCLIGCGFSTGYGSAVKVAKVTPGSTCAVFGLGGVGLSVVMGCKAAGAARIIAVDINKDKFAKAKELGATECINPQDYKKPIQEVLKEMTDGGVDFSFEVIGRLDTMMASLLCCHEACGTSVIVGVPPDSQNLSINPMLLLTGRTWKGAIFGGFKSKESVPKLVADFMAKKFSLDALITNILPFEKINEGFDLLRSGKSIRTVLTF

SEQ ID NO: 20191 - protein, 364 aa, Homo sapiens
MPHSYPALSAEQKKELSDIALRIVAPGKGILAADESVGSMAKRLSQIGVENTEENRRLYRQVLFSADDRVKKCIGGVIFFHETLYQKDDNGVPFVRTIQDKGIVVGIKVDKGVVPLAGTDGETTTQGLDGLSERCAQYKKDGADFAKWRCVLKISERTPSALAILENANVLARYASICQQNGIVPIVEPEILPDGDHDLKRCQYVTEKVLAAVYKALSDHHVYLEGTLLKPNMVTPGHACPIKYTPEEIAMATVTALRRTVPPAVPGVTFLSGGQSEEEASFNLNAINRCPLPRPWALTFSYGRALQASALNAWRGQRDNAGAATEEFIKRAEVNGLAAQGKYEGSGEDGGAAAQSLYIANHAY

SEQ ID NO: 20192 - protein, 338 aa, Homo sapiens
MAKWGEGDPRWIVEERADATNVNNWHWTERDASNWSTDKLKTLFLAVQVQNEEGKCEVTEVSKLDGEASINNRKGKLIFFYEWSVKLNWTGTSKSGVQYKGHVEIPNLSDENSVDEVEISVSLAKDEPDTNLVALMKEEGVKLLREAMGIYISTLKTEFTQGMILPTMNGESVDPVGQPALKTEERKAKPAPSKTQARPVGVKIPTCKITLKETFLTSPEELYRVFTTQELVQAFTHAPATLEADRGGKFHMVDGNVSGEFTDLVPEKHIVMKWRFKSWPEGHFATITLTFIDKNGETELCMEGRGIPAPEEERTRQGWQRYYFEGIKQTFGYGARLF

SEQ ID NO: 20193 - protein, 288 aa, Homo sapiens
MAKWGEGDPRWIVEERADATNVNNWHWTERDASNWSTDKLKTLFLAVQVQNEEGKCEVTEVSKLDGEASINNRKGKLIFFYEWSVKLNWTGTSKSGVQYKGHVEIPNLSDENSVDEVEISVSLAKDEPDTNLVALMKEEGVKLLREAMGIYISTLKTEFTQGMILPTMNGESVDPVGQPALKTEERKAKPAPSKTQARPVGVKIPTCKITLKETFLTSPEELYRVFTTQELVQAFTHAPATLEADRGGKFHMVDGNVSGEFTDLVPEKHIVMKWRFKSWPEGSHCHSG

SEQ ID NO: 20194 - protein, 256 aa, Homo sapiens
MASGRPEELWEAVVGAAERFRARTGTELVLLTAAPPPPPRPGPCAYAAHGRGALAEAARRCLHDIALAHRAATAARPPAPPPAPQPPSPTPSPPRPTLAREDNEEDEDEPTETETSGEQLGISDNGGLFVMDEDATLQDLPPFCESDPESTDDGSLSEETPAGPPTCSVPPASALPTQQYAKSLPVSVPVWGFKEKRTEARSSDEENGPPSSPDLDRIAASMRALVLREAEDTQVFGDLPRPRLNTSDFQKLKRKY

SEQ ID NO: 20195 - protein, 126 aa, Homo sapiens
MDEDATLQDLPPFCESDPESTDDGSLSEETPAGPPTCSVPPASALPTQQYAKSLPVSVPVWGFKEKRTEARSSDEENGPPSSPDLDRIAASMRALVLREAEDTQVFGDLPRPRLNTSDFQKLKRKY

SEQ ID NO: 20196 - protein, 276 aa, Homo sapiens
MSFEGGDGAGPAMLATGTARMASGRPEELWEAVVGAAERFRARTGTELVLLTAAPPPPPRPGPCAYAAHGRGALAEAARRCLHDIALAHRAATAARPPAPPPAPQPPSPTPSPPRPTLAREDNEEDEDEPTETETSGEQLGISDNGGLFVMDEDATLQDLPPFCESDPESTDDGSLSEETPAGPPTCSVPPASALPTQQYAKSLPVSVPVWGFKEKRTEARSSDEENGPPSSPDLDRIAASMRALVLREAEDTQVFGDLPRPRLNTSDFQKLKRKY

SEQ ID NO: 20197 - protein, 316 aa, Homo sapiens
MASRLLLNNGAKMPILGLGTWKSPPGQVTEAVKVAIDVGYRHIDCAHVYQNENEVGVAIQEKLREQVVKREELFIVSKLWCTYHEKGLVKGACQKTLSDLKLDYLDLYLIHWPTGFKPGKEFFPLDESGNVVPSDTNILDTWAAMEELVDEGLVKAIGISNFNHLQVEMILNKPGLKYKPAVNQIECHPYLTQEKLIQYCQSKGIVVTAYSPLGSPDRPWAKPEDPSLLEDPRIKAIAAKHNKTTAQVLIRFPMQRNLVVIPKSVTPERIAENFKVFDFELSSQDMTTLLSYNRNWRVCALLSCTSHKDYPFHEEF

SEQ ID NO: 20198 - protein, 310 aa, Homo sapiens
MGKRRCVPPLEPKLAAGCCGVKKPKLSGSGTHSHGNQSTTVPGSSSGPLQNHQHVDSSSGRENVSDLTLGPGNSPITRMNPASGALSPLPRPNGTANTTKNLVVTAEMCCYCFDVLYCHLYGFPQPRLPRFTNDPYPLFVTWKTGRDKRLRGCIGTFSAMNLHSGLREYTLTSALKDSRFPPLTREELPKLFCSVSLLTNFEDASDYLDWEVGVHGIRIEFINEKGVKRTATYLPEVAKEQDWDQIQTIDSLLRKGGFKAPITSEFRKTIKLTRYRSEKVTISYAEYIASRQHCFQNGTLHAPPLYNHYS

SEQ ID NO: 20199 - protein, 522 aa, Homo sapiens
MSLRVHTLPTLLGAVVRPGCRELLCLLMITVTVGPGASGVCPTACICATDIVSCTNKNLSKVPGNLFRLIKRLDLSYNRIGLLDSEWIPVSFAKLNTLILRHNNITSISTGSFSTTPNLKCLDLSSNKLKTVKNAVFQELKVLEVLLLYNNHISYLDPSAFGGLSQLQKLYLSGNFLTQFPMDLYVGRFKLAELMFLDVSYNRIPSMPMHHINLVPGKQLRGIYLHGNPFVCDCSLYSLLVFWYRRHFSSVMDFKNDYTCRLWSDSRHSRQVLLLQDSFMNCSDSIINGSFRALGFIHEAQVGERLMVHCDSKTGNANTDFIWVGPDNRLLEPDKEMENFYVFHNGSLVIESPRFEDAGVYSCIAMNKQRLLNETVDVTINVSNFTVSRSHAHEAFNTAFTTLAACVASIVLVLLYLYLTPCPCKCKTKRQKNMLHQSNAHSSILSPGPASDASADERKAGAGKRVVFLEPLKDTAAGQNGKVRLFPSEAVIAEGILKSTRGKSDSDSVNSVFSDTPFVAST

SEQ ID NO: 20200 - protein, 493 aa, Homo sapiens
MHPHRDPRGLWLLLPSLSLLLFEVARAGRAVVSCPAACLCASNILSCSKQQLPNVPHSLPSYTALLDLSHNNLSRLRAEWTPTRLTQLHSLLLSHNHLNFISSEAFSPVPNLRYLDLSSNQLRTLDEFLFSDLQVLEVLLLYNNHIMAVDRCAFDDMAQLQKLYLSQNQISRFPLELVKEGAKLPKLTLLDLSSNKLKNLPLPDLQKLPAWIKNGLYLHNNPLNCDCELYQLFSHWQYRQLSSVMDFQEDLYCMNSKKLHNVFNLSFLNCGEYKERAWEAHLGDTLIIKCDTKQQGMTKVWVTPSNERVLDEVTNGTVSVSKDGSLLFQQVQVEDGGVYTCYAMGETFNETLSVELKVHNFTLHGHHDTLNTAYTTLVGCILSVVLVLIYLYLTPCRCWCRGVEKPSSHQGDSLSSSMLSTTPNHDPMAGGDKDDGFDRRVAFLEPAGPGQGQNGKLKPGNTLPVPEATGKGQRRMSDPESVSSVFSDTPIVV

SEQ ID NO: 20201 - protein, 1474 aa, Homo sapiens
MARLAAVLWNLCVTAVLVTSATQGLSRAGLPFGLMRRELACEGYPIELRCPGSDVIMVENANYGRTDDKICDADPFQMENVQCYLPDAFKIMSQRCNNRTQCVVVAGSDAFPDPCPGTYKYLEVQYDCVPYKVEQKVFVCPGTLQKVLEPTSTHESEHQSGAWCKDPLQAGDRIYVMPWIPYRTDTLTEYASWEDYVAARHTTTYRLPNRVDGTGFVVYDGAVFYNKERTRNIVKYDLRTRIKSGETVINTANYHDTSPYRWGGKTDIDLAVDENGLWVIYATEGNNGRLVVSQLNPYTLRFEGTWETGYDKRSASNAFMVCGVLYVLRSVYVDDDSEAAGNRVDYAFNTNANREEPVSLTFPNPYQFISSVDYNPRDNQLYVWNNYFVVRYSLEFGPPDPSAGPATSPPLSTTTTARPTPLTSTASPAATTPLRRAPLTTHPVGAINQLGPDLPPATAPVPSTRRPPAPNLHVSPELFCEPREVRRVQWPATQQGMLVERPCPKGTRGIASFQCLPALGLWNPRGPDLSNCTSPWVNQVAQKIKSGENAANIASELARHTRGSIYAGDVSSSVKLMEQLLDILDAQLQALRPIERESAGKNYNKMHKRERTCKDYIKAVVETVDNLLRPEALESWKDMNATEQVHTATMLLDVLEEGAFLLADNVREPARFLAAKENVVLEVTVLNTEGQVQELVFPQEEYPRKNSIQLSAKTIKQNSRNGVVKVVFILYNNLGLFLSTENATVKLAGEAGPGGPGGASLVVNSQVIAASINKESSRVFLMDPVIFTVAHLEDKNHFNANCSFWNYSERSMLGYWSTQGCRLVESNKTHTTCACSHLTNFAVLMAHREIYQGRINELLLSVITWVGIVISLVCLAICISTFCFLRGLQTDRNTIHKNLCINLFLAELLFLVGIDKTQYEIACPIFAGLLHYFFLAAFSWLCLEGVHLYLLLVEVFESEYSRTKYYYLGGYCFPALVVGIAAAIDYRSYGTEKACWLRVDNYFIWSFIGPVSFVIVVNLVFLMVTLHKMIRSSSVLKPDSSRLDNIKSWALGAIALLFLLGLTWAFGLLFINKESVVMAYLFTTFNAFQGVFIFVFHCALQKKVHKEYSKCLRHSYCCIRSPPGGTHGSLKTSAMRSNTRYYTGTQSRIRRMWNDTVRKQTESSFMAGDINSTPTLNRGTMGNHLLTNPVLQPRGGTSPYNTLIAESVGFNPSSPPVFNSPGSYREPKHPLGGREACGMDTLPLNGNFNNSYSLRSGDFPPGDGGPEPPRGRNLADAAAFEKMIISELVHNNLRGSSSAAKGPPPPEPPVPPVPGGGGEEEAGGPGGADRAEIELLYKALEEPLLLPRAQSVLYQSDLDESESCTAEDGATSRPLSSPPGRDSLYASGANLRDSPSYPDSSPEGPSEALPPPPPAPPGPPEIYYTSRPPALVARNPLQGYYQVRRPSHEGYLAAPGLEGPGPDGDGQMQLVTSL

SEQ ID NO: 20202 - protein, 1469 aa, Homo sapiens
MARLAAVLWNLCVTAVLVTSATQGLSRAGLPFGLMRRELACEGYPIELRCPGSDVIMVENANYGRTDDKICDADPFQMENVQCYLPDAFKIMSQRCNNRTQCVVVAGSDAFPDPCPGTYKYLEVQYDCVPYIFVCPGTLQKVLEPTSTHESEHQSGAWCKDPLQAGDRIYVMPWIPYRTDTLTEYASWEDYVAARHTTTYRLPNRVDGTGFVVYDGAVFYNKERTRNIVKYDLRTRIKSGETVINTANYHDTSPYRWGGKTDIDLAVDENGLWVIYATEGNNGRLVVSQLNPYTLRFEGTWETGYDKRSASNAFMVCGVLYVLRSVYVDDDSEAAGNRVDYAFNTNANREEPVSLTFPNPYQFISSVDYNPRDNQLYVWNNYFVVRYSLEFGPPDPSAGPATSPPLSTTTTARPTPLTSTASPAATTPLRRAPLTTHPVGAINQLGPDLPPATAPVPSTRRPPAPNLHVSPELFCEPREVRRVQWPATQQGMLVERPCPKGTRGIASFQCLPALGLWNPRGPDLSNCTSPWVNQVAQKIKSGENAANIASELARHTRGSIYAGDVSSSVKLMEQLLDILDAQLQALRPIERESAGKNYNKMHKRERTCKDYIKAVVETVDNLLRPEALESWKDMNATEQVHTATMLLDVLEEGAFLLADNVREPARFLAAKENVVLEVTVLNTEGQVQELVFPQEEYPRKNSIQLSAKTIKQNSRNGVVKVVFILYNNLGLFLSTENATVKLAGEAGPGGPGGASLVVNSQVIAASINKESSRVFLMDPVIFTVAHLEDKNHFNANCSFWNYSERSMLGYWSTQGCRLVESNKTHTTCACSHLTNFAVLMAHREIYQGRINELLLSVITWVGIVISLVCLAICISTFCFLRGLQTDRNTIHKNLCINLFLAELLFLVGIDKTQYEIACPIFAGLLHYFFLAAFSWLCLEGVHLYLLLVEVFESEYSRTKYYYLGGYCFPALVVGIAAAIDYRSYGTEKACWLRVDNYFIWSFIGPVSFVIVVNLVFLMVTLHKMIRSSSVLKPDSSRLDNIKSWALGAIALLFLLGLTWAFGLLFINKESVVMAYLFTTFNAFQGVFIFVFHCALQKKVHKEYSKCLRHSYCCIRSPPGGTHGSLKTSAMRSNTRYYTGTQSRIRRMWNDTVRKQTESSFMAGDINSTPTLNRGTMGNHLLTNPVLQPRGGTSPYNTLIAESVGFNPSSPPVFNSPGSYREPKHPLGGREACGMDTLPLNGNFNNSYSLRSGDFPPGDGGPEPPRGRNLADAAAFEKMIISELVHNNLRGSSSAAKGPPPPEPPVPPVPGGGGEEEAGGPGGADRAEIELLYKALEEPLLLPRAQSVLYQSDLDESESCTAEDGATSRPLSSPPGRDSLYASGANLRDSPSYPDSSPEGPSEALPPPPPAPPGPPEIYYTSRPPALVARNPLQGYYQVRRPSHEGYLAAPGLEGPGPDGDGQMQLVTSL

SEQ ID NO: 20203 - protein, 2170 aa, Homo sapiens
MKDSEGPQRPPLCFLSTLLSQKVPEKSDAVLRCIISGQPKPEVTWYKNGQAIDGSGIISNYEFFENQYIHVLHLSCCTKNDAAVYQISAKNSFGMICCSASVEVECSSENPQLSPNLEDDRDRGWKHETGTHEEERANQIDEKEHPYKEEESISPGTPRSADSSPSKSNHSLSLQSLGNLDISVSSSENPLGVKGTRHTGEAYDPSNTEEIANGLLFLNSSHIYEKQDRCCHKTVHSMASKFTDGDLNNDGPHDEGLRSSQQNPKVQKYISFSLPLSEATAHIYPGDSAVANKQPSPQLSSEDSDSDYELCPEITLTYTEEFSDDDLEYLECSDVMTDYSNAVWQRNLLGTEHVFLLESDDEEMEFGEHCLGGCEHFLSGMGCGSRVSGDAGPMVATAGFCGHHSQPQEVGVRSSRVSKHGPSSPQTGMTLILGPHQDGTSSVTEQGRYKLPTAPEAAENDYPGIQGETRDSHQAREEFASDNLLNMDESVRETEMKLLSGESENSGMSQCWETAADKRVGGKDLWSKRGSRKSARVRQPGMKGNPKKPNANLRESTTEGTLHLCSAKESAEPPLTQSDKRETSHTTAAATGRSSHADARECAISTQAEQEAKTLQTSTDSVSKEGNTNCKGEGMQVNTLFETSQVPDWSDPPQVQVQETVRETISCSQMPAFSEPAGEESPFTGTTTISFSNLGGVHKENASLAQHSEVKPCTCGPQHEEKQDRDGNIPDNFREDLKYEQSISEANDETMSPGVFSRHLPKDARADFREPVAVSVASPEPTDTALTLENVCDEPRDREAVCAMECFEAGDQGTCFDTIDSLVGRPVDKYSPQEICSVDTELAEGQNKVSDLCSSNDKTLEVFFQTQVSETSVSTCKSSKDGNSVMSPLFTSTFTLNISHTASEGATGENLAKVENSTYPLASTVHAGQEQPSPSNSGGLDETQLLSSENNPLVQFKEGGDKSPSPSAADTTATPASYSSIVSFPWEKPTTLTANNECFQATRETEDTSTVTIATEVHPAKYLAVSIPEDKHAGGTEERFPRASHEKVSQFPSQVQLDHILSGATIKSTKELLCRAPSVPGVPHHVLQLPEGEGFCSNSPLQVDNLSGDKSQTVDRADFRSYEENFQERGSETKQGVQQQSLSQQGSLSAPDFQQSLPTTSAAQEERNLVPTAHSPASSREGAGQRSGWGTRVSVVAETAGEEDSQALSNVPSLSDILLEESKEYRPGNWEAGNKLKIITLEASASEIWPPRQLTNSESKASDGGLIIPDKVWAVPDSLKADAVVPELAPSEIAALAHSPEDAESALADSRESHKGEEPTISVHWRSLSSRGFSQPRLLESSVDPVDEKELSVTDSLSAASETGGKENVNNVSQDQEEKQLKMDHTAFFKKFLTCPKILESSVDPIDEISVIEYTRAGKPEPSETTPQGAREGGQSNDGNMGHEAEIQPAILQVPCLQGTILSENRISRSQEGSMKQEAEQIQPEEAKTAIWQVLQPSEGGERIPSGCSIGQIQESSDGSLGEAEQSKKDKAELISPTSPLSSCLPIMTHASLGVDTHNSTGQIHDVPENDIVEPRKRQYVFPVSQKRGTIENERGKPLPSSPDLTRFPCTSSPEGNVTDFLISHKMEEPKIEVLQIGETKPPSSSSSSAKTLAFISGERELEKAPKLLQDPCQKGTLGCAKKSREREKSLEARAGKSPGTLTAVTGSEEVKRKPEAPGSGHLAEGVKKKILSRVAALRLKLEEKENIRKNSAFLKKMPKLETSLSHTEEKQDPKKPSCKREGRAPVLLKKIQAEMFPEHSGNVKLSCQFAEIHEDSTICWTKDSKSIAQVQRSAGDNSTVSFAIVQASPKDQGLYYCCIKNSYGKVTAEFNLTAEVLKQLSSRQDTKGCEEIEFSQLIFKEDFLHDSYFGGRLRGQIATEELHFGEGVHRKAFRSTVMHGLMPVFKPGHACVLKVHNAIAYGTRNNDELIQRNYKLAAQECYVQNTARYYAKIYAAEAQPLEGFGEVPEIIPIFLIHRPENNIPYATVEEELIGEFVKYSIRDGKEINFLRRESEAGQKCCTFQHWVYQKTSGCLLVTDMQGVGMKLTDVGIATLAKGYKGFKGNCSMTFIDQFKALHQCNKYCKMLGLKSLQNNNQKQKQPSIGKSKVQTNSMTIKKAGPETPGEKKT

SEQ ID NO: 20204 - protein, 485 aa, Homo sapiens
MELEVRRVRQAFLSGRSRPLRFRLQQLEALRRMVQEREKDILTAIAADLCKSEFNVYSQEVITVLGEIDFMLENLPEWVTAKPVKKNVLTMLDEAYIQPQPLGVVLIIGAWNYPFVLTIQPLIGAIAAGNAVIIKPSELSENTAKILAKLLPQYLDQDLYIVINGGVEETTELLKQRFDHIFYTGNTAVGKIVMEAAAKHLTPVTLELGGKSPCYIDKDCDLDIVCRRITWGKYMNCGQTCIAPDYILCEASLQNQIVWKIKETVKEFYGENIKESPDYERIINLRHFKRILSLLEGQKIAFGGETDEATRYIAPTVLTDVDPKTKVMQEEIFGPILPIVPVKNVDEAINFINEREKPLALYVFSHNHKLIKRMIDETSSGGVTGNDVIMHFTLNSFPFGGVGSSGMGAYHGKHSFDTFSHQRPCLLKSLKREGANKLRYPPNSQSKVDWGKFFLLKRFNKEKLGLLLLTFLGIVAAVLVKAEYY

SEQ ID NO: 20205 - protein, 508 aa, Homo sapiens
MELEVRRVRQAFLSGRSRPLRFRLQQLEALRRMVQEREKDILTAIAADLCKSEFNVYSQEVITVLGEIDFMLENLPEWVTAKPVKKNVLTMLDEAYIQPQPLGVVLIIGAWNYPFVLTIQPLIGAIAAGNAVIIKPSELSENTAKILAKLLPQYLDQDLYIVINGGVEETTELLKQRFDHIFYTGNTAVGKIVMEAAAKHLTPVTLELGGKSPCYIDKDCDLDIVCRRITWGKYMNCGQTCIAPDYILCEASLQNQIVWKIKETVKEFYGENIKESPDYERIINLRHFKRILSLLEGQKIAFGGETDEATRYIAPTVLTDVDPKTKVMQEEIFGPILPIVPVKNVDEAINFINEREKPLALYVFSHNHKLIKRMIDETSSGGVTGNDVIMHFTLNSFPFGGVGSSGMGAYHGKHSFDTFSHQRPCLLKSLKREGANKLRYPPNSQSKVDWGKFFLLKRFNKEKLGLLLLTFLGIVAAVLVKKYQAVLRRKALLIFLVVHRLRWSSKQR

SEQ ID NO: 20206 - protein, 953 aa, Homo sapiens
MCNPEEAALLRLEEVFSATLAHVNSLVLQPLLPAAPDPSDPWGRECLRLLQQLHKSSQQLWEVTEESLHSLQERLRYPDSTGLESLLLLRGADRVLQAHIEYIESYTSCMVVQAFQKAAKRRSEYWRGQRKALRQLLSGVSSEGSVGASLGQALHQPLAHHVQQYVLLLLSLGDTIGEHHPTRELVVNAVTLFGNLQSFMKQELDQAVATQALWHTLRGRLRDVLCTPAHRLLQDSQDVPVTVAPLRAERVLLFDDALVLLQGHNVHTFDLKLVWVDPGQDGCTFHLLTPEEEFSFCAKDSQGQAVWQWKVTWAVHQALHGKKDFPVLGAGLEPSQPPDCRCAEYTFQAEGRLCQATYEGEWCRGRPHGKGTLKWPDGRNHVGNFCQGLEHGFGIRLLPQASEDKFDCYKCHWREGSMCGYGICEYSTDEVYKGYFQEGLRHGFGVLESGPQAPQPFRYTGHWERGQRSGYGIEEDGDRGERYIGMWQAGQRHGPGVMVTQAGVCYQGTFQADKTVGPGILLSEDDSLYEGTFTRDLTLMGKGKVTFPNGFTLEGSFGSGAGRGLHTQGVLDTAALPPDPSSTCKRQLGVGAFPVESRWQGVYSPFRDFVCAGCPRDLQEALLGFDVQSSRELRRSQDYLSCERTHPEDSVGSMEDILEELLQHREPKALQLYLRKALSNSLHPLGKLLRTLMLTFQATYAGVGANKHLQELAQEEVKQHAQELWAAYRGLLRVALERKGQALEEDEDTETRDLQVHGLVLPLMLPSFYSELFTLYLLLHEREDSFYSQGIANLSLFPDTQLLEFLDVQKHLWPLKDLTLTSNQRYSLVRDKCFLSATECLQKIMTTVDPREKLEVLERTYGEIEGTVSRVLGREYKLPMDDLLPLLIYVVSRARIQHLGAEIHLIRDMMDPNHTGGLYDFLLTALESCYEHIQKEDMRLHRLPGHWHSRELW

SEQ ID NO: 20207 - protein, 754 aa, Homo sapiens
MKQELDQAVATQALWHTLRGRLRDVLCTPAHRLLQDSQDVPVTVAPLRAERVLLFDDALVLLQGHNVHTFDLKLVWVDPGQDGCTFHLLTPEEEFSFCAKDSQGQAVWQWKVTWAVHQALHGKKDFPVLGAGLEPSQPPDCRCAEYTFQAEGRLCQATYEGEWCRGRPHGKGTLKWPDGRNHVGNFCQGLEHGFGIRLLPQASEDKFDCYKCHWREGSMCGYGICEYSTDEVYKGYFQEGLRHGFGVLESGPQAPQPFRYTGHWERGQRSGYGIEEDGDRGERYIGMWQAGQRHGPGVMVTQAGVCYQGTFQADKTVGPGILLSEDDSLYEGTFTRDLTLMGKGKVTFPNGFTLEGSFGSGAGRGLHTQGVLDTAALPPDPSSTCKRQLGVGAFPVESRWQGVYSPFRDFVCAGCPRDLQEALLGFDVQSSRELRRSQDYLSCERTHPEDSVGSMEDILEELLQHREPKALQLYLRKALSNSLHPLGKLLRTLMLTFQATYAGVGANKHLQELAQEEVKQHAQELWAAYRGLLRVALERKGQALEEDEDTETRDLQVHGLVLPLMLPSFYSELFTLYLLLHEREDSFYSQGIANLSLFPDTQLLEFLDVQKHLWPLKDLTLTSNQRYSLVRDKCFLSATECLQKIMTTVDPREKLEVLERTYGEIEGTVSRVLGREYKLPMDDLLPLLIYVVSRARIQHLGAEIHLIRDMMDPNHTGGLYDFLLTALESCYEHIQKEDMRLHRLPGHWHSRELW

SEQ ID NO: 20208 - protein, 468 aa, Homo sapiens
MWQAGQRHGPGVMVTQAGVCYQGTFQADKTVGPGILLSEDDSLYEGTFTRDLTLMGKGKVTFPNGFTLEGSFGSGAGRGLHTQGVLDTAALPPDPSSTCKRQLGVGAFPVESRWQGVYSPFRDFVCAGCPRDLQEALLGFDVQSSRELRRSQDYLSCERTHPEDSVGSMEDILEELLQHREPKALQLYLRKALSNSLHPLGKLLRTLMLTFQATYAGVGANKHLQELAQEEVKQHAQELWAAYRGLLRVALERKGQALEEDEDTETRDLQVHGLVLPLMLPSFYSELFTLYLLLHEREDSFYSQGIANLSLFPDTQLLEFLDVQKHLWPLKDLTLTSNQRYSLVRDKCFLSATECLQKIMTTVDPREKLEVLERTYGEIEGTVSRVLGREYKLPMDDLLPLLIYVVSRARIQHLGAEIHLIRDMMDPNHTGGLYDFLLTALESCYEHIQKEDMRLHRLPGHWHSRELW

SEQ ID NO: 20209 - protein, 205 aa, Homo sapiens
MLPSFYSELFTLYLLLHEREDSFYSQGIANLSLFPDTQLLEFLDVQKHLWPLKDLTLTSNQRYSLVRDKCFLSATECLQKIMTTVDPREKLEVLERTYGEIEGTVSRVLGREYKLPMDDLLPLLIYVVSRARWGSQGPEKGGSQPGCWGARGRVRTTPQVSSHPGQRSFPSCLSATGLFSLSPSLSWWGGVLQNSAPGSRDPPDP

SEQ ID NO: 20210 - protein, 190 aa, Homo sapiens
MLPSFYSELFTLYLLLHEREDSFYSQGIANLSLFPDTQLLEFLDVQKHLWPLKDLTLTSNQRYSLVRDKCFLSATECLQKIMTTVDPREKLEVLERTYGEIEGTVSRVLGREYKLPMDDLLPLLIYVVSRARIQHLGAEIHLIRDMMDPNHTGGLYDFLLTALESCYEHIQKEDMRLHRLPGHWHSRELW

SEQ ID NO: 20211 - protein, 300 aa, Homo sapiens
MEDILEELLQHREPKALQLYLRKALSNSLHPLGKLLRTLMLTFQATYAGVGANKHLQELAQEEVKQHAQELWAAYRGLLRVALERKGQALEEDEDTETRDLQVHGLVLPLMLPSFYSELFTLYLLLHEREDSFYSQGIANLSLFPDTQLLEFLDVQKHLWPLKDLTLTSNQRYSLVRDKCFLSATECLQKIMTTVDPREKLEVLERTYGEIEGTVSRVLGREYKLPMDDLLPLLIYVVSRARIQHLGAEIHLIRDMMDPNHTGGLYDFLLTALESCYEHIQKEDMRLHRLPGHWHSRELW

SEQ ID NO: 20212 - protein, 343 aa, Homo sapiens
MLATRLSRPLSRLPGKTLSACDRENGARRPLLLGSTSFIPIGRRTYASAAEPVGSKAVLVTGCDSGFGFSLAKHLHSKGFLVFAGCLMKDKGHDGVKELDSLNSDRLRTVQLNVCSSEEVEKVVEIVRSSLKDPEKGMWGLVNNAGISTFGEVEFTSLETYKQVAEVNLWGTVRMTKSFLPLIRRAKGRVVNISSMLGRMANPARSPYCITKFGVEAFSDCLRYEMYPLGVKVSVVEPGNFIAATSLYSPESIQAIAKKMWEELPEVVRKDYGKKYFDEKIAKMETYCSSGSTDTSPVIDAVTHALTATTPYTRYHPMDYYWWLRMQIMTHLPGAISDMIYIR

SEQ ID NO: 20213 - protein, 343 aa, Homo sapiens
MESKYKEILLLTGLDNITDEELDRFKFFLSDEFNIATGKLHTANRIQVATLMIQNAGAVSAVMKTIRIFQKLNYMLLAKRLQEEKEKVDKQYKSVTKPKPLSQAEMSPAASAAIRNDVAKQRAAPKVSPHVKPEQKQMVAQQESIREGFQKRCLPVMVLKAKKPFTFETQEGKQEMFHATVATEKEFFFVKVFNTLLKDKFIPKRIIIIARYYRHSGFLEVNSASRVLDAESDQKVNVPLNIIRKAGETPKINTLQTQPLGTIVNGLFVVQKVTEKKKNILFDLSDNTGKMEVLGVRNEDTMKCKEGDKVRLTFFTLSKNGEKLQLTSGVHSTIKVIKAKKKT

SEQ ID NO: 20214 - protein, 377 aa, Homo sapiens
MFNPHALDSPAVIFDNGSGFCKAGLSGEFGPRHMVSSIVGHLKFQAPSAEANQKKYFVGEEALYKQEALQLHSPFERGLITGWDDVERLWKHLFEWELGVKPSDQPLLATEPSLNPRENREKMAEVMFENFGVPAFYLSDQAVLALYASACVTGLVVDSGDAVTCTVPIFEGYSLPHAVTKLHVAGRDITELLMQLLLASGHTFPCQLDKGLVDDIKKKLCYVALEPEKELSRRPEEVLREYKLPDGNIISLGDPLHQAPEALFVPQQLGSQSPGLSNMVSSSITKCDTDIQKILFGEIVLSGGTTLFHGLDDRLLKELEQLASKDTPIKITAPPDRWFSTWIGASIVTSLSSFKQMWVTAADFKEFGTSVVQRRCF

SEQ ID NO: 20215 - protein, 494 aa, Homo sapiens
MSTGTFVVSQPLNYRGGARVEPADASGTEKAFEPATGRVIATFTCSGEKEVNLAVQNAKAAFKIWSQKSGMERCRILLEAARIIREREDEIATMECINNGKSIFEARLDIDISWQCLEYYAGLAASMAGEHIQLPGGSFGYTRREPLGVCVGIGAWNYPFQIASWKSAPALACGNAMVFKPSPFTPVSALLLAEIYSEAGVPPGLFNVVQGGAATGQFLCQHPDVAKVSFTGSVPTGMKIMEMSAKGIKPVTLELGGKSPLIIFSDCDMNNAVKGALMANFLTQGQVCCNGTRVFVQKEILDKFTEEVVKQTQRIKIGDPLLEDTRMGPLINRPHLERVLGFVKVAKEQGAKVLCGGDIYVPEDPKLKDGYYMRPCVLTNCRDDMTCVKEEIFGPVMSILSFDTEAEVLERANDTTFGLAAGVFTRDIQRAHRVVAELQAGTCFINNYNVSPVELPFGGYKKSGFGRENGRVTIEYYSQLKTVCVEMGDVESAF

SEQ ID NO: 20216 - protein, 424 aa, Homo sapiens
MERCRILLEAARIIREREDEIATMECINNGKSIFEARLDIDISWQCLEYYAGLAASMAGEHIQLPGGSFGYTRREPLGVCVGIGAWNYPFQIASWKSAPALACGNAMVFKPSPFTPVSALLLAEIYSEAGVPPGLFNVVQGGAATGQFLCQHPDVAKVSFTGSVPTGMKIMEMSAKGIKPVTLELGGKSPLIIFSDCDMNNAVKGALMANFLTQGQVCCNGTRVFVQKEILDKFTEEVVKQTQRIKIGDPLLEDTRMGPLINRPHLERVLGFVKVAKEQGAKVLCGGDIYVPEDPKLKDGYYMRPCVLTNCRDDMTCVKEEIFGPVMSILSFDTEAEVLERANDTTFGLAAGVFTRDIQRAHRVVAELQAGTCFINNYNVSPVELPFGGYKKSGFGRENGRVTIEYYSQLKTVCVEMGDVESAF

SEQ ID NO: 20217 - protein, 518 aa, Homo sapiens
MFLRAGLAALSPLLRSLRPSPVAAMSTGTFVVSQPLNYRGGARVEPADASGTEKAFEPATGRVIATFTCSGEKEVNLAVQNAKAAFKIWSQKSGMERCRILLEAARIIREREDEIATMECINNGKSIFEARLDIDISWQCLEYYAGLAASMAGEHIQLPGGSFGYTRREPLGVCVGIGAWNYPFQIASWKSAPALACGNAMVFKPSPFTPVSALLLAEIYSEAGVPPGLFNVVQGGAATGQFLCQHPDVAKVSFTGSVPTGMKIMEMSAKGIKPVTLELGGKSPLIIFSDCDMNNAVKGALMANFLTQGQVCCNGTRVFVQKEILDKFTEEVVKQTQRIKIGDPLLEDTRMGPLINRPHLERVLGFVKVAKEQGAKVLCGGDIYVPEDPKLKDGYYMRPCVLTNCRDDMTCVKEEIFGPVMSILSFDTEAEVLERANDTTFGLAAGVFTRDIQRAHRVVAELQAGTCFINNYNVSPVELPFGGYKKSGFGRENGRVTIEYYSQLKTVCVEMGDVESAF

SEQ ID NO: 20218 - protein, 545 aa, Homo sapiens
MATDAALRRLLRLHRTEIAVAVDSAFPLLHALADHDVVPEDKFQETLHLKEKEGCPQAFHALLSWLLTQDSTAILDFWRVLFKDYNLERYGRLQPILDSFPKDVDLSQPRKGRKPPAVPKALVPPPRLPTKRKASEEARAAAPAALTPRGTASPGSQLKAKPPKKPESSAEQQRLPLGNGIQTMSASVQRAVAMSSGDVPGARGAVEGILIQQVFESGGSKKCIQVGGEFYTPSKFEDSGSGKNKARSSSGPKPLVRAKGAQGAAPGGGEARLGQQGSVPAPLALPSDPQLHQKNEDECAVCRDGGELICCDGCPRAFHLACLSPPLREIPSGTWRCSSCLQATVQEVQPRAEEPRPQEPPVETPLPPGLRSAGEEVRGPPGEPLAGMDTTLVYKHLPAPPSAAPLPGLDSSALHPLLCVGPEGQQNLAPGARCGVCGDGTDVLRCTHCAAAFHWRCHFPAGTSRPGTGLRCRSCSGDVTPAPVEGVLAPSPARLAPGPAKDDTASHEPALHRDDLESLLSEHTFDGILQWAIQSMARPAAPFPS

SEQ ID NO: 20219 - protein, 338 aa, Homo sapiens
MWLVYSSGAPGTQQPARNRVFFPIGMAPGGVCWRPDGWGTGGQGRISGPGSMGAGQRLGSSGTQRCCWGSCFGKEVALRRVLHPSQKNEDECAVCRDGGELICCDGCPRAFHLACLSPPLREIPSGTWRCSSCLQATVQEVQPRAEEPRPQEPPVETPLPPGLRSAGEEVRGPPGEPLAGMDTTLVYKHLPAPPSAAPLPGLDSSALHPLLCVGPEGQQNLAPGARCGVCGDGTDVLRCTHCAAAFHWRCHFPAGTSRPGTGLRCRSCSGDVTPAPVEGVLAPSPARLAPGPAKDDTASHEPALHRDDLESLLSEHTFDGILQWAIQSMARPAAPFPS

SEQ ID NO: 20220 - protein, 244 aa, Homo sapiens
MWLVYSSGAPGTQQPARNRVFFPIGMAPGGVCWRPDGWGTGGQGRISGPGSMGAGQRLGSSGTQRCCWGSCFGKEVALRRVLHPSQKNEDECAVCRDGGELICCDGCPRAFHLACLSPPLREIPSGTWRCSSCLQATVQEVQPRAEEPRPQEPPVETPLPPGLRSAGEEPRCQGWTPRPCTPYCVWVLRVSRTWLLVRVAGCAEMVRTCCGVLTAPLPSTGAATSQPAPPGPGRACAADPAQET

SEQ ID NO: 20221 - protein, 348 aa, Homo sapiens
MWLVYSSGAPGTQQPARNRVFFPIGMAPGGVCWRPDGWGTGGQGRISGPGSMGAGQRLGSSGTQRCCWGSCFGKEVALRRVLHPSPVCMGVSCLCQKNEDECAVCRDGGELICCDGCPRAFHLACLSPPLREIPSGTWRCSSCLQATVQEVQPRAEEPRPQEPPVETPLPPGLRSAGEEVRGPPGEPLAGMDTTLVYKHLPAPPSAAPLPGLDSSALHPLLCVGPEGQQNLAPGARCGVCGDGTDVLRCTHCAAAFHWRCHFPAGTSRPGTGLRCRSCSGDVTPAPVEGVLAPSPARLAPGPAKDDTASHEPALHRDDLESLLSEHTFDGILQWAIQSMARPAAPFPS

SEQ ID NO: 20222 - protein, 411 aa, Homo sapiens
MWIQQLLGLSSMSIRWPGRPLGSHAWILIAMFQLAVDLPACEALGPGPEFWLLPRSPPRPPRLWSFRSGQPARVPAPVWSPRPPRVERIHGQMQMPRARRAHRPRDQAAALVPKAGLAKPPAAAKSSPSLASSSSSSSSAVAGGAPEQQALLRRGKRHLQGDGLSSFDSRGSRPTTETEFIAWGPTGDEEALESNTFPGVYGPTTVSILQTRKTTVAATTTTTTTATPMTLQTKGFTESLDPRRRIPGGVSTTEPSTSPSNNGEVTQPPRILGEASGLAVHQIITITVSLIMVIAALITTLVLKNCCAQSGNTRRNSHQRKTNQQEESCQNLTDFPSARVPSSLDIFTAYNETLQCSHECVRASVPVYTDETLHSTTGEYKSTFNGNRPSSSDRHLIPVAFVSEKWFEISC

SEQ ID NO: 20223 - protein, 505 aa, Homo sapiens
MAESAGASSFFPLVVLLLAGSGGSGPRGVQALLCACTSCLQANYTCETDGACMVSIFNLDGMEHHVRTCIPKVELVPAGKPFYCLSSEDLRNTHCCYTDYCNRIDLRVPSGHLKEPEHPSMWGPVELVGIIAGPVFLLFLIIIIVFLVINYHQRVYHNRQRLDMEDPSCEMCLSKDKTLQDLVYDLSTSGSGSGLPLFVQRTVARTIVLQEIIGKGRFGEVWRGRWRGGDVAVKIFSSREERSWFREAEIYQTVMLRHENILGFIAADNKDNGTWTQLWLVSDYHEHGSLFDYLNRYTVTIEGMIKLALSAASGLAHLHMEIVGTQGKPGIAHRDLKSKNILVKKNGMCAIADLGLAVRHDAVTDTIDIAPNQRVGTKRYMAPEVLDETINMKHFDSFKCADIYALGLVYWEIARRCNSGGVHEEYQLPYYDLVPSDPSIEEMRKVVCDQKLRPNIPNWWQSYEALRVMGKMMRECWYANGAARLTALRIKKTLSQLSVQEDVKI

SEQ ID NO: 20224 - protein, 476 aa, Homo sapiens
MAESAGASSFFPLVVLLLAGSGGSGPRGVQALLCACTSCLQANYTCETDGACMVSIFNLDGMEHHVRTCIPKVELVPAGKPFYCLSSEDLRNTHCCYTDYCNRIDLRVPSGHLKEPEHPSMWGPVELVGIIAGPVFLLFLIIIIVFLVINYHQRVYHNRQRLDMEDPSCEMCLSKDKTLQDLVYDLSTSGSGSGLPLFVQRTVARTIVLQEIIGKGRFGEVWRGRWRGGDVAVKIFSSREERSWFREAEIYQTVMLRHENILGFIAADNKDNGTWTQLWLVSDYHEHGSLFDYLNRYTVTIEGMIKLALSAASGLAHLHMEIVGTQGKPGIAHRDLKSKNILVKKNGMCAIADLGLAVRHDAVTDTIDIAPNQRVGTKRYMAPEVLDETINMKHFDSFKCADIYALGLVYWEIARRCNSGGVHEEYQLPYYDLVPSDPSIEEMRKVVCDQKLRPNIPNWWQSYEVRSWPPAAFPSA

SEQ ID NO: 20225 - protein, 487 aa, Homo sapiens
MAESAGASSFFPLVVLLLAGSGGSGPRGVQALLCACTSCLQANYTCETDGACMVSIFNLDGMEHHVRTCIPKVELVPAGKPFYCLSSEDLRNTHCCYTDYCNRIDLRVPSGHLKEPEHPSMWGPVELVGIIAGPVFLLFLIIIIVFLVINYHQRVYHNRQRLDMEDPSCEMCLSKDKTLQDLVYDLSTSGSGSGLPLFVQRTVARTIVLQEIIGKGRFGEVWRGRWRGGDVAVKIFSSREERSWFREAEIYQTVMLRHENILGFIAADNKDNGTWTQLWLVSDYHEHGSLFDYLNRYTVTIEGMIKLALSAASGLAHLHMEIVGTQGKPGIAHRDLKSKNILVKKNGMCAIADLGLAVRHDAVTDTIDIAPNQRVGTKRYMAPEVLDETINMKHFDSFKCADIYALGLVYWEIARRCNSGGTFLFCLCSYLPFQDAGSPKAVLLPPFFLQPVGCLLPEPESSFKVAIKGVEVAVLRVRLFFRDQFVE

SEQ ID NO: 20226 - protein, 546 aa, Homo sapiens
MAESAGASSFFPLVVLLLAGSGGSGPRGVQALLCACTSCLQANYTCETDGACMVSIFNLDGMEHHVRTCIPKVELVPAGKPFYCLSSEDLRNTHCCYTDYCNRIDLRVPSGHLKEPEHPSMWGPVELVGIIAGPVFLLFLIIIIVFLVINYHQRVYHNRQRLDMEDPSCEMCLSKDKTLQDLVYDLSTSGSGSGLPLFVQRTVARTIVLQEIIGKGRFGEVWRGRWRGGDVAVKIFSSREERSWFREAEIYQTVMLRHENILGFIAADNKADCSFLTLPWEVVMVSAAPKLRSLRLQYKGGRGRARFLFPLNNGTWTQLWLVSDYHEHGSLFDYLNRYTVTIEGMIKLALSAASGLAHLHMEIVGTQGKPGIAHRDLKSKNILVKKNGMCAIADLGLAVRHDAVTDTIDIAPNQRVGTKRYMAPEVLDETINMKHFDSFKCADIYALGLVYWEIARRCNSGGVHEEYQLPYYDLVPSDPSIEEMRKVVCDQKLRPNIPNWWQSYEALRVMGKMMRECWYANGAARLTALRIKKTLSQLSVQEDVKI

SEQ ID NO: 20227 - protein, 453 aa, Homo sapiens
MVSIFNLDGMEHHVRTCIPKVELVPAGKPFYCLSSEDLRNTHCCYTDYCNRIDLRVPSGHLKEPEHPSMWGPVELVGIIAGPVFLLFLIIIIVFLVINYHQRVYHNRQRLDMEDPSCEMCLSKDKTLQDLVYDLSTSGSGSGLPLFVQRTVARTIVLQEIIGKGRFGEVWRGRWRGGDVAVKIFSSREERSWFREAEIYQTVMLRHENILGFIAADNKDNGTWTQLWLVSDYHEHGSLFDYLNRYTVTIEGMIKLALSAASGLAHLHMEIVGTQGKPGIAHRDLKSKNILVKKNGMCAIADLGLAVRHDAVTDTIDIAPNQRVGTKRYMAPEVLDETINMKHFDSFKCADIYALGLVYWEIARRCNSGGVHEEYQLPYYDLVPSDPSIEEMRKVVCDQKLRPNIPNWWQSYEALRVMGKMMRECWYANGAARLTALRIKKTLSQLSVQEDVKI

SEQ ID NO: 20228 - protein, 520 aa, Homo sapiens
MNPDLDTGHNTSAPAHWGELKNANFTGPNQTSSNSTLPQLDITRAISVGLVLGAFILFAIVGNILVILSVACNRHLRTPTNYFIVNLAMADLLLSFTVLPFSAALEVLGYWVLGRIFCDIWAAVDVLCCTASILSLCAISIDRYIGVRYSLQYPTLVTRRKAILALLSVWVLSTVISIGPLLGWKEPAPNDDKECGVTEEPFYALFSSLGSFYIPLAVILVMYCRVYIVAKRTTKNLEAGVMKEMSNSKELTLRIHSKNFHEDTLSSTKAKGHNPRSSIAVKLFKFSREKKAAKTLGIVVGMFILCWLPFFIALPLGSLFSTLKPPDAVFKVVFWLGYFNSCLNPIIYPCSSKEFKRAFVRILGCQCRGRGRRRRRRRRRLGGCAYTYRPWTRGGSLERSQSRKDSLDDSGSCLSGSQRTLPSASPSPGYLGRGAPPPVELCAFPEWKAPGALLSLPAPEPPGRRGRHDSGPLFTFKLLTEPESPGTDGGASNGGCEAAADVANGQPGFKSNMPLAPGQF

SEQ ID NO: 20229 - protein, 323 aa, Homo sapiens
MDSKYQCVKLNDGHFMPVLGFGTYAPAEVPKSKALEATKLAIEAGFRHIDSAHLYNNEEQVGLAIRSKIADGSVKREDIFYTSKLWCNSHRPELVRPALERSLKNLQLDYVDLYLIHFPVSVKPGEEVIPKDENGKILFDTVDLCATWEAVEKCKDAGLAKSIGVSNFNRRQLEMILNKPGLKYKPVCNQVECHPYFNQRKLLDFCKSKDIVLVAYSALGSHREEPWVDPNSPVLLEDPVLCALAKKHKRTPALIALRYQLQRGVVVLAKSYNEQRIRQNVQVFEFQLTSEEMKAIDGLNRNVRYLTLDIFAGPPNYPFSDEY

SEQ ID NO: 20230 - protein, 316 aa, Homo sapiens
MATFVELSTKAKMPIVGLGTWKSPLGKVKEAVKVAIDAGYRHIDCAYVYQNEHEVGEAIQEKIQEKAVKREDLFIVSKLWPTFFERPLVRKAFEKTLKDLKLSYLDVYLIHWPQGFKSGDDLFPKDDKGNAIGGKATFLDAWEAMEELVDEGLVKALGVSNFSHFQIEKLLNKPGLKYKPVTNQVECHPYLTQEKLIQYCHSKGITVTAYSPLGSPDRPWAKPEDPSLLEDPKIKEIAAKHKKTAAQVLIRFHIQRNVIVIPKSVTPARIVENIQVFDFKLSDEEMATILSFNRNWRACNVLQSSHLEDYPFNAEY

SEQ ID NO: 20231 - protein, 787 aa, Homo sapiens
MFRLWLLLAGLCGLLASRPGFQNSLLQIVIPEKIQTNTNDSSEIEYEQISYIIPIDEKLYTVHLKQRYFLADNFMIYLYNQGSMNTYSSDIQTQCYYQGNIEGYPDSMVTLSTCSGLRGILQFENVSYGIEPLESAVEFQHVLYKLKNEDNDIAIFIDRSLKEQPMDDNIFISEKSEPAVPDLFPLYLEMHIVVDKTLYDYWGSDSMIVTNKVIEIVGLANSMFTQFKVTIVLSSLELWSDENKISTVGEADELLQKFLEWKQSYLNLRPHDIAYLLIYMDYPRYLGAVFPGTMCITRYSAGVALYPKEITLEAFAVIVTQMLALSLGISYDDPKKCQCSESTCIMNPEVVQSNGVKTFSSCSLRSFQNFISNVGVKCLQNKPQMQKKSPKPVCGNGRLEGNEICDCGTEAQCGPASCCDFRTCVLKDGAKCYKGLCCKDCQILQSGVECRPKAHPECDIAENCNGTSPECGPDITLINGLSCKNNKFICYDGDCHDLDARCESVFGKGSRNAPFACYEEIQSQSDRFGNCGRDRNNKYVFCGWRNLICGRLVCTYPTRKPFHQENGDVIYAFVRDSVCITVDYKLPRTVPDPLAVKNGSQCDIGRVCVNRECVESRIIKASAHVCSQQCSGHGVCDSRNKCHCSPGYKPPNCQIRSKGFSIFPEEDMGSIMERASGKTENTWLLGFLIALPILIVTTAIVLARKQLKKWFAKEEEFPSSESKSEGSTQTYASQSSSEGSTQTYASQTRSESSSQADTSKSKSEDSAEAYTSRSKSQDSTQTQSSSN

SEQ ID NO: 20232 - protein, 389 aa, Homo sapiens
MGKMAAAVGSVATLATEPGEDAFRKLFRFYRQSRPGTADLEGVIDFSAAHAARGKGPGAQKVIKSQLNVSSVSEQNAYRAGLQPVSKWQAYGLKGYPGFIFIPNPFLPGYQWHWVKQCLKLYSQKPNVCNLDKHMSKEETQDLWEQSKEFLRYKEATKRRPRSLLEKLRWVTVGYHYNWDSKKYSADHYTPFPSDLGFLSEQVAAACGFEDFRAEAGILNYYRLDSTLGIHVDRSELDHSKPLLSFSFGQSAIFLLGGLQRDEAPTAMFMHSGDIMIMSGFSRLLNHAVPRVLPNPEGEGLPHCLEAPLPAVLPRDSMVEPCSMEDWQVCASYLKTARVNMTVRQVLATDQNFPLEPIEDEKRDISTEGFCHLDDQNSEVKRARINPDS

SEQ ID NO: 20233 - protein, 348 aa, Homo sapiens
MERPEAGGINSNECENVSRKKKMSEEFEANTMDSLVDMPFATVDIQDDCGITDEPQINLKRSQENEWVKSDQVKKRKKKRKDYQPNYFLSIPITNKEIIKGIKILQNAIIQQDERLAKAMVSDGSFHITLLVMQLLNEDEVNIGIDALLELKPFIEELLQGKHLTLPFQGIGTFGNQVGFVKLAEGDHVNSLLEIAETANRTFQEKGILVGESRSFKPHLTFMKLSKSPWLRKNGVKKIDPDLYEKFISHRFGEEILYRIDLCSMLKKKQSNGYYHCESSIVIGEKNGGEPDDAELVRLSKRLVENAVLKAVQQYLEETQNKNKPGEGSSVKTEAADQNGNDNENNRK

SEQ ID NO: 20234 - protein, 408 aa, Homo sapiens
MTSKGPEEEHPSVTLFRQYLRIRTVQPKPDYGAAVAFFEETARQLGLGCQKVEVAPGYVVTVLTWPGTNPTLSSILLNSHTDVVPVFKEHWSHDPFEAFKDSEGYIYARGAQDMKCVSIQYLEAVRRLKVEGHRFPRTIHMTFVPDEEVGGHQGMELFVQRPEFHALRAGFALDEGIANPTDAFTVFYSERSPWWVRVTSTGRPGHASRFMEDTAAEKLHKVVNSILAFREKEWQRLQSNPHLKEGSVTSVNLTKLEGGVAYNVIPATMSASFDFRVAPDVDFKAFEEQLQSWCQAAGEGVTLEFAQKWMHPQVTPTDDSNPWWAAFSRVCKDMNLTLEPEIMPAATDNRYIRAVGVPALGFSPMNRTPVLLHDHDERLHEAVFLRGVDIYTRLLPALASVPALPSDS

SEQ ID NO: 20235 - protein, 336 aa, Homo sapiens
MTSKGPEEEHPSVTLFRQYLRIRTVQPKPDYGAAVAFFEETARQLGLGCQKVEVAPGYVVTVLTWPGTNPTLSSILLNSHTDVVPVFKEHWSHDPFEAFKDSEGIANPTDAFTVFYSERSPWWVRVTSTGRPGHASRFMEDTAAEKLHKVVNSILAFREKEWQRLQSNPHLKEGSVTSVNLTKLEGGVAYNVIPATMSASFDFRVAPDVDFKAFEEQLQSWCQAAGEGVTLEFAQKWMHPQVTPTDDSNPWWAAFSRVCKDMNLTLEPEIMPAATDNRYIRAVGVPALGFSPMNRTPVLLHDHDERLHEAVFLRGVDIYTRLLPALASVPALPSDS

SEQ ID NO: 20236 - protein, 343 aa, Homo sapiens
MTSKGPEEEHPSVTLFRQYLRIRTVQPKPDYGAAVAFFEETARQLGLGCQKVEVAPGYVVTVLTWPGTNPTLSSILLNSHTDVVPVFKEHWSHDPFEAFKDSEGYIYARGAQDMKCVSIQYLEAVRRLKVEGHRFPRTIHMTFVPDEEVGGHQGMELFVQRPEFHALRAGFALDEGIANPTDAFTVFYSERSPWWVRVTSTGRPGHASRFMEDTAAEKLAFEEQLQSWCQAAGEGVTLEFAQKWMHPQVTPTDDSNPWWAAFSRVCKDMNLTLEPEIMPAATDNRYIRAVGVPALGFSPMNRTPVLLHDHDERLHEAVFLRGVDIYTRLLPALASVPALPSDS

SEQ ID NO: 20237 - protein, 373 aa, Homo sapiens
MTSKGPEEEHPSVTLFRQYLRIRTVQPKPDYGTNPTLSSILLNSHTDVVPVFKEHWSHDPFEAFKDSEGYIYARGAQDMKCVSIQYLEAVRRLKVEGHRFPRTIHMTFVPDEEVGGHQGMELFVQRPEFHALRAGFALDEGIANPTDAFTVFYSERSPWWVRVTSTGRPGHASRFMEDTAAEKLHKVVNSILAFREKEWQRLQSNPHLKEGSVTSVNLTKLEGGVAYNVIPATMSASFDFRVAPDVDFKAFEEQLQSWCQAAGEGVTLEFAQKWMHPQVTPTDDSNPWWAAFSRVCKDMNLTLEPEIMPAATDNRYIRAVGVPALGFSPMNRTPVLLHDHDERLHEAVFLRGVDIYTRLLPALASVPALPSDS

SEQ ID NO: 20238 - protein, 710 aa, Homo sapiens
MVMACRVVNKRRHMGLQQLSSFAETGRTFLGPLKSSKFIIDEECHESVLISSTVRLLESLDLTSAVGQLLNEAVQAQNNTYRTGISTLLFLVGAWSSAVEECLHLGVPISIIVSVMSEGLNFCSEEVVSLHVPVHNIFDCMDSTKTFSQLETFSVSLCPFLQVPSDTDLIEELHGLKDVASQTLTISNLSGRPLKSYELFKPQTKVEADNNTSRTLKNSLLADTCCRQSILIHSRHFNRTDNTEGVSKPDGFQEHVTATHKTYRCNDLVELAVGLSHGDHSSMKLVEEAVQLQYQNACVQQGNCTKPFMFDISRIFTCCLPGLPETSSCVCPGYITVVSVSNNPVIKELQNQPVRIVLIEGDLTENYRHLGFNKSANIKTVLDSMRLQEDSSEELWANHVLQVLIQFKVNLVLVQGNVSERLIEKCINSKRLVIGSVNGSVMQAFAEAAGAVQVAYITQVNEDCVGDGVCVTFWRSSPLDVVDRNNRIAILLKTEGINLVTAVLTNPVTAQMQIKEDRFWTCAYRLYYALKEEKVFLGGGAVEFLCLSCLHILAEQSLKKENHACSGWLHNTSSWLASSLAIYRPTVLKFLANGWQKYLSTLLYNTANYSSEFEASTYIQHHLQNATDSGSPSSYILNEYSKLNSRIFNSDISNKLEQIPRVYDVVTPKIEAWRRALDLVLLVLQTDSEIITGHGHTQINSQELTGFLFL

SEQ ID NO: 20239 - protein, 191 aa, Homo sapiens
MEAKAAPKPAASGACSVSAEETEKWMEEAMHMAKEALENTEVPVGCLMVYNNEVVGKGRNEVNQTKNATRHAEMVAIDQVLDWCRQSGKSPSEVFEHTVLYVTVEPCIMCAAALRLMKIPLVVYGCQNERFGGCGSVLNIASADLPNTGRPFQCIPGYRAEEAVEMLKTFYKQENPNAPKSKVRKKECQKS

SEQ ID NO: 20240 - protein, 144 aa, Homo sapiens
MVYNNEVVGKGRNEVNQTKNATRHAEMVAIDQVLDWCRQSGKSPSEVFEHTVLYVTVEPCIMCAAALRLMKIPLVVYGCQNERFGGCGSVLNIASADLPNTGRPFQCIPGYRAEEAVEMLKTFYKQENPNAPKSKVRKKECQKS

SEQ ID NO: 20241 - protein, 715 aa, Homo sapiens
MDLILNRMDYLQVGVTSQKTMKLIPASRHRATQKVVIGDHDGVVMCFGMKKGEAAAVFKTLPGPKIARLELGGVINTPQEKIFIAAASEIRGFTKRGKQFLSFETNLTESIKAMHISGSDLFLSASYIYNHYCDCKDQHYYLSGDKINDVICLPVERLSRITPVLACQDRVLRVLQGSDVMYAVEVPGPPTVLALHNGNGGDSGEDLLFGTSDGKLALIQITTSKPVRKWEIQNEKKRGGILCIDSFDIVGDGVKDLLVGRDDGMVEVYSFDNANEPVLRFDQMLSESVTSIQGGCVGKDSYDEIVVSTYSGWVTGLTTEPIHKESGPGEELKINQEMQNKISSLRNELEHLQYKVLQERENYQQSSQSSKAKSAVPSFGINDKFTLNKDDASYSLILEVQTAIDNVLIQSDVPIDLLDVDKNSAVVSFSSCDSESNDNFLLATYRCQADTTRLELKIRSIEGQYGTLQAYVTPRIQPKTCQVRQYHIKPLSLHQRTHFIDHDRPMNTLTLTGQFSFAEVHSWVVFCLPEVPEKPPAGECVTFYFQNTFLDTQLESTYRKGEGVFKSDNISTISILKDVLSKEATKRKINLNISYEINEVSVKHTLKLIHPKLEYQLLLAKKVQLIDALKELQIHEGNTNFLIPEYHCILEEADHLQEEYKKQPAHLERLYGMITDLFIDKFKFKGTNVKTKVPLLLEILDSYDQNALISFFDAA

SEQ ID NO: 20242 - protein, 672 aa, Homo sapiens
MDLILNRMDYLQVGVTSQKTMKLIPASRHRATQKVVIGDHDGVVMCFGMKKGEAAAVFKTLPGPKIARLELGGVINTPQEKIFIAAASEIRGFTKRGKQFLSFETNLTESIKAMHISGSDLFLSASYIYNHYCDCKDQHYYLSGDKINDVICLPVERLSRITPVLACQDRVLRVLQGSDVMYAVEVPGPPTVLALHNGNGGDSGEDLLFGTSDGKLALIQITTSKPVRKWEIQNEKKRGGILCIDSFDIVGDGVKDLLVGRDDGMVEVYSFDNANEPVLRFDQMLSESVTSIQGGCVGKDSYDEIVVSTYSGWVTGLTTEPIHKESGPGEELKINQEMQNKISSLRNELEHLQYKVLQERENYQQSSQSSKAKSAVPSFGINDKFTLNKDDASYSLILEVQTAIDNVLIQSDVPIDLLDVDKNSAVVSFSSCDSESNDNFLLATYRCQADTTRLELKIRSIEGQYGTLQAYVTPRIQPKTCQVRQYHIKPLSLHQRTHFIDHDRPMNTLTLTGQFSFAEVHSWVVFCLPEVPEKPPAGECVTFYFQNTFLDTQLESTYRKGEGVFKSDNISTISILKDVLSKEATKRKINLNISYEINEVSVKHTLKLIHPKLEYQLLLAKKVQLIDALKELQIHEGNTNFLIPEYHCILEEADHLQEEYKKQPAHLERLYG

SEQ ID NO: 20243 - protein, 377 aa, Homo sapiens
MCDDEETTALVCDNGSGLVKAGFAGDDAPRAVFPSIVGRPRHQGVMVGMGQKDSYVGDEAQSKRGILTLKYPIEHGIITNWDDMEKIWHHTFYNELRVAPEEHPTLLTEAPLNPKANREKMTQIMFETFNVPAMYVAIQAVLSLYASGRTTGIVLDSGDGVTHNVPIYEGYALPHAIMRLDLAGRDLTDYLMKILTERGYSFVTTAEREIVRDIKEKLCYVALDFENEMATAASSSSLEKSYELPDGQVITIGNERFRCPETLFQPSFIGMESAGIHETTYNSIMKCDIDIRKDLYANNVLSGGTTMYPGIADRMQKEITALAPSTMKIKIIAPPERKYSVWIGGSILASLSTFQQMWISKQEYDEAGPSIVHRKCF

SEQ ID NO: 20244 - protein, 692 aa, Homo sapiens
MDQGYGGYGAWSAGPANTQGAYGTGVASWQGYENYNYYGAQNTSVTTGATYSYGPASWEAAKANDGGLAAGAPAMHMASYGPEPCTDNSDSLIAKINQRLDMMSKEGGRGGSGGGGEGIQDRESSFRFQPFESYDSRPCLPEHNPYRPSYSYDYEFDLGSDRNGSFGGQYSECRDPARERGSLDGFMRGRGQGRFQDRSNPGTFMRSDPFVPPAASSEPLSTPWNELNYVGGRGLGGPSPSRPPPSLFSQSMAPDYGVMGMQGAGGYDSTMPYGCGRSQPRMRDRDRPKRRGFDRFGPDGTGRKRKQFQLYEEPDTKLARVDSEGDFSENDDAAGDFRSGDEEFKGEDELCDSGRQRGEKEDEDEDVKKRREKQRRRDRTRDRAADRIQFACSVCKFRSFDDEEIQKHLQSKFHKETLRFISTKLPDKTVEFLQEYIVNRNKKIEKRRQELMEKETAKPKPDPFKGIGQEHFFKKIEAAHCLACDMLIPAQPQLLQRHLHSVDHNHNRRLAAEQFKKTSLHVAKSVLNNRHIVKMLEKYLKGEDPFTSETVDPEMEGDDNLGGEDKKETPEEVAADVLAEVITAAVRAVDGEGAPAPESSGEPAEDEGPTDTAEAGSDPQAEQLLEEQVPCGTAHEKGVPKARSEAAEAGNGAETMAAEAESAQTRVAPAPAAADAEVEQTDAESKDAVPTE

SEQ ID NO: 20245 - protein, 473 aa, Homo sapiens
MAQLEGYCFSAALSCTFLVSCLLFSAFSRALREPYMDEIFHLPQAQRYCEGHFSLSQWDPMITTLPGLYLVSVGVVKPAIWIFAWSEHVVCSIGMLRFVNLLFSVGNFYLLYLLFHKVQPRNKAASSIQRVLSTLTLAVFPTLYFFNFLYYTEAGSMFFTLFAYLMCLYGNHKTSAFLGFCGFMFRQTNIIWAVFCAGNVIAQKLTEAWKTELQKKEDRLPPIKGPFAEFRKILQFLLAYSMSFKNLSMLFCLTWPYILLGFLFCAFVVVNGGIVIGDRSSHEACLHFPQLFYFFSFTLFFSFPHLLSPSKIKTFLSLVWKHGILFLVVTLVSVFLVWKFTYAHKYLLADNRHYTFYVWKRVFQRYAILKYLLVPAYIFAGWSIADSLKSKPIFWNLMFFICLFIVIVPQKLLEFRYFILPYVIYRLNITLPPTSRLVCELSCYAIVNFITFYIFLNKTFQWPNSQDIQRFMW

SEQ ID NO: 20246 - protein, 1585 aa, Homo sapiens
MENTGWMGKGHRMTPACPLLLSVILSLRLATAFDPAPSACSALASGVLYGAFSLQDLFPTIASGCSWTLENPDPTKYSLYLRFNRQEQVCAHFAPRLLPLDHYLVNFTCLRPSPEEAVAQAESEVGRPEEEEAEAAAGLELCSGSGPFTFLHFDKNFVQLCLSAEPSEAPRLLAPAALAFRFVEVLLINNNNSSQFTCGVLCRWSEECGRAAGRACGFAQPGCSCPGEAGAGSTTTTSPGPPAAHTLSNALVPGGPAPPAEADLHSGSSNDLFTTEMRYGEEPEEEPKVKTQWPRSADEPGLYMAQTGDPAAEEWSPWSVCSLTCGQGLQVRTRSCVSSPYGTLCSGPLRETRPCNNSATCPVHGVWEEWGSWSLCSRSCGRGSRSRMRTCVPPQHGGKACEGPELQTKLCSMAACPVEGQWLEWGPWGPCSTSCANGTQQRSRKCSVAGPAWATCTGALTDTRECSNLECPATDSKWGPWNAWSLCSKTCDTGWQRRFRMCQATGTQGYPCEGTGEEVKPCSEKRCPAFHEMCRDEYVMLMTWKKAAAGEIIYNKCPPNASGSASRRCLLSAQGVAYWGLPSFARCISHEYRYLYLSLREHLAKGQRMLAGEGMSQVVRSLQELLARRTYYSGDLLFSVDILRNVTDTFKRATYVPSADDVQRFFQVVSFMVDAENKEKWDDAQQVSPGSVHLLRVVEDFIHLVGDALKAFQSSLIVTDNLVISIQREPVSAVSSDITFPMRGRRGMKDWVRHSEDRLFLPKEVLSLSSPGKPATSGAAGSPGRGRGPGTVPPGPGHSHQRLLPADPDESSYFVIGAVLYRTLGLILPPPRPPLAVTSRVMTVTVRPPTQPPAEPLITVELSYIINGTTDPHCASWDYSRADASSGDWDTENCQTLETQAAHTRCQCQHLSTFAVLAQPPKDLTLELAGSPSVPLVIGCAVSCMALLTLLAIYAAFWRFIKSERSIILLNFCLSILASNILILVGQSRVLSKGVCTMTAAFLHFFFLSSFCWVLTEAWQSYLAVIGRMRTRLVRKRFLCLGWGLPALVVAVSVGFTRTKGYGTSSYCWLSLEGGLLYAFVGPAAVIVLVNMLIGIIVFNKLMARDGISDKSKKQRAGSERCPWASLLLPCSACGAVPSPLLSSASARNAMASLWSSCVVLPLLALTWMSAVLAMTDRRSVLFQALFAVFNSAQGFVITAVHCFLRREVQDVVKCQMGVCRADESEDSPDSCKNGQLQILSDFEKDVDLACQTVLFKEVNTCNPSTITGTLSRLSLDEDEEPKSCLVGPEGSLSFSPLPGNILVPMAASPGLGEPPPPQEANPVYMCGEGGLRQLDLTWLRPTEPGSEGDYMVLPRRTLSLQPGGGGGGGEDAPRARPEGTPRRAAKTVAHTEGYPSFLSVDHSGLGLGPAYGSLQNPYGMTFQPPPPTPSARQVPEPGERSRTMPRTVPGSTMKMGSLERKKLRYSDLDFEKVMHTRKRHSELYHELNQKFHTFDRYRSQSTAKREKRWSVSSGGAAERSVCTDKPSPGERPSLSQHRRHQSWSTFKSMTLGSLPPKPRERLTLHRAAAWEPTEPPDGDFQTEV

SEQ ID NO: 20247 - protein, 1584 aa, Homo sapiens
MENTGWMGKGHRMTPACPLLLSVILSLRLATAFDPAPSACSALASGVLYGAFSLQDLFPTIASGCSWTLENPDPTKYSLYLRFNRQEQVCAHFAPRLLPLDHYLVNFTCLRPSPEEAVAQAESEVGRPEEEEAEAAAGLELCSGSGPFTFLHFDKNFVQLCLSAEPSEAPRLLAPAALAFRFVEVLLINNNNSSQFTCGVLCRWSEECGRAAGRACGFAQPGCSCPGEAGAGSTTTTSPGPPAAHTLSNALVPGGPAPPAEADLHSGSSNDLFTTEMRYGEEPEEEPKVKTQWPRSADEPGLYMAQTGDPAAEEWSPWSVCSLTCGQGLQVRTRSCVSSPYGTLCSGPLRETRPCNNSATCPVHGVWEEWGSWSLCSRSCGRGSRSRMRTCVPPQHGGKACEGPELQTKLCSMAACPVEGQWLEWGPWGPCSTSCANGTQQRSRKCSVAGPAWATCTGALTDTRECSNLECPATDSKWGPWNAWSLCSKTCDTGWQRRFRMCQATGTQGYPCEGTGEEVKPCSEKRCPAFHEMCRDEYVMLMTWKKAAAGEIIYNKCPPNASGSASRRCLLSAQGVAYWGLPSFARCISHEYRYLYLSLREHLAKGQRMLAGEGMSQVVRSLQELLARRTYYSGDLLFSVDILRNVTDTFKRATYVPSADDVQRFFQVVSFMVDAENKEKWDDAQQVSPGSVHLLRVVEDFIHLVGDALKAFQSSLIVTDNLVISIQREPVSAVSSDITFPMRGRRGMKDWVRHSEDRLFLPKEVLSLSSPGKPATSGAAGSPGRGRGPGTVPPGPGHSHQRLLPADPDESSYFVIGAVLYRTLGLILPPPRPPLAVTSRVMTVTVRPPTQPPAEPLITVELSYIINGTTDPHCASWDYSRADASSGDWDTENCQTLETQAAHTRCQCQHLSTFAVLAQPPKDLTLELAGSPSVPLVIGCAVSCMALLTLLAIYAAFWRFIKSERSIILLNFCLSILASNILILVGQSRVLSKGVCTMTAAFLHFFFLSSFCWVLTEAWQSYLAVIGRMRTRLVRKRFLCLGWGLPALVVAVSVGFTRTKGYGTSSYCWLSLEGGLLYAFVGPAAVIVLVNMLIGIIVFNKLMARDGISDKSKKQRAGSERCPWASLLLPCSACGAVPSPLLSSASARNAMASLWSSCVVLPLLALTWMSAVLAMTDRRSVLFQALFAVFNSAQGFVITAVHCFLRREVQDVVKCQMGVCRADESEDSPDSCKNGQLQILSDFEKDVDLACQTVLFKEVNTCNPSTITGTLSRLSLDEDEEPKSCLVGPEGSLSFSPLPGNILVPMAASPGLGEPPPPQEANPVYMCGEGGLRQLDLTWLRPTEPGSEGDYMVLPRRTLSLQPGGGGGGGEDAPRARPEGTPRRAAKTVAHTEGYPSFLSVDHSGLGLGPAYGSLQNPYGMTFQPPPPTPSARQVPEPGERSRTMPRTVPGSTMKMGSLERKKLRYSDLDFEVMHTRKRHSELYHELNQKFHTFDRYRSQSTAKREKRWSVSSGGAAERSVCTDKPSPGERPSLSQHRRHQSWSTFKSMTLGSLPPKPRERLTLHRAAAWEPTEPPDGDFQTEV

SEQ ID NO: 20248 - protein, 1573 aa, Homo sapiens
MTPACPLLLSVILSLRLATAFDPAPSACSALASGVLYGAFSLQDLFPTIASGCSWTLENPDPTKYSLYLRFNRQEQVCAHFAPRLLPLDHYLVNFTCLRPSPEEAVAQAESEVGRPEEEEAEAAAGLELCSGSGPFTFLHFDKNFVQLCLSAEPSEAPRLLAPAALAFRFVEVLLINNNNSSQFTCGVLCRWSEECGRAAGRACGFAQPGCSCPGEAGAGSTTTTSPGPPAAHTLSNALVPGGPAPPAEADLHSGSSNDLFTTEMRYGEEPEEEPKVKTQWPRSADEPGLYMAQTGDPAAEEWSPWSVCSLTCGQGLQVRTRSCVSSPYGTLCSGPLRETRPCNNSATCPVHGVWEEWGSWSLCSRSCGRGSRSRMRTCVPPQHGGKACEGPELQTKLCSMAACPVEGQWLEWGPWGPCSTSCANGTQQRSRKCSVAGPAWATCTGALTDTRECSNLECPATDSKWGPWNAWSLCSKTCDTGWQRRFRMCQATGTQGYPCEGTGEEVKPCSEKRCPAFHEMCRDEYVMLMTWKKAAAGEIIYNKCPPNASGSASRRCLLSAQGVAYWGLPSFARCISHEYRYLYLSLREHLAKGQRMLAGEGMSQVVRSLQELLARRTYYSGDLLFSVDILRNVTDTFKRATYVPSADDVQRFFQVVSFMVDAENKEKWDDAQQVSPGSVHLLRVVEDFIHLVGDALKAFQSSLIVTDNLVISIQREPVSAVSSDITFPMRGRRGMKDWVRHSEDRLFLPKEVLSLSSPGKPATSGAAGSPGRGRGPGTVPPGPGHSHQRLLPADPDESSYFVIGAVLYRTLGLILPPPRPPLAVTSRVMTVTVRPPTQPPAEPLITVELSYIINGTTDPHCASWDYSRADASSGDWDTENCQTLETQAAHTRCQCQHLSTFAVLAQPPKDLTLELAGSPSVPLVIGCAVSCMALLTLLAIYAAFWRFIKSERSIILLNFCLSILASNILILVGQSRVLSKGVCTMTAAFLHFFFLSSFCWVLTEAWQSYLAVIGRMRTRLVRKRFLCLGWGLPALVVAVSVGFTRTKGYGTSSYCWLSLEGGLLYAFVGPAAVIVLVNMLIGIIVFNKLMARDGISDKSKKQRAGSERCPWASLLLPCSACGAVPSPLLSSASARNAMASLWSSCVVLPLLALTWMSAVLAMTDRRSVLFQALFAVFNSAQGFVITAVHCFLRREVQDVVKCQMGVCRADESEDSPDSCKNGQLQILSDFEKDVDLACQTVLFKEVNTCNPSTITGTLSRLSLDEDEEPKSCLVGPEGSLSFSPLPGNILVPMAASPGLGEPPPPQEANPVYMCGEGGLRQLDLTWLRPTEPGSEGDYMVLPRRTLSLQPGGGGGGGEDAPRARPEGTPRRAAKTVAHTEGYPSFLSVDHSGLGLGPAYGSLQNPYGMTFQPPPPTPSARQVPEPGERSRTMPRTVPGSTMKMGSLERKKLRYSDLDFEKVMHTRKRHSELYHELNQKFHTFDRYRSQSTAKREKRWSVSSGGAAERSVCTDKPSPGERPSLSQHRRHQSWSTFKSMTLGSLPPKPRERLTLHRAAAWEPTEPPDGDFQTEV

SEQ ID NO: 20249 - protein, 1551 aa, Homo sapiens
MENTGWMGKGHRMTPACPLLLSVILSLRLATAFDPAPSACSALASGVLYGAFSLQDLFPTIASGCSWTLENPDPTKYSLYLRFNRQEQVCAHFAPRLLPLDHYLVNFTCLRPSPEEAVAQAESEVGRPEEEEAEAAAGLELCSGSGPFTFLHFDKNFVQLCLSAEPSEAPRLLAPAALAFRFVEVLLINNNNSSQFTCGVLCRWSEECGRAAGRACGFAQPGCSCPGEAGAGSTTTTSPGPPAAHTLSNALVPGGPAPPAEADLHSGSSNDLFTTEMRYGEEPEEEPKVKTQWPRSADEPGLYMAQTGDPAAEEWSPWSVCSLTCGQGLQVRTRSCVSSPYGTLCSGPLRETRPCNNSATCPVHGVWEEWGSWSLCSRSCGRGSRSRMRTCVPPQHGGKACEGPELQTKLCSMAACPVEGQWLEWGPWGPCSTSCANGTQQRSRKCSVAGPAWATCTGALTDTRECSNLECPATDSKWGPWNAWSLCSKTCDTGWQRRFRMCQATGTQGYPCEGTGEEVKPCSEKRCPAFHEMCRDEYVMLMTWKKAAAGEIIYNKCPPNASGSASRRCLLSAQGVAYWGLPSFARCISHEYRYLYLSLREHLAKGQRMLAGEGMSQVVRSLQELLARRTYYSGDLLFSVDILRNVTDTFKRATYVPSADDVQRFFQVVSFMVDAENKEKWDDAQQVSPGSVHLLRVVEDFIHLVGDALKAFQSSLIVTDNLVISIQREPVSAVSSDITFPMRGRRGMKDWVRHSEDRLFLPKEVLSLSSPGKPATSGAAGSPGRGRGPGTVPPGPGHSHQRLLPADPDESSYFVIGAVLYRTLGLILPPPRPPLAVTSRVMTVTVRPPTQPPAEPLITVELSYIINGTTDPHCASWDYSRADASSGDWDTENCQTLETQAAHTRCQCQHLSTFAVLAQPPKDLTLELAGSPSVPLVIGCAVSCMALLTLLAIYAAFWRFIKSERSIILLNFCLSILASNILILVGQSRVLSKGVCTMTAAFLHFFFLSSFCWVLTEAWQSYLAVIGRMRTRLVRKRFLCLGWGLPALVVAVSVGFTRTKGYGTSSYCWLSLEGGLLYAFVGPAAVIVLVNMLIGIIVFNKLMARDGISDKSKKQRAGASLWSSCVVLPLLALTWMSAVLAMTDRRSVLFQALFAVFNSAQGFVITAVHCFLRREVQDVVKCQMGVCRADESEDSPDSCKNGQLQILSDFEKDVDLACQTVLFKEVNTCNPSTITGTLSRLSLDEDEEPKSCLVGPEGSLSFSPLPGNILVPMAASPGLGEPPPPQEANPVYMCGEGGLRQLDLTWLRPTEPGSEGDYMVLPRRTLSLQPGGGGGGGEDAPRARPEGTPRRAAKTVAHTEGYPSFLSVDHSGLGLGPAYGSLQNPYGMTFQPPPPTPSARQVPEPGERSRTMPRTVPGSTMKMGSLERKKLRYSDLDFEVMHTRKRHSELYHELNQKFHTFDRYRSQSTAKREKRWSVSSGGAAERSVCTDKPSPGERPSLSQHRRHQSWSTFKSMTLGSLPPKPRERLTLHRAAAWEPTEPPDGDFQTEV

SEQ ID NO: 20250 - protein, 1137 aa, Homo sapiens
MKCVFVTVGTTSFDDLIACVSAPDSLQKIESLGYNRLILQIGRGTVVPEPFSTESFTLDVYRYKDSLKEDIQKADLVISHAGAGSCLETLEKGKPLVVVINEKLMNNHQLELAKQLHKEGHLFYCTCRVLTCPGQAKSIASAPGKCQDSAALTSTAFSGLDFGLLSGYLHKQALVTATHPTCTLLFPSCHAFFPLPLTPTLYKMHKGWKNYCSQKSLNEASMDEYLGSLGLFRKLTAKDASCLFRAISEQLFCSQVHHLEIRKACVSYMRENQQTFESYVEGSFEKYLERLGDPKESAGQLEIRALSLIYNRDFILYRFPGKPPTYVTDNGYEDKILLCYSSSGHYDSVYSKQFQSSAAVCQAVLYEILYKDVFVVDEEELKTAIKLFRSGSKKNRNNAVTGSEDAHTDYKSSNQNRMEEWGACYNAENIPEGYNKGTEETKSPENPSKMPFPYKVLKALDPEIYRNVEFDVWLDSRKELQKSDYMEYAGRQYYLGDKCQVCLESEGRYYNAHIQEVGNENNSVTVFIEELAEKHVVPLANLKPVTQVMSVPAWNAMPSRKGRGYQKMPGGYVPEIVISEMDIKQQKKMFKKIRGKEVYMTMAYGKGDPLLPPRLQHSMHYGHDPPMHYSQTAGNVMSNEHFHPQHPSPRQGRGYGMPRNSSRFINRHNMPGPKVDFYPGPGKRCCQSYDNFSYRSRSFRRSHRQMSCVNKESQYGFTPGNGQMPRGLEETITFYEVEEGDETAYPTLPNHGGPSTMVPATSGYCVGRRGHSSGKQTLNLEEGNGQSENGRYHEEYLYRAEPDYETSGVYSTTASTANLSLQDRKSCSMSPQDTVTSYNYPQKMMGNIAAVAASCANNVPAPVLSNGAAANQAISTTSVSSQNAIQPLFVSPPTHGRPVIASPSYPCHSAIPHAGASLPPPPPPPPPPPPPPPPPPPPPPPPPPPALDVGETSNLQPPPPLPPPPYSCDPSGSDLPQDTKVLQYYFNLGLQCYYHSYWHSMVYVPQMQQQLHVENYPVYTEPPLVDQTVPQCYSEVRREDGIQAEASANDTFPNADSSSVPHGAVYYPVMSDPYGQPPLPGFDSCLPVVPDYSCVPPWHPVGTAYGGSSQIHGAINPGPIGCIAPSPPASHYVPQGM

SEQ ID NO: 20251 - protein, 165 aa, Homo sapiens
MKCVFVTVGTTSFDDLIACVSAPDSLQKIESLGYNRLILQIGRGTVVPEPFSTESFTLDVYRYKDSLKEDIQKADLVISHAGAGSCLETLEKGKPLVVVINEKLMNNHQLELAKQLHKEGHLFYCTCSTLPGLLQSMDLSTLKCYPPGQPEKFSAFLDKVVGLQK

SEQ ID NO: 20252 - protein, 1059 aa, Homo sapiens
MFTGAGSCLETLEKGKPLVVVINEKLMNNHQLELAKQLHKEGHLFYCTCRVLTCPGQAKSIASAPGKCQDSAALTSTAFSGLDFGLLSGYLHKQALVTATHPTCTLLFPSCHAFFPLPLTPTLYKMHKGWKNYCSQKSLNEASMDEYLGSLGLFRKLTAKDASCLFRAISEQLFCSQVHHLEIRKACVSYMRENQQTFESYVEGSFEKYLERLGDPKESAGQLEIRALSLIYNRDFILYRFPGKPPTYVTDNGYEDKILLCYSSSGHYDSVYSKQFQSSAAVCQAVLYEILYKDVFVVDEEELKTAIKLFRSGSKKNRNNAVTGSEDAHTDYKSSNQNRMEEWGACYNAENIPEGYNKGTEETKSPENPSKMPFPYKVLKALDPEIYRNVEFDVWLDSRKELQKSDYMEYAGRQYYLGDKCQVCLESEGRYYNAHIQEVGNENNSVTVFIEELAEKHVVPLANLKPVTQVMSVPAWNAMPSRKGRGYQKMPGGYVPEIVISEMDIKQQKKMFKKIRGKEVYMTMAYGKGDPLLPPRLQHSMHYGHDPPMHYSQTAGNVMSNEHFHPQHPSPRQGRGYGMPRNSSRFINRHNMPGPKVDFYPGPGKRCCQSYDNFSYRSRSFRRSHRQMSCVNKESQYGFTPGNGQMPRGLEETITFYEVEEGDETAYPTLPNHGGPSTMVPATSGYCVGRRGHSSGKQTLNLEEGNGQSENGRYHEEYLYRAEPDYETSGVYSTTASTANLSLQDRKSCSMSPQDTVTSYNYPQKMMGNIAAVAASCANNVPAPVLSNGAAANQAISTTSVSSQNAIQPLFVSPPTHGRPVIASPSYPCHSAIPHAGASLPPPPPPPPPPPPPPPPPPPPPPPPPPPALDVGETSNLQPPPPLPPPPYSCDPSGSDLPQDTKVLQYYFNLGLQCYYHSYWHSMVYVPQMQQQLHVENYPVYTEPPLVDQTVPQCYSEVRREDGIQAEASANDTFPNADSSSVPHGAVYYPVMSDPYGQPPLPGFDSCLPVVPDYSCVPPWHPVGTAYGGSSQIHGAINPGPIGCIAPSPPASHYVPQGM

SEQ ID NO: 20253 - protein, 954 aa, Homo sapiens
MNNHQLELAKQLHKEGHLFYCTCRVLTCPGQAKSIASAPGKCQDSAALTSTAFSGLDFGLLSGYLHKQALVTATHPTCTLLFPSCHAFFPLPLTPTLYKMHKGWKNYCSQKSLNEASMDEYLGSLGLFRKLTAKDASCLFRAISEQLFCSQVHHLEIRKACVSYMRENQQTFESYVEGSFEKYLERLGDPKESAGQLEIRALSLIYNRDFILYRFPGKPPTYVTDNGYEDKILLCYSSSGHYDSVYSKQFQSSAAVCQAVLYEILYKDVFVVDEEELKTAIKLFRSGSKKNRNNAVTGSEDAHTDYKSSNQNRMEEWGACYNAENIPEGYNKGTEETKSPENPSKMPFPYKVLKALDPEIYRNVEFDVWLDSRKELQKSDYMEYAGRQYYLGDKCQVCLESEGRYYNAHIQEVGNENNSVTVFIEELAEKHVVPLANLKPVTQVMSVPAWNAMPSRKGRGYQKMPGGYVPEIVISEMDIKQQKKMFKKIRGKEVYMTMAYGKGDPLLPPRLQHSMHYGHDPPMHYSQTAGNVMSNEHFHPQHPSPRQGRGYGMPRNSSRFINRHNMPGPKVDFYPGPGKRCCQSYDNFSYRSRSFRRSHRQMSCVNKESQYGFTPGNGQMPRGLEETITFYEVEEGDETAYPTLPNHGGPSTMVPATSGYCVGRRGHSSGKQTLNLEEGNGQSENGRYHEEYLYRAEPDYETSGVYSTTASTANLSLQDRKSCSMSPQDTVTSYNYPQKMMGNIAAVAASCANNVPAPVLSNGAAANQAISTTSVSSQNAIQPLFVSPPTHGRPDTKVLQYYFNLGLQCYYHSYWHSMVYVPQMQQQLHVENYPVYTEPPLVDQTVPQCYSEVRREDGIQAEASANDTFPNADSSSVPHGAVYYPVMSDPYGQPPLPGFDSCLPVVPDYSCVPPWHPVGTAYGGSSQIHGAINPGPIGCIAPSPPASHYVPQGM

SEQ ID NO: 20254 - protein, 874 aa, Homo sapiens
MEKLLRLCCWYSWLLLFYYNFQVRGVYSRSQDHPGFQVLASASHYWPLENVDGIHELQDTTGDIVEGKVNKGIYLKEEKGVTLLYYGRYNSSCISKPEQCGPEGVTFSFFWKTQGEQSRPIPSAYGGQVISNGFKVCSSGGRGSVELYTRDNSMTWEASFSPPGPYWTHVLFTWKSKEGLKVYVNGTLSTSDPSGKVSRDYGESNVNLVIGSEQDQAKCYENGAFDEFIIWERALTPDEIAMYFTAAIGKHALLSSTLPSLFMTSTASPVMPTDAYHPIITNLTEERKTFQSPGVILSYLQNVSLSLPSKSLSEQTALNLTKTFLKAVGEILLLPGWIALSEDSAVVLSLIDTIDTVMGHVSSNLHGSTPQVTVEGSSAMAEFSVAKILPKTVNSSHYRFPAHGQSFIQIPHEAFHRHAWSTVVGLLYHSMHYYLNNIWPAHTKIAEAMHHQDCLLFATSHLISLEVSPPPTLSQNLSGSPLITVHLKHRLTRKQHSEATNSSNRVFVYCAFLDFSSGEGVWSNHGCALTRGNLTYSVCRCTHLTNFAILMQVVPLELARGHQVALSSISYVGCSLSVLCLVATLVTFAVLSSVSTIRNQRYHIHANLSFAVLVAQVLLLISFRLEPGTTPCQVMAVLLHYFFLSAFAWMLVEGLHLYSMVIKVFGSEDSKHRYYYGMGWGFPLLICIISLSFAMDSYGTSNNCWLSLASGAIWAFVAPALFVIVVNIGILIAVTRVISQISADNYKIHGDPSAFKLTAKAVAVLLPILGTSWVFGVLAVNGCAVVFQYMFATLNSLQGLFIFLFHCLLNSEVRAAFKHKTKVWSLTSSSARTSNAKPFHSDLMNGTRPGMASTKLSPWDKSSHSAHRVDLSAV

SEQ ID NO: 20255 - protein, 560 aa, Homo sapiens
MEKGTELLVSPSQSGPGGDQPLLVKHREDSAVVLSLIDTIDTVMGHVSSNLHGSTPQVTVEGSSAMAEFSVAKILPKTVNSSHYRFPAHGQSFIQIPHEAFHRHAWSTVVGLLYHSMHYYLNNIWPAHTKIAEAMHHQDCLLFATSHLISLEVSPPPTLSQNLSGSPLITVHLKHRLTRKQHSEATNSSNRVFVYCAFLDFSSGEGVWSNHGCALTRGNLTYSVCRCTHLTNFAILMQVVPLELARGHQVALSSISYVGCSLSVLCLVATLVTFAVLSSVSTIRNQRYHIHANLSFAVLVAQVLLLISFRLEPGTTPCQVMAVLLHYFFLSAFAWMLVEGLHLYSMVIKVFGSEDSKHRYYYGMGWGFPLLICIISLSFAMDSYGTSNNCWLSLASGAIWAFVAPALFVIVVNIGILIAVTRVISQISADNYKIHGDPSAFKLTAKAVAVLLPILGTSWVFGVLAVNGCAVVFQYMFATLNSLQGLFIFLFHCLLNSEVRAAFKHKTKVWSLTSSSARTSNAKPFHSDLMNGTRPGMASTKLSPWDKSSHSAHRVDLSAV

SEQ ID NO: 20256 - protein, 393 aa, Homo sapiens
MHRVCFLSFQTRKQHSEATNSSNRVFVYCAFLDFSSGEGVWSNHGCALTRGNLTYSVCRCTHLTNFAILMQVVPLELARGHQVALSSISYVGCSLSVLCLVATLVTFAVLSSVSTIRNQRYHIHANLSFAVLVAQVLLLISFRLEPGTTPCQVMAVLLHYFFLSAFAWMLVEGLHLYSMVIKVFGSEDSKHRYYYGMGWGFPLLICIISLSFAMDSYGTSNNCWLSLASGAIWAFVAPALFVIVVNIGILIAVTRVISQISADNYKIHGDPSAFKLTAKAVAVLLPILGTSWVFGVLAVNGCAVVFQYMFATLNSLQGLFIFLFHCLLNSEVRAAFKHKTKVWSLTSSSARTSNAKPFHSDLMNGTRPGMASTKLSPWDKSSHSAHRVDLSAV

SEQ ID NO: 20257 - protein, 906 aa, Homo sapiens
MEKLLRLCCWYSWLLLFYYNFQVRGVYSRSQDHPGFQVLASASHYWPLENVDGIHELQDTTGASRTHKLTVLPSRNATFVYSNDSAYSNLSATVDIVEGKVNKGIYLKEEKGVTLLYYGRYNSSCISKPEQCGPEGVTFSFFWKTQGEQSRPIPSAYGGQVISNGFKVCSSGGRGSVELYTRDNSMTWEASFSPPGPYWTHVLFTWKSKEGLKVYVNGTLSTSDPSGKVSRDYGESNVNLVIGSEQDQAKCYENGAFDEFIIWERALTPDEIAMYFTAAIGKHALLSSTLPSLFMTSTASPVMPTDAYHPIITNLTEERKTFQSPGVILSYLQNVSLSLPSKSLSEQTALNLTKTFLKAVGEILLLPGWIALSEDSAVVLSLIDTIDTVMGHVSSNLHGSTPQVTVEGSSAMAEFSVAKILPKTVNSSHYRFPAHGQSFIQIPHEAFHRHAWSTVVGLLYHSMHYYLNNIWPAHTKIAEAMHHQDCLLFATSHLISLEVSPPPTLSQNLSGSPLITVHLKHRLTRKQHSEATNSSNRVFVYCAFLDFSSGEGVWSNHGCALTRGNLTYSVCRCTHLTNFAILMQVVPLELARGHQVALSSISYVGCSLSVLCLVATLVTFAVLSSVSTIRNQRYHIHANLSFAVLVAQVLLLISFRLEPGTTPCQVMAVLLHYFFLSAFAWMLVEGLHLYSMVIKVFGSEDSKHRYYYGMGWGFPLLICIISLSFAMDSYGTSNNCWLSLASGAIWAFVAPALFVIVVNIGILIAVTRVISQISADNYKIHGDPSAFKLTAKAVAVLLPILGTSWVFGVLAVNGCAVVFQYMFATLNSLQGLFIFLFHCLLNSEVRAAFKHKTKVWSLTSSSARTSNAKPFHSDLMNGTRPGMASTKLSPWDKSSHSAHRVDLSAV

SEQ ID NO: 20258 - protein, 166 aa, Homo sapiens
MMLHSALGLCLLLVTVSSNLAIAIKKEKRPPQTLSRGWGDDITWVQTYEEGLFYAQKSKKPLMVIHHLEDCQYSQALKKVFAQNEEIQEMAQNKFIMLNLMHETTDKNLSPDGQYVPRIMFVDPSLTVRADIAGRYSNRLYTYEPRDLPLLIENMKKALRLIQSEL

SEQ ID NO: 20259 - protein, 823 aa, Homo sapiens
MGGRVFLVFLAFCVWLTLPGAETQDSRGCARWCPQDSSCVNATACRCNPGFSSFSEIITTPMETCDDINECATLSKVSCGKFSDCWNTEGSYDCVCSPGYEPVSGAKTFKNESENTCQDVDECQQNPRLCKSYGTCVNTLGSYTCQCLPGFKLKPEDPKLCTDVNECTSGQNPCHSSTHCLNNVGSYQCRCRPGWQPIPGSPNGPNNTVCEDVDECSSGQHQCDSSTVCFNTVGSYSCRCRPGWKPRHGIPNNQKDTVCEDMTFSTWTPPPGVHSQTLSRFFDKVQDLGRDYKPGLANNTIQSILQALDELLEAPGDLETLPRLQQHCVASHLLDGLEDVLRGLSKNLSNGLLNFSYPAGTELSLEVQKQVDRSVTLRQNQAVMQLDWNQAQKSGDPGPSVVGLVSIPGMGKLLAEAPLVLEPEKQMLLHETHQGLLQDGSPILLSDVISAFLSNNDTQNLSSPVTFTFSHRSVIPRQKVLCVFWEHGQNGCGHWATTGCSTIGTRDTSTICRCTHLSSFAVLMAHYDVQEEDPVLTVITYMGLSVSLLCLLLAALTFLLCKAIQNTSTSLHLQLSLCLFLAHLLFLVAIDQTGHKVLCSIIAGTLHYLYLATLTWMLLEALYLFLTARNLTVVNYSSINRFMKKLMFPVGYGVPAVTVAISAASRPHLYGTPSRCWLQPEKGFIWGFLGPVCAIFSVNLVLFLVTLWILKNRLSSLNSEVSTLRNTRMLAFKATAQLFILGCTWCLGILQVGPAARVMAYLFTIINSLQGVFIFLVYCLLSQQVREQYGKWSKGIRKLKTESEMHTLSSSAKADTSKPSTVN

SEQ ID NO: 20260 - protein, 812 aa, Homo sapiens
MGGRVFLVFLAFCVWLTLPGAETQDSRGCARWCPQDSSCVNATACRCNPGFSSFSEIITTPMETCDDINECATLSKVSCGKFSDCWNTEGSYDCVCSPGYEPVSGAKTFKNESENTCQDVDECQQNPRLCKSYGTCVNTLGSYTCQCLPGFKLKPEDPKLCTDVNECTSGQNPCHSSTHCLNNVGSYQCRCRPGWQPIPGSPNGPNNTVCEDVDECSSGQHQCDSSTVCFNTVGSYSCRCRPGWKPRHGIPNNQKDTVCEDMTFSTWTPPPGVHSQTLSRFFDKVQDLGRDYKPGLANNTIQSILQALDELLEAPGDLETLPRLQQHCVASHLLDGLEDVLRGLSKNLSNGLLNFSYPAGTELSLEVQKQVDRSVTLRQNQAVMQLDWNQAQKSGDPGMGKLLAEAPLVLEPEKQMLLHETHQGLLQDGSPILLSDVISAFLSNNDTQNLSSPVTFTFSHRSVIPRQKVLCVFWEHGQNGCGHWATTGCSTIGTRDTSTICRCTHLSSFAVLMAHYDVQEEDPVLTVITYMGLSVSLLCLLLAALTFLLCKAIQNTSTSLHLQLSLCLFLAHLLFLVAIDQTGHKVLCSIIAGTLHYLYLATLTWMLLEALYLFLTARNLTVVNYSSINRFMKKLMFPVGYGVPAVTVAISAASRPHLYGTPSRCWLQPEKGFIWGFLGPVCAIFSVNLVLFLVTLWILKNRLSSLNSEVSTLRNTRMLAFKATAQLFILGCTWCLGILQVGPAARVMAYLFTIINSLQGVFIFLVYCLLSQQVREQYGKWSKGIRKLKTESEMHTLSSSAKADTSKPSTVN

SEQ ID NO: 20261 - protein, 774 aa, Homo sapiens
MGGRVFLVFLAFCVWLTLPGAETQDSRGCARWCPQDSSCVNATACRCNPGFSSFSEIITTPMETCDDINECATLSKVSCGKFSDCWNTEGSYDCVCSPGYEPVSGAKTFKNESENTCQDVDECQQNPRLCKSYGTCVNTLGSYTCQCLPGFKLKPEDPKLCTDVDECSSGQHQCDSSTVCFNTVGSYSCRCRPGWKPRHGIPNNQKDTVCEDMTFSTWTPPPGVHSQTLSRFFDKVQDLGRDYKPGLANNTIQSILQALDELLEAPGDLETLPRLQQHCVASHLLDGLEDVLRGLSKNLSNGLLNFSYPAGTELSLEVQKQVDRSVTLRQNQAVMQLDWNQAQKSGDPGPSVVGLVSIPGMGKLLAEAPLVLEPEKQMLLHETHQGLLQDGSPILLSDVISAFLSNNDTQNLSSPVTFTFSHRSVIPRQKVLCVFWEHGQNGCGHWATTGCSTIGTRDTSTICRCTHLSSFAVLMAHYDVQEEDPVLTVITYMGLSVSLLCLLLAALTFLLCKAIQNTSTSLHLQLSLCLFLAHLLFLVAIDQTGHKVLCSIIAGTLHYLYLATLTWMLLEALYLFLTARNLTVVNYSSINRFMKKLMFPVGYGVPAVTVAISAASRPHLYGTPSRCWLQPEKGFIWGFLGPVCAIFSVNLVLFLVTLWILKNRLSSLNSEVSTLRNTRMLAFKATAQLFILGCTWCLGILQVGPAARVMAYLFTIINSLQGVFIFLVYCLLSQQVREQYGKWSKGIRKLKTESEMHTLSSSAKADTSKPSTVN

SEQ ID NO: 20262 - protein, 730 aa, Homo sapiens
MGGRVFLVFLAFCVWLTLPGAETQDSRGCARWCPQDSSCVNATACRCNPGFSSFSEIITTPMETCDDINECATLSKVSCGKFSDCWNTEGSYDCVCSPGYEPVSGAKTFKNESENTCQDVDECSSGQHQCDSSTVCFNTVGSYSCRCRPGWKPRHGIPNNQKDTVCEDMTFSTWTPPPGVHSQTLSRFFDKVQDLGRDYKPGLANNTIQSILQALDELLEAPGDLETLPRLQQHCVASHLLDGLEDVLRGLSKNLSNGLLNFSYPAGTELSLEVQKQVDRSVTLRQNQAVMQLDWNQAQKSGDPGPSVVGLVSIPGMGKLLAEAPLVLEPEKQMLLHETHQGLLQDGSPILLSDVISAFLSNNDTQNLSSPVTFTFSHRSVIPRQKVLCVFWEHGQNGCGHWATTGCSTIGTRDTSTICRCTHLSSFAVLMAHYDVQEEDPVLTVITYMGLSVSLLCLLLAALTFLLCKAIQNTSTSLHLQLSLCLFLAHLLFLVAIDQTGHKVLCSIIAGTLHYLYLATLTWMLLEALYLFLTARNLTVVNYSSINRFMKKLMFPVGYGVPAVTVAISAASRPHLYGTPSRCWLQPEKGFIWGFLGPVCAIFSVNLVLFLVTLWILKNRLSSLNSEVSTLRNTRMLAFKATAQLFILGCTWCLGILQVGPAARVMAYLFTIINSLQGVFIFLVYCLLSQQVREQYGKWSKGIRKLKTESEMHTLSSSAKADTSKPSTVN

SEQ ID NO: 20263 - protein, 681 aa, Homo sapiens
MGGRVFLVFLAFCVWLTLPGAETQDSRGCARWCPQDSSCVNATACRCNPGFSSFSEIITTPMETCDDINECATLSKVSCGKFSDCWNTEGSYDCVCSPGYEPVSGAKTFKNESENTCQDMTFSTWTPPPGVHSQTLSRFFDKVQDLGRDYKPGLANNTIQSILQALDELLEAPGDLETLPRLQQHCVASHLLDGLEDVLRGLSKNLSNGLLNFSYPAGTELSLEVQKQVDRSVTLRQNQAVMQLDWNQAQKSGDPGPSVVGLVSIPGMGKLLAEAPLVLEPEKQMLLHETHQGLLQDGSPILLSDVISAFLSNNDTQNLSSPVTFTFSHRSVIPRQKVLCVFWEHGQNGCGHWATTGCSTIGTRDTSTICRCTHLSSFAVLMAHYDVQEEDPVLTVITYMGLSVSLLCLLLAALTFLLCKAIQNTSTSLHLQLSLCLFLAHLLFLVAIDQTGHKVLCSIIAGTLHYLYLATLTWMLLEALYLFLTARNLTVVNYSSINRFMKKLMFPVGYGVPAVTVAISAASRPHLYGTPSRCWLQPEKGFIWGFLGPVCAIFSVNLVLFLVTLWILKNRLSSLNSEVSTLRNTRMLAFKATAQLFILGCTWCLGILQVGPAARVMAYLFTIINSLQGVFIFLVYCLLSQQVREQYGKWSKGIRKLKTESEMHTLSSSAKADTSKPSTVN

SEQ ID NO: 20264 - protein, 765 aa, Homo sapiens
MGGRVFLVFLAFCVWLTLPGAETQDSRGCARWCPQDSSCVNATACRCNPGFSSFSEIITTPMETCDDINECATLSKVSCGKFSDCWNTEGSYDCVCSPGYEPVSGAKTFKNESENTCQDVDECQQNPRLCKSYGTCVNTLGSYTCQCLPGFKLKPEDPKLCTDVNECTSGQNPCHSSTHCLNNVGSYQCRCRPGWQPIPGSPNGPNNTVCEDVDECSSGQHQCDSSTVCFNTVGSYSCRCRPGWKPRHGIPNNQKDTVCEDMTFSTWTPPPGVHSQTLSRFFDKVQDLGRDYKPGLANNTIQSILQALDELLEAPGDLETLPRLQQHCVASHLLDGLEDVLRGLSKNLSNGLLNFSYPAGTELSLEVQKQVDRSVTLRQNQAVMQLDWNQAQKSGDPGPSVVGLVSIPGMGKLLAEAPLVLEPEKQMLLHETHQGLLQDGSPILLSDVISAFLSNNDTQNLSSPVTFTFSHREEDPVLTVITYMGLSVSLLCLLLAALTFLLCKAIQNTSTSLHLQLSLCLFLAHLLFLVAIDQTGHKVLCSIIAGTLHYLYLATLTWMLLEALYLFLTARNLTVVNYSSINRFMKKLMFPVGYGVPAVTVAISAASRPHLYGTPSRCWLQPEKGFIWGFLGPVCAIFSVNLVLFLVTLWILKNRLSSLNSEVSTLRNTRMLAFKATAQLFILGCTWCLGILQVGPAARVMAYLFTIINSLQGVFIFLVYCLLSQQVREQYGKWSKGIRKLKTESEMHTLSSSAKADTSKPSTVN

SEQ ID NO: 20265 - protein, 835 aa, Homo sapiens
MGGRVFLAFCVWLTLPGAETQDSRGCARWCPQNSSCVNATACRCNPGFSSFSEIITTPTETCDDINECATPSKVSCGKFSDCWNTEGSYDCVCSPGYEPVSGAKTFKNESENTCQDVDECQQNPRLCKSYGTCVNTLGSYTCQCLPGFKFIPEDPKVCTDVNECTSGQNPCHSSTHCLNNVGSYQCRCRPGWQPIPGSPNGPNNTVCEDVDECSSGQHQCDSSTVCFNTVGSYSCRCRPGWKPRHGIPNNQKDTVCEDMTFSTWTPPPGVHSQTLSRFFDKVQDLGRDSKTSSAEVTIQNVIKLVDELMEAPGDVEALAPPVRHLIATQLLSNLEDIMRILAKSLPKGPFTYISPSNTELTLMIQERGDKNVTMGQSSARMKLNWAVAAGAEDPGPAVAGILSIQNMTTLLANASLNLHSKKQAELEEIYESSIRGVQLRRLSAVNSIFLSHNNTKELNSPILFAFSHLESSDGEAGRDPPAKDVMPGPRQELLCAFWKSDSDRGGHWATEGCQVLGSKNGSTTCQCSHLSSFAILMAHYDVEDWKLTLITRVGLALSLFCLLLCILTFLLVRPIQGSRTTIHLHLCICLFVGSTIFLAGIENEGGQVGLRCRLVAGLLHYCFLAAFCWMSLEGLELYFLVVRVFQGQGLSTRWLCLIGYGVPLLIVGVSAAIYSKGYGRPRYCWLDFEQGFLWSFLGPVTFIILCNAVIFVTTVWKLTQKFSEINPDMKKLKKARALTITAIAQLFLLGCTWVFGLFIFDDRSLVLTYVFTILNCLQGAFLYLLHCLLNKKVREEYRKWACLVAGGSKYSEFTSTTSGTGHNQTRALRASESGI

SEQ ID NO: 20266 - protein, 742 aa, Homo sapiens
MGGRVFLAFCVWLTLPGAETQDSRGCARWCPQNSSCVNATACRCNPGFSSFSEIITTPTETCDDINECATPSKVSCGKFSDCWNTEGSYDCVCSPGYEPVSGAKTFKNESENTCQDVDECSSGQHQCDSSTVCFNTVGSYSCRCRPGWKPRHGIPNNQKDTVCEDMTFSTWTPPPGVHSQTLSRFFDKVQDLGRDSKTSSAEVTIQNVIKLVDELMEAPGDVEALAPPVRHLIATQLLSNLEDIMRILAKSLPKGPFTYISPSNTELTLMIQERGDKNVTMGQSSARMKLNWAVAAGAEDPGPAVAGILSIQNMTTLLANASLNLHSKKQAELEEIYESSIRGVQLRRLSAVNSIFLSHNNTKELNSPILFAFSHLESSDGEAGRDPPAKDVMPGPRQELLCAFWKSDSDRGGHWATEGCQVLGSKNGSTTCQCSHLSSFAILMAHYDVEDWKLTLITRVGLALSLFCLLLCILTFLLVRPIQGSRTTIHLHLCICLFVGSTIFLAGIENEGGQVGLRCRLVAGLLHYCFLAAFCWMSLEGLELYFLVVRVFQGQGLSTRWLCLIGYGVPLLIVGVSAAIYSKGYGRPRYCWLDFEQGFLWSFLGPVTFIILCNAVIFVTTVWKLTQKFSEINPDMKKLKKARALTITAIAQLFLLGCTWVFGLFIFDDRSLVLTYVFTILNCLQGAFLYLLHCLLNKKVREEYRKWACLVAGGSKYSEFTSTTSGTGHNQTRALRASESGI

SEQ ID NO: 20267 - protein, 786 aa, Homo sapiens
MGGRVFLAFCVWLTLPGAETQDSRGCARWCPQNSSCVNATACRCNPGFSSFSEIITTPTETCDDINECATPSKVSCGKFSDCWNTEGSYDCVCSPGYEPVSGAKTFKNESENTCQDVDECQQNPRLCKSYGTCVNTLGSYTCQCLPGFKFIPEDPKVCTDVDECSSGQHQCDSSTVCFNTVGSYSCRCRPGWKPRHGIPNNQKDTVCEDMTFSTWTPPPGVHSQTLSRFFDKVQDLGRDSKTSSAEVTIQNVIKLVDELMEAPGDVEALAPPVRHLIATQLLSNLEDIMRILAKSLPKGPFTYISPSNTELTLMIQERGDKNVTMGQSSARMKLNWAVAAGAEDPGPAVAGILSIQNMTTLLANASLNLHSKKQAELEEIYESSIRGVQLRRLSAVNSIFLSHNNTKELNSPILFAFSHLESSDGEAGRDPPAKDVMPGPRQELLCAFWKSDSDRGGHWATEGCQVLGSKNGSTTCQCSHLSSFAILMAHYDVEDWKLTLITRVGLALSLFCLLLCILTFLLVRPIQGSRTTIHLHLCICLFVGSTIFLAGIENEGGQVGLRCRLVAGLLHYCFLAAFCWMSLEGLELYFLVVRVFQGQGLSTRWLCLIGYGVPLLIVGVSAAIYSKGYGRPRYCWLDFEQGFLWSFLGPVTFIILCNAVIFVTTVWKLTQKFSEINPDMKKLKKARALTITAIAQLFLLGCTWVFGLFIFDDRSLVLTYVFTILNCLQGAFLYLLHCLLNKKVREEYRKWACLVAGGSKYSEFTSTTSGTGHNQTRALRASESGI

SEQ ID NO: 20268 - protein, 261 aa, Homo sapiens
MASPDWGYDDKNGPEQWSKLYPIANGNNQSPVDIKTSETKHDTSLKPISVSYNPATAKEIINVGHSFHVNFEDNDNRSVLKGGPFSDSYRLFQFHFHWGSTNEHGSEHTVDGVKYSAELHVAHWNSAKYSSLAEAASKADGLAVIGVLMKVGEANPKLQKVLDALQAIKTKGKRAPFTNFDPSTLLPSSLDFWTYPGSLTHPPLYESVTWIICKESISVSSEQLAQFRSLLSNVEGDNAVPMQHNNRPTQPLKGRTVRASF

SEQ ID NO: 20269 - protein, 818 aa, Homo sapiens
MERYKALEQLLTELDDFLKILDQENLSSTALVKKSCLAELLRLYTKSSSSDEEYIYMNKVTINKQQNAESQGKAPEEQGLLPNGEPSQHSSAPQKSLPDLPPPKMIPERKQLAIPKTESPEGYYEEAEPYDTSLNEDGEAVSSSYESYDEEDGSKGKSAPYQWPSPEAGIELMRDARICAFLWRKKWLGQWAKQLCVIKDNRLLCYKSSKDHSPQLDVNLLGSSVIHKEKQVRKKEHKLKITPMNADVIVLGLQSKDQAEQWLRVIQEVSGLPSEGASEGNQYTPDAQRFNCQKPDIAEKYLSASEYGSSVDGHPEVPETKDVKKKCSAGLKLSNLMNLGRKKSTSLEPVERSLETSSYLNVLVNSQWKSRWCSVRDNHLHFYQDRNRSKVAQQPLSLVGCEVVPDPSPDHLYSFRILHKGEELAKLEAKSSEEMGHWLGLLLSESGSKTDPEEFTYDYVDADRVSCIVSAAKNSLLLMQRKFSEPNTYIDGLPSQDRQEELYDDVDLSELTAAVEPTEEATPVADDPNERESDRVYLDLTPVKSFLHGPSSAQAQASSPTLSCLDNATEALPADSGPGPTPDEPCIKCPENLGEQQLESLEPEDPSLRITTVKIQTEQQRISFPPSCPDAVVATPPGASPPVKDRLRVTSAEIKLGKNRTEAEVKRYTEEKERLEKKKEEIRGHLAQLRKEKRELKETLLKCTDKEVLASLEQKLKEIDEECRGEESRRVDLELSIMEVKDNLKKAEAGPVTLGTTVDTTHLENVSPRPKAVTPASAPDCTPVNSATTLKNRPLSVVVTGKGTVLQKAKEWEKKGAS

SEQ ID NO: 20270 - protein, 814 aa, Homo sapiens
MERYKALEQLLTELDDFLKILDQENLSSTALVKKSCLAELLRLYTKSSSSDEEYIYMNKVTINKQQNAESQGKAPEEQGLLPNGEPSQHSSAPQKSLPDLPPPKMIPERKQLAIPKTESPEGYYEEAEPYDTSLNEDGEAVSSSYESYDEEDGSKGKSAPYQWPSPEAGIELMRDARICAFLWRKKWLGQWAKQLCVIKDNRLLCYKSSKDHSPQLDVNLLGSSVIHKEKQVRKKEHKLKITPMNADVIVLGLQSKDQAEQWLRVIQEVSGLPSEGASEGNQYTPDAQRFNCQKPDIAEKYLSASEYGSSVDGHPEVPETKDVKKKCSAGLKLSNLMNLGRKKSTSLEPVERSLETSSYLNVLVNSQWKSRWCSVRDNHLHFYQDRNRSKVAQQPLSLVGCEVVPDPSPDHLYSFRILHKGEELAKLEAKSSEEMGHWLGLLLSESGSKTDPEEFTYDYVDADRVSCIVSAAKNSLLLMQRKFSEPNTYIDGLPSQDRQEELYDDVDLSELTAAVEPTEEATPVADDPNERESDRVYLDLTPVKSFLHGPSSAQAQASSPTLSCLDNATEALPADSGPGPTPDEPCIKCPENLGEQQLESLEPEDPSLRITTVKIQTEQQRISFPPSCPDAVVATPPGASPPVKDRLRVTSAEIKLGKNRTEAEVKRYTEEKERLEKKKEEIRGHLAQLRKEKRELKETLLKCTDKEVLASLEQKLKEIDEECRGEESRRVDLELSIMEVKDNLKKAEAGPVTLGTTVDTTHLENPKAVTPASAPDCTPVNSATTLKNRPLSVVVTGKGTVLQKAKEWEKKGAS

SEQ ID NO: 20271 - protein, 349 aa, Homo sapiens
MQRKFSEPNTYIDGLPSQDRQEELYDDVDLSELTAAVEPTEEATPVADDPNERESDRVYLDLTPVKSFLHGPSSAQAQASSPTLSCLDNATEALPADSGPGPTPDEPCIKCPENLGEQQLESLEPEDPSLRITTVKIQTEQQRISFPPSCPDAVVATPPGASPPVKDRLRVTSAEIKLGKNRTEAEVKRYTEEKERLEKKKEEIRGHLAQLRKEKRELKETLLKCTDKEVLASLEQKLKEIDEECRGEESRRVDLELSIMEVKDNLKKAEAGPVTLGTTVDTTHLENVSPRPKAVTPASAPDCTPVNSATTLKNRPLSVVVTGKGTVLQKAKVSSHSQPPLGPAEMSLR

SEQ ID NO: 20272 - protein, 842 aa, Homo sapiens
MERYKALEQLLTELDDFLKILDQENLSSTALVKKSCLAELLRLYTKSSSSDEEYIYMNKVTINKQQNAESQGKAPEEQGLLPNGEPSQHSSAPQKSLPDLPPPKMIPERKQLAIPKTESPEGYYEEAEPYDTSLNGHSGGFLPTGVPRWVQVPERVIYATITLEDGEAVSSSYESYDEEDGSKGKSAPYQWPSPEAGIELMRDARICAFLWRKKWLGQWAKQLCVIKDNRLLCYKSSKDHSPQLDVNLLGSSVIHKEKQVRKKEHKLKITPMNADVIVLGLQSKDQAEQWLRVIQEVSGLPSEGASEGNQYTPDAQRFNCQKPDIAEKYLSASEYGSSVDGHPEVPETKDVKKKCSAGLKLSNLMNLGRKKSTSLEPVERSLETSSYLNVLVNSQWKSRWCSVRDNHLHFYQDRNRSKVAQQPLSLVGCEVVPDPSPDHLYSFRILHKGEELAKLEAKSSEEMGHWLGLLLSESGSKTDPEEFTYDYVDADRVSCIVSAAKNSLLLMQRKFSEPNTYIDGLPSQDRQEELYDDVDLSELTAAVEPTEEATPVADDPNERESDRVYLDLTPVKSFLHGPSSAQAQASSPTLSCLDNATEALPADSGPGPTPDEPCIKCPENLGEQQLESLEPEDPSLRITTVKIQTEQQRISFPPSCPDAVVATPPGASPPVKDRLRVTSAEIKLGKNRTEAEVKRYTEEKERLEKKKEEIRGHLAQLRKEKRELKETLLKCTDKEVLASLEQKLKEIDEECRGEESRRVDLELSIMEVKDNLKKAEAGPVTLGTTVDTTHLENPKAVTPASAPDCTPVNSATTLKNRPLSVVVTGKGTVLQKAKEWEKKGAS

SEQ ID NO: 20273 - protein, 686 aa, Homo sapiens
MGNILTCCVHPSVSLEFDQQQGSVCPSESEIYEAGAGDRMAGAPMAAAVQPAEVTVEVGEDLHMHHIRDQEMPEALEFSLSANPEASTIFQRNSQTDALEFNPSANPEASTIFQRNSQTDVVEIRRSNCTNHVSTERFSQQYSSCSTIFLDDSTASQHYLTMTIISVTLEIPHHITQRDADRSLSIPDEQLHSFAVSTVHITKNRNGGGSLNNYSSSIPSTPSTSQEDPQFSVPPTANTPTPVCKRSMRWSNLFTSEKGSHPDKERKAPENHADTIGSGRAIPIKQGMLLKRSGKWLKTWKKKYVTLCSNGVLTYYSSLGDYMKNIHKKEIDLRTSTIKVPGKWPSLATSACAPISSSKSNGLSKDMDTGLGDSICFSPSISSTTSPKLNPPPSPHANKKKHLKKKSTNNFMIVSATGQTWHFEATTYEERDAWVQAIQSQILASLQSCESSKSKSQLTSQSEAMALQSIQNMRGNAHCVDYETQNPKWASLNLGVLMCIECSGIHRSLGTRLSRVRSLELDDWPVELRKVMSSIGNDLANSIWEGSSQGQTKPSVKSTREEKERWIRSKYEEKLFLAPLPCTELSLGQHLLRATADEDLQTAILLLAHGSREEVNETCGEGDGCTALHLACRKGNVVLAQLLIWYGVDVMARDAHGNTALTYARQASSQECINVLLQYGCPDECV

SEQ ID NO: 20274 - protein, 376 aa, Homo sapiens
MTDNELSALVVDNGSGMCKAGFGGDDAPRAVFPSMIGRPRHQGVMVGMGQKDCYVGDEAQSKRGVLTLKYPIEHGVVTNWDDMEKIWYHTFYNELRVAPDEHPILLTEAPLNPKINREKMTQIMFEAFNTPAMYVAIQAVLSLYASGRTTGIVMDSGDGVTHIVPIYEGYALPHAILRLDLAGRDLTDYLMKILTERGYNFTTTAEREIVRDVKEKLCYVALDFEQEMVRAAASSSPERSYELPDGQVITIGNERFRCPEAIFQPSFLGIESSGIHETTFNSIMKCDVDIRKDLYANTVLSGGSTMYPGIADRMQKEIITLAPSTMKIKIIAPPERKYSVWIGGSILASLSTFQQMWISKQEYDEAGPPIVHRKCF

SEQ ID NO: 20275 - protein, 909 aa, Homo sapiens
MAARPLPVSPARALLLALAGALLAPCEARGVSLWNQGRADEVVSASVGSGDLWIPVKSFDSKNHPEVLNIRLQRESKELIINLERNEGLIASSFTETHYLQDGTDVSLARNYTVILGHCYYHGHVRGYSDSAVSLSTCSGLRGLIVFENESYVLEPMKSATNRYKLFPAKKLKSVRGSCGSHHNTPNLAAKNVFPPPSQTWARRHKRETLKATKYVELVIVADNREFQRQGKDLEKVKQRLIEIANHVDKFYRPLNIRIVLVGVEVWNDMDKCSVSQDPFTSLHEFLDWRKMKLLPRKSHDNAQLVSGVYFQGTTIGMAPIMSMCTADQSGGIVMDHSDNPLGAAVTLAHELGHNFGMNHDTLDRGCSCQMAVEKGGCIMNASTGYPFPMVFSSCSRKDLETSLEKGMGVCLFNLPEVRESFGGQKCGNRFVEEGEECDCGEPEECMNRCCNATTCTLKPDAVCAHGLCCEDCQLKPAGTACRDSSNSCDLPEFCTGASPHCPANVYLHDGHSCQDVDGYCYNGICQTHEQQCVTLWGPGAKPAPGICFERVNSAGDPYGNCGKVSKSSFAKCEMRDAKCGKIQCQGGASRPVIGTNAVSIETNIPLQQGGRILCRGTHVYLGDDMPDPGLVLAGTKCADGKICLNRQCQNISVFGVHECAMQCHGRGVCNNRKNCHCEAHWAPPFCDKFGFGGSTDSGPIRQADNQGLTIGILVTILCLLAAGFVVYLKRKTLIRLLFTNKKTTIEKLRCVRPSRPPRGFQPCQAHLGHLGKGLMRKPPDSYPPKDNPRRLLQCQNVDISRPLNGLNVPQPQSTQRVLPPLHRAPRAPSVPARPLPAKPALRQAQGTCKPNPPQKPLPADPLARTTRLTHALARTPGQWETGLRLAPLRPAPQYPHQVPRSTHTAYIK

SEQ ID NO: 20276 - protein, 738 aa, Homo sapiens
MAARPLPVSPARALLLALAGALLAPCEARGVSLWNQGRADEVVSASVGSGDLWIPVKSFDSKNHPEVLNIRLQRESKELIINLERNEGLIASSFTETHYLQDGTDVSLARNYTVILGHCYYHGHVRGYSDSAVSLSTCSGLRGLIVFENESYVLEPMKSATNRYKLFPAKKLKSVRGSCGSHHNTPNLAAKNVFPPPSQTWARRHKRETLKATKYVELVIVADNREFQRQGKDLEKVKQRLIEIANHVDKFYRPLNIRIVLVGVEVWNDMDKCSVSQDPFTSLHEFLDWRKMKLLPRKSHDNAQLVSGVYFQGTTIGMAPIMSMCTADQSGGIVMDHSDNPLGAAVTLAHELGHNFGMNHDTLDRGCSCQMAVEKGGCIMNASTGYPFPMVFSSCSRKDLETSLEKGMGVCLFNLPEVRESFGGQKCGNRFVEEGEECDCGEPEECMNRCCNATTCTLKPDAVCAHGLCCEDCQLKPAGTACRDSSNSCDLPEFCTGASPHCPANVYLHDGHSCQDVDGYCYNGICQTHEQQCVTLWGPGAKPAPGICFERVNSAGDPYGNCGKVSKSSFAKCEMRDAKCGKIQCQGGASRPVIGTNAVSIETNIPLQQGGRILCRGTHVYLGDDMPDPGLVLAGTKCADGKICLNRQCQNISVFGVHECAMQCHGRGVCNNRKNCHCEAHWAPPFCDKFGFGGSTDSGPIRQAEARQEAAESNRERGQGQEPVGSQEHASTASLTLI

SEQ ID NO: 20277 - protein, 735 aa, Homo sapiens
MAARPLPVSPARALLLALAGALLAPCEARGVSLWNQGRADEVVSASVGSGDLWIPVKSFDSKNHPEVLNIRLQRESKELIINLERNEGLIASSFTETHYLQDGTDVSLARNYTGHCYYHGHVRGYSDSAVSLSTCSGLRGLIVFENESYVLEPMKSATNRYKLFPAKKLKSVRGSCGSHHNTPNLAAKNVFPPPSQTWARRHKRETLKATKYVELVIVADNREFQRQGKDLEKVKQRLIEIANHVDKFYRPLNIRIVLVGVEVWNDMDKCSVSQDPFTSLHEFLDWRKMKLLPRKSHDNAQLVSGVYFQGTTIGMAPIMSMCTADQSGGIVMDHSDNPLGAAVTLAHELGHNFGMNHDTLDRGCSCQMAVEKGGCIMNASTGYPFPMVFSSCSRKDLETSLEKGMGVCLFNLPEVRESFGGQKCGNRFVEEGEECDCGEPEECMNRCCNATTCTLKPDAVCAHGLCCEDCQLKPAGTACRDSSNSCDLPEFCTGASPHCPANVYLHDGHSCQDVDGYCYNGICQTHEQQCVTLWGPGAKPAPGICFERVNSAGDPYGNCGKVSKSSFAKCEMRDAKCGKIQCQGGASRPVIGTNAVSIETNIPLQQGGRILCRGTHVYLGDDMPDPGLVLAGTKCADGKICLNRQCQNISVFGVHECAMQCHGRGVCNNRKNCHCEAHWAPPFCDKFGFGGSTDSGPIRQAEARQEAAESNRERGQGQEPVGSQEHASTASLTLI

SEQ ID NO: 20278 - protein, 737 aa, Homo sapiens
MAARPLPVSPARALLLALAGALLAPCEARGVSLWNQGRADEVVSASVGSGDLWIPVKSFDSKNHPEVLNIRLQRESKELIINLERNEGLIASSFTETHYLQDGTDVSLARNYTGHCYYHGHVRGYSDSAVSLSTCSGLRGLIVFENESYVLEPMKSATNRYKLFPAKKLKSVRGSCGSHHNTPNLAAKNVFPPPSQTWARRHKRETLKATKYVELVIVADNREFQRQGKDLEKVKQRLIEIANHVDKFYRPLNIRIVLVGVEVWNDMDKCSVSQDPFTSLHEFLDWRKMKLLPRKSHDNAQLVSGVYFQGTTIGMAPIMSMCTADQSGGIVMDHSDNPLGAAVTLAHELGHNFGMNHDTLDRGCSCQMAVEKGGCIMNASTGYPFPMVFSSCSRKDLETSLEKGMGVCLFNLPEVRESFGGQKCGNRFVEEGEECDCGEPEECMNRCCNATTCTLKPDAVCAHGLCCEDCQLKPAGTACRDSSNSCDLPEFCTGASPHCPANVYLHDGHSCQDVDGYCYNGICQTHEQQCVTLWGPGAKPAPGICFERVNSAGDPYGNCGKVSKSSFAKCEMRDAKCGKIQCQGGASRPVIGTNAVSIETNIPLQQGGRILCRGTHVYLGDDMPDPGLVLAGTKCADGKICLNRQCQNISVFGVHECAMQCHGRGVCNNRKNCHCEAHWAPPFCDKFGFGGSTDSGPIRQAGKEARQEAAESNRERGQGQEPVGSQEHASTASLTLI

SEQ ID NO: 20279 - protein, 863 aa, Homo sapiens
MRLALLWALGLLGAGSPLPSWPLPNIGGTEEQQAESEKAPREPLEPQVLQDDLPISLKKVLQTSLPEPLRIKLELDGDSHILELLQNRELVPGRPTLVWYQPDGTRVVSEGHTLENCCYQGRVRGYAGSWVSICTCSGLRGLVVLTPERSYTLEQGPGDLQGPPIISRIQDLHLPGHTCALSWRESVHTQKPPEHPLGQRHIRRRRDVVTETKTVELVIVADHSEAQKYRDFQHLLNRTLEVALLLDTFFRPLNVRVALVGLEAWTQRDLVEISPNPAVTLENFLHWRRAHLLPRLPHDSAQLVTGTSFSGPTVGMAIQNSICSPDFSGGVNMDHSTSILGVASSIAHELGHSLGLDHDLPGNSCPCPGPAPAKTCIMEASTDFLPGLNFSNCSRRALEKALLDGMGSCLFERLPSLPPMAAFCGNMFVEPGEQCDCGFLDDCVDPCCDSLTCQLRPGAQCASDGPCCQNCQLRPSGWQCRPTRGDCDLPEFCPGDSSQCPPDVSLGDGEPCAGGQAVCMHGRCASYAQQCQSLWGPGAQPAAPLCLQTANTRGNAFGSCGRNPSGSYVSCTPRDAICGQLQCQTGRTQPLLGSIRDLLWETIDVNGTELNCSWVHLDLGSDVAQPLLTLPGTACGPGLVCIDHRCQRVDLLGAQECRSKCHGHGVCDSNRHCYCEEGWAPPDCTTQLKATSSLTTGLLLSLLVLLVLVMLGASYWYRARLHQRLCQLKGPTCQYRAAQSGPSERPGPPQRALLARGTKQASALSFPAPPSRPLPPDPVSKRLQAELADRPNPPTRPLPADPVVRSPKSQGPAKPPPPRKPLPADPQGRCPSGDLPGPGAGIPPLVVPSRPAPPPPTVSSLYL

SEQ ID NO: 20280 - protein, 814 aa, Homo sapiens
MRLALLWALGLLGAGSPLPSWPLPNIGGTEEQQAESEKAPREPLEPQVLQDDLPISLKKVLQTSLPEPLRIKLELDGDSHILELLQNRELVPGRPTLVWYQPDGTRVVSEGHTLENCCYQGRVRGYAGSWVSICTCSGLRGLVVLTPERSYTLEQGPGDLQGPPIISRIQDLHLPGHTCALSWRESVHTQKPPEHPLGQRHIRRRRDVVTETKTVELVIVADHSEAQKYRDFQHLLNRTLEVALLLDTFFRPLNVRVALVGLEAWTQRDLVEISPNPAVTLENFLHWRRAHLLPRLPHDSAQLVTGTSFSGPTVGMAIQNSICSPDFSGGVNMDHSTSILGVASSIAHELGHSLGLDHDLPGNSCPCPGPAPAKTCIMEASTDFLPGLNFSNCSRRALEKALLDGMGSCLFERLPSLPPMAAFCGNMFVEPGEQCDCGFLDDCVDPCCDSLTCQLRPGAQCASDGPCCQNCQLRPSGWQCRPTRGDCDLPEFCPGDSSQCPPDVSLGDGEPCAGGQAVCMHGRCASYAQQCQSLWGPGAQPAAPLCLQTANTRGNAFGSCGRNPSGSYVSCTPRDAICGQLQCQTGRTQPLLGSIRDLLWETIDVNGTELNCSWVHLDLGSDVAQPLLTLPGTACGPGLVCIDHRCQRVDLLGAQECRSKCHGHGVCDSNRHCYCEEGWAPPDCTTQLKATSSLTTGLLLSLLVLLVLVMLGASYWYRARLHQRLCQLKGPTCQYRAAQSGPSERPGPPQRALLARGTKSQGPAKPPPPRKPLPADPQGRCPSGDLPGPGAGIPPLVVPSRPAPPPPTVSSLYL

SEQ ID NO: 20281 - protein, 862 aa, Homo sapiens
MRLALLWALGLLGAGSPLPSWPLPNIGGTEEQQAESEKAPREPLEPQVLQDDLPISLKKVLQTSLPEPLRIKLELDGDSHILELLQNRELVPGRPTLVWYQPDGTRVVSEGHTLENCCYQGRVRGYAGSWVSICTCSGLRGLVVLTPERSYTLEQGPGDLQGPPIISRIQDLHLPGHTCALSWRESVHTQKPPEHPLGQRHIRRRRDVVTETKTVELVIVADHSEAQKYRDFQHLLNRTLEVALLLDTFFRPLNVRVALVGLEAWTQRDLVEISPNPAVTLENFLHWRRAHLLPRLPHDSAQLVTGTSFSGPTVGMAIQNSICSPDFSGGVNMDHSTSILGVASSIAHELGHSLGLDHDLPGNSCPCPGPAPAKTCIMEASTDFLPGLNFSNCSRRALEKALLDGMGSCLFERLPSLPPMAAFCGNMFVEPGEQCDCGFLDDCVDPCCDSLTCQLRPGAQCASDGPCCQNCQLRPSGWQCRPTRGDCDLPEFCPGDSSQCPPDVSLGDGEPCAGGQAVCMHGRCASYAQQCQSLWGPGAQPAAPLCLQTANTRGNAFGSCGRNPSGSYVSCTPRDAICGQLQCQTGRTQPLLGSIRDLLWETIDVNGTELNCSWVHLDLGSDVAQPLLTLPGTACGPGLVCIDHRCQRVDLLGAQECRSKCHGHGVCDSNRHCYCEEGWAPPDCTTQLKATSSLTTGLLLSLLVLLVLVMLGASYWYRARLHQRLCQLKGPTCQYRAAQSGPSERPGPPQRALLARGTKASALSFPAPPSRPLPPDPVSKRLQAELADRPNPPTRPLPADPVVRSPKSQGPAKPPPPRKPLPADPQGRCPSGDLPGPGAGIPPLVVPSRPAPPPPTVSSLYL

SEQ ID NO: 20282 - protein, 839 aa, Homo sapiens
MRLALLWALGLLGAGSPLPSWPLPNIGGTEEQQAESEKAPREPLEPQVLQDDLPISLKKVLQTSLPEPLRIKLELDGDSHILELLQNRELVPGRPTLVWYQPDGTRVVSEGHTLENCCYQGRVRGYAGSWVSICTCSGLRGLVVLTPERSYTLEQGPGDLQGPPIISRIQDLHLPGHTCALSWRESVHTQKPPEHPLGQRHIRRRRDVVTETKTVELVIVADHSEAQKYRDFQHLLNRTLEVALLLDTFFRPLNVRVALVGLEAWTQRDLVEISPNPAVTLENFLHWRRAHLLPRLPHDSAQLVTGTSFSGPTVGMAIQNSICSPDFSGGVNMDHSTSILGVASSIAHELGHSLGLDHDLPGNSCPCPGPAPAKTCIMEASTDFLPGLNFSNCSRRALEKALLDGMGSCLFERLPSLPPMAAFCGNMFVEPGEQCDCGFLDDCVDPCCDSLTCQLRPGAQCASDGPCCQNCQLRPSGWQCRPTRGDCDLPEFCPGDSSQCPPDVSLGDGEPCAGGQAVCMHGRCASYAQQCQSLWGPGAQPAAPLCLQTANTRGNAFGSCGRNPSGSYVSCTPRDAICGQLQCQTGRTQPLLGSIRDLLWETIDVNGTELNCSWVHLDLGSDVAQPLLTLPGTACGPGLVCIDHRCQRVDLLGAQECRSKCHGHGVCDSNRHCYCEEGWAPPDCTTQLKATSSLTTGLLLSLLVLLVLVMLGASYWYRARLHQRLCQLKGPTCQYRAAQSGPSERPGPPQRALLARGTKQASALSFPAPPSRPLPPDPVSKRLQSQGPAKPPPPRKPLPADPQGRCPSGDLPGPGAGIPPLVVPSRPAPPPPTVSSLYL

SEQ ID NO: 20283 - protein, 838 aa, Homo sapiens
MRLALLWALGLLGAGSPLPSWPLPNIGGTEEQQAESEKAPREPLEPQVLQDDLPISLKKVLQTSLPEPLRIKLELDGDSHILELLQNRELVPGRPTLVWYQPDGTRVVSEGHTLENCCYQGRVRGYAGSWVSICTCSGLRGLVVLTPERSYTLEQGPGDLQGPPIISRIQDLHLPGHTCALSWRESVHTQKPPEHPLGQRHIRRRRDVVTETKTVELVIVADHSEAQKYRDFQHLLNRTLEVALLLDTFFRPLNVRVALVGLEAWTQRDLVEISPNPAVTLENFLHWRRAHLLPRLPHDSAQLVTGTSFSGPTVGMAIQNSICSPDFSGGVNMDHSTSILGVASSIAHELGHSLGLDHDLPGNSCPCPGPAPAKTCIMEASTDFLPGLNFSNCSRRALEKALLDGMGSCLFERLPSLPPMAAFCGNMFVEPGEQCDCGFLDDCVDPCCDSLTCQLRPGAQCASDGPCCQNCQLRPSGWQCRPTRGDCDLPEFCPGDSSQCPPDVSLGDGEPCAGGQAVCMHGRCASYAQQCQSLWGPGAQPAAPLCLQTANTRGNAFGSCGRNPSGSYVSCTPRDAICGQLQCQTGRTQPLLGSIRDLLWETIDVNGTELNCSWVHLDLGSDVAQPLLTLPGTACGPGLVCIDHRCQRVDLLGAQECRSKCHGHGVCDSNRHCYCEEGWAPPDCTTQLKATSSLTTGLLLSLLVLLVLVMLGASYWYRARLHQRLCQLKGPTCQYRAAQSGPSERPGPPQRALLARGTKAELADRPNPPTRPLPADPVVRSPKSQGPAKPPPPRKPLPADPQGRCPSGDLPGPGAGIPPLVVPSRPAPPPPTVSSLYL

SEQ ID NO: 20284 - protein, 822 aa, Homo sapiens
MRLALLWALGLLGAGSPLPSWPLPNIGGTEEQQAESEKAPREPLEPQVLQDDLPISLKKVLQTSLPEPLRIKLELDGDSHILELLQNRELVPGRPTLVWYQPDGTRVVSEGHTLENCCYQGRVRGYAGSWVSICTCSGLRGLVVLTPERSYTLEQGPGDLQGPPIISRIQDLHLPGHTCALSWRESVHTQKPPEHPLGQRHIRRRRDVVTETKTVELVIVADHSEAQKYRDFQHLLNRTLEVALLLDTFFRPLNVRVALVGLEAWTQRDLVEISPNPAVTLENFLHWRRAHLLPRLPHDSAQLVTGTSFSGPTVGMAIQNSICSPDFSGGVNMDHSTSILGVASSIAHELGHSLGLDHDLPGNSCPCPGPAPAKTCIMEASTDFLPGLNFSNCSRRALEKALLDGMGSCLFERLPSLPPMAAFCGNMFVEPGEQCDCGFLDDCVDPCCDSLTCQLRPGAQCASDGPCCQNCQLRPSGWQCRPTRGDCDLPEFCPGDSSQCPPDVSLGDGEPCAGGQAVCMHGRCASYAQQCQSLWGPGAQPAAPLCLQTANTRGNAFGSCGRNPSGSYVSCTPRDAICGQLQCQTGRTQPLLGSIRDLLWETIDVNGTELNCSWVHLDLGSDVAQPLLTLPGTACGPGLVCIDHRCQRVDLLGAQECRSKCHGHGVCDSNRHCYCEEGWAPPDCTTQLKATSSLTTGLLLSLLVLLVLVMLGASYWYRARLHQRLCQLKGPTCQYRAAQSGPSERPGPPQRALLARGTKQASALSFPAPPSRPLPPDPVSKRLQAELADRPNPPTRPLPADPVVRSPKVTVGGEKGTASPPT

SEQ ID NO: 20285 - protein, 821 aa, Homo sapiens
MRLALLWALGLLGAGSPLPSWPLPNIGGTEEQQAESEKAPREPLEPQVLQDDLPISLKKVLQTSLPEPLRIKLELDGDSHILELLQNRELVPGRPTLVWYQPDGTRVVSEGHTLENCCYQGRVRGYAGSWVSICTCSGLRGLVVLTPERSYTLEQGPGDLQGPPIISRIQDLHLPGHTCALSWRESVHTQKPPEHPLGQRHIRRRRDVVTETKTVELVIVADHSEAQKYRDFQHLLNRTLEVALLLDTFFRPLNVRVALVGLEAWTQRDLVEISPNPAVTLENFLHWRRAHLLPRLPHDSAQLVTGTSFSGPTVGMAIQNSICSPDFSGGVNMDHSTSILGVASSIAHELGHSLGLDHDLPGNSCPCPGPAPAKTCIMEASTDFLPGLNFSNCSRRALEKALLDGMGSCLFERLPSLPPMAAFCGNMFVEPGEQCDCGFLDDCVDPCCDSLTCQLRPGAQCASDGPCCQNCQLRPSGWQCRPTRGDCDLPEFCPGDSSQCPPDVSLGDGEPCAGGQAVCMHGRCASYAQQCQSLWGPGAQPAAPLCLQTANTRGNAFGSCGRNPSGSYVSCTPRDAICGQLQCQTGRTQPLLGSIRDLLWETIDVNGTELNCSWVHLDLGSDVAQPLLTLPGTACGPGLVCIDHRCQRVDLLGAQECRSKCHGHGVCDSNRHCYCEEGWAPPDCTTQLKATSSLTTGLLLSLLVLLVLVMLGASYWYRARLHQRLCQLKGPTCQYRAAQSGPSERPGPPQRALLARGTKASALSFPAPPSRPLPPDPVSKRLQAELADRPNPPTRPLPADPVVRSPKVTVGGEKGTASPPT

SEQ ID NO: 20286 - protein, 797 aa, Homo sapiens
MRLALLWALGLLGAGSPLPSWPLPNIGGTEEQQAESEKAPREPLEPQVLQDDLPISLKKVLQTSLPEPLRIKLELDGDSHILELLQNRELVPGRPTLVWYQPDGTRVVSEGHTLENCCYQGRVRGYAGSWVSICTCSGLRGLVVLTPERSYTLEQGPGDLQGPPIISRIQDLHLPGHTCALSWRESVHTQKPPEHPLGQRHIRRRRDVVTETKTVELVIVADHSEAQKYRDFQHLLNRTLEVALLLDTFFRPLNVRVALVGLEAWTQRDLVEISPNPAVTLENFLHWRRAHLLPRLPHDSAQLVTGTSFSGPTVGMAIQNSICSPDFSGGVNMDHSTSILGVASSIAHELGHSLGLDHDLPGNSCPCPGPAPAKTCIMEASTDFLPGLNFSNCSRRALEKALLDGMGSCLFERLPSLPPMAAFCGNMFVEPGEQCDCGFLDDCVDPCCDSLTCQLRPGAQCASDGPCCQNCQLRPSGWQCRPTRGDCDLPEFCPGDSSQCPPDVSLGDGEPCAGGQAVCMHGRCASYAQQCQSLWGPGAQPAAPLCLQTANTRGNAFGSCGRNPSGSYVSCTPRDAICGQLQCQTGRTQPLLGSIRDLLWETIDVNGTELNCSWVHLDLGSDVAQPLLTLPGTACGPGLVCIDHRCQRVDLLGAQECRSKCHGHGVCDSNRHCYCEEGWAPPDCTTQLKATSSLTTGLLLSLLVLLVLVMLGASYWYRARLHQRLCQLKGPTCQYRAAQSGPSERPGPPQRALLARGTKAELADRPNPPTRPLPADPVVRSPKVTVGGEKGTASPPT

SEQ ID NO: 20287 - protein, 796 aa, Homo sapiens
MRLALLWALGLLGAGSPLPSWPLPNIGGTEEQQAESEKAPREPLEPQVLQDDLPISLKKVLQTSLPEPLRIKLELDGDSHILELLQNRELVPGRPTLVWYQPDGTRVVSEGHTLENCCYQGRVRGYAGSWVSICTCSGLRGLVVLTPERSYTLEQGPGDLQGPPIISRIQDLHLPGHTCALSWRESVHTQKPPEHPLGQRHIRRRRDVVTETKTVELVIVADHSEAQKYRDFQHLLNRTLEVALLLDTFFRPLNVRVALVGLEAWTQRDLVEISPNPAVTLENFLHWRRAHLLPRLPHDSAQLVTGTSFSGPTVGMAIQNSICSPDFSGGVNMDHSTSILGVASSIAHELGHSLGLDHDLPGNSCPCPGPAPAKTCIMEASTDFLPGLNFSNCSRRALEKALLDGMGSCLFERLPSLPPMAAFCGNMFVEPGEQCDCGFLDDCVDPCCDSLTCQLRPGAQCASDGPCCQNCQLRPSGWQCRPTRGDCDLPEFCPGDSSQCPPDVSLGDGEPCAGGQAVCMHGRCASYAQQCQSLWGPGAQPAAPLCLQTANTRGNAFGSCGRNPSGSYVSCTPRDAICGQLQCQTGRTQPLLGSIRDLLWETIDVNGTELNCSWVHLDLGSDVAQPLLTLPGTACGPGLVCIDHRCQRVDLLGAQECRSKCHGHGVCDSNRHCYCEEGWAPPDCTTQLKATSSLTTGLLLSLLVLLVLVMLGASYWYRARLHQRLCQLKGPTCQYRLVLSASRPPLPGRCRLTLCPRDSSLRGQPSPHPQGSHCLPTPRAGAHRVTCPAQGLESRP

SEQ ID NO: 20288 - protein, 772 aa, Homo sapiens
MRLALLWALGLLGAGSPLPSWPLPNIGGTEEQQAESEKAPREPLEPQVLQDDLPISLKKVLQTSLPEPLRIKLELDGDSHILELLQNRELVPGRPTLVWYQPDGTRVVSEGHTLENCCYQGRVRGYAGSWVSICTCSGLRGLVVLTPERSYTLEQGPGDLQGPPIISRIQDLHLPGHTCALSWRESVHTQKPPEHPLGQRHIRRRRDVVTETKTVELVIVADHSEAQKYRDFQHLLNRTLEVALLLDTFFRPLNVRVALVGLEAWTQRDLVEISPNPAVTLENFLHWRRAHLLPRLPHDSAQLVTGTSFSGPTVGMAIQNSICSPDFSGGVNMDHSTSILGVASSIAHELGHSLGLDHDLPGNSCPCPGPAPAKTCIMEASTDFLPGLNFSNCSRRALEKALLDGMGSCLFERLPSLPPMAAFCGNMFVEPGEQCDCGFLDDCVDPCCDSLTCQLRPGAQCASDGPCCQNCQLRPSGWQCRPTRGDCDLPEFCPGDSSQCPPDVSLGDGEPCAGGQAVCMHGRCASYAQQCQSLWGPGAQPAAPLCLQTANTRGNAFGSCGRNPSGSYVSCTPRDAICGQLQCQTGRTQPLLGSIRDLLWETIDVNGTELNCSWVHLDLGSDVAQPLLTLPGTACGPGLVCIDHRCQRVDLLGAQECRSKCHGHGVCDSNRHCYCEEGWAPPDCTTQLKATSSLTTGLLLSLLVLLVLVMLGASYWYRARLHQRLCQLKGPTCQYSLRGQPSPHPQGSHCLPTPRAGAHRVTCPAQGLESRP

SEQ ID NO: 20289 - protein, 520 aa, Homo sapiens
MRLALLWALGLLGAGSPLPSWPLPNIGGTEEQQAESEKAPREPLEPQVLQDDLPISLKKVLQTSLPEPLRIKLELDGDSHILELLQNRELVPGLNFSNCSRRALEKALLDGMGSCLFERLPSLPPMAAFCGNMFVEPGEQCDCGFLDDCVDPCCDSLTCQLRPGAQCASDGPCCQNCQLRPSGWQCRPTRGDCDLPEFCPGDSSQCPPDVSLGDGEPCAGGQAVCMHGRCASYAQQCQSLWGPGAQPAAPLCLQTANTRGNAFGSCGRNPSGSYVSCTPRDAICGQLQCQTGRTQPLLGSIRDLLWETIDVNGTELNCSWVHLDLGSDVAQPLLTLPGTACGPGLVCIDHRCQRVDLLGAQECRSKCHGHGVCDSNRHCYCEEGWAPPDCTTQLKATSSLTTGLLLSLLVLLVLVMLGASYWYRARLHQRLCQLKGPTCQYRAAQSGPSERPGPPQRALLARGTKSQGPAKPPPPRKPLPADPQGRCPSGDLPGPGAGIPPLVVPSRPAPPPPTVSSLYL

SEQ ID NO: 20290 - protein, 824 aa, Homo sapiens
MRLALLWALGLLGAGSPLPSWPLPNIVLSWGVLGPAGGTEEQQAESEKAPREPLEPQVLQDDLPISLKKVLQTSLPEPLRIKLELDGDSHILELLQNRELVPGRPTLVWYQPDGTRVVSEGHTLENCCYQGRVRGYAGSWVSICTCSGLRGLVVLTPERSYTLEQGPGDLQGPPIISRIQDLHLPGHTCALSWRESVHTQKPPEHPLGQRHIRRRRDVVTETKTVELVIVADHSEAQKYRDFQHLLNRTLEVALLLDTFFRPLNVRVALVGLEAWTQRDLVEISPNPAVTLENFLHWRRAHLLPRLPHDSAQLVTGTSFSGPTVGMAIQNSICSPDFSGGVNMDHSTSILGVASSIAHELGHSLGLDHDLPGNSCPCPGPAPAKTCIMEASTDFLPGLNFSNCSRRALEKALLDGMGSCLFERLPSLPPMAAFCGNMFVEPGEQCDCGFLDDCVDPCCDSLTCQLRPGAQCASDGPCCQNCQLRPSGWQCRPTRGDCDLPEFCPGDSSQCPPDVSLGDGEPCAGGQAVCMHGRCASYAQQCQSLWGPGAQPAAPLCLQTANTRGNAFGSCGRNPSGSYVSCTPRDAICGQLQCQTGRTQPLLGSIRDLLWETIDVNGTELNCSWVHLDLGSDVAQPLLTLPGTACGPGLVCIDHRCQRVDLLGAQECRSKCHGHGVCDSNRHCYCEEGWAPPDCTTQLKATSSLTTGLLLSLLVLLVLVMLGASYWYRARLHQRLCQLKGPTCQYRAAQSGPSERPGPPQRALLARGTKSQGPAKPPPPRKPLPADPQGRCPSGDLPGPGAGIPPLVVPSRPAPPPPTVSSLYL

SEQ ID NO: 20291 - protein, 633 aa, Homo sapiens
MRLALLWALGLLGAGSPLPSWPLPNIVSACNVEAPQVALRSSRQSQRRPRGSPWSPRSFRTISQLASKRCFRELVPGRPTLVWYQPDGTRVVSEGHTLENCCYQGRVRGYAGSWVSICTCSGLRGLVVLTPERSYTLEQGPGDLQGPPIISRIQDLHLPGHTCALSWRESVHTQKPPEHPLGQRHIRRRRDVVTETKTVELVIVADHSEAQKYRDFQHLLNRTLEVALLLDTFFRPLNVRVALVGLEAWTQRDLVEISPNPAVTLENFLHWRRAHLLPRLPHDSAQLVTGTSFSGPTVGMAIQNSICSPDFSGGVNMDHSTSILGVASSIAHELGHSLGLDHDLPGNSCPCPGPAPAKTCIMEASTDFLPGLNFSNCSRRALEKALLDGMGSCLFERLPSLPPMAAFCGNMFVEPGEQCDCGFLDDCVDPCCDSLTCQLRPGAQCASDGPCCQNCQLRPSGWQCRPTRGDCDLPEFCPGDSSQCPPDVSLGDGEPCAGGQAVCMHGRCASYAQQCQSLWGPGAQPAAPLCLQTANTRGNAFGSCGRNPSGSYVSCTPRDAICGQLQCQTGRTQPLLGSIRDLLWETIDVNGTELNCSWVHLDLGSDVAQPLLTLPGTACGPGLVSSLGGQDQV

SEQ ID NO: 20292 - protein, 714 aa, Homo sapiens
MASEAPSPPRSPPPPTSPEPELAQLRRKVEKLERELRSCKRQVREIEKLLHHTERLYQNAESNNQELRTQVEELSKILQRGRNEDNKKSDVEVQTENHAPWSISDYFYQTYYNDVSLPNKVTELSDQQDQAIETSILNSKDHLQVENDAYPGTDRTENVKYRQVDHFASNSQEPASALATEDTSLEGSSLAESLRAAAEAAVSQTGFSYDENTGLYFDHSTGFYYDSENQLYYDPSTGIYYYCDVESGRYQFHSRVDLQPYPTSSTKQSKDKKLKKKRKDPDSSATNEEKDLNSEDQKAFSVEHTSCNEEENFANMKKKAKIGIHHKNSPPKVTVPTSGNTIESPLHENISNSTSFKDEKIMETDSEPEEGEITDSQTEDSYDEAITSEGNVTAEDSEDEDEDKIWPPCIRVIVIRSPVLQIGSLFIITAVNPATIGREKDMEHTLRIPEVGVSKFHAEIYFDHDLQSYVLVDQGSQNGTIVNGKQILQPKTKCDPYVLEHGDEVKIGETVLSFHIHPGSDTCDGCEPGQVRAHLRLDKKDESFVGPTLSKEEKELERRKELKKIRVKYGLQNTEYEDEKTLKNPKYKDRAGKRREQVGSEGTFQRDDAPASVHSEITDSNKGRKMLEKMGWKKGEGLGKDGGGMKTPIQLQLRRTHAGLGTGKPSSFEDVHLLQNKNKKNWDKARERFTENFPETKPQKDDPGTMPWVKGTLE

SEQ ID NO: 20293 - protein, 109 aa, Homo sapiens
MASEAPSPPRSPPPPTSPEPELAQLRRKVEKLERELRSCKRQVREIEKLLHHTERLYQNAESNNQELRTQVRGPPQPRAPSSPGEAFEARDSLGRGPWQGLRTTVEYLK

SEQ ID NO: 20294 - protein, 176 aa, Homo sapiens
MASEAPSPPRSPPPPTSPEPELAQLRRKVEKLERELRSCKRQVREIEKLLHHTERLYQNAESNNQELRTQVEELSKILQRGRNEDNKKSDVEVQTENHAPWSISDYFYQTYYNDVSLPNKVTELSDQQDQAIETSILNSKDHLQVENDAYPGTDRTENVKYRQVDHFASNSQVIKC

SEQ ID NO: 20295 - protein, 1602 aa, Homo sapiens
MVDASGRAAAEGWRKMEAPPDGAADLVPLDRYDAARAKIAANLQWICAKAYGRDNIPEDLRDPFYVDQYEQEHIKPPVIKLLLSSELYCRVCSLILKGDQVAALQGHQSVIQALSRKGIYVMESDDTPVTESDLSRAPIKMSAHMAMVDALMMAYTVEMISIEKVVASVKRFSTFSASKELPYDLEDAMVFWINKVNLKMREITEKEVKLKQQLLESPAHQKVRYRREHLSARQSPYFPLLEDLMRDGSDGAALLAVIHYYCPEQMKLDDICLKEVTSMADSLYNIRLLREFSNEYLNKCFYLTLEDMLYAPLVLKPNVMVFIAELFWWFENVKPDFVQPRDVQELKDAKTVLHQKSSRPPVPISNATKRSFLGSPAAGTLAELQPPVQLPAEGCHRHYLHPEEPEYLGKGTAAFSPSHPLLPLRQKQQKSIQGEDIPDQRHRSNSLTRVDGQPRGAAIAWPEKKTRPASQPTPFALHHAASCEVDPSSGDSISLARSISKDSLASNIVNLTPQNQPHPTATKSHGKSLLSNVSIEDEEEELVAIVRADVVPQQADPEFPRASPRALGLTANARSPQGQLDTSESKPDSFFLEPLMPAVLKPAKEKQVITKEDERGEGRPRSIVSRRPSEGPQPLVRRKMTGSRDLNRTFTPIPCSEFPMGIDPTETGPLSVETAGEVCGGPLALGGFDPFPQGPSTDGFFLHVGRADEDTEGRLYVSCSKSPNSHDSEPWTLLRQDSDSDVVDIEEAEHDFMGEAHPVVFSRYIGEEESAKLQEDMKVKEHEDKDDASGRSSPCLSTASQMSSVSMASGSVKMTSFAERKLQRLNSCETKSSTSSSQKTTPDASESCPAPLTTWRQKREQSPSQHGKDPASLLASELVQLHMQLEEKRRAIEAQKKKMEALSARQRLKLGKAAFLHVVKKGKAEAAPPLRPEHFAKEYSQHNGEDCGDAVSKTEDFLVKEEQREELLHEPQDVDKESLAFAQQHKAKDPVALHELERNKVISAALLEDTVGEVVDVNECDLSIEKLNETISTLQQAILKISQQQEQLLMKSPTVPVPGSKNNSQDHKVKAPVHFVEPLSPTGVAGHRKAPRLGQGRNSRSGRPAELKVPKDRPQGSSRSKTPTPSVETLPHLRPFPASSHPRTPTDPGLDSALEPSGDPHGKCLFDSYRLHDESNQRTLTLSSSKDANILSEQMSLKEVLDASVKEVGSSSSDVSGKESVPVEEPLRSRASLIEVDLSDLKAPDEDGELVSLDGSADLVSEGDQKPGVGFFFKDEQKAEDELAKKRAAFLLKQQRKAEEARVRKQQLEAEVELKRDEARRKAEEDRVRKEEEKARRELIKQEYLRRKQQQILEEQGLGKPKSKPKKPRPKSVHREESCSDSGTKCSSTPDNLSRTQSGSSLSLASAATTEPESVHSGGTPSQRVESMEALPILSRNPSRSTDRDWETASAASSLASVAEYTGPKLFKEPSSKSNKPIIHNAISHCCLAGKVNEPHKNSILEELEKCDANHYIILFRDAGCQFRALYCYYPDTEEIYKLTGTGPKNITKKMIDKLYKYSSDRKQFNLIPAKTMSVSVDALTIHNHLWQPKRPAVPKKAQTRK

SEQ ID NO: 20296 - protein, 1324 aa, Homo sapiens
MADSLYNIRLLREFSNEYLNKCFYLTLEDMLYAPLVLKPNVMVFIAELFWWFENVKPDFVQPRDVQELKDAKTVLHQKSSRPPVPISNATKRSFLGSPAAGTLAELQPPVQLPAEGCHRHYLHPEEPEYLGKGTAAFSPSHPLLPLRQKQQKSIQGEDIPDQRHRSNSLTRVDGQPRGAAIAWPEKKTRPASQPTPFALHHAASCEVDPSSGDSISLARSISKDSLASNIVNLTPQNQPHPTATKSHGKSLLSNVSIEDEEEELVAIVRADVVPQQADPEFPRASPRALGLTANARSPQGQLDTSESKPDSFFLEPLMPAVLKPAKEKQVITKEDERGEGRPRSIVSRRPSEGPQPLVRRKMTGSRDLNRTFTPIPCSEFPMGIDPTETGPLSVETAGEVCGGPLALGGFDPFPQGPSTDGFFLHVGRADEDTEGRLYVSCSKSPNSHDSEPWTLLRQDSDSDVVDIEEAEHDFMGEAHPVVFSRYIGEEESAKLQEDMKVKEHEDKDDASGRSSPCLSTASQMSSVSMASGSVKMTSFAERKLQRLNSCETKSSTSSSQKTTPDASESCPAPLTTWRQKREQSPSQHGKDPASLLASELVQLHMQLEEKRRAIEAQKKKMEALSARQRLKLGKAAFLHVVKKGKAEAAPPLRPEHFAKEYSQHNGEDCGDAVSKTEDFLVKEEQREELLHEPQDVDKESLAFAQQHKAKDPVALHELERNKVISAALLEDTVGEVVDVNECDLSIEKLNETISTLQQAILKISQQQEQLLMKSPTVPVPGSKNNSQDHKVKAPVHFVEPLSPTGVAGHRKAPRLGQGRNSRSGRPAELKVPKDRPQGSSRSKTPTPSVETLPHLRPFPASSHPRTPTDPGLDSALEPSGDPHGKCLFDSYRLHDESNQRTLTLSSSKDANILSEQMSLKEVLDASVKEVGSSSSDVSGKESVPVEEPLRSRASLIEVDLSDLKAPDEDGELVSLDGSADLVSEGDQKPGVGFFFKDEQKAEDELAKKRAAFLLKQQRKAEEARVRKQQLEAEVELKRDEARRKAEEDRVRKEEEKARRELIKQEYLRRKQQQILEEQGLGKPKSKPKKPRPKSVHREESCSDSGTKCSSTPDNLSRTQSGSSLSLASAATTEPESVHSGGTPSQRVESMEALPILSRNPSRSTDRDWETASAASSLASVAEYTGPKLFKEPSSKSNKPIIHNAISHCCLAGKVNEPHKNSILEELEKCDANHYIILFRDAGCQFRALYCYYPDTEEIYKLTGTGPKNITKKMIDKLYKYSSDRKQFNLIPAKTMSVSVDALTIHNHLWQPKRPAVPKKAQTRK

SEQ ID NO: 20297 - protein, 1613 aa, Homo sapiens
MVDASGRAAAEGWRKMEAPPDGAADLVPLDRYDAARAKIAANLQWICAKAYGRDNIPEDLRDPFYVDQYEQEHIKPPVIKLLLSSELYCRVCSLILKGDQVAALQGHQSVIQALSRKGIYVMESDDTPVTESDLSRAPIKMSAHMAMVDALMMAYTVEMISIEKVVASVKRFSTFSASKELPYDLEDAMVFWINKVNLKMREITEKEVKLKQQLLESPAHQKSPSKWYWKLVPVRYRREHLSARQSPYFPLLEDLMRDGSDGAALLAVIHYYCPEQMKLDDICLKEVTSMADSLYNIRLLREFSNEYLNKCFYLTLEDMLYAPLVLKPNVMVFIAELFWWFENVKPDFVQPRDVQELKDAKTVLHQKSSRPPVPISNATKRSFLGSPAAGTLAELQPPVQLPAEGCHRHYLHPEEPEYLGKGTAAFSPSHPLLPLRQKQQKSIQGEDIPDQRHRSNSLTRVDGQPRGAAIAWPEKKTRPASQPTPFALHHAASCEVDPSSGDSISLARSISKDSLASNIVNLTPQNQPHPTATKSHGKSLLSNVSIEDEEEELVAIVRADVVPQQADPEFPRASPRALGLTANARSPQGQLDTSESKPDSFFLEPLMPAVLKPAKEKQVITKEDERGEGRPRSIVSRRPSEGPQPLVRRKMTGSRDLNRTFTPIPCSEFPMGIDPTETGPLSVETAGEVCGGPLALGGFDPFPQGPSTDGFFLHVGRADEDTEGRLYVSCSKSPNSHDSEPWTLLRQDSDSDVVDIEEAEHDFMGEAHPVVFSRYIGEEESAKLQEDMKVKEHEDKDDASGRSSPCLSTASQMSSVSMASGSVKMTSFAERKLQRLNSCETKSSTSSSQKTTPDASESCPAPLTTWRQKREQSPSQHGKDPASLLASELVQLHMQLEEKRRAIEAQKKKMEALSARQRLKLGKAAFLHVVKKGKAEAAPPLRPEHFAKEYSQHNGEDCGDAVSKTEDFLVKEEQREELLHEPQDVDKESLAFAQQHKAKDPVALHELERNKVISAALLEDTVGEVVDVNECDLSIEKLNETISTLQQAILKISQQQEQLLMKSPTVPVPGSKNNSQDHKVKAPVHFVEPLSPTGVAGHRKAPRLGQGRNSRSGRPAELKVPKDRPQGSSRSKTPTPSVETLPHLRPFPASSHPRTPTDPGLDSALEPSGDPHGKCLFDSYRLHDESNQRTLTLSSSKDANILSEQMSLKEVLDASVKEVGSSSSDVSGKESVPVEEPLRSRASLIEVDLSDLKAPDEDGELVSLDGSADLVSEGDQKPGVGFFFKDEQKAEDELAKKRAAFLLKQQRKAEEARVRKQQLEAEVELKRDEARRKAEEDRVRKEEEKARRELIKQEYLRRKQQQILEEQGLGKPKSKPKKPRPKSVHREESCSDSGTKCSSTPDNLSRTQSGSSLSLASAATTEPESVHSGGTPSQRVESMEALPILSRNPSRSTDRDWETASAASSLASVAEYTGPKLFKEPSSKSNKPIIHNAISHCCLAGKVNEPHKNSILEELEKCDANHYIILFRDAGCQFRALYCYYPDTEEIYKLTGTGPKNITKKMIDKLYKYSSDRKQFNLIPAKTMSVSVDALTIHNHLWQPKRPAVPKKAQTRK

SEQ ID NO: 20298 - protein, 669 aa, Homo sapiens
MAYYQEPSVETSIIKFKDQDFTTLRDHCLSMGRTFKDETFPAADSSIGQKLLQEKRLSNVIWKRPQDLPGGPPHFILDDISRFDIQQGGAADCWFLAALGSLTQNPQYRQKILMVQSFSHQYAGIFRFRFWQCGQWVEVVIDDRLPVQGDKCLFVRPRHQNQEFWPCLLEKAYAKLLGSYSDLHYGFLEDALVDLTGGVITNIHLHSSPVDLVKAVKTATKAGSLITCATPSGPTDTAQAMENGLVSLHAYTVTGAEQIQYRRGWEEIISLWNPWGWGEAEWRGRWSDGSQEWEETCDPRKSQLHKKREDGEFWMSCQDFQQKFIAMFICSEIPITLDHGNTLHEGWSQIMFRKQVILGNTAGGPRNDAQFNFSVQEPMEGTNVVVCVTVAVTPSNLKAEDAKFPLDFQVILAGSQRFREKFPPVFFSSFRNTVQSSNNKFRRNFTMTYHLSPGNYVVVAQTRRKSAEFLLRIFLKMPDSDRHLSSHFNLRMKGSPSEHGSQQSIFNRYAQQRLDIDATQLQGLLNQELLTGPPGDMFSLDECRSLVALMELKVNGRLDQEEFARLWKRLVHYQHVFQKVQTSPGVLLSSDLWKAIENTDFLRGIFISRELLHLVTLRYSDSVGRVSFPSLVCFLMRLEAMAKTFRNLSKDGKGLYLTEMEWMSLVMYN

SEQ ID NO: 20299 - protein, 423 aa, Homo sapiens
MAYYQEPSVETSIIKFKDQDFTTLRDHCLSMGRTFKDETFPAADSSIGQKLLQEKRLSNVIWKRPQDLPGGPPHFILDDISRFDIQQGGAADCWFLAALGSLTQNPQYRQKILMVQSFSHQYAGIFRFRFWQCGQWVEVVIDDRLPVQGDKCLFVRPRHQNQEFWPCLLEKAYAKLLGSYSDLHYGFLEDALVDLTGGVITNIHLHSSPVDLVKAVKTATKAGSLITCATPSGPTDTAQAMENGLVSLHAYTVTGAEQIQYRRGWEEIISLWNPWGWGEAEWRGRWSDGSQEWEETCDPRKSQLHKKREDGEFWMSCQDFQQKFIAMFICSEIPITLDHGNTLHEGWSQIMFRKQVILGNTAGGPRNDAQFNFSVQEPMEGTNVVVCVTVAVTPSNLKAEDAKFPLDFQVILAGSQKHCPKLK

SEQ ID NO: 20300 - protein, 421 aa, Homo sapiens
MVEMLPTAILLVLAVSVVAKDNATCDGPCGLRFRQNPQGGVRIVGGKAAQHGAWPWMVSLQIFTYNSHRYHTCGGSLLNSRWVLTAAHCFVGKNNVHDWRLVFGAKEITYGNNKPVKAPLQERYVEKIIIHEKYNSATEGNDIALVEITPPISCGRFIGPGCLPHFKAGLPRGSQSCWVAGWGYIEEKAPRPSSILMEARVDLIDLDLCNSTQWYNGRVQPTNVCAGYPVGKIDTCQGDSGGPLMCKDSKESAYVVVGITSWGVGCARAKRPGIYTATWPYLNWIASKIGSNALRMIQSATPPPPTTRPPPIRPPFSHPISAHLPWYFQPPPRPLPPRPPAAQPRPPPSPPPPPPPPASPLPPPPPPPPPTPSSTTKLPQGLSFAKRLQQLIEVLKGKTYSDGKNHYDMETTELPELTSTS

SEQ ID NO: 20301 - protein, 179 aa, Homo sapiens
MGLIFAKLWSLFCNQEHKVIIVGLDNAGKTTILYQFLMNEVVHTSPTIGSNVEEIVVKNTHFLMWDIGGQESLRSSWNTYYSNTEFIILVVDSIDRERLAITKEELYRMLAHEDLRKAAVLIFANKQDMKGCMTAAEISKYLTLSSIKDHPWHIQSCCALTGEGLCQGLEWMTSRIGVR

SEQ ID NO: 20302 - protein, 407 aa, Homo sapiens
MTTSGALFPSLVPGSRGASNKYLVEFRAGKMSLKGTTVTPDKRKGLVYIQQTDDSLIHFCWKDRTSGNVEDDLIIFPDDCEFKRVPQCPSGRVYVLKFKAGSKRLFFWMQEPKTDQDEEHCRKVNEYLNNPPMPGALGASGSSGHELSALGGEGGLQSLLGNMSHSQLMQLIGPAGLGGLGGLGALTGPGLASLLGSSGPPGSSSSSSSRSQSAAVTPSSTTSSTRATPAPSAPAAASATSPSPAPSSGNGASTAASPTQPIQLSDLQSILATMNVPAGPAGGQQVDLASVLTPEIMAPILANADVQERLLPYLPSGESLPQTADEIQNTLTSPQFQQALGMFSAALASGQLGPLMCQFGLPAEAVEAANKGDVEAFAKAMQNNAKPEQKEGDTKDKKDEEEDMSLD

SEQ ID NO: 20303 - protein, 690 aa, Homo sapiens
MPWEEPAGEKPSCSHSQKAFHMEPAQKPCFTTDMVTWALLCISAETVRGEAPSQPRGIPHRSPVSVDDLWLEKTQRKKLQKQAHVERRLHIGAVHKDGVKCWRKTIITSPESLNLPRRSHPLSQSAPTGLNHMGWPEHTPGTAMPDGALDTAVCADEVGSEEDLYDDLHSSSHHYSHPGGGGEQLAINELISDGSVVCAEALWDHVTMDDQELGFKAGDVIEVMDATNREWWWGRVADGEGWFPASFVRLRVNQDEPADDDAPLAGNSGAEDGGAEAQSSKDQMRTNVINEILSTERDYIKHLRDICEGYVRQCRKRADMFSEEQLRTIFGNIEDIYRCQKAFVKALEQRFNRERPHLSELGACFLEHQADFQIYSEYCNNHPNACVELSRLTKLSKYVYFFEACRLLQKMIDISLDGFLLTPVQKICKYPLQLAELLKYTHPQHRDFKDVEAALHAMKNVAQLINERKRRLENIDKIAQWQSSIEDWEGEDLLVRSSELIYSGELTRVTQPQAKSQQRMFFLFDHQLIYCKKDLLRRDVLYYKGRLDMDGLEVVDLEDGKDRDLHVSIKNAFRLHRGATGDSHLLCTRKPEQKQRWLKAFAREREQVQLDQETGFSITELQRKQAMLNASKQQVTGKPKAVGRPCYLTRQKHPALPSNRPQQQVLVLAEPRRKPSTFWHSISRLAPFRK

SEQ ID NO: 20304 - protein, 619 aa, Homo sapiens
MRPDGQQALDAVVRSFDCHSEAALRQRNDVIYCSLPRTAQGIVQREDQLEVLVSLREVWGRRRGRDGTCTGAMPDGALDTAVCADEVGSEEDLYDDLHSSSHHYSHPGGGGEQLAINELISDGSVVCAEALWDHVTMDDQELGFKAGDVIEVMDATNREWWWGRVADGEGWFPASFVRLRVNQDEPADDDAPLAGNSGAEDGGAEAQSSKDQMRTNVINEILSTERDYIKHLRDICEGYVRQCRKRADMFSEEQLRTIFGNIEDIYRCQKAFVKALEQRFNRERPHLSELGACFLEHQADFQIYSEYCNNHPNACVELSRLTKLSKYVYFFEACRLLQKMIDISLDGFLLTPVQKICKYPLQLAELLKYTHPQHRDFKDVEAALHAMKNVAQLINERKRRLENIDKIAQWQSSIEDWEGEDLLVRSSELIYSGELTRVTQPQAKSQQRMFFLFDHQLIYCKKDLLRRDVLYYKGRLDMDGLEVVDLEDGKDRDLHVSIKNAFRLHRGATGDSHLLCTRKPEQKQRWLKAFAREREQVQLDQETGFSITELQRKQAMLNASKQQVTGKPKAVGRPCYLTRQKHPALPSNRPQQQVLVLAEPRRKPSTFWHSISRLAPFRK

SEQ ID NO: 20305 - protein, 670 aa, Homo sapiens
MPWEEPAGEKPSCSHSQKAFHMEPAQKPCFTTDMVTWALLCISAETVRGEAPSQPRGIPHRSPVSVDDLWLEKTQRKKLQKQAHVERRLHIGAVHKDGVKCWRKTIITSPESLNLPRRSHPLSQSAPTGLNHMGWPEHTPGTAMPDGALDTAVCADEVGSEEDLYDDLHSSSHHYSHPGGGGEQLAINELISDGSVVCAEALWDHVTMDDQELGFKAGDVIEVMDATNREWWWGRVADGEGWFPASFVRLRVNQDEPADDDAPLAGNSGAEDGGAEAQSSKDQMRTNVINEILSTERDYIKHLRDICEGYVRQCRKRADMFSEEQLRTIFGNIEDIYRCQKAFVKALEQRFNRERPHLSELGACFLEHQADFQIYSEYCNNHPNACVELSRLTKLSKYVYFFEACRLLQKMIDISLDGFLLTPVQKICKYPLQLAELLKYTHPQHRDFKDVEAALHAMKNVAQLINERKRRLENIDKIAQWQSSIEDWEGEDLLVRSSELIYSGELTRVTQPQAKSQQRMFFLFDHQLIYCKKDLLRRDVLYYKGRLDMDGLEVVDLEDGKDRDLHVSIKNAFRLHRGATGDSHLLCTRKPEQKQRWLKAFAREREQVQLDQETGFSITELQRKQAMLNASKQQVTGKPKGRRTAAPPPRLPGPYPADIIPFSEPQSQAS

SEQ ID NO: 20306 - protein, 803 aa, Homo sapiens
MNSAEQTVTWLITLGVLESPKKTISDPEGFLQASLKDGVVLCRLLERLLPGTIEKVYPEPRSESECLSNIREFLRGCGASLRLELLFPPSQPPQHLVTTILLSASTFDANDLYQGQNFNKVLSSLVTLNKVTADIGLGSDSVCARPSSHRIKSFDSLGSQSLHTRTSKLFQGQYRSLDMTDNSNNQLVVRAKFNFQQTNEDELSFSKGDVIHVTRVEEGGWWEGTLNGRTGWFPSNYVREVKASEKPVSPKSGTLKSPPKGFDTTAINKSYYNVVLQNILETENEYSKELQTVLSTYLRPLQTSEKLSSANISYLMGNLEEICSFQQMLVQSLEECTKLPEAQQRVGGCFLNLMPQMKTLYLTYCANHPSAVNVLTEHSEELGEFMETKGASSPGILVLTTGLSKPFMRLDKYPTLLKELERHMEDYHTDRQDIQKSMAAFKNLSAQCQEVRKRKELELQILTEAIRNWEGDDIKTLGNVTYMSQVLIQCAGSEEKNERYLLLFPNVLLMLSASPRMSGFIYQGKLPTTGMTITKLEDSENHRNAFEISGSMIERILVSCNNQQDLQEWVEHLQKQTKVTSVGNPTIKPHSVPSHTLPSHPVTPSSKHADSKPAPLTPAYHTLPHPSHHGTPHTTINWGPLEPPKTPKPWSLSCLRPAPPLRPSAALCYKEDLSKSPKTMKKLLPKRKPERKPSDEEFASRKSTAALEEDAQILKVIEAYCTSAKTRQTLNSTWQGTDLMHNHVLADDDQPSLDSLGRRSSLSRLEPSDLSEDSDYDSIWTAHSYRMGSTSRKSCCSYISHQN

SEQ ID NO: 20307 - protein, 646 aa, Homo sapiens
MTDNSNNQLVVRAKFNFQQTNEDELSFSKGDVIHVTRVEEGGWWEGTLNGRTGWFPSNYVREVKASEKPVSPKSGTLKSPPKGFDTTAINKSYYNVVLQNILETENEYSKELQTVLSTYLRPLQTSEKLSSANISYLMGNLEEICSFQQMLVQSLEECTKLPEAQQRVGGCFLNLMPQMKTLYLTYCANHPSAVNVLTEHSEELGEFMETKGASSPGILVLTTGLSKPFMRLDKYPTLLKELERHMEDYHTDRQDIQKSMAAFKNLSAQCQEVRKRKELELQILTEAIRNWEGDDIKTLGNVTYMSQVLIQCAGSEEKNERYLLLFPNVLLMLSASPRMSGFIYQGKLPTTGMTITKLEDSENHRNAFEISGSMIERILVSCNNQQDLQEWVEHLQKQTKVTSVGNPTIKPHSVPSHTLPSHPVTPSSKHADSKPAPLTPAYHTLPHPSHHGTPHTTINWGPLEPPKTPKPWSLSCLRPAPPLRPSAALCYKEDLSKSPKTMKKLLPKRKPERKPSDEEFASRKSTAALEEDAQILKVIEAYCTSAKTRQTLNSSSRKESAPQVLLPEEEKIIVEETKSNGQTVIEEKSLVDTVYALKDEVQELRQDNKKMKKSLEEEQRARKDLEKLVRKVLKNMNDPAWDETNL

SEQ ID NO: 20308 - protein, 753 aa, Homo sapiens
MNSAEQTVTWLITLGVLESPKKTISDPEGFLQASLKDGVVLCRLLERLLPGTIEKTFDANDLYQGQNFNKVLSSLVTLNKVTADIGLGSDSVCARPSSHRIKSFDSLGSQSLHTRTSKLFQGQYRSLDMTDNSNNQLVVRAKFNFQQTNEDELSFSKGDVIHVTRVEEGGWWEGTLNGRTGWFPSNYVREVKASEKPVSPKSGTLKSPPKGFDTTAINKSYYNVVLQNILETENEYSKELQTVLSTYLRPLQTSEKLSSANISYLMGNLEEICSFQQMLVQSLEECTKLPEAQQRVGGCFLNLMPQMKTLYLTYCANHPSAVNVLTEHSEELGEFMETKGASSPGILVLTTGLSKPFMRLDKYPTLLKELERHMEDYHTDRQDIQKSMAAFKNLSAQCQEVRKRKELELQILTEAIRNWEGDDIKTLGNVTYMSQVLIQCAGSEEKNERYLLLFPNVLLMLSASPRMSGFIYQGKLPTTGMTITKLEDSENHRNAFEISGSMIERILVSCNNQQDLQEWVEHLQKQTKVTSVGNPTIKPHSVPSHTLPSHPVTPSSKHADSKPAPLTPAYHTLPHPSHHGTPHTTINWGPLEPPKTPKPWSLSCLRPAPPLRPSAALCYKEDLSKSPKTMKKLLPKRKPERKPSDEEFASRKSTAALEEDAQILKVIEAYCTSAKTRQTLNSTWQGTDLMHNHVLADDDQPSLDSLGRRSSLSRLEPSDLSEDSDYDSIWTAHSYRMGSTSRKSCCSYISHQN

SEQ ID NO: 20309 - protein, 782 aa, Homo sapiens
MNSAEQTVTWLITLGVLESPKKTISDPEGFLQASLKDGVVLCRLLERLLPGTIEKVYPEPRSESECLSNIREFLRGCGASLRLETFDANDLYQGQNFNKVLSSLVTLNKVTADIGLGSDSVCARPSSHRIKSFDSLGSQSLHTRTSKLFQGQYRSLDMTDNSNNQLVVRAKFNFQQTNEDELSFSKGDVIHVTRVEEGGWWEGTLNGRTGWFPSNYVREVKASEKPVSPKSGTLKSPPKGFDTTAINKSYYNVVLQNILETENEYSKELQTVLSTYLRPLQTSEKLSSANISYLMGNLEEICSFQQMLVQSLEECTKLPEAQQRVGGCFLNLMPQMKTLYLTYCANHPSAVNVLTEHSEELGEFMETKGASSPGILVLTTGLSKPFMRLDKYPTLLKELERHMEDYHTDRQDIQKSMAAFKNLSAQCQEVRKRKELELQILTEAIRNWEGDDIKTLGNVTYMSQVLIQCAGSEEKNERYLLLFPNVLLMLSASPRMSGFIYQGKLPTTGMTITKLEDSENHRNAFEISGSMIERILVSCNNQQDLQEWVEHLQKQTKVTSVGNPTIKPHSVPSHTLPSHPVTPSSKHADSKPAPLTPAYHTLPHPSHHGTPHTTINWGPLEPPKTPKPWSLSCLRPAPPLRPSAALCYKEDLSKSPKTMKKLLPKRKPERKPSDEEFASRKSTAALEEDAQILKVIEAYCTSAKTRQTLNSTWQGTDLMHNHVLADDDQPSLDSLGRRSSLSRLEPSDLSEDSDYDSIWTAHSYRMGSTSRKSCCSYISHQN

SEQ ID NO: 20310 - protein, 731 aa, Homo sapiens
MNSAEQTVTWLITLGVLESPKKTISDPEGFLQASLKDGVVLCRLLERLLPGTIEKVYPEPRSESECLSNIREFLRGCGASLRLEDMTDNSNNQLVVRAKFNFQQTNEDELSFSKGDVIHVTRVEEGGWWEGTLNGRTGWFPSNYVREVKASEKPVSPKSGTLKSPPKGFDTTAINKSYYNVVLQNILETENEYSKELQTVLSTYLRPLQTSEKLSSANISYLMGNLEEICSFQQMLVQSLEECTKLPEAQQRVGGCFLNLMPQMKTLYLTYCANHPSAVNVLTEHSEELGEFMETKGASSPGILVLTTGLSKPFMRLDKYPTLLKELERHMEDYHTDRQDIQKSMAAFKNLSAQCQEVRKRKELELQILTEAIRNWEGDDIKTLGNVTYMSQVLIQCAGSEEKNERYLLLFPNVLLMLSASPRMSGFIYQGKLPTTGMTITKLEDSENHRNAFEISGSMIERILVSCNNQQDLQEWVEHLQKQTKVTSVGNPTIKPHSVPSHTLPSHPVTPSSKHADSKPAPLTPAYHTLPHPSHHGTPHTTINWGPLEPPKTPKPWSLSCLRPAPPLRPSAALCYKEDLSKSPKTMKKLLPKRKPERKPSDEEFASRKSTAALEEDAQILKVIEAYCTSAKTRQTLNSSSRKESAPQVLLPEEEKIIVEETKSNGQTVIEEKSLVDTVYALKDEVQELRQDNKKMKKSLEEEQRARKDLEKLVRKVLKNMNDPAWDETNL

SEQ ID NO: 20311 - protein, 625 aa, Homo sapiens
MTDNSNNQLVVRAKFNFQQTNEDELSFSKGDVIHVTRVEEGGWWEGTLNGRTGWFPSNYVREVKASEKPVSPKSGTLKSPPKGFDTTAINKSYYNVVLQNILETENEYSKELQTVLSTYLRPLQTSEKLSSANISYLMGNLEEICSFQQMLVQSLEECTKLPEAQQRVGGCFLNLMPQMKTLYLTYCANHPSAVNVLTEHSEELGEFMETKGASSPGILVLTTGLSKPFMRLDKYPTLLKELERHMEDYHTDRQDIQKSMAAFKNLSAQCQEVRKRKELELQILTEAIRNWEGDDIKTLGNVTYMSQVLIQCAGSEEKNERYLLLFPNVLLMLSASPRMSGFIYQGKLPTTGMTITKLEDSENHRNAFEISGSMIERILVSCNNQQDLQEWVEHLQKQTKVTSVGNPTIKPHSVPSHTLPSHPVTPSSKHADSKPAPLTPAYHTLPHPSHHGTPHTTINWGPLEPPKTPKPWSLSCLRPAPPLRPSAALCYKEDLSKSPKTMKKLLPKRKPERKPSDEEFASRKSTAALEEDAQILKVIEAYCTSAKTRQTLNSTWQGTDLMHNHVLADDDQPSLDSLGRRSSLSRLEPSDLSEDSDYDSIWTAHSYRMGSTSRKSCCSYISHQN

SEQ ID NO: 20312 - protein, 837 aa, Homo sapiens
MNHLEGSAEVEVTDEAAGGEVNESVEADLEHPEVEEEQQQPPQQQHYVGRHQRGRALEDLRAQLGQEEEERGECLARSASTESGFHNHTDTAEGDVIAAARDGYDAERAQDPEDESAYAVQYRPEAEEYTEQAEAEHAEATHRRALPNHLHFHSLEHEEAMNAAYSGYVYTHRLFHRGEDEPYSEPYADYGGLQEHVYEEIGDAPELDARDGLRLYEQERDEAAAYRQEALGARLHHYDERSDGESDSPEKEAEFAPYPRMDSYEQEEDIDQIVAEVKQSMSSQSLDKAAEDMPEAEQDLERPPTPAGGRPDSPGLQAPAGQQRAVGPAGGGEAGQRYSKEKRDAISLAIKDIKEAIEEVKTRTIRSPYTPDEPKEPIWVMRQDISPTRDCDDQRPMDGDSPSPGSSSPLGAESSSTSLHPSDPVEASTNKESRKSLASFPTYVEVPGPCDPEDLIDGIIFAANYLGSTQLLSDKTPSKNVRMMQAQEAVSRIKMAQKLAKSRKKAPEGESQPMTEVDLFISTQRIKVLNADTQETMMDHPLRTISYIADIGNIVVLMARRRMPRSNSQENVEASHPSQDGKRQYKMICHVFESEDAQLIAQSIGQAFSVAYQEFLRANGINPEDLSQKEYSDLLNTQDMYNDDLIHFSKSENCKDVFIEKQKGEILGVVIVESGWGSILPTVIIANMMHGGPAEKSGKLNIGDQIMSINGTSLVGLPLSTCQSIIKGLKNQSRVKLNIVRCPPVTTVLIRRPDLRYQLGFSVQNGIICSLMRGGIAERGGVRVGHRIIEINGQSVVATPHEKIVHILSNAVGEIHMKTMPAAMYRLLTAQEQPVYI

SEQ ID NO: 20313 - protein, 826 aa, Homo sapiens
MNHLEGSAEVEVTDEAAGGEVNESVEADLEHPEVEEEQQQPPQQQHYVGRHQRGRALEDLRAQLGQEEEERGECLARSASTESGFHNHTDTAEGDVIAAARDGYDAERAQDPEDESAYAVQYRPEAEEYTEQAEAEHAEATHRRALPNHLHFHSLEHEEAMNAAYSGYVYTHRLFHRGEDEPYSEPYADYGGLQEHVYEEIGDAPELDARDGLRLYEQERDEAAAYRQEALGARLHHYDERSDGESDSPEKEAEFAPYPRMDSYEQEEDIDQIVAEVKQSMSSQSLDKAAEDMPEAEQDLERPPTPAGGRPDSPGLQAPAGQQRAVGPAGGGEAGQRYSKEKRDAISLAIKDIKEAIEEVKTRTIRSPYTPDEPKEPIWVMRQDISPTRDCDDQRPMDGDSPSPGSSSPLGAESSSTSLHPSDPVEASTNKESRKSLASFPTYVEVPGPCDPEDLIDGIIFAANYLGSTQLLSDKTPSKNVRMMQAQEAVSRIKAPEGESQPMTEVDLFISTQRIKVLNADTQETMMDHPLRTISYIADIGNIVVLMARRRMPRSNSQENVEASHPSQDGKRQYKMICHVFESEDAQLIAQSIGQAFSVAYQEFLRANGINPEDLSQKEYSDLLNTQDMYNDDLIHFSKSENCKDVFIEKQKGEILGVVIVESGWGSILPTVIIANMMHGGPAEKSGKLNIGDQIMSINGTSLVGLPLSTCQSIIKGLKNQSRVKLNIVRCPPVTTVLIRRPDLRYQLGFSVQNGIICSLMRGGIAERGGVRVGHRIIEINGQSVVATPHEKIVHILSNAVGEIHMKTMPAAMYRLLTAQEQPVYI

SEQ ID NO: 20314 - protein, 516 aa, Homo sapiens
MGDPSKQDILTIFKRLRSVPTNKVCFDCGAKNPSWASITYGVFLCIDCSGSHRSLGVHLSFIRSTELDSNWSWFQLRCMQVGGNASASSFFHQHGCSTNDTNAKYNSRAAQLYREKIKSLASQATRKHGTDLWLDSCVVPPLSPPPKEEDFFASHVSPEVSDTAWASAIAEPSSLTSRPVETTLENNEGGQEQGPSVEGLNVPTKATLEVSSIIKKKPNQAKKGLGAKKGSLGAQKLANTCFNEIEKQAQAADKMKEQEDLAKVVSKEESIVSSLRLAYKDLEIQMKKDEKMNISGKKNVDSDRLGMGFGNCRSVISHSVTSDMQTIEQESPIMAKPRKKYNDDSDDSYFTSSSSYFDEPVELRSSSFSSWDDSSDSYWKKETSKDTETVLKTTGYSDRPTARRKPDYEPVENTDEAQKKFGNVKAISSDMYFGRQSQADYETRARLERLSASSSISSADLFEEPRKQPAGNYSLSSVLPNAPDMAQFKQGVRSVAGKLSVFANGVVTSIQDRYGS

SEQ ID NO: 20315 - protein, 472 aa, Homo sapiens
MGDPSKQDILTIFKRLRSVPTNKVCFDCGAKNPSWASITYGVFLCIDCSGSHRSLGVHLSFIRSTELDSNWSWFQLRCMQVGGNASALWLDSCVVPPLSPPPKEEDFFASHVSPEVSDTAWASAIAEPSSLTSRPVETTLENNEGGQEQGPSVEGLNVPTKATLEVSSIIKKKPNQAKKGLGAKKGSLGAQKLANTCFNEIEKQAQAADKMKEQEDLAKVVSKEESIVSSLRLAYKDLEIQMKKDEKMNISGKKNVDSDRLGMGFGNCRSVISHSVTSDMQTIEQESPIMAKPRKKYNDDSDDSYFTSSSSYFDEPVELRSSSFSSWDDSSDSYWKKETSKDTETVLKTTGYSDRPTARRKPDYEPVENTDEAQKKFGNVKAISSDMYFGRQSQADYETRARLERLSASSSISSADLFEEPRKQPAGNYSLSSVLPNAPDMAQFKQGVRSVAGKLSVFANGVVTSIQDRYGS

SEQ ID NO: 20316 - protein, 749 aa, Homo sapiens
MAHRKLESVGSGMLDHRVRPGPVPHSQEPESEDMELPLEGYVPEGLELAALRPESPAPEEQECHNHSPDGDSSSDYVNNTSEEEDYDEGLPEEEEGITYYIRYCPEDDSYLEGMDCNGEEYLAHSAHPVDTDECQEAVEEWTDSAGPHPHGHEAEGSQDYPDGQLPIPEDEPSVLEAHDQEEDGHYCASKEGYQDYYPEEANGNTGASPYRLRRGDGDLEDQEEDIDQIVAEIKMSLSMTSITSASEASPEHGPEPGPEDSVEACPPIKASCSPSRHEARPKSLNLLPEAKHPGDPQRGFKPKTRTPEERLKWPHEQVCNGLEQPRKQQRSDLNGPVDNNNIPETKKVASFPSFVAVPGPCEPEDLIDGIIFAANYLGSTQLLSERNPSKNIRMMQAQEAVSRVKRMQKAAKIKKKANSEGDAQTLTEVDLFISTQRIKVLNADTQETMMDHALRTISYIADIGNIVVLMARRRMPRSASQDCIETTPGAQEGKKQYKMICHVFESEDAQLIAQSIGQAFSVAYQEFLRANGINPEDLSQKEYSDIINTQEMYNDDLIHFSNSENCKELQLEKHKGEILGVVVVESGWGSILPTVILANMMNGGPAARSGKLSIGDQIMSINGTSLVGLPLATCQGIIKGLKNQTQVKLNIVSCPPVTTVLIKRPDLKYQLGFSVQNGIICSLMRGGIAERGGVRVGHRIIEINGQSVVATAHEKIVQALSNSVGEIHMKTMPAAMFRLLTGQETPLYI

SEQ ID NO: 20317 - protein, 737 aa, Homo sapiens
MAHRKLESVGSGMLDHRVRPGPVPHSQEPESEDMELPLEGYVPEGLELAALRPESPAPEEQECHNHSPDGDSSSDYVNNTSEEEDYDEGLPEEEEGITYYIRYCPEDDSYLEGMDCNGEEYLAHSAHPVDTDECQEAVEEWTDSAGPHPHGHEAEGSQDYPDGQLPIPEDEPSVLEAHDQEEDGHYCASKEGYQDYYPEEANGNTGASPYRLRRGDGDLEDQEEDIDQIVAEIKMSLSMTSITSASEASPEHGPEPGPEDSVEACPPIKASCSPSRHEARPKSLNLLPEAKHPGDPQRGFKPKTRTPEERLKWPHEQVCNGLEQPRKQQRSDLNGPVDNNNIPETKKVASFPSFVAVPGPCEPEDLIDGIIFAANYLGSTQLLSERNPSKNIRMMQAQEAVSRVKNSEGDAQTLTEVDLFISTQRIKVLNADTQETMMDHALRTISYIADIGNIVVLMARRRMPRSASQDCIETTPGAQEGKKQYKMICHVFESEDAQLIAQSIGQAFSVAYQEFLRANGINPEDLSQKEYSDIINTQEMYNDDLIHFSNSENCKELQLEKHKGEILGVVVVESGWGSILPTVILANMMNGGPAARSGKLSIGDQIMSINGTSLVGLPLATCQGIIKGLKNQTQVKLNIVSCPPVTTVLIKRPDLKYQLGFSVQNGIICSLMRGGIAERGGVRVGHRIIEINGQSVVATAHEKIVQALSNSVGEIHMKTMPAAMFRLLTGQETPLYI

SEQ ID NO: 20318 - protein, 1369 aa, Homo sapiens
MRPPGFLSRAPSLNRAERGIWSCSMDQREPLPPAPAENEMKYDTNNNEEEEGEQFDFDSGDEIPEADRQAPSAPETGGAGASEAPAPTGGEDGAGAETTPVAEPTKLVLPMKVNPYSVIDITPFQEDQPPTPVPSAEEENVGLHVPCGYLVPVPCGYAVPSNLPLLLPAYSSPVIICATSLDEEAETPEVTEDRQPNSLSSEEPPTSEDQVGREDSALARWAADPANTAWMENPEEAIYDDVPRENSDSEPDEMIYDDVENGDEGGNSSLEYGWSSSEFESYEEQSDSECKNGIPRSFLRSNHKKQLSHDLTRLKEHYEKKMRDLMASTVGVVEIQQLRQKHELKMQKLVKAAKDGTKDGLERTRAAVKRGRSFIRTKSLIAQDHRSSLEEEQNLFIDVDCKHPEAILTPMPEGLSQQQVVRRYILGSVVDSEKNYVDALKRILEQYEKPLSEMEPKVLSERKLKTVFYRVKEILQCHSLFQIALASRVSEWDSVEMIGDVFVASFSKSMVLDAYSEYVNNFSTAVAVLKKTCATKPAFLEFLKQEQEASPDRTTLYSLMMKPIQRFPQFILLLQDMLKNTSKGHPDRLPLQMALTELETLAEKLNERKRDADQRCEVKQIAKAINERYLNKLLSSGSRYLIRSDDMIETVYNDRGEIVKTKERRVFMLNDVLMCATVSSRPSHDSRVMSSQRYLLKWSVPLGHVDAIEYGSSAGTGEHSRHLAVHPPESLAVVANAKPNKVYMGPGQLYQDLQNLLHDLNVIGQITQLIGNLKGNYQNLNQSVAHDWTSGLQRLILKKEDEIRAADCCRIQLQLPGKQDKSGRPTFFTAVFNTFTPAIKESWVNSLQMAKLALEEENHMGWFCVEDDGNHIKKEKHPLLVGHMPVMVAKQQEFKIECAAYNPEPYLNNESQPDSFSTAHGFLWIGSCTHQMGQIAIVSFQNSTPKVIECFNVESRILCMLYVPVEEKRREPGAPPDPETPAVRASDVPTICVGTEEGSISIYKSSQGSKKVRLQHFFTPEKSTVMSLACTSQSLYAGLVNGAVASYARAPDGSWDSEPQKVIKLGVLPVRSLLMMEDTLWAASGGQVFIISVETHAVEGQLEAHQEEGMVISHMAVSGVGIWIAFTSGSTLRLFHTETLKHLQDINIATPVHNMLPGHQRLSVTSLLVCHGLLMVGTSLGVLVALPVPRLQGIPKVTGRGMVSYHAHNSPVKFIVLATALHEKDKDKSRDSLAPGPEPQDEDQKDALPSGGAGSSLSQGDPDAAIWLGDSLGSMTQKSDLSSSSGSLSLSHGSSSLEHRSEDSTIYDLLKDPVSLRSKARRAKKAKASSALVVCGGQGHRRVHRKARQPHQEELAPTVMVWQIPLLNI

SEQ ID NO: 20319 - protein, 1368 aa, Homo sapiens
MRPPGFLSRAPSLNRAERGIWSCSMDQREPLPPAPAENEMKYDTNNNEEEEGEQFDFDSGDEIPEADRQAPSAPETGGAGASEAPAPTGGEDGAGAETTPVAEPTKLVLPMKVNPYSVIDITPFQEDQPPTPVPSAEEENVGLHVPCGYLVPVPCGYAVPSNLPLLLPAYSSPVIICATSLDEEAETPEVTEDRQPNSLSSEEPPTSEDQVGREDSALARWAADPANTAWMENPEEAIYDDVPRENSDSEPDEMIYDDVENGDEGGNSSLEYGWSSSEFESYEEQSDSECKNGIPRSFLRSNHKKQLSHDLTRLKEHYEKKMRDLMASTVGVVEIQQLRQKHELKMQKLVKAAKDGTKDGLERTRAAVKRGRSFIRTKSLIAQDHRSSLEEEQNLFIDVDCKHPEAILTPMPEGLSQQQVVRRYILGSVVDSEKNYVDALKRILEQYEKPLSEMEPKVLSERKLKTVFYRVKEILQCHSLFQIALASRVSEWDSVEMIGDVFVASFSKSMVLDAYSEYVNNFSTAVAVLKKTCATKPAFLEFLKEQEASPDRTTLYSLMMKPIQRFPQFILLLQDMLKNTSKGHPDRLPLQMALTELETLAEKLNERKRDADQRCEVKQIAKAINERYLNKLLSSGSRYLIRSDDMIETVYNDRGEIVKTKERRVFMLNDVLMCATVSSRPSHDSRVMSSQRYLLKWSVPLGHVDAIEYGSSAGTGEHSRHLAVHPPESLAVVANAKPNKVYMGPGQLYQDLQNLLHDLNVIGQITQLIGNLKGNYQNLNQSVAHDWTSGLQRLILKKEDEIRAADCCRIQLQLPGKQDKSGRPTFFTAVFNTFTPAIKESWVNSLQMAKLALEEENHMGWFCVEDDGNHIKKEKHPLLVGHMPVMVAKQQEFKIECAAYNPEPYLNNESQPDSFSTAHGFLWIGSCTHQMGQIAIVSFQNSTPKVIECFNVESRILCMLYVPVEEKRREPGAPPDPETPAVRASDVPTICVGTEEGSISIYKSSQGSKKVRLQHFFTPEKSTVMSLACTSQSLYAGLVNGAVASYARAPDGSWDSEPQKVIKLGVLPVRSLLMMEDTLWAASGGQVFIISVETHAVEGQLEAHQEEGMVISHMAVSGVGIWIAFTSGSTLRLFHTETLKHLQDINIATPVHNMLPGHQRLSVTSLLVCHGLLMVGTSLGVLVALPVPRLQGIPKVTGRGMVSYHAHNSPVKFIVLATALHEKDKDKSRDSLAPGPEPQDEDQKDALPSGGAGSSLSQGDPDAAIWLGDSLGSMTQKSDLSSSSGSLSLSHGSSSLEHRSEDSTIYDLLKDPVSLRSKARRAKKAKASSALVVCGGQGHRRVHRKARQPHQEELAPTVMVWQIPLLNI

SEQ ID NO: 20320 - protein, 1306 aa, Homo sapiens
MDQREPLPPAPAENEMKYDTNNNEEEEGEQFDFDSGDEIPEADRQAPSAPETGGAGASEAPAPTGGEDGAGAETTPVAEPTKLVLPMKVNPYSVIDITPFQEDQPPTPVPSAEEENVGLHVPCGYLVPVPCGYAVPSNLPLLLPAYSSPVIICATSLDEEAETPEVTEDRQPNSLSSEEPPTSEDQVGREDSALARWAADPANTAWMENPEEAIYDDVPRENSDSEPDEMIYDDVENGDEGGNSSLEYGWSSSEFESYEEQSDSECKNGIPRSFLRSNHKKQMQKLVKAAKDGTKDGLERTRAAVKRGRSFIRTKSLIAQDHRSSLEEEQNLFIDVDCKHPEAILTPMPEGLSQQQVVRRYILGSVVDSEKNYVDALKRILEQYEKPLSEMEPKVLSERKLKTVFYRVKEILQCHSLFQIALASRVSEWDSVEMIGDVFVASFSKSMVLDAYSEYVNNFSTAVAVLKKTCATKPAFLEFLKQEQEASPDRTTLYSLMMKPIQRFPQFILLLQDMLKNTSKGHPDRLPLQMALTELETLAEKLNERKRDADQRCEVKQIAKAINERYLNKLLSSGSRYLIRSDDMIETVYNDRGEIVKTKERRVFMLNDVLMCATVSSRPSHDSRVMSSQRYLLKWSVPLGHVDAIEYGSSAGTGEHSRHLAVHPPESLAVVANAKPNKVYMGPGQLYQDLQNLLHDLNVIGQITQLIGNLKGNYQNLNQSVAHDWTSGLQRLILKKEDEIRAADCCRIQLQLPGKQDKSGRPTFFTAVFNTFTPAIKESWVNSLQMAKLALEEENHMGWFCVEDDGNHIKKEKHPLLVGHMPVMVAKQQEFKIECAAYNPEPYLNNESQPDSFSTAHGFLWIGSCTHQMGQIAIVSFQNSTPKVIECFNVESRILCMLYVPVEEKRREPGAPPDPETPAVRASDVPTICVGTEEGSISIYKSSQGSKKVRLQHFFTPEKSTVMSLACTSQSLYAGLVNGAVASYARAPDGSWDSEPQKVIKLGVLPVRSLLMMEDTLWAASGGQVFIISVETHAVEGQLEAHQEEGMVISHMAVSGVGIWIAFTSGSTLRLFHTETLKHLQDINIATPVHNMLPGHQRLSVTSLLVCHGLLMVGTSLGVLVALPVPRLQGIPKVTGRGMVSYHAHNSPVKFIVLATALHEKDKDKSRDSLAPGPEPQDEDQKDALPSGGAGSSLSQGDPDAAIWLGDSLGSMTQKSDLSSSSGSLSLSHGSSSLEHRSEDSTIYDLLKDPVSLRSKARRAKKAKASSALVVCGGQGHRRVHRKARQPHQEELAPTVMVWQIPLLNI

SEQ ID NO: 20321 - protein, 1340 aa, Homo sapiens
MRPPGFLSRAPSLNRAERGIWSCSMDQREPLPPAPAENEMKYDTNNNEEEEGEQFDFDSGDEIPEADRQAPSAPETGGAGASEAPAPTGGEDGAGAETTPVAEPTKLVLPMKVNPYSVIDITPFQEDQPPTPVPSAEEENVGLHVPCGYLVPVPCGYAVPSNLPLLLPAYSSPVIICATSLDEEAETPEVTEDRQPNSLSSEEPPTSEDQVGREDSALARWAADPANTAWMENPEEAIYDDVPRENSDSEPDEMIYDDVENGDEGGNSSLEYGWSSSEFESYEEQSDSECKNGIPRSFLRSNHKKQLSHDLTRLKEHYEKKMRDLMASTVGVVEIQQLRQKHELKMQKLVKAAKDGTKDGLERTRAAVKRGRSFIRTKSLIAQDHRSSLEEEQNLFIDVDCKHPEAILTPMPEGLSQQQVVRRYILGSVVDSEKNYVDALKRILEQYEKPLSEMEPKVLSERKLKTVFYRVKEILQCHSLFQIALASRVSEWDSVEMIGDVFVASFSKSMVLDAYSEYVNNFSTAVAVLKKTCATKPAFLEFLKQEQEASPDRTTLYSLMMKPIQRFPQFILLLQDMLKNTSKGHPDRLPLQMALTELETLAEKLNERKRDADQRCEVKQIAKAINERYLNKLLSSGSRYLIRSDDMIETVYNDRGEIVKTKERRVFMLNDVLMCATVSSRPSHDSRVMSSQRYLLKWSVPLGHVDAIEYGSSAGTGEHSRHLAVHPPESLAVVANAKPNKVYMGPGQLYQDLQNLLHDLNVIGQITQLIGNLKGNYQNLNQSVAHDWTSGLQRLILKKEDEIRAADCCRIQLQLPGKQDKSGRPTFFTAVFNTFTPAIKESWVNSLQMAKLALEEENHMGWFCVEDDGNHIKKEKHPLLVGHMPVMVAKQQEFKIGSCTHQMGQIAIVSFQNSTPKVIECFNVESRILCMLYVPVEEKRREPGAPPDPETPAVRASDVPTICVGTEEGSISIYKSSQGSKKVRLQHFFTPEKSTVMSLACTSQSLYAGLVNGAVASYARAPDGSWDSEPQKVIKLGVLPVRSLLMMEDTLWAASGGQVFIISVETHAVEGQLEAHQEEGMVISHMAVSGVGIWIAFTSGSTLRLFHTETLKHLQDINIATPVHNMLPGHQRLSVTSLLVCHGLLMVGTSLGVLVALPVPRLQGIPKVTGRGMVSYHAHNSPVKFIVLATALHEKDKDKSRDSLAPGPEPQDEDQKDALPSGGAGSSLSQGDPDAAIWLGDSLGSMTQKSDLSSSSGSLSLSHGSSSLEHRSEDSTIYDLLKDPVSLRSKARRAKKAKASSALVVCGGQGHRRVHRKARQPHQEELAPTVMVWQIPLLNI

SEQ ID NO: 20322 - protein, 1344 aa, Homo sapiens
MDQREPLPPAPAENEMKYDTNNNEEEEGEQFDFDSGDEIPEADRQAPSAPETGGAGASEAPAPTGGEDGAGAETTPVAEPTKLVLPMKVNPYSVIDITPFQEDQPPTPVPSAEEENVGLHVPCGYLVPVPCGYAVPSNLPLLLPAYSSPVIICATSLDEEETPEVTEDRQPNSLSSEEPPTSEDQVGREDSALARWAADPANTAWMENPEEAIYDDVPRENSDSEPDEMIYDDVENGDEGGNSSLEYGWSSSEFESYEEQSDSECKNGIPRSFLRSNHKKQLSHDLTRLKEHYEKKMRDLMASTVGVVEIQQLRQKHELKMQKLVKAAKDGTKDGLERTRAAVKRGRSFIRTKSLIAQDHRSSLEEEQNLFIDVDCKHPEAILTPMPEGLSQQQVVRRYILGSVVDSEKNYVDALKRILEQYEKPLSEMEPKVLSERKLKTVFYRVKEILQCHSLFQIALASRVSEWDSVEMIGDVFVASFSKSMVLDAYSEYVNNFSTAVAVLKKTCATKPAFLEFLKQEQEASPDRTTLYSLMMKPIQRFPQFILLLQDMLKNTSKGHPDRLPLQMALTELETLAEKLNERKRDADQRCEVKQIAKAINERYLNKLLSSGSRYLIRSDDMIETVYNDRGEIVKTKERRVFMLNDVLMCATVSSRPSHDSRVMSSQRYLLKWSVPLGHVDAIEYGSSAGTGEHSRHLAVHPPESLAVVANAKPNKVYMGPGQLYQDLQNLLHDLNVIGQITQLIGNLKGNYQNLNQSVAHDWTSGLQRLILKKEDEIRAADCCRIQLQLPGKQDKSGRPTFFTAVFNTFTPAIKESWVNSLQMAKLALEEENHMGWFCVEDDGNHIKKEKHPLLVGHMPVMVAKQQEFKIECAAYNPEPYLNNESQPDSFSTAHGFLWIGSCTHQMGQIAIVSFQNSTPKVIECFNVESRILCMLYVPVEEKRREPGAPPDPETPAVRASDVPTICVGTEEGSISIYKSSQGSKKVRLQHFFTPEKSTVMSLACTSQSLYAGLVNGAVASYARAPDGSWDSEPQKVIKLGVLPVRSLLMMEDTLWAASGGQVFIISVETHAVEGQLEAHQEEGMVISHMAVSGVGIWIAFTSGSTLRLFHTETLKHLQDINIATPVHNMLPGHQRLSVTSLLVCHGLLMVGTSLGVLVALPVPRLQGIPKVTGRGMVSYHAHNSPVKFIVLATALHEKDKDKSRDSLAPGPEPQDEDQKDALPSGGAGSSLSQGDPDAAIWLGDSLGSMTQKSDLSSSSGSLSLSHGSSSLEHRSEDSTIYDLLKDPVSLRSKARRAKKAKASSALVVCGGQGHRRVHRKARQPHQEELAPTVMVWQIPLLNI

SEQ ID NO: 20323 - protein, 275 aa, Homo sapiens
MQCHRDLALSQALWGWQLSKQSGWAHPSLPHSPLPSTVHSCSWAPPHLQRHLPLATVSPGTTQLTQGPAGRTLGQTQASCPEPRPSMDAVDATMEKLRAQCLSRGASGIQGLARFFRQLDRDGSRSLDADEFRQGLAKLGLVLDQAEAEGVCRKWDRNGSGTLDLEEFLRALRPPMSQAREAVIAAAFAKLDRSGDGVVTVDDLRGVYSGRAHPKVRSGEWTEDEVLRRFLDNFDSSEKDGQVTLAEFQDYYSGVSASMNTDEEFVAMMTSAWQL

SEQ ID NO: 20324 - protein, 248 aa, Homo sapiens
MQCHRDLALSQALWGWQLSKQSGWAHPSLPHSPLPSTVHSCSWAPPHLQRHLPLATVSPGTTQLTQGPAGRTLGQTQASCPEPRPSMDAVDATMEKLRAQCLSRGASGIQGLARFFRQLDRDGSRSLDADEFRQGLAKLGLVLDQAEAEGVCRKWDRNGSGTLDLEEFLRALRPPMSQAREAVIAAAFAKLDRSGDGVVTVDDLRGVYSGRAHPKVTLAEFQDYYSGVSASMNTDEEFVAMMTSAWQL

SEQ ID NO: 20325 - protein, 189 aa, Homo sapiens
MDAVDATMEKLRAQCLSRGASGIQGLARFFRQLDRDGSRSLDADEFRQGLAKLGLVLDQAEAEGVCRKWDRNGSGTLDLEEFLRALRPPMSQAREAVIAAAFAKLDRSGDGVVTVDDLRGVYSGRAHPKVRSGEWTEDEVLRRFLDNFDSSEKDGQVTLAEFQDYYSGVSASMNTDEEFVAMMTSAWQL

SEQ ID NO: 20326 - protein, 557 aa, Homo sapiens
MGNSFCYTAVYCMINTGTQMDLEVKGVAATSRSQIQPFFGRKKPLQQRWTSESWTNQNSCPPVVPRLDLGSLVDSDDEDNFSYIPLSTANLPNSSSTLGWVTPCQTPYTQYHLNKLDQNIIPENLPAPTDKCKLKYQQCKTEIKEGYKQYSQRNAENTKSNVTHKQSPRNKIDEKCVQDEEANTDDLTTLDRKAILQQGYADNSCDKQQRARKLDAEIVAAEKKKQIVAEQVMIDHLSRAVISDPEQNLAIEQKESDHILPDSKMTPLRFRKRTLHETKIRTHSTLTENVLSHKLQFDGRIVSRNGRDACRELIGFFFTHDQSLTIYEYRQFGKNRTNVLPFIQKSIYSHQCGRRKGKQYRLGDFYVGATLTFLSSDHLSLPESIKENTLLKLRITNIDQIALDSLKTASMEQEDDIIIQETNDRLVFKAIQDVLKEKLHKRGVRILTGLGKYFQQLDKEGNGLLDKADFKQALKVFHLEVSEKDFESAWLILNDNGNGKVDYGEFKRGIIGEMNEYRKSYVRKAFMKLDFNKSGSVPIINIRKCYCAKKHSQVISG

SEQ ID NO: 20327 - protein, 382 aa, Homo sapiens
MIDHLSRAVISDPEQNLAIEQKESDHILPDSKMTPLRFRKRTLHETKIRTHSTLTENVLSHKLQFDGRIVSRNGRDACRELIGFFFTHDQSLTIYEYRQFGKNRTNVLPFIQKSIYSHQCGRRKGKQYRLGDFYVGATLTFLSSDHLSLPESIKENTLLKLRITNIDQIALDSLKTASMEQEDDIIIQETNDRLVFKAIQDVLKEKLHKRGVRILTGLGKYFQQLDKEGNGLLDKADFKQALKVFHLEVSEKDFESAWLILNDNGNGKVDYGEFKRGIIGEMNEYRKSYVRKAFMKLDFNKSGSVPIINIRKCYCAKKHSQVISGHSTEEEIKSSFLETLKVACSKSDEVSYGEFEDYYEGLSIGIVDDEDFVNILRTPWGI

SEQ ID NO: 20328 - protein, 293 aa, Homo sapiens
MIDHLSRAVISDPEQNLAIEQKESDHILPDSKMTPLRFRKRTLHETKIRTHSTLTENVLSHKLQFDGRIVSRTNVLPFIQKSIYSHQCGRRKGKQYRLGDFYVGATLTFLSSDHLSLPESIKENTLLKLRITNIDQIALDSLKTASMEQEDDIIIQETNDRLVFKAIQDVLKEKLHKRGVRILTGLGKYFQQLDKEGNGLLDKADFKQALKVFHLEVSEKDFESAWLILNDNGNGKVDYGEFKRGIIGEMNEYRKSYVRKAFMKLDFNKSGSVPIINIRKCYCAKKHSQVISG

SEQ ID NO: 20329 - protein, 315 aa, Homo sapiens
MRNRMAPENPQPDPFINRNYSNMKVIPPQDPASPSFTLLSKLECSGTVSAYCSLNLPGSTDPPTSASRVAATTAIRRRHKERTSFTHQQYEELEALFSQTMFPDRNLQEKLALRLDLPESTVKVWFRNRRFKLKKQQQQQSAKQRNQILPSKKNVPTSPRTSPSPYAFSPVISDFYSSLPSQPLDPSNWAWNSTFTESSTSDFQMQDTQWERLVASVPALYSDAYDIFQIIELYNLPDENEISSSSFHCLYQYLSPTKYQVGGQGSSLSIFAGPAVGLSPAQTWPNMTSQAFEAYSLTDSLEFQKTSNMVDLGFL

SEQ ID NO: 20330 - protein, 1522 aa, Homo sapiens
MSVRLPQSIDRLSSLSSLGDSAPERKSPSHHRQPSDASETTGLVQRCVIIQKDQHGFGFTVSGDRIVLVQSVRPGGAAMKAGVKEGDRIIKVNGTMVTNSSHLEVVKLIKSGAYVALTLLGSSPSSMGISGLQQDPSPAGAPRITSVIPSPPPPPPLPPPQRITGPKPLQDPEVQKHATQILRNMLRQEEKELQDILPLYGDTSQRPSEGRLSLDSQEGDSGLDSGTERFPSLSESLMNRNSVLSDPGLDSPRTSPVIMARVAQHHRRQGSDAAVPSTGDQGVDQSPKPLIIGPEEDYDPGYFNNESDIIFQDLEKLKSRPAHLGVFLRYIFSQADPSPLLFYLCAEVYQQASPKDSRSLGKDIWNIFLEKNAPLRVKIPEMLQAEIDSRLRNSEDARGVLCEAQEAAMPEIQEQIHDYRTKRTLGLGSLYGENDLLDLDGDPLRERQVAEKQLAALGDILSKYEEDRSAPMDFALNTYMSHAGIRLREARPSNTAEKAQSAPDKDKWLPFFPKTKKSSNSKKEKDALEDKKRNPILKYIGKPKSSSQSTFHIPLSPVEVKPGNVRNIIQHFENNQQYDAPEPGTQRLSTGSFPEDLLESDSSRSEIRLGRSESLKGREEMKRSRKAENVPRSRSDVDMDAAAEATRLHQSASSSTSSLSTRSLENPTPPFTPKMGRRSIESPSLGFCTDTLLPHLLEDDLGQLSDLEPEPDAQNWQHTVGKDVVAGLTQREIDRQEVINELFVTEASHLRTLRVLDLIFYQRMKKENLMPREELARLFPNLPELIEIHNSWCEAMKKLREEGPIIKEISDLMLARFDGPAREELQQVAAQFCSYQSIALELIKTKQRKESRFQLFMQEAESHPQCRRLQLRDLIISEMQRLTKYPLLLESIIKHTEGGTSEHEKLCRARDQCREILKYVNEAVKQTENRHRLEGYQKRLDATALERASNPLAAEFKSLDLTTRKMIHEGPLTWRISKDKTLDLHVLLLEDLLVLLQKQDEKLLLKCHSKTAVGSSDSKQTFSPVLKLNAVLIRSVATDKRAFFIICTSKLGPPQIYELVALTSSDKNTWMELLEEAVRNATRHPGAAPMPVHPPPPGPREPAQQGPTPSRVELDDSDVFHGEPEPEELPGGTGSQQRVQGKHQVLLEDPEQEGSAEEEELGVLPCPSTSLDGENRGIRTRNPIHLAFPGPLFMEGLADSALEDVENLRHLILWSLLPGHTMETQAAQEPEDDLTPTPSVISVTSHPWDPGSPGQAPPGGEGDNTQLAGLEGERPEQEDMGLCSLEHLPPRTRNSGIWESPELDRNLAEDASSTEAAGGYKVVRKAEVAGSKVVPALPESGQSEPGPPEVEGGTKATGNCFYVSMPSGPPDSSTDHSEAPMSPPQPDSLPAGQTEPQPQLQGGNDDPRRPSRSPPSLALRDVGMIFHTIEQLTLKLNRLKDMELAHRELLKSLGGESSGGTTPVGSFHTEAARWTDGSLSPPAKEPLASDSRNSHELGPCPEDGSDAPLEDSTADAAASPGP

SEQ ID NO: 20331 - protein, 1562 aa, Homo sapiens
MSVRLPQSIDRLSSLSSLGDSAPERKSPSHHRQPSDASETTGLVQRCVIIQKDQHGFGFTVSGDRIVLVQSVRPGGAAMKAGVKEGDRIIKVNGTMVTNSSHLEVVKLIKSGAYVALTLLGSSPSSMGISGLQQDPSPAGAPRITSVIPSPPPPPPLPPPQRITGPKPLQDPEVQKHATQILRNMLRQEEKELQRICEVYSRNPASLLEEQIEGARRRVTQLQLKIQQETGGSVDILPLYGDTSQRPSEGRLSLDSQEGDSGLDSGTERFPSLSESLMNRNSVLSDPGLDSPRTSPVIMARVAQHHRRQGSDAAVPSTGDQGVDQSPKPLIIGPEEDYDPGYFNNESDIIFQDLEKLKSRPAHLGVFLRYIFSQADPSPLLFYLCAEVYQQASPKDSRSLGKDIWNIFLEKNAPLRVKIPEMLQAEIDSRLRNSEDARGVLCEAQEAAMPEIQEQIHDYRTKRTLGLGSLYGENDLLDLDGDPLRERQVAEKQLAALGDILSKYEEDRSAPMDFALNTYMSHAGIRLREARPSNTAEKAQSAPDKDKWLPFFPKTKKSSNSKKEKDALEDKKRNPILKYIGKPKSSSQSTFHIPLSPVEVKPGNVRNIIQHFENNQQYDAPEPGTQRLSTGSFPEDLLESDSSRSEIRLGRSESLKGREEMKRSRKAENVPRSRSDVDMDAAAEATRLHQSASSSTSSLSTRSLENPTPPFTPKMGRRSIESPSLGFCTDTLLPHLLEDDLGQLSDLEPEPDAQNWQHTVGKDVVAGLTQREIDRQEVINELFVTEASHLRTLRVLDLIFYQRMKKENLMPREELARLFPNLPELIEIHNSWCEAMKKLREEGPIIKEISDLMLARFDGPAREELQQVAAQFCSYQSIALELIKTKQRKESRFQLFMQEAESHPQCRRLQLRDLIISEMQRLTKYPLLLESIIKHTEGGTSEHEKLCRARDQCREILKYVNEAVKQTENRHRLEGYQKRLDATALERASNPLAAEFKSLDLTTRKMIHEGPLTWRISKDKTLDLHVLLLEDLLVLLQKQDEKLLLKCHSKTAVGSSDSKQTFSPVLKLNAVLIRSVATDKRAFFIICTSKLGPPQIYELVALTSSDKNTWMELLEEAVRNATRHPGAAPMPVHPPPPGPREPAQQGPTPSRVELDDSDVFHGEPEPEELPGGTGSQQRVQGKHQVLLEDPEQEGSAEEEELGVLPCPSTSLDGENRGIRTRNPIHLAFPGPLFMEGLADSALEDVENLRHLILWSLLPGHTMETQAAQEPEDDLTPTPSVISVTSHPWDPGSPGQAPPGGEGDNTQLAGLEGERPEQEDMGLCSLEHLPPRTRNSGIWESPELDRNLAEDASSTEAAGGYKVVRKAEVAGSKVVPALPESGQSEPGPPEVEGGTKATGNCFYVSMPSGPPDSSTDHSEAPMSPPQPDSLPAGQTEPQPQLQGGNDDPRRPSRSPPSLALRDVGMIFHTIEQLTLKLNRLKDMELAHRELLKSLGGESSGGTTPVGSFHTEAARWTDGSLSPPAKEPLASDSRNSHELGPCPEDGSDAPLEDSTADAAASPGP

SEQ ID NO: 20332 - protein, 700 aa, Homo sapiens
MAGIAAKLAKDREAAEGLGSHDRAIKYLNQDYEALRNECLEAGTLFQDPSFPAIPSALGFKELGPYSSKTRGIEWKRPTEICADPQFIIGGATRTDICQGALGDCWLLAAIASLTLNEEILARVVPLNQSFQENYAGIFHFQFWQYGEWVEVVVDDRLPTKDGELLFVHSAEGSEFWSALLEKAYAKINGCYEALSGGATTEGFEDFTGGIAEWYELKKPPPNLFKIIQKALQKGSLLGCSIDITSAADSEAITFQKLVKGHAYSVTGAEEVESNGSLQKLIRIRNPWGEVEWTGRWNDNCPSWNTIDPEERERLTRRHEDGEFWMSFSDFLRHYSRLEICNLTPDTLTSDTYKKWKLTKMDGNWRRGSTAGGCRNYPNTFWMNPQYLIKLEEEDEDEEDGESGCTFLVGLIQKHRRRQRKMGEDMHTIGFGIYEVPEELSGQTNIHLSKNFFLTNRARERSDTFINLREVLNRFKLPPGEYILVPSTFEPNKDGDFCIRVFSEKKADYQAVDDEIEANLEEFDISEDDIDDGFRRLFAQLAGEDAEISAFELQTILRRVLAKRQDIKSDGFSIETCKIMVDMLDSDGSGKLGLKEFYILWTKIQKYQKIYREIDVDRSGTMNSYEMRKALEEAGFKMPCQLHQVIVARFADDQLIIDFDNFVRCLVRLETLFKIFKQLDPENTGTIELDLISWLCFSVL

SEQ ID NO: 20333 - protein, 622 aa, Homo sapiens
MEICADPQFIIGGATRTDICQGALGDCWLLAAIASLTLNEEILARVVPLNQSFQENYAGIFHFQFWQYGEWVEVVVDDRLPTKDGELLFVHSAEGSEFWSALLEKAYAKINGCYEALSGGATTEGFEDFTGGIAEWYELKKPPPNLFKIIQKALQKGSLLGCSIDITSAADSEAITFQKLVKGHAYSVTGAEEVESNGSLQKLIRIRNPWGEVEWTGRWNDNCPSWNTIDPEERERLTRRHEDGEFWMSFSDFLRHYSRLEICNLTPDTLTSDTYKKWKLTKMDGNWRRGSTAGGCRNYPNTFWMNPQYLIKLEEEDEDEEDGESGCTFLVGLIQKHRRRQRKMGEDMHTIGFGIYEVPEELSGQTNIHLSKNFFLTNRARERSDTFINLREVLNRFKLPPGEYILVPSTFEPNKDGDFCIRVFSEKKADYQAVDDEIEANLEEFDISEDDIDDGFRRLFAQLAGEDAEISAFELQTILRRVLAKRQDIKSDGFSIETCKIMVDMLDSDGSGKLGLKEFYILWTKIQKYQKIYREIDVDRSGTMNSYEMRKALEEAGFKMPCQLHQVIVARFADDQLIIDFDNFVRCLVRLETLFKIFKQLDPENTGTIELDLISWLCFSVL

SEQ ID NO: 20334 - protein, 329 aa, Homo sapiens
MELHILEHRVRVLSVARPGLWLYTHPLIKLLFLPRRSRCKFFSLTETPEDYTLMVDEEGFKELPPSEFLQVAEATWLVLNVSSHSGAAVQAAGVTKIARSVIAPLAEHHVSVLMLSTYQTDFILVREQDLSVVIHTLAQEFDIYREVGGEPVPVTRDDSSNGFPRTQHGPSPTVHPIQSPQNRFCVLTLDPETLPAIATTLIDVLFYSHSTPKEAASSSPEPSSITFFAFSLIEGYISIVMDAETQKKFPSDLLLTSSSGELWRMVRIGGQPLGFDECGIVAQIAGPLAAADISAYYISTFNFDHALVPEDGIGSVIEVLQRRQEGLAS

SEQ ID NO: 20335 - protein, 329 aa, Homo sapiens
MELHILEHRLQVASVAKESIPLFTYGLIKLAFLSSKTRCKFFSLTETPEDYTIIVDEEGFLELPSSEHLSVADATWLALNVVSGGGSFSSSQPIGVTKIAKSVIAPLADQNISVFMLSTYQTDFILVRERDLPFVTHTLSSEFTILRVVNGETVAAENLGITNGFVKPKLVQRPVIHPLSSPSNRFCVTSLDPDTLPAVATLLMDVMFYSNGVKDPMATGDDCGHIRFFSFSLIEGYISLVMDVQTQQRFPSNLLFTSASGELWKMVRIGGQPLGFDECGIVAQISEPLAAADIPAYYISTFKFDHALVPEENINGVISALKVSQAEKH

SEQ ID NO: 20336 - protein, 335 aa, Homo sapiens
MELSCPGSRCPVQEQRARWERKRACTARELLETERRYQEQLGLVATYFLGILKAKGTLRPPERQALFGSWELIYGASQELLPYLEGGCWGQGLEGFCRHLELYNQFAANSERSQTTLQEQLKKNKGFRRFVRLQEGRPEFGGLQLQDLLPLPLQRLQQYENLVVALAENTGPNSPDHQQLTRAARLISETAQRVHTIGQKQKNDQHLRRVQALLSGRQAKGLTSGRWFLRQGWLLVVPPHGEPRPRMFFLFTDVLLMAKPRPPLHLLRSGTFACKALYPMAQCHLSRVFGHSGGPCGGLLSLSFPHEKLLLMSTDQEELSRWYHSLTWAISSQKN

SEQ ID NO: 20337 - protein, 299 aa, Homo sapiens
MLGVCQTLKQYFLGILKAKGTLRPPERQALFGSWELIYGASQELLPYLEGGCWGQGLEGFCRHLELYNQFAANSERSQTTLQEQLKKNKGFRRFVRLQEGRPEFGGLQLQDLLPLPLQRLQQYENLVVALAENTGPNSPDHQQLTRAARLISETAQRVHTIGQKQKNDQHLRRVQALLSGRQAKGLTSGRWFLRQGWLLVVPPHGEPRPRMFFLFTDVLLMAKPRPPLHLLRSGTFACKALYPMAQCHLSRVFGHSGGPCGGLLSLSFPHEKLLLMSTDQEELSRWYHSLTWAISSQKN

SEQ ID NO: 20338 - protein, 186 aa, Homo sapiens
MELSCPGSRCPVQEQRARWERKRACTARELLETERRYQEQLGLVATYFLGILKAKGTLRPPERQALFGSWELIYGASQELLPYLEGGCWGQGLEGFCRHLELYNQFAANSERSQTTLQEQLKKNKGFRRFVRLQEGRPEFGGLQLQDLLPLPLQRLQQYENLVVALAENTGPNSPDHQQLTPVLPS

SEQ ID NO: 20339 - protein, 305 aa, Homo sapiens
MELSCPGSRCPVQEQRARWERKRACTARELLETERRYQEQLGLVATYFLGILKAKGTLRPPERQALFGSWELIYGASQELLPYLEGGCWGQGLEGFCRHLELYNQFAANSERSQTTLQEQLKKNKGFRRFVRLQEGRPEFGGLQLQDLLPLPLQRLQQYENLVVALAENTGPNSPDHQQLTRAARLISETAQRVHTIGQKQKNDQHLRRVQALLSGRQAKGLTSGRWFLRQGWLLVVPPHGEPRPRMFFLFTDVLLMAKPRPPLHLLRSGTFACKALYPMAQCHLSRVFGHSGGPCGGLLTVLPS

SEQ ID NO: 20340 - protein, 484 aa, Homo sapiens
MEAEEAQHGASPPISAIEEFSIIPEAPMRSSQVSALGLEAQEDEDPSYKWREEHRLSATQQSELRDVCDYAIETMPSFPKEGSADVEPNQESLVAEACDTPEHWEAVPQSLAGRQARTLAPPELWACPIQSEHLDMAPFSSDLGSEEEEVEFWPGLTSLTLGSGQAEEEEETSSDNSGQTRYYSPCEEHPAETNQNEGAESGTIRQGEELPSEELQESQGLLHPQEVQVLEEQGQQEAGFRGEGTLREDVCADGLLGEEQMIEQVNDEKGEQKQKQEQVQDVMLGRQGERMGLTGEPEGLNDGEWEQEDMERKAQGQGGPEQGEERKRELQVPEENRADSQDEKSQTFLGKSEEVTGKQEDHGIKEKGVPVSGQEAKEPESWDGGRLGAVGRARSREEENEHHGPSMPALIAPEDSPHCDLFPGASYLVTQIPGTQTESRAEELSPAALSPLLEPIRCSHQPISLLGSFLTEESPDKEKLLSVL

SEQ ID NO: 20341 - protein, 2236 aa, Homo sapiens
MAHNAGAAAAAGTHSAKSGGSEAALKEGGSAAALSSSSSSSAAAAAASSSSSSGPGSAMETGLLPNHKLKTVGEAPAAPPHQQHHHHHHAHHHHHHAHHLHHHHALQQQLNQFQQQQQQQQQQQQQQQQQQHPISNNNSLGGAGGGAPQPGPDMEQPQHGGAKDSAAGGQADPPGPPLLSKPGDEDDAPPKMGEPAGGRYEHPGLGALGTQQPPVAVPGGGGGPAAVPEFNNYYGSAAPASGGPGGRAGPCFDQHGGQQSPGMGMMHSASAAAAGAPGSMDPLQNSHEGYPNSQCNHYPGYSRPGAGGGGGGGGGGGGGSGGGGGGGGAGAGGAGAGAVAAAAAAAAAAAGGGGGGGYGGSSAGYGVLSSPRQQGGGMMMGPGGGGAASLSKAAAGSAAGGFQRFAGQNQHPSGATPTLNQLLTSPSPMMRSYGGSYPEYSSPSAPPPPPSQPQSQAAAAGAAAGGQQAAAGMGLGKDMGAQYAAASPAWAAAQQRSHPAMSPGTPGPTMGRSQGSPMDPMVMKRPQLYGMGSNPHSQPQQSSPYPGGSYGPPGPQRYPIGIQGRTPGAMAGMQYPQQQMPPQYGQQGVSGYCQQGQQPYYSQQPQPPHLPPQAQYLPSQSQQRYQPQQDMSQEGYGTRSQPPLAPGKPNHEDLNLIQQERPSSLPDLSGSIDDLPTGTEATLSSAVSASGSTSSQGDQSNPAQSPFSPHASPHLSSIPGGPSPSPVGSPVGSNQSRSGPISPASIPGSQMPPQPPGSQSESSSHPALSQSPMPQERGFMAGTQRNPQMAQYGPQQTGPSMSPHPSPGGQMHAGISSFQQSNSSGTYGPQMSQYGPQGNYSRPPAYSGVPSASYSGPGPGMGISANNQMHGQGPSQPCGAVPLGRMPSAGMQNRPFPGNMSSMTPSSPGMSQQGGPGMGPPMPTVNRKAQEAAAAVMQAAANSAQSRQGSFPGMNQSGLMASSSPYSQPMNNSSSLMNTQAPPYSMAPAMVNSSAASVGLADMMSPGESKLPLPLKADGKEEGTPQPESKSKKSSSSTTTGEKITKVYELGNEPERKLWVDRYLTFMEERGSPVSSLPAVGKKPLDLFRLYVCVKEIGGLAQVNKNKKWRELATNLNVGTSSSAASSLKKQYIQYLFAFECKIERGEEPPPEVFSTGDTKKQPKLQPPSPANSGSLQGPQTPQSTGSNSMAEVPGDLKPPTPASTPHGQMTPMQGGRSSTISVHDPFSDVSDSSFPKRNSMTPNAPYQQGMSMPDVMGRMPYEPNKDPFGGMRKVPGSSEPFMTQGQMPNSSMQDMYNQSPSGAMSNLGMGQRQQFPYGASYDRRHEPYGQQYPGQGPPSGQPPYGGHQPGLYPQQPNYKRHMDGMYGPPAKRHEGDMYNMQYSSQQQEMYNQYGGSYSGPDRRPIQGQYPYPYSRERMQGPGQIQTHGIPPQMMGGPLQSSSSEGPQQNMWAARNDMPYPYQNRQGPGGPTQAPPYPGMNRTDDMMVPDQRINHESQWPSHVSQRQPYMSSSASMQPITRPPQPSYQTPPSLPNHISRAPSPASFQRSLENRMSPSKSPFLPSMKMQKVMPTVPTSQVTGPPPQPPPIRREITFPPGSVEASQPVLKQRRKITSKDIVTPEAWRVMMSLKSGLLAESTWALDTINILLYDDSTVATFNLSQLSGFLELLVEYFRKCLIDIFGILMEYEVGDPSQKALDHNAARKDDSQSLADDSGKEEEDAECIDDDEEDEEDEEEDSEKTESDEKSSIALTAPDAAADPKEKPKQASKFDKLPIKIVKKNNLFVVDRSDKLGRVQEFNSGLLHWQLGGGDTTEHIQTHFESKMEIPPRRRPPPPLSSAGRKKEQEGKGDSEEQQEKSIIATIDDVLSARPGALPEDANPGPQTESSKFPFGIQQAKSHRNIKLLEDEPRSRDETPLCTIAHWQDSLAKRCICVSNIVRSLSFVPGNDAEMSKHPGLVLILGKLILLHHEHPERKRAPQTYEKEEDEDKGVACSKDEWWWDCLEVLRDNTLVTLANISGQLDLSAYTESICLPILDGLLHWMVCPSAEAQDPFPTVGPNSVLSPQRLVLETLCKLSIQDNNVDLILATPPFSRQEKFYATLVRYVGDRKNPVCREMSMALLSNLAQGDALAARAIAVQKGSIGNLISFLEDGVTMAQYQQSQHNLMHMQPPPLEPPSVDMMCRAAKALLAMARVDENRSEFLLHEGRLLDISISAVLNSLVASVICDVLFQIGQL

SEQ ID NO: 20342 - protein, 2249 aa, Homo sapiens
MAHNAGAAAAAGTHSAKSGGSEAALKEGGSAAALSSSSSSSAAAAAASSSSSSGPGSAMETGLLPNHKLKTVGEAPAAPPHQQHHHHHHAHHHHHHAHHLHHHHALQQQLNQFQQQQQQQQQQQQQQQQQQHPISNNNSLGGAGGGAPQPGPDMEQPQHGGAKDSAAGGQADPPGPPLLSKPGDEDDAPPKMGEPAGGRYEHPGLGALGTQQPPVAVPGGGGGPAAVPEFNNYYGSAAPASGGPGGRAGPCFDQHGGQQSPGMGMMHSASAAAAGAPGSMDPLQNSHEGYPNSQCNHYPGYSRPGAGGGGGGGGGGGGGSGGGGGGGGAGAGGAGAGAVAAAAAAAAAAAGGGGGGGYGGSSAGYGVLSSPRQQGGGMMMGPGGGGAASLSKAAAGSAAGGFQRFAGQNQHPSGATPTLNQLLTSPSPMMRSYGGSYPEYSSPSAPPPPPSQPQSQAAAAGAAAGGQQAAAGMGLGKDMGAQYAAASPAWAAAQQRSHPAMSPGTPGPTMGRSQGSPMDPMVMKRPQLYGMGSNPHSQPQQSSPYPGGSYGPPGPQRYPIGIQGRTPGAMAGMQYPQQQDSGDATWKETFWLMPPQYGQQGVSGYCQQGQQPYYSQQPQPPHLPPQAQYLPSQSQQRYQPQQDMSQEGYGTRSQPPLAPGKPNHEDLNLIQQERPSSLPDLSGSIDDLPTGTEATLSSAVSASGSTSSQGDQSNPAQSPFSPHASPHLSSIPGGPSPSPVGSPVGSNQSRSGPISPASIPGSQMPPQPPGSQSESSSHPALSQSPMPQERGFMAGTQRNPQMAQYGPQQTGPSMSPHPSPGGQMHAGISSFQQSNSSGTYGPQMSQYGPQGNYSRPPAYSGVPSASYSGPGPGMGISANNQMHGQGPSQPCGAVPLGRMPSAGMQNRPFPGNMSSMTPSSPGMSQQGGPGMGPPMPTVNRKAQEAAAAVMQAAANSAQSRQGSFPGMNQSGLMASSSPYSQPMNNSSSLMNTQAPPYSMAPAMVNSSAASVGLADMMSPGESKLPLPLKADGKEEGTPQPESKSKKSSSSTTTGEKITKVYELGNEPERKLWVDRYLTFMEERGSPVSSLPAVGKKPLDLFRLYVCVKEIGGLAQVNKNKKWRELATNLNVGTSSSAASSLKKQYIQYLFAFECKIERGEEPPPEVFSTGDTKKQPKLQPPSPANSGSLQGPQTPQSTGSNSMAEVPGDLKPPTPASTPHGQMTPMQGGRSSTISVHDPFSDVSDSSFPKRNSMTPNAPYQQGMSMPDVMGRMPYEPNKDPFGGMRKVPGSSEPFMTQGQMPNSSMQDMYNQSPSGAMSNLGMGQRQQFPYGASYDRRHEPYGQQYPGQGPPSGQPPYGGHQPGLYPQQPNYKRHMDGMYGPPAKRHEGDMYNMQYSSQQQEMYNQYGGSYSGPDRRPIQGQYPYPYSRERMQGPGQIQTHGIPPQMMGGPLQSSSSEGPQQNMWAARNDMPYPYQNRQGPGGPTQAPPYPGMNRTDDMMVPDQRINHESQWPSHVSQRQPYMSSSASMQPITRPPQPSYQTPPSLPNHISRAPSPASFQRSLENRMSPSKSPFLPSMKMQKVMPTVPTSQVTGPPPQPPPIRREITFPPGSVEASQPVLKQRRKITSKDIVTPEAWRVMMSLKSGLLAESTWALDTINILLYDDSTVATFNLSQLSGFLELLVEYFRKCLIDIFGILMEYEVGDPSQKALDHNAARKDDSQSLADDSGKEEEDAECIDDDEEDEEDEEEDSEKTESDEKSSIALTAPDAAADPKEKPKQASKFDKLPIKIVKKNNLFVVDRSDKLGRVQEFNSGLLHWQLGGGDTTEHIQTHFESKMEIPPRRRPPPPLSSAGRKKEQEGKGDSEEQQEKSIIATIDDVLSARPGALPEDANPGPQTESSKFPFGIQQAKSHRNIKLLEDEPRSRDETPLCTIAHWQDSLAKRCICVSNIVRSLSFVPGNDAEMSKHPGLVLILGKLILLHHEHPERKRAPQTYEKEEDEDKGVACSKDEWWWDCLEVLRDNTLVTLANISGQLDLSAYTESICLPILDGLLHWMVCPSAEAQDPFPTVGPNSVLSPQRLVLETLCKLSIQDNNVDLILATPPFSRQEKFYATLVRYVGDRKNPVCREMSMALLSNLAQGDALAARAIAVQKGSIGNLISFLEDGVTMAQYQQSQHNLMHMQPPPLEPPSVDMMCRAAKALLAMARVDENRSEFLLHEGRLLDISISAVLNSLVASVICDVLFQIGQL

SEQ ID NO: 20343 - protein, 2289 aa, Homo sapiens
MAHNAGAAAAAGTHSAKSGGSEAALKEGGSAAALSSSSSSSAAAAAASSSSSSGPGSAMETGLLPNHKLKTVGEAPAAPPHQQHHHHHHAHHHHHHAHHLHHHHALQQQLNQFQQQQQQQQQQQQQQQQQQHPISNNNSLGGAGGGAPQPGPDMEQPQHGGAKDSAAGGQADPPGPPLLSKPGDEDDAPPKMGEPAGGRYEHPGLGALGTQQPPVAVPGGGGGPAAVPEFNNYYGSAAPASGGPGGRAGPCFDQHGGQQSPGMGMMHSASAAAAGAPGSMDPLQNSHEGYPNSQCNHYPGYSRPGAGGGGGGGGGGGGGSGGGGGGGGAGAGGAGAGAVAAAAAAAAAAAGGGGGGGYGGSSAGYGVLSSPRQQGGGMMMGPGGGGAASLSKAAAGSAAGGFQRFAGQNQHPSGATPTLNQLLTSPSPMMRSYGGSYPEYSSPSAPPPPPSQPQSQAAAAGAAAGGQQAAAGMGLGKDMGAQYAAASPAWAAAQQRSHPAMSPGTPGPTMGRSQGSPMDPMVMKRPQLYGMGSNPHSQPQQSSPYPGGSYGPPGPQRYPIGIQGRTPGAMAGMQYPQQQMPPQYGQQGVSGYCQQGQQPYYSQQPQPPHLPPQAQYLPSQSQQRYQPQQDMSQEGYGTRSQPPLAPGKPNHEDLNLIQQERPSSLPDLSGSIDDLPTGTEATLSSAVSASGSTSSQGDQSNPAQSPFSPHASPHLSSIPGGPSPSPVGSPVGSNQSRSGPISPASIPGSQMPPQPPGSQSESSSHPALSQSPMPQERGFMAGTQRNPQMAQYGPQQTGPSMSPHPSPGGQMHAGISSFQQSNSSGTYGPQMSQYGPQGNYSRPPAYSGVPSASYSGPGPGMGISANNQMHGQGPSQPCGAVPLGRMPSAGMQNRPFPGNMSSMTPSSPGMSQQGGPGMGPPMPTVNRKAQEAAAAVMQAAANSAQSRQGSFPGMNQSGLMASSSPYSQPMNNSSSLMNTQAPPYSMAPAMVNSSAASVGLADMMSPGESKLPLPLKADGKEEGTPQPESKSKDSYSSQGISQPPTPGNLPVPSPMSPSSASISSFHGDESDSISSPGWPKTPSSPKSSSSTTTGEKITKVYELGNEPERKLWVDRYLTFMEERGSPVSSLPAVGKKPLDLFRLYVCVKEIGGLAQVNKNKKWRELATNLNVGTSSSAASSLKKQYIQYLFAFECKIERGEEPPPEVFSTGDTKKQPKLQPPSPANSGSLQGPQTPQSTGSNSMAEVPGDLKPPTPASTPHGQMTPMQGGRSSTISVHDPFSDVSDSSFPKRNSMTPNAPYQQGMSMPDVMGRMPYEPNKDPFGGMRKVPGSSEPFMTQGQMPNSSMQDMYNQSPSGAMSNLGMGQRQQFPYGASYDRRHEPYGQQYPGQGPPSGQPPYGGHQPGLYPQQPNYKRHMDGMYGPPAKRHEGDMYNMQYSSQQQEMYNQYGGSYSGPDRRPIQGQYPYPYSRERMQGPGQIQTHGIPPQMMGGPLQSSSSEGPQQNMWAARNDMPYPYQNRQGPGGPTQAPPYPGMNRTDDMMVPDQRINHESQWPSHVSQRQPYMSSSASMQPITRPPQPSYQTPPSLPNHISRAPSPASFQRSLENRMSPSKSPFLPSMKMQKVMPTVPTSQVTGPPPQPPPIRREITFPPGSVEASQPVLKQRRKITSKDIVTPEAWRVMMSLKSGLLAESTWALDTINILLYDDSTVATFNLSQLSGFLELLVEYFRKCLIDIFGILMEYEVGDPSQKALDHNAARKDDSQSLADDSGKEEEDAECIDDDEEDEEDEEEDSEKTESDEKSSIALTAPDAAADPKEKPKQASKFDKLPIKIVKKNNLFVVDRSDKLGRVQEFNSGLLHWQLGGGDTTEHIQTHFESKMEIPPRRRPPPPLSSAGRKKEQEGKGDSEEQQEKSIIATIDDVLSARPGALPEDANPGPQTESSKFPFGIQQAKSHRNIKLLEDEPRSRDETPLCTIAHWQDSLAKRCICVSNIVRSLSFVPGNDAEMSKHPGLVLILGKLILLHHEHPERKRAPQTYEKEEDEDKGVACSKDEWWWDCLEVLRDNTLVTLANISGQLDLSAYTESICLPILDGLLHWMVCPSAEAQDPFPTVGPNSVLSPQRLVLETLCKLSIQDNNVDLILATPPFSRQEKFYATLVRYVGDRKNPVCREMSMALLSNLAQGDALAARAIAVQKGSIGNLISFLEDGVTMAQYQQSQHNLMHMQPPPLEPPSVDMMCRAAKALLAMARVDENRSEFLLHEGRLLDISISAVLNSLVASVICDVLFQIGQL

SEQ ID NO: 20344 - protein, 1486 aa, Homo sapiens
MPPQPPGSQSESSSHPALSQSPMPQERGFMAGTQRNPQMAQYGPQQTGPSMSPHPSPGGQMHAGISSFQQSNSSGTYGPQMSQYGPQGNYSRPPAYSGVPSASYSGPGPGMGISANNQMHGQGPSQPCGAVPLGRMPSAGMQNRPFPGNMSSMTPSSPGMSQQGGPGMGPPMPTVNRKAQEAAAAVMQAAANSAQSRQGSFPGMNQSGLMASSSPYSQPMNNSSSLMNTQAPPYSMAPAMVNSSAASVGLADMMSPGESKLPLPLKADGKEEGTPQPESKSKKSSSSTTTGEKITKVYELGNEPERKLWVDRYLTFMEERGSPVSSLPAVGKKPLDLFRLYVCVKEIGGLAQVNKNKKWRELATNLNVGTSSSAASSLKKQYIQYLFAFECKIERGEEPPPEVFSTGDTKKQPKLQPPSPANSGSLQGPQTPQSTGSNSMAEVPGDLKPPTPASTPHGQMTPMQGGRSSTISVHDPFSDVSDSSFPKRNSMTPNAPYQQGMSMPDVMGRMPYEPNKDPFGGMRKVPGSSEPFMTQGQMPNSSMQDMYNQSPSGAMSNLGMGQRQQFPYGASYDRRHEPYGQQYPGQGPPSGQPPYGGHQPGLYPQQPNYKRHMDGMYGPPAKRHEGDMYNMQYSSQQQEMYNQYGGSYSGPDRRPIQGQYPYPYSRERMQGPGQIQTHGIPPQMMGGPLQSSSSEGPQQNMWAARNDMPYPYQNRQGPGGPTQAPPYPGMNRTDDMMVPDQRINHESQWPSHVSQRQPYMSSSASMQPITRPPQPSYQTPPSLPNHISRAPSPASFQRSLENRMSPSKSPFLPSMKMQKVMPTVPTSQVTGPPPQPPPIRREITFPPGSVEASQPVLKQRRKITSKDIVTPEAWRVMMSLKSGLLAESTWALDTINILLYDDSTVATFNLSQLSGFLELLVEYFRKCLIDIFGILMEYEVGDPSQKALDHNAARKDDSQSLADDSGKEEEDAECIDDDEEDEEDEEEDSEKTESDEKSSIALTAPDAAADPKEKPKQASKFDKLPIKIVKKNNLFVVDRSDKLGRVQEFNSGLLHWQLGGGDTTEHIQTHFESKMEIPPRRRPPPPLSSAGRKKEQEGKGDSEEQQEKSIIATIDDVLSARPGALPEDANPGPQTESSKFPFGIQQAKSHRNIKLLEDEPRSRDETPLCTIAHWQDSLAKRCICVSNIVRSLSFVPGNDAEMSKHPGLVLILGKLILLHHEHPERKRAPQTYEKEEDEDKGVACSKDEWWWDCLEVLRDNTLVTLANISGQLDLSAYTESICLPILDGLLHWMVCPSAEAQDPFPTVGPNSVLSPQRLVLETLCKLSIQDNNVDLILATPPFSRQEKFYATLVRYVGDRKNPVCREMSMALLSNLAQGDALAARAIAVQKGSIGNLISFLEDGVTMAQYQQSQHNLMHMQPPPLEPPSVDMMCRAAKALLAMARVDENRSEFLLHEGRLLDISISAVLNSLVASVICDVLFQIGQL

SEQ ID NO: 20345 - protein, 110 aa, Homo sapiens
MAASSSSSSAGGVSGSSVTGSGFSVSDLAPPRKALFTYPKGAGEMLEDGSERFLCESVFSYQVASTLKQVKHDQQVARMEKLAGLVEELEADEWRFKPIEQLLGFTPSSG

SEQ ID NO: 20346 - protein, 1279 aa, Homo sapiens
MASSNPPPQPAIGDQLVPGVPGPSSEAEDDPGEAFEFDDSDDEEDTSAALGVPSLAPERDTDPPLIHLDSIPVTDPDPAAAPPGTGVPAWVSNGDAADAAFSGARHSSWKRKSSRRIDRFTFPALEEDVIYDDVPCESPDAHQPGAERNLLYEDAHRAGAPRQAEDLGWSSSEFESYSEDSGEEAKPEVEVEPAKHRVSFQPKLSPDLTRLKERYARTKRDILALRVGGRDMQELKHKYDCKMTQLMKAAKSGTKDGLEKTRMAVMRKVSFLHRKDVLGDSEEEDMGLLEVSVSDIKPPAPELGPMPEGLSPQQVVRRHILGSIVQSEGSYVESLKRILQDYRNPLMEMEPKALSARKCQVVFFRVKEILHCHSMFQIALSSRVAEWDSTEKIGDLFVASFSKSMVLDVYSDYVNNFTSAMSIIKKACLTKPAFLEFLKRRQVCSPDRVTLYGLMVKPIQRFPQFILLLQDMLKNTPRGHPDRLSLQLALTELETLAEKLNEQKRLADQVAEIQQLTKSVSDRSSLNKLLTSGQRQLLLCETLTETVYGDRGQLIKSKERRVFLLNDMLVCANINFKPANHRGQLEISSLVPLGPKYVVKWNTALPQVQVVEVGQDGGTYDKDNVLIQHSGAKKASASGQAQNKVYLGPPRLFQELQDLQKDLAVVEQITLLISTLHGTYQNLNMTVAQDWCLALQRLMRVKEEEIHSANKCRLRLLLPGKPDKSGRPISFMVVFITPNPLSKISWVNRLHLAKIGLREENQPGWLCPDEDKKSKAPFWCPILACCIPAFSSRALSLQLGALVHSPVNCPLLGFSAVSTSLPQGYLWVGGGQEGAGGQVEIFSLNRPSPRTVKSFPLAAPVLCMEYIPELEEEAESRDESPTVADPSATVHPTICLGLQDGSILLYSSVDTGTQCLVSCRSPGLQPVLCLRHSPFHLLAGLQDGTLAAYPRTSGGVLWDLESPPVCLTVGPGPVRTLLSLEDAVWASCGPRVTVLEATTLQPQQSFEAHQDEAVSVTHMVKAGSGVWMAFSSGTSIRLFHTETLEHLQEINIATRTTFLLPGQKHLCVTSLLICQGLLWVGTDQGVIVLLPVPRLEGIPKITGKGMVSLNGHCGPVAFLAVATSILAPDILRSDQEEAEGPRAEEDKPDGQAHEPMPDSHVGRELTRKKGILLQYRLRSTAHLPGPLLSMREPAPADGAALEHSEEDGSIYEMADDPDIWVRSRPCARDAHRKEICSVAIISGGQGYRNFGSALGSSGRQAPCGETDSTLLIWQVPLML

SEQ ID NO: 20347 - protein, 1240 aa, Homo sapiens
MASSNPPPQPAIGDQLVPGVPGPSSEAEDDPGEAFEFDDSDDEEDTSAALGVPSLAPERDTDPPLIHLDSIPVTDPDPAAAPPGTGVPAWVSNGDAADAAFSGARHSSWKRKSSRRIDRFTFPALEEDVIYDDVPCESPDAHQPGAERNLLYEDAHRAGAPRQAEDLGWSSSEFESYSEDSGEEAKPEVEVEPAKHRVSFQPKMTQLMKAAKSGTKDGLEKTRMAVMRKVSFLHRKDVLGDSEEEDMGLLEVSVSDIKPPAPELGPMPEGLSPQQVVRRHILGSIVQSEGSYVESLKRILQDYRNPLMEMEPKALSARKCQVVFFRVKEILHCHSMFQIALSSRVAEWDSTEKIGDLFVASFSKSMVLDVYSDYVNNFTSAMSIIKKACLTKPAFLEFLKRRQVCSPDRVTLYGLMVKPIQRFPQFILLLQDMLKNTPRGHPDRLSLQLALTELETLAEKLNEQKRLADQVAEIQQLTKSVSDRSSLNKLLTSGQRQLLLCETLTETVYGDRGQLIKSKERRVFLLNDMLVCANINFKPANHRGQLEISSLVPLGPKYVVKWNTALPQVQVVEVGQDGGTYDKDNVLIQHSGAKKASASGQAQNKVYLGPPRLFQELQDLQKDLAVVEQITLLISTLHGTYQNLNMTVAQDWCLALQRLMRVKEEEIHSANKCRLRLLLPGKPDKSGRPISFMVVFITPNPLSKISWVNRLHLAKIGLREENQPGWLCPDEDKKSKAPFWCPILACCIPAFSSRALSLQLGALVHSPVNCPLLGFSAVSTSLPQGYLWVGGGQEGAGGQVEIFSLNRPSPRTVKSFPLAAPVLCMEYIPELEEEAESRDESPTVADPSATVHPTICLGLQDGSILLYSSVDTGTQCLVSCRSPGLQPVLCLRHSPFHLLAGLQDGTLAAYPRTSGGVLWDLESPPVCLTVGPGPVRTLLSLEDAVWASCGPRVTVLEATTLQPQQSFEAHQDEAVSVTHMVKAGSGVWMAFSSGTSIRLFHTETLEHLQEINIATRTTFLLPGQKHLCVTSLLICQGLLWVGTDQGVIVLLPVPRLEGIPKITGKGMVSLNGHCGPVAFLAVATSILAPDILRSDQEEAEGPRAEEDKPDGQAHEPMPDSHVGRELTRKKGILLQYRLRSTAHLPGPLLSMREPAPADGAALEHSEEDGSIYEMADDPDIWVRSRPCARDAHRKEICSVAIISGGQGYRNFGSALGSSGRQAPCGETDSTLLIWQVPLML

SEQ ID NO: 20348 - protein, 1235 aa, Homo sapiens
MASSNPPPQPAIGDQLVPGVPGPSSEAEDDPGEAFEFDDSDDEEDTSAALGVPSLAPERDTDPPLIHLDSIPVTDPDPAAAPPGTGVPAWVSNGDAADAAFSGARHSSWKRKSSRRIDRFTFPALEEDVIYDDVPCESPDAHQPGAERNLLYEDAHRAGAPRQAEDLGWSSSEFESYSEDSGEEAKPEVEVEPAKHRVSFQPKMTQLMKAAKSGTKDGLEKTRMAVMRKVSFLHRKDVLGDSEEEDMGLLEVSVSDIKPPAPELGPMPEGLSPQQVVRRHILGSIVQSEGSYVESLKRILQDYRNPLMEMEPKALSARKCQVVFFRVKEILHCHSMFQIALSSRVAEWDSTEKIGDLFVASFSKSMVLDVYSDYVNNFTSAMSIIKKACLTKPAFLEFLKRRQVCSPDRVTLYGLMVKPIQRFPQFILLLQDMLKNTPRGHPDRLSLQLALTELETLAEKLNEQKRLADQVAEIQQLTKSVSDRSSLNKLLTSGQRQLLLCETLTETVYGDRGQLIKSKERRVFLLNDMLVCANINFKGQLEISSLVPLGPKYVVKWNTALPQVQVVEVGQDGGTYDKDNVLIQHSGAKKASASGQAQNKVYLGPPRLFQELQDLQKDLAVVEQITLLISTLHGTYQNLNMTVAQDWCLALQRLMRVKEEEIHSANKCRLRLLLPGKPDKSGRPISFMVVFITPNPLSKISWVNRLHLAKIGLREENQPGWLCPDEDKKSKAPFWCPILACCIPAFSSRALSLQLGALVHSPVNCPLLGFSAVSTSLPQGYLWVGGGQEGAGGQVEIFSLNRPSPRTVKSFPLAAPVLCMEYIPELEEEAESRDESPTVADPSATVHPTICLGLQDGSILLYSSVDTGTQCLVSCRSPGLQPVLCLRHSPFHLLAGLQDGTLAAYPRTSGGVLWDLESPPVCLTVGPGPVRTLLSLEDAVWASCGPRVTVLEATTLQPQQSFEAHQDEAVSVTHMVKAGSGVWMAFSSGTSIRLFHTETLEHLQEINIATRTTFLLPGQKHLCVTSLLICQGLLWVGTDQGVIVLLPVPRLEGIPKITGKGMVSLNGHCGPVAFLAVATSILAPDILRSDQEEAEGPRAEEDKPDGQAHEPMPDSHVGRELTRKKGILLQYRLRSTAHLPGPLLSMREPAPADGAALEHSEEDGSIYEMADDPDIWVRSRPCARDAHRKEICSVAIISGGQGYRNFGSALGSSGRQAPCGETDSTLLIWQVPLML

SEQ ID NO: 20349 - protein, 982 aa, Homo sapiens
MLPSSSWGKRKLRGRLGWVRSDARGVMWARQEGLHHPHPHAVIRCPSSSSSSVSCSGDSEEEDMGLLEVSVSDIKPPAPELGPMPEGLSPQQVVRRHILGSIVQSEGSYVESLKRILQDYRNPLMEMEPKALSARKCQVVFFRVKEILHCHSMFQIALSSRVAEWDSTEKIGDLFVASDMLKNTPRGHPDRLSLQLALTELETLAEKLNEQKRLADQVAEIQQLTKSVSDRSSLNKLLTSGQRQLLLCETLTETVYGDRGQLIKSKERRVFLLNDMLVCANINFKGQLEISSLVPLGPKYVVKWNTALPQVQVVEVGQDGGTYDKDNVLIQHSGAKKASASGQAQNKVYLGPPRLFQELQDLQKDLAVVEQITLLISTLHGTYQNLNMTVAQDWCLALQRLMRVKEEEIHSANKCRLRLLLPGKPDKSGRPISFMVVFITPNPLSKISWVNRLHLAKIGLREENQPGWLCPDEDKKSKAPFWCPILACCIPAFSSRALSLQLGALVHSPVNCPLLGFSAVSTSLPQGYLWVGGGQEGAGGQVEIFSLNRPSPRTVKSFPLAAPVLCMEYIPELEEEAESRDESPTVADPSATVHPTICLGLQDGSILLYSSVDTGTQCLVSCRSPGLQPVLCLRHSPFHLLAGLQDGTLAAYPRTSGGVLWDLESPPVCLTVGPGPVRTLLSLEDAVWASCGPRVTVLEATTLQPQQSFEAHQDEAVSVTHMVKAGSGVWMAFSSGTSIRLFHTETLEHLQEINIATRTTFLLPGQKHLCVTSLLICQGLLWVGTDQGVIVLLPVPRLEGIPKITGKGMVSLNGHCGPVAFLAVATSILAPDILRSDQEEAEGPRAEEDKPDGQAHEPMPDSHVGRELTRKKGILLQYRLRSTAHLPGPLLSMREPAPADGAALEHSEEDGSIYEMADDPDIWVRSRPCARDAHRKEICSVAIISGGQGYRNFGSALGSSGRQAPCGETDSTLLIWQVPLML

SEQ ID NO: 20350 - protein, 1067 aa, Homo sapiens
MASSNPPPQPAIGDQLVPGVPGPSSEAEDDPGEAFEFDDSDDEEDTSAALGVPSLAPERDTDPPLIHLDSIPVTDPDPAAAPPGTGVPAWVSNGDAADAAFSGARHSSWKRKSSRRIDRFTFPALEEDVIYDDVPCESPDAHQPGAERNLLYEDAHRAGAPRQAEDLGWSSSEFESYSEDSGEEAKPEVEVEPAKHRVSFQPKLSPDLTRLKERYARTKRDILALRVGGRDMQELKHKYDCKMTQLMKAAKSGTKDGLEKTRMAVMRKVSFLHRKDVLGDSEEEDMGLLEVSVSDIKPPAPELGPMPEGLSPQQVVRRHILGSIVQSEGSYVESLKRILQDYRNPLMEMEPKALSARKCQVVFFRVKEILHCHSMFQIALSSRVAEWDSTEKIGDLFVASFSKSMVLDVYSDYVNNFTSAMSIIKKACLTKPAFLEFLKRRQVCSPDRVTLYGLMVKPIQRFPQFILLLQDMLKNTPRGHPDRLSLQLALTELETLAEKLNEQKRLADQVAEIQQLTKSVSDRSSLNKLLTSGQRQLLLCETLTETVYGDRGQLIKSKERRVFLLNDMLVCANINFKGQLEISSLVPLGPKYVVKWNTALPQVQVVEVGQDGGTYDKDNVLIQHSGAKKASASGQAQNKVYLGPPRLFQELQDLQKDLAVVEQITLLISTLHGTYQNLNMTVAQDWCLALQRLMRVKEEEIHSANKCRLRLLLPGKPDKSGRPISFMVVFITPNPLSKISWVNRLHLAKIGLREENQPGWLCPDEDKKSKAPFWCPILACCIPAFSSRALSLQLGALVHSPVNCPLLGFSAVSTSLPQGYLWVGGGQEGAGGQVEIFSLNRPSPRTVKSFPLAAPVLCMEYIPELEEEAESRDESPTVADPSATVHPTICLGLQDGSILLYSSVDTGTQCLVSCRSPGLQPVLCLRHSPFHLLAGLQDGTLAAYPRTSGGVLWDLESPPVCLTVGPGPVRTLLSLEDAVWASCGPRVTVLEATTLQPQQSFEAHQDEAVSVTHMVKAGSGVWMAFSSGTSIRLFHTETLEHLQEINIATRTTFLLPDRSLIKCSPRA

SEQ ID NO: 20351 - protein, 1450 aa, Homo sapiens
MAEAGDAALSVAEWLRALHLEQYTGLFEQHGLVWATECQGLSDTRLMDMGMLLPGHRRRILAGLLRAHTSPAPAPRPTPRPVPMKRHIFRSPPVPATPPEPLPTTTEDEGLPAAPPIPPRRSCLPPTCFTTPSTAAPDPVLPPLPAKRHLAELSVPPVPPRTGPPRLLVSLPTKEEESLLPSLSSPPQPQSEEPLSTLPQGPPQPPSPPPCPPEIPPKPVRLFPEFDDSDYDEVPEEGPGAPARVMTKKEEPPPSRVPRAVRVASLLSEGEELSGDDQGDEEEDDHAYEGVPNGGWHTSSLSLSLPSTIAAPHPMDGPPGGSTPVTPVIKAGWLDKNPPQGSYIYQKRWVRLDTDHLRYFDSNKDAYSKRFISVACISHVAAIGDQKFEVITNNRTFAFRAESDVERKEWMQALQQAMAEQRARARLSSAYLLGVPGSEQPDRAGSLELRGFKNKLYVAVVGDKVQLYKNLEEYHLGIGITFIDMSVGNVKEVDRRSFDLTTPYRIFSFSADSELEKEQWLEAMQGAIAEALSTSEVAERIWAAAPNRFCADCGAPQPDWASINLCVVICKRCAGEHRGLGAGVSKVRSLKMDRKVWTETLIELFLQLGNGAGNRFWAANVPPSEALQPSSSPSTRRCHLEAKYREGKYRRYHPLFGNQEELDKALCAAVTTTDLAETQALLGCGAGINCFSGDPEAPTPLALAEQAGQTLQMEFLRNNRTTEVPRLDSMKPLEKHYSVVLPTVSHSGFLYKTASAGKLLQDRRAREEFSRRWCVLGDGVLSYFENERAVTPNGEIRASEIVCLAVPPPDTHGFEHTFEVYTEGERLYLFGLESAEQAHEWVKCIAKAFVPPLAEDLLARDFERLGRLPYKAGLSLQRAQEGWFSLSGSELRAVFPEGPCEEPLQLRKLQELSIQGDSENQVLVLVERRRTLYIQGERRLDFMGWLGAIQKAAASMGDTLSEQQLGDSDIPVIVYRCVDYITQCGLTSEGIYRKCGQTSKTQRLLESLRQDARSVHLKEGEQHVDDVSSALKRFLRDLPDGLFTRAQRLTWLEASEIEDEEEKVSRYRELLVRLPPVNRATVKALISHLYCVQCFSDTNQMNVHNLAIVFGPTLFQTDGQDYKAGRVVEDLINHYVVVFSVDEEELRKQREEITAIVKMRVAGTASGTQHAGDFICTVYLEEKKAETEQHIKVPASMTAEELTLEILDRRNVGIREKDYWTCFEVNEREEAERPLHFAEKVLPILHGLGTDSHLVVKKHQAMEAMLLYLASRVGDTKHGMMKFREDRSLLGLGLPSGGFHDRYFILNSSCLRLYKEVRSQRPWSGAPETSHRPEKEWPIKSLKVYLGVKKKLRPPTCWGFTVVHETEKHEKQQWYLCCDTQMELREWFATFLFVQHDGLVWPSEPSRVSRAVPEVRLGSVSLIPLRGSENEMRRSVAAFTADPLSLLRNV

SEQ ID NO: 20352 - protein, 1210 aa, Homo sapiens
MTLSGSRGQEEPPPSRVPRAVRVASLLSEGEELSGDDQGDEEEDDHAYEGVPNGGWHTSSLSLSLPSTIAAPHPMDGPPGGSTPVTPVIKAGWLDKNPPQGSYIYQKRWVRLDTDHLRYFDSNKDAYSKRFISVACISHVAAIGDQKFEVITNNRTFAFRAESDVERKEWMQALQQAMAEQRARARLSSAYLLGVPGSEQPDRAGSLELRGFKNKLYVAVVGDKVQLYKNLEEYHLGIGITFIDMSVGNVKEVDRRSFDLTTPYRIFSFSADSELEKEQWLEAMQGAIAEALSTSEVAERIWAAAPNRFCADCGAPQPDWASINLCVVICKRCAGEHRGLGAGVSKVRSLKMDRKVWTETLIELFLQLGNGAGNRFWAANVPPSEALQPSSSPSTRRCHLEAKYREGKYRRYHPLFGNQEELDKALCAAVTTTDLAETQALLGCGAGINCFSGDPEAPTPLALAEQAGQTLQMEFLRNNRTTEVPRLDSMKPLEKHYSVVLPTVSHSGFLYKTASAGKLLQDRRAREEFSRRWCVLGDGVLSYFENERAVTPNGEIRASEIVCLAVPPPDTHGFEHTFEVYTEGERLYLFGLESAEQAHEWVKCIAKAFVPPLAEDLLARDFERLGRLPYKAGLSLQRAQEGWFSLSGSELRAVFPEGPCEEPLQLRKLQELSIQGDSENQVLVLVERRRTLYIQGERRLDFMGWLGAIQKAAASMGDTLSEQQLGDSDIPVIVYRCVDYITQCGLTSEGIYRKCGQTSKTQRLLESLRQDARSVHLKEGEQHVDDVSSALKRFLRDLPDGLFTRAQRLTWLEASEIEDEEEKVSRYRELLVRLPPVNRATVKALISHLYCVQCFSDTNQMNVHNLAIVFGPTLFQTDGQDYKAGRVVEDLINHYVVVFSVDEEELRKQREEITAIVKMRVAGTASGTQHAGDFICTVYLEEKKAETEQHIKVPASMTAEELTLEILDRRNVGIREKDYWTCFEVNEREEAERPLHFAEKVLPILHGLGTDSHLVVKKHQAMEAMLLYLASRVGDTKHGMMKFREDRSLLGLGLPSGGFHDRYFILNSSCLRLYKEVRSQRPWSGAPETSHRPEKEWPIKSLKVYLGVKKKLRPPTCWGFTVVHETEKHEKQQWYLCCDTQMELREWFATFLFVQHDGLVWPSEPSRVSRAVPEVRLGSVSLIPLRGSENEMRRSVAAFTADPLSLLRNV

SEQ ID NO: 20353 - protein, 1199 aa, Homo sapiens
MTLSGSRGQEEPPPSRVPRAVRVASLLSEGEELSGDDQGDEEEDDHAYEGVPNGGWHTSSLSLSLPSTIAAPHPMDGPPGGSTPVTPVIKAGWLDKNPPQGSYIYQKRWVRLDTDHLRYFDSNKDAYSKRFISVACISHVAAIGDQKFEVITNNRTFAFRAESDVERKEWMQALQQAMAEQRARARLSSAYLLGVPGSEQPDRAGSLELRGFKNKLYVAVVGDKVQLYKNLEEYHLGIGITFIDMSVGNVKEVDRRSFDLTTPYRIFSFSADSELEKEQWLEAMQGAIAEALSTSEVAERIWAAAPNRFCADCGAPQPDWASINLCVVICKRCAGEHRGLGAGVSKVRSLKMDRKVWTETLIELFLQLGNGAGNRFWAANVPPSEALQPSSSPSTRRCHLEAKYREGKYRRYHPLFGNQEELDKALCAAVTTTDLAETQALLGCGAGINCFSGDPEAPTPLALAEQAGQTLQMEFLRNNRTTEVPRLDSMKPLEKHYSVVLPTVSHSGFLYKTASAGKLLQDRRAREEFSRRWCVLGDGVLSYFENERAVTPNGEIRASEIVCLAVPPPDTHGFEHTFEVYTEGERLYLFGLESAEQAHEWVKCIAKAFVPPLAEDLLARDFERLGRLPYKAGLSLQRAQEGWFSLSGSELRAVFPEGPCEEPLQLRKLQELSIQGDSENQVLVLVERRRTLYIQGERRLDFMGWLGAIQKAAASMGDTLSEQQLGDSDIPVIVYRCVDYITQCGLTSEGIYRKCGQTSKTQRLLESLRQDARSVHLKEGEQHVDDVSSALKRFLRDLPDGLFTRAQRLTWLEASEIEDEEEKVSRYRELLVRLPPVNRATVKALISHLYCVQCFSDTNQMNVHNLAIVFGPTLFQTDGQDYKAGRVVEDLINHYVVVFSVDEEELRKQREEITAIVKMRVAGTASGTQHAGDFICTVYLEEKKAETEQHIKVPASMTAEELTLEILDRRNVGIREKDYWTCFEVNEREEAERPLHFAEKVLPILHGLGTDSHLVVKKHQAMEAMLLYLASRVGDTKHGMMKFREDRSLLGLGLPSGGFHDRYFILNSSCLRLYKEVRSHRPEKEWPIKSLKVYLGVKKKLRPPTCWGFTVVHETEKHEKQQWYLCCDTQMELREWFATFLFVQHDGLVWPSEPSRVSRAVPEVRLGSVSLIPLRGSENEMRRSVAAFTADPLSLLRNV

SEQ ID NO: 20354 - protein, 1439 aa, Homo sapiens
MAEAGDAALSVAEWLRALHLEQYTGLFEQHGLVWATECQGLSDTRLMDMGMLLPGHRRRILAGLLRAHTSPAPAPRPTPRPVPMKRHIFRSPPVPATPPEPLPTTTEDEGLPAAPPIPPRRSCLPPTCFTTPSTAAPDPVLPPLPAKRHLAELSVPPVPPRTGPPRLLVSLPTKEEESLLPSLSSPPQPQSEEPLSTLPQGPPQPPSPPPCPPEIPPKPVRLFPEFDDSDYDEVPEEGPGAPARVMTKKEEPPPSRVPRAVRVASLLSEGEELSGDDQGDEEEDDHAYEGVPNGGWHTSSLSLSLPSTIAAPHPMDGPPGGSTPVTPVIKAGWLDKNPPQGSYIYQKRWVRLDTDHLRYFDSNKDAYSKRFISVACISHVAAIGDQKFEVITNNRTFAFRAESDVERKEWMQALQQAMAEQRARARLSSAYLLGVPGSEQPDRAGSLELRGFKNKLYVAVVGDKVQLYKNLEEYHLGIGITFIDMSVGNVKEVDRRSFDLTTPYRIFSFSADSELEKEQWLEAMQGAIAEALSTSEVAERIWAAAPNRFCADCGAPQPDWASINLCVVICKRCAGEHRGLGAGVSKVRSLKMDRKVWTETLIELFLQLGNGAGNRFWAANVPPSEALQPSSSPSTRRCHLEAKYREGKYRRYHPLFGNQEELDKALCAAVTTTDLAETQALLGCGAGINCFSGDPEAPTPLALAEQAGQTLQMEFLRNNRTTEVPRLDSMKPLEKHYSVVLPTVSHSGFLYKTASAGKLLQDRRAREEFSRRWCVLGDGVLSYFENERAVTPNGEIRASEIVCLAVPPPDTHGFEHTFEVYTEGERLYLFGLESAEQAHEWVKCIAKAFVPPLAEDLLARDFERLGRLPYKAGLSLQRAQEGWFSLSGSELRAVFPEGPCEEPLQLRKLQELSIQGDSENQVLVLVERRRTLYIQGERRLDFMGWLGAIQKAAASMGDTLSEQQLGDSDIPVIVYRCVDYITQCGLTSEGIYRKCGQTSKTQRLLESLRQDARSVHLKEGEQHVDDVSSALKRFLRDLPDGLFTRAQRLTWLEASEIEDEEEKVSRYRELLVRLPPVNRATVKALISHLYCVQCFSDTNQMNVHNLAIVFGPTLFQTDGQDYKAGRVVEDLINHYVVVFSVDEEELRKQREEITAIVKMRVAGTASGTQHAGDFICTVYLEEKKAETEQHIKVPASMTAEELTLEILDRRNVGIREKDYWTCFEVNEREEAERPLHFAEKVLPILHGLGTDSHLVVKKHQAMEAMLLYLASRVGDTKHGMMKFREDRSLLGLGLPSGGFHDRYFILNSSCLRLYKEVRSHRPEKEWPIKSLKVYLGVKKKLRPPTCWGFTVVHETEKHEKQQWYLCCDTQMELREWFATFLFVQHDGLVWPSEPSRVSRAVPEVRLGSVSLIPLRGSENEMRRSVAAFTADPLSLLRNV

SEQ ID NO: 20355 - protein, 1205 aa, Homo sapiens
MTKKEEPPPSRVPRAVRVASLLSEGEELSGDDQGDEEEDDHAYEGVPNGGWHTSSLSLSLPSTIAAPHPMDGPPGGSTPVTPVIKAGWLDKNPPQGSYIYQKRWVRLDTDHLRYFDSNKDAYSKRFISVACISHVAAIGDQKFEVITNNRTFAFRAESDVERKEWMQALQQAMAEQRARARLSSAYLLGVPGSEQPDRAGSLELRGFKNKLYVAVVGDKVQLYKNLEEYHLGIGITFIDMSVGNVKEVDRRSFDLTTPYRIFSFSADSELEKEQWLEAMQGAIAEALSTSEVAERIWAAAPNRFCADCGAPQPDWASINLCVVICKRCAGEHRGLGAGVSKVRSLKMDRKVWTETLIELFLQLGNGAGNRFWAANVPPSEALQPSSSPSTRRCHLEAKYREGKYRRYHPLFGNQEELDKALCAAVTTTDLAETQALLGCGAGINCFSGDPEAPTPLALAEQAGQTLQMEFLRNNRTTEVPRLDSMKPLEKHYSVVLPTVSHSGFLYKTASAGKLLQDRRAREEFSRRWCVLGDGVLSYFENERAVTPNGEIRASEIVCLAVPPPDTHGFEHTFEVYTEGERLYLFGLESAEQAHEWVKCIAKAFVPPLAEDLLARDFERLGRLPYKAGLSLQRAQEGWFSLSGSELRAVFPEGPCEEPLQLRKLQELSIQGDSENQVLVLVERRRTLYIQGERRLDFMGWLGAIQKAAASMGDTLSEQQLGDSDIPVIVYRCVDYITQCGLTSEGIYRKCGQTSKTQRLLESLRQDARSVHLKEGEQHVDDVSSALKRFLRDLPDGLFTRAQRLTWLEASEIEDEEEKVSRYRELLVRLPPVNRATVKALISHLYCVQCFSDTNQMNVHNLAIVFGPTLFQTDGQDYKAGRVVEDLINHYVVVFSVDEEELRKQREEITAIVKMRVAGTASGTQHAGDFICTVYLEEKKAETEQHIKVPASMTAEELTLEILDRRNVGIREKDYWTCFEVNEREEAERPLHFAEKVLPILHGLGTDSHLVVKKHQAMEAMLLYLASRVGDTKHGMMKFREDRSLLGLGLPSGGFHDRYFILNSSCLRLYKEVRSQRPWSGAPETSHRPEKEWPIKSLKVYLGVKKKLRPPTCWGFTVVHETEKHEKQQWYLCCDTQMELREWFATFLFVQHDGLVWPSEPSRVSRAVPEVRLGSVSLIPLRGSENEMRRSVAAFTADPLSLLRNV

SEQ ID NO: 20356 - protein, 679 aa, Homo sapiens
MDASGKGEFSRRWCVLGDGVLSYFENERAVTPNGEIRASEIVCLAVPPPDTHGFEHTFEVYTEGERLYLFGLESAEQAHEWVKCIAKAFVPPLAEDLLARDFERLGRLPYKAGLSLQRAQEGWFSLSGSELRAVFPEGPCEEPLQLRKLQELSIQGDSENQVLVLVERRRTLYIQGERRLDFMGWLGAIQKAAASMGDTLSEQQLGDSDIPVIVYRCVDYITQCGLTSEGIYRKCGQTSKTQRLLESLRQDARSVHLKEGEQHVDDVSSALKRFLRDLPDGLFTRAQRLTWLEASEIEDEEEKVSRYRELLVRLPPVNRATVKALISHLYCVQCFSDTNQMNVHNLAIVFGPTLFQTDGQDYKAGRVVEDLINHYVVVFSVDEEELRKQREEITAIVKMRVAGTASGTQHAGDFICTVYLEEKKAETEQHIKVPASMTAEELTLEILDRRNVGIREKDYWTCFEVNEREEAERPLHFAEKVLPILHGLGTDSHLVVKKHQAMEAMLLYLASRVGDTKHGMMKFREDRSLLGLGLPSGGFHDRYFILNSSCLRLYKEVRSHRPEKEWPIKSLKVYLGVKKKLRPPTCWGFTVVHETEKHEKQQWYLCCDTQMELREWFATFLFVQHDGLVWPSEPSRVSRAVPEVRLGSVSLIPLRGSENEMRRSVAAFTADPLSLLRNV

SEQ ID NO: 20357 - protein, 1133 aa, Homo sapiens
MTKKEEPPPSRVPRAVRVASLLSEGEELSGDDQGDEEEDDHAYEGVPNGGWHTSSLSLSLPSTIAAPHPMDGPPGGSTPVTPVIKAGWLDKNPPQGSYIYQKRWVRLDTDHLRYFDSNKDAYSKRFISVACISHVAAIGDQKFEVITNNRTFAFRAESDVERKEWMQALQQAMAEQRARARLSSAYLLGVPGSEQPDRAGSLELRGFKNKLYVAVVGDKVQLYKNLEEYHLGIGITFIDMSVGNVKEVDRRSFDLTTPYRIFSFSADSELEKEQWLEAMQGAIAEALSTSEVAERIWAAAPNRFCADCGAPQPDWASINLCVVICKRCAGEHRGLGAGVSKVRSLKMDRKVWTETLIEALCAAVTTTDLAETQALLGCGAGINCFSGDPEAPTPLALAEQAGQTLQMEFLRNNRTTEVPRLDSMKPLEKHYSVVLPTVSHSGFLYKTASAGKLLQDRRAREEFSRRWCVLGDGVLSYFENERAVTPNGEIRASEIVCLAVPPPDTHGFEHTFEVYTEGERLYLFGLESAEQAHEWVKCIAKAFVPPLAEDLLARDFERLGRLPYKAGLSLQRAQEGWFSLSGSELRAVFPEGPCEEPLQLRKLQELSIQGDSENQVLVLVERRRTLYIQGERRLDFMGWLGAIQKAAASMGDTLSEQQLGDSDIPVIVYRCVDYITQCGLTSEGIYRKCGQTSKTQRLLESLRQDARSVHLKEGEQHVDDVSSALKRFLRDLPDGLFTRAQRLTWLEASEIEDEEEKVSRYRELLVRLPPVNRATVKALISHLYCVQCFSDTNQMNVHNLAIVFGPTLFQTDGQDYKAGRVVEDLINHYVVVFSVDEEELRKQREEITAIVKMRVAGTASGTQHAGDFICTVYLEEKKAETEQHIKVPASMTAEELTLEILDRRNVGIREKDYWTCFEVNEREEAERPLHFAEKVLPILHGLGTDSHLVVKKHQAMEAMLLYLASRVGDTKHGMMKFREDRSLLGLGLPSGGFHDRYFILNSSCLRLYKEVRSHRPEKEWPIKSLKVYLGVKKKLRPPTCWGFTVVHETEKHEKQQWYLCCDTQMELREWFATFLFVQHDGLVWPSEPSRVSRAVPEVRLGSVSLIPLRGSENEMRRSVAAFTADPLSLLRNV

SEQ ID NO: 20358 - protein, 511 aa, Homo sapiens
MKFFLLLFTIGFCWAQYSPNTQQGRTSIVHLFEWRWVDIALECERYLAPKGFGGVQVSPPNENVAIHNPFRPWWERYQPVSYKLCTRSGNEDEFRNMVTRCNNVGVRIYVDAVINHMSGNAVSAGTSSTCGSYFNPGSRDFPAVPYSGWDFNDGKCKTGSGDIENYNDATQVRDCRLVGLLDLALEKDYVRSKIAEYMNHLIDIGVAGFRLDASKHMWPGDIKAILDKLHNLNSNWFPAGSKPFIYQEVIDLGGEPIKSSDYFGNGRVTEFKYGAKLGTVIRKWNGEKMSYLKNWGEGWGFMPSDRALVFVDNHDNQRGHGAGGASILTFWDARLYKMAVGFMLAHPYGFTRVMSSYRWPRQFQNGNDVNDWVGPPNNNGVIKEVTINPDTTCGNDWVCEHRWRQIRNMVNFRNVVDGQPFTNWYDNGSNQVAFGRGNRGFIVFNNDDWTFSLTLQTGLPAGTYCDVISGDKINGNCTGIKIYVSDDGKAHFSISNSAEDPFIAIHAESKL

SEQ ID NO: 20359 - protein, 370 aa, Homo sapiens
MKFFLLLFTIGFCWAQYSPNTQQGRTSIVHLFEWRWVDIALECERYLAPKGFGGVQVSPPNENVAIHNPFRPWWERYQPVSYKLCTRSGNEDEFRNMVTRCNNVGVRIYVDAVINHMSGNAVSAGTSSTCGSYFNPGSRDFPAVPYSGWDFNDGKCKTGSGDIENYNDATQVRDCRLVGLLDLALEKDYVRSKIAEYMNHLIDIGVAGFRLDASKHMWPGDIKAILDKLHNLNSNWFPAGSKPFIYQEVIDLGGEPIKSSDYFGNGRVTEFKYGAKLGTVIRKWNGEKMSYLKNWGEGWGFMPSDRALVFVDNHDNQRGHGAGGASILTFWDARLYKMAVGFMLAHPYGFTRVMSSYRWPRQFQNGNEHG

SEQ ID NO: 20360 - protein, 1001 aa, Homo sapiens
MSEDSEKEDYSDRTISDEDESDEDMFMKFVSEDLHRCALLTADSFGDPFFPRTTQILLEYQLGRWVPRLREPRDLYGVSSSGPLSPTRWPYHCEVIDEKVQHIDWTPSCPEPVYIPTGLETEPLYPDSKEATVVYLAEDAYKEPCFVYSRVGGNRTPLKQPVDYRDNTLMFEARFESGNLQKVVKVAEYEYQLTVRPDLFTNKHTQWYYFQVTNMRAGIVYRFTIVNFTKPASLYSRGMRPLFYSEKEAKAHHIGWQRIGDQIKYYRNNPGQDGRHYFSLTWTFQFPHNKDTCYFAHCYPYTYTNLQEYLSGINNDPVRSKFCKIRVLCHTLARNMVYILTITTPLKNSDSRKRKAVILTARVHPGETNSSWIMKGFLDYILGNSSDAQLLRDTFVFKVVPMLNPDGVIVGNYRCSLAGRDLNRNYTSLLKESFPSVWYTRNMVHRLMEKREVILYCDLHGHSRKENIFMYGCDGSDRSKTLYLQQRIFPLMLSKNCPDKFSFSACKFNVQKSKEGTGRVVMWKMGIRNSFTMEATFCGSTLGNKRGTHFSTKDLESMGYHFCDSLLDYCDPDRTKYYRCLKELEEMERHITLEKVFEDSDTPVIDITLDVESSSRGSDSSESIDSLTYLLKLTSQKKHLKTKKERNSTIASHQNARGQEVYDRGHLLQRHTQSNSDVKDTRPNEPDDYMVDYFRRQLPNQGLAHCKLRLPGSRHSPASASRVAGTTGTRHHTWLIFVFLVEMGKKIPLKGTDLYGNCFKVTSLQSPMGKQTSTWTEKTRIPTEDLHHNLKSKIKECISFQSKKTGINWTDDEKRSYKDKGIVQTQEILQYLLPIVHSTKNMQTTQIKQLFNPRTNFQIQHQLNPATCRNIKKYSTSWTAPRNHPFVIQGDVMANSSEWVQSKPHRSLESLSPLKGPKKNKHSQIWAIKNEDIKPLSSKWETASSSFGMDANVLKYKSLQAEETNQQSSKHTALHLTKNKDEQANKNDGQPTLYLKFQRES

SEQ ID NO: 20361 - protein, 621 aa, Homo sapiens
MSEDSEKEDYSDRTISDEDESDEDMFMKFVSEDLHRCALLTADSFGDPFFPRTTQILLEYQLGRWVPRLREPRDLYGVSSSGPLSPTRWPYHCEVIDEKVQHIDWTPSCPEPVYIPTGLETEPLYPDSKEATVVYLAEDAYKEPCFVYSRVGGNRTPLKQPVDYRDNTLMFEARFESGNLQKVVKVAEYEYQLTVRPDLFTNKHTQWYYFQVTNMRAGIVYRFTIVNFTKPASLYSRGMRPLFYSEKEAKAHHIGWQRIGDQIKYYRNNPGQDGRHYFSLTWTFQFPHNKDTCYFAHCYPYTYTNLQEYLSGINNDPVRSKFCKIRVLCHTLARNMVYILTITTPLKNSDSRKRKAVILTARVHPGETNSSWIMKGFLDYILGNSSDAQLLRDTFVFKVVPMLNPDGVIVGNYRCSLAGRDLNRNYTSLLKESFPSVWYTRNMVHRLMEKREVILYCDLHGHSRKENIFMYGCDGSDRSKTLYLQQRIFPLMLSKNCPDKFSFSACKFNVQKSKEGTGRVVMWKMGIRNSFTMEATFCGSTLGNKRGTHFSTKDLESMGYHFCDSLLDYCDPDRTKYYRCLKELEEMERHITLEKVFEDSDTPVIDITLDVESRELTFLLR

SEQ ID NO: 20362 - protein, 177 aa, Homo sapiens
MSEDSEKEDYSDRTISDEDESDEDMFMKFVSEDLHRCALLTADSFGDPFFPRTTQILLEYQLGRWVPRLREPRDLYGVSSSGPLSPTRWPYHCEVIDEKVQHIDGVSCWSESHQAGAQWCDLGSLQPPPPRFKRFACFSLLSSRDYRRVPPRPANFVFLVETGFHHVGQDGLRLLTS

SEQ ID NO: 20363 - protein, 920 aa, Homo sapiens
MSEDSEKEDYSDRTISDEDESDEDMFMKFVSEDLHRCALLTADSFGDPFFPRTTQILLEYQLGRWVPRLREPRDLYGVSSSGPLSPTRWPYHCEVIDEKVQHIDWTPSCPEPVYIPTGLETEPLYPDSKEATVVYLAEDAYKEPCFVYSRVGGNRTPLKQPVDYRDNTLMFEARFESGNLQKVVKVAEYEYQLTVRPDLFTNKHTQWYYFQVTNMRAGIVYRFTIVNFTKPASLYSRGMRPLFYSEKEAKAHHIGWQRIGDQIKYYRNNPGQDGRHYFSLTWTFQFPHNKDTCYFAHCYPYTYTNLQEYLSGINNDPVRSKFCKIRVLCHTLARNMVYILTITTPLKNSDSRKRKAVILTARVHPGETNSSWIMKGFLDYILGNSSDAQLLRDTFVFKVVPMLNPDGVIVGNYRCSLAGRDLNRNYTSLLKESFPSVWYTRNMVHRLMEKREVILYCDLHGHSRKENIFMYGCDGSDRSKTLYLQQRIFPLMLSKNCPDKFSFSACKFNVQKSKEGTGRVVMWKMGIRNSFTMEATFCGSTLGNKRGTHFSTKDLESMGYHFCDSLLDYCDPDRTKYYRCLKELEEMERHITLEKVFEDSDTPVIDITLDVESSSRGSDSSESIDSLTYLLKLTSQKKHLKTKKERNSTIASHQNARGQEVYDRGHLLQRHTQSNSDVKDTRPNEPDDYMVDYFRRQLPNQGLDLHHNLKSKIKECISFQSKKTGINWTDDEKRSYKDKGIVQTQEILQYLLPIVHSTKNMQTTQIKQLFNPRTNFQIQHQLNPATCRNIKKYSTSWTAPRNHPFVIQGDVMANSSEWVQSKPHRSLESLSPLKGPKKNKHSQIWAIKNEDIKPLSSKWETASSSFGMDANVLKYKSLQAEETNQQSSKHTALHLTKNKDEQANKNDGQPTLYLKFQRES

SEQ ID NO: 20364 - protein, 290 aa, Homo sapiens
MLGQRAGDGERPGLPGDGEGGVPARPGRRAERPPQRPAKVNKAVTCAAHLPGAAASRPLSPNKPDRVRPGQRDRIGAKRQRRRRADAGQARAASSRRVVPTAPEVLGAVASLPDRGRPTVARVATGSRLEGLFSAASLKLSALTQSLTRVRQAPTASGATIRLPASPVEMFLTSAFLTGFSFHCLYSGIGHGEDILASVEQITIVSRPLSGQRGAGPGNSAYTPRRSQGGPRAATTPGFRFPCRGLVRRAVLRLTVTVQDCILTALLAVSFHSIGVVIMTSSYLLGPVVK

SEQ ID NO: 20365 - protein, 689 aa, Homo sapiens
MADLEAVLADVSYLMAMEKSKATPAARASKKILLPEPSIRSVMQKYLEDRGEVTFEKIFSQKLGYLLFRDFCLNHLEEARPLVEFYEEIKKYEKLETEEERVARSREIFDSYIMKELLACSHPFSKSATEHVQGHLGKKQVPPDLFQPYIEEICQNLRGDVFQKFIESDKFTRFCQWKNVELNIHLTMNDFSVHRIIGRGGFGEVYGCRKADTGKMYAMKCLDKKRIKMKQGETLALNERIMLSLVSTGDCPFIVCMSYAFHTPDKLSFILDLMNGGDLHYHLSQHGVFSEADMRFYAAEIILGLEHMHNRFVVYRDLKPANILLDEHGHVRISDLGLACDFSKKKPHASVGTHGYMAPEVLQKGVAYDSSADWFSLGCMLFKLLRGHSPFRQHKTKDKHEIDRMTLTMAVELPDSFSPELRSLLEGLLQRDVNRRLGCLGRGAQEVKESPFFRSLDWQMVFLQKYPPPLIPPRGEVNAADAFDIGSFDEEDTKGIKLLDSDQELYRNFPLTISERWQQEVAETVFDTINAETDRLEARKKAKNKQLGHEEDYALGKDCIMHGYMSKMGNPFLTQWQRRYFYLFPNRLEWRGEGEAPQSLLTMEEIQSVEETQIKERKCLLLKIRGGKQFILQCDSDPELVQWKKELRDAYREAQQLVQRVPKMKNKPRSPVVELSKVPLVQRGSANGL

SEQ ID NO: 20366 - protein, 98 aa, Homo sapiens
MALLLALSLLVLWTSPAPTLSGTNDAEDCCLSVTQKPIPGYIVRNFHYLLIKDGCRVPAVVFTTLRGRQLCAPPDQPWVERIIQRLQRTSAKMKRRSS

SEQ ID NO: 20367 - protein, 420 aa, Homo sapiens
MSAAGAGAGVEAGFSSEELLSLRFPLHRACRDGDLATLCSLLQQTPHAHLASEDSFYGWTPVHWAAHFGKLECLVQLVRAGATLNVSTTRYAQTPAHIAAFGGHPQCLVWLIQAGANINKPDCEGETPIHKAARSGSLECISALVANGAHVDLRNASGLTAADIAQTQGFQECAQFLLNLQNCHLNHFYNNGILNGGHQNVFPNHISVGTNRKRCLEDSEDFGVKKARTEAQSLDSAVPLTNGDTEDDADKMHVDREFAVVTDMKNSSSVSNTLTNGCVINGHLDFPSTTPLSGMESRNGQCLTGTNGISSGLAPGQPFPSSQGSLCISGTEEPEKTLRANPELCGSLHLNGSPSSCIASRPSWVEDIGDNLYYGHYHGFGDTAESIPELNSVVEHSKSVKVQERYDSAVLGTMHLHHGS

SEQ ID NO: 20368 - protein, 220 aa, Homo sapiens
MSAAGAGAGVEAGFSSEELLSLRFPLHRACRDGDLATLCSLLQQTPHAHLASEDSFYGWTPVHWAAHFGKLECLVQLVRAGATLNVSTTRYAQTPAHIAAFGGHPQCLVWLIQAGANINKPDCEGETPIHKAARSGSLECISALVANGAHVEFISQSSVHSCLPGELQHGVTFDPSVLIQCLKPEKCQWPDSSRHCTNPGFPRVCPVSLEPPELSSEPFL

SEQ ID NO: 20369 - protein, 120 aa, Homo sapiens
MKVSVAALSCLMLVTALGSQARVTKDAETEFMMSKLPLENPVLLDRFHATSADCCISYTPRSIPCSLLESYFETNSECSKPGVIFLTKKGRRFCANPSDKQVQVCVRMLKLDTRIKTRKN

SEQ ID NO: 20370 - protein, 137 aa, Homo sapiens
MKVSVAALSCLMLVTALGSQARVTKDAETEFMMSKLPLENPVLLDMLWRRKIGPQMTLSHAAGFHATSADCCISYTPRSIPCSLLESYFETNSECSKPGVIFLTKKGRRFCANPSDKQVQVCVRMLKLDTRIKTRKN

SEQ ID NO: 20371 - protein, 982 aa, Homo sapiens [sequence omitted]

SEQ ID NO: 20372 - protein, 810 aa, Homo sapiens
MANSMNGRNPGGRGGNPRKGRILGIIDAIQDAVGPPKQAAADRRTVEKTWKLMDKVVRLCQNPKLQLKNSPPYILDILPDTYQHLRLILSKYDDNQKLAQLSENEYFKIYIDSLMKKSKRAIRLFKEGKERMYEEQSQDRRNLTKLSLIFSHMLAEIKAIFPNGQFQGDNFRITKADAAEFWRKFFGDKTIVPWKVFRQCLHEVHQISSGLEAMALKSTIDLTCNDYISVFEFDIFTRLFQPWGSILRNWNFLAVTHPGYMAFLTYDEVKARLQKYSTKPGSYIFRLSCTRLGQWAIGYVTGDGNILQTIPHNKPLFQALIDGSREGFYLYPDGRSYNPDLTGLCEPTPHDHIKVTQEQYELYCEMGSTFQLCKICAENDKDVKIEPCGHLMCTSCLTAWQESDGQGCPFCRCEIKGTEPIIVDPFDPRDEGSRCCSIIDPFGMPMLDLDDDDDREESLMMNRLANVRKCTDRQNSPVTSPGSSPLAQRRKPQPDPLQIPHLSLPPVPPRLDLIQKGIVRSPCGSPTGSPKSSPCMVRKQDKPLPAPPPPLRDPPPPPPERPPPIPPDNRLSRHIHHVESVPSRDPPMPLEAWCPRDVFGTNQLVGCRLLGEGSPKPGITASSNVNGRHSRVGSDPVLMRKHRRHDLPLEGAKVFSNGHLGSEEYDVPPRLSPPPPVTTLLPSIKCTGPLANSLSEKTRDPVEEDDDEYKIPSSHPVSLNSQPSHCHNVKPPVRSCDNGHCMLNGTHGPSSEKKSNIPDLSIYLKGDVFDSASDPVPLPPARPPTRDNPKHGSSLNRTPSDYDLLIPPLG

SEQ ID NO: 20373 - protein, 770 aa, Homo sapiens
MANSMNGRNPGGRGGNPRKGRILGIIDAIQDAVGPPKQAAADRRTVEKTWKLMDKVVRLCQNPKLQLKNSPPYILDILPDTYQHLRLILSKYDDNQKLAQLSENEYFKIYIDSLMKKSKRAIRLFKEGKERMYEEQSQDRRNLTKLSLIFSHMLAEIKAIFPNGQFQGDNFRITKADAAEFWRKFFGDKTIVPWKVFRQCLHEVHQISSGLEAMALKSTIDLTCNDYISVFEFDIFTRLFQPWGSILRNWNFLAVTHPGYMAFLTYDEVKARLQKYSTKPGSYIFRLSCTRLGQWAIGYVTGDGNILQTIPHNKPLFQALIDGSREGFYLYPDGRSYNPDLTGLCEPTPHDHIKVTQEQYELYCEMGSTFQLCKICAENDKDVKIEPCGHLMCTSCLTAWQESDGQGCPFCRCEIKGTEPIIVDPFDPRDEGSRCCSIIDPFGMPMLDLDDDDDREESLMMNRLANVRKCTDRQNSPVTSPGSSPLAQRRKPQPDPLQIPHLSLPPVPPRLDLIQKGIVRSPCGSPTGSPKSSPCMVRKQDKPLPAPPPPLRDPPPPPPERPPPIPPDNRLSRHIHHVESVPSRDPPMPLEAWCPRDVFGTNQLVGCRLLGEGSPKPGITASSNVNGRHSRVGSDPVLMRKHRRHDLPLEGAKVFSNGHLGSEEYDVPPRLSPPPPVTTLLPSIKCTGPLANSLSEKTRDPVEEDDDEYKIPSSHPVSLNSQPSHCHNVKPPVRSCDNGHCMLNGTHGPSSEKKSNIPDLSIYLKGTYRI

SEQ ID NO: 20374 - protein, 594 aa, Homo sapiens
MAAPVKGNRKQSTEGDALDPPASPKPAGKQNGIQNPISLEDSPEAGGEREEEQEREEEQAFLVSLYKFMKERHTPIERVPHLGFKQINLWKIYKAVEKLGAYELVTGRRLWKNVYDELGGSPGSTSAATCTRRHYERLVLPYVRHLKGEDDKPLPTSKPRKQYKMAKENRGDDGATERPKKAKEERRMDQMMPGKTKADAADPAPLPSQEPPRNSTEQQGLASGSSVSFVGASGCPEAYKRLLSSFYCKGTHGIMSPLAKKKLLAQVSKVEALQCQEEGCRHGAEPQASPAVHLPESPQSPKGLTENSRHRLTPQEGLQAPGGSLREEAQAGPCPAAPIFKGCFYTHPTEVLKPVSQHPRDFFSRLKDGVLLGPPGKEGLSVKEPQLVWGGDANRPSAFHKGGSRKGILYPKPKACWVSPMAKVPAESPTLPPTFPSSPGLGSKRSLEEEGAAHSGKRLRAVSPFLKEADAKKCGAKPAGSGLVSCLLGPALGPVPPEAYRGTMLHCPLNFTGTPGPLKGQAALPFSPLVIPAFPAHFLATAGPSPMAAGLMHFPPTSFDSALRHRLCPASSAWHAPPVTTYAAPHFFHLNTKL

SEQ ID NO: 20375 - protein, 526 aa, Homo sapiens
MKERHTPIERVPHLGFKQINLWKIYKAVEKLGAYELVTGRRLWKNVYDELGGSPGSTSAATCTRRHYERLVLPYVRHLKGEDDKPLPTSKPRKQYKMAKENRGDDGATERPKKAKEERRMDQMMPGKTKADAADPAPLPSQEPPRNSTEQQGLASGSSVSFVGASGCPEAYKRLLSSFYCKGTHGIMSPLAKKKLLAQVSKVEALQCQEEGCRHGAEPQASPAVHLPESPQSPKGLTENSRHRLTPQEGLQAPGGSLREEAQAGPCPAAPIFKGCFYTHPTEVLKPVSQHPRDFFSRLKDGVLLGPPGKEGLSVKEPQLVWGGDANRPSAFHKGGSRKGILYPKPKACWVSPMAKVPAESPTLPPTFPSSPGLGSKRSLEEEGAAHSGKRLRAVSPFLKEADAKKCGAKPAGSGLVSCLLGPALGPVPPEAYRGTMLHCPLNFTGTPGPLKGQAALPFSPLVIPAFPAHFLATAGPSPMAAGLMHFPPTSFDSALRHRLCPASSAWHAPPVTTYAAPHFFHLNTKL

SEQ ID NO: 20376 - protein, 370 aa, Homo sapiens
MSLHQFLLEPITCHAWNRDRTQIALSPNNHEVHIYKKNGSQWVKAHELKEHNGHITGIDWAPKSDRIVTCGADRNAYVWSQKDGVWKPTLVILRINRAATFVKWSPLENKFAVGSGARLISVCYFESENDWWVSKHIKKPIRSTVLSLDWHPNNVLLAAGSCDFKCRVFSAYIKEVDEKPASTPWGSKMPFGQLMSEFGGSGTGGWVHGVSFSASGSRLAWVSHDSTVSVADASKSVQVSTLKTEFLPLLSVSFVSENSVVAAGHDCCPMLFNYDDRGCLTFVSKLDIPKQSIQRNMSAMERFRNMDKRATTEDRNTALETLHQNSITQVSIYEVDKQDCRKFCTTGIDGAMTIWDFKTLESSIQGLRIM

SEQ ID NO: 20377 - protein, 345 aa, Homo sapiens
MHERFIHCFCIDWAPKSDRIVTCGADRNAYVWSQKDGVWKPTLVILRINRAATFVKWSPLENKFAVGSGARLISVCYFESENDWWVSKHIKKPIRSTVLSLDWHPNNVLLAAGSCDFKCRVFSAYIKEVDEKPASTPWGSKMPFGQLMSEFGGSGTGGWVHGVSFSASGSRLAWVSHDSTVSVADASKSVQVSTLKTEFLPLLSVSFVSENSVVAAGHDCCPMLFNYDDRGCLTFVSKLDIPKQSIQRNMSAMERFRNMDKRATTEDRNTALETLHQNSITQVSIYEVDKQDCRKFCTTGIDGAMTIWDFKEPSRHGLPQLPGGAHQLPRLEQGPHPDCHLPQQP

SEQ ID NO: 20378 - protein, 425 aa, Homo sapiens
MNKMPAGEQECEYNKEGKYYSKGVKLVRKKKKIPGYRWGDIKINIIGEKDDLPIHFCDKCDLPIKIYGRIIPCKHAFCYHCANLYDKVGYKVCPRCRYPVLRIEAHKRGSVFMCSIVQQCKRTYLSQKSLQAHIKRRHKRARKQVTSASLEKVRPHIAPPQTEISDIPKRLQDRDHLSYIPPEQHTMVSLPSVQHMLQEQHNQPHKDIQAPPPELSLSLPFPIQWETVSIFTRKHGNLTVDHIQNNSDSGAKKPTPPDYYPECQSQPAVSSPHHIIPQKQHYAPPPSPSSPVNHQMPYPPQDVVTPNSVRSQVPALTTTYDPSSGYIIVKVPPDMNSPPLRAPQSQNGNPSASEFASHHYNLNILPQFTENQETLSPQFTQTDAMDHRRWPAWKRLSPCPPTRSPPPSTLHGRSHHSHQRRHRRY

SEQ ID NO: 20379 - protein, 763 aa, Homo sapiens
MEASLTRRLLFKDRHFTCSKIIGRRFACFAQRLSHRRKQSQCDLLNESTGQLPTTCSSAASNSINWNCRVKMTQQMQNLHLCQSKKHSAPSSPNAAKRLYRNLSEKLKGSHSSFDEAYFRTRTDRLSLRKTSVNFQGNEAMFEAVEQQDMDAVQILLYQYTPEELDLNTPNSEGLTPLDIAIMTNNVPIARILLRTGARESPHFVSLESRAMHLNTLVQEAQERVSELSAQVENEGFTLDNTEKEKQLKAWEWRYRLYRRMKTGFEHARAPEMPTNVCLMVTSSTSLTVSFQEPLSVNAAVVTRYKVEWSMSEDFSPLAGEIIMDNLQTLRCTITGLTMGQQYFVQVSAYNMKGWGPAQTTTPACASPSNWKDYDDREPRHKGQSEVLEGLLQQVRALHQHYSCRESTKLQTTGRKQSVSRSLKHLFHSSNKFVKTLKRGLYIAVIFYYKDNILVTNEDQVPIVEIDDSHTSSITQDFLWFTKLSCMWEDIRWLRQSIPISSSSSTVLQTRQKMLAATAQLQNLLGTHNLGRVYYEPIKDRHGNILIVTIREVEMLYSFFNGKWMQISKLQSQRKSLSTPEEPTALDILLITIQDILSYHKRSHQRLFPGLYLGYLKLCSSVDQIKVLVTQKLPNILCHVKIRENNNISREEWEWIQKLSGSESMESVDHTSDCPMQLFFYELQMAVKALLQQINIPLHQARNFRLYTQEVLEMGHNVSFLLLLPASDDVCTAPGQNNPYTPHSGFLNLPLQMFELGIVACFT

SEQ ID NO: 20380 - protein, 2603 aa, Homo sapiens
MEKATVPVAAATAAEGEGSPPAVAAVAGPPAAAEVGGGVGGSSRARSASSPRGMVRVCDLLLKKKPPQQQHHKAKRNRTCRPPSSSESSSDSDNSGGGGGGGGGGGGGGGTSSNNSEEEEDDDDEEEEVSEVESFILDQDDLENPMLETASKLLLSGTADGADLRTVDPETQARLEALLEAAGIGKLSTADGKAFADPEVLRRLTSSVSCALDEAAAALTRMRAESTANAGQSDNRSLAEACSEGDVNAVRKLLIEGRSVNEHTEEGESLLCLACSAGYYELAQVLLAMHANVEDRGIKGDITPLMAAANGGHVKIVKLLLAHKADVNAQSSTGNTALTYACAGGYVDVVKVLLESGASIEDHNENGHTPLMEAGSAGHVEVARLLLENGAGINTHSNEFKESALTLACYKGHLEMVRFLLEAGADQEHKTDEMHTALMEACMDGHVEVARLLLDSGAQVNMPADSFESPLTLAACGGHVELAALLIERGASLEEVNDEGYTPLMEAAREGHEEMVALLLGQGANINAQTEETQETALTLACCGGFLEVADFLIKAGADIELGCSTPLMEAAQEGHLELVKYLLAAGANVHATTATGDTALTYACENGHTDVADVLLQAGADLEHESEGGRTPLMKAARAGHVCTVQFLISKGANVNRTTANNDHTVLSLACAGGHLAVVELLLAHGADPTHRLKDGSTMLIEAAKGGHTSVVCYLLDYPNNLLSAPPPDVTQLTPPSHDLNRAPRVPVQALPMVVPPQEPDKPPANVATTLPIRNKAASKQKSSSHLPANSQDVQGYITNQSPESIVEEAQGKLTELEQRIKEAIEKNAQLQSLELAHADQLTKEKIEELNKTREEQIQKKQKILEELQKVERELQLKTQQQLKKQYLEVKAQRIQLQQQQQQSCQHLGLLTPVGVGEQLSEGDYARLQQVDPVLLKDEPQQTAAQMGFAPIQPLAMPQALPLAAGPLPPGSIANLTELQGVIVGQPVLGQAQLAGLGQGILTETQQGLMVASPAQTLNDTLDDIMAAVSGRASAMSNTPTHSIAASISQPQTPTPSPIISPSAMLPIYPAIDIDAQTESNHDTALTLACAGGHEELVQTLLERGASIEHRDKKGFTPLILAATAGHVGVVEILLDNGADIEAQSERTKDTPLSLACSGGRQEVVELLLARGANKEHRNVSDYTPLSLAASGGYVNIIKILLNAGAEINSRTGSKLGISPLMLAAMNGHTAAVKLLLDMGSDINAQIETNRNTALTLACFQGRTEVVSLLLDRKANVEHRAKTGLTPLMEAASGGYAEVGRVLLDKGADVNAPPVPSSRDTALTIAADKGHYKFCELLIGRGAHIDVRNKKGNTPLWLAANGGHLDVVQLLVQAGADVDAADNRKITPLMAAFRKGHVKVVRYLVKEVNQFPSDSECMRYIATITDKEMLKKCHLCMESIVQAKDRQAAEANKNASILLEELDLEKLREESRRLALAAKREKRKEKRRKKKEEQRRKLEEIEAKNKENFELQAAQEKEKLKVEDEPEVLTEPPSATTTTTIGISATWTTLAGSHGKRNNTITTTSSKRKNRKNKITPENVQIIFDDPLPISYSQPEKVNGESKSSSTSESGDSDNMRISSCSDESSNSNSSRKSDNHSPAVVTTTVSSKKQPSVLVTFPKEERKSVSGKASIKLSETISEGTSNSLSTCTKSGPSPLSSPNGKLTVASPKRGQKREEGWKEVVRRSKKVSVPSTVISRVIGRGGCNINAIREFTGAHIDIDKQKDKTGDRIITIRGGTESTRQATQLINALIKDPDKEIDELIPKNRLKSSSANSKIGSSAPTTTAANTSLMGIKMTTVALSSTSQTATALTVPAISSASTHKTIKNPVNNVRPGFPVSLPLAYPPPQFAHALLAAQTFQQIRPPRLPMTHFGGTFPPAQSTWGPFPVRPLSPARATNSPKPHMVPRHSNQNSSGSQVNSAGSLTSSPTTTTSSSASTVPGTSTNGSPSSPSVRRQLFVTVVKTSNATTTTVTTTASNNNTAPTNATYPMPTAKEHYPVSSPSSPSPPAQPGGVSRNSPLDCGSASPNKVASSSEQEAGSPPVVETTNTRPPNSSSSSGSSSAHSNQQQPPGSVSQEPRPPLQQSQVPPPEVRMTVPPLATSSAPVAVPSTAPVTYPMPQTPMGCPQPTPKMETPAIRPPPHGTTAPHKNSASVQNSSVAVLSVNHIKRPHSVPSSVQLPSTLSTQSACQNSVHPANKPIAPNFSAPLPFGPFSTLFENSPTSAHAFWGGSVVSSQSTPESMLSGKSSYLPNSDPLHQSDTSKAPGFRPPLQRPAPSPSGIVNMDSPYGSVTPSSTHLGNFASNISGGQMYGPGAPLGGAPAAANFNRQHFSPLSLLTPCSSASNDSSAQSVSSGVRAPSPAPSSVPLGSEKPSNVSQDRKVPVPIGTERSARIRQTGTSAPSVIGSNLSTSVGHSGIWSFEGIGGNQDKVDWCNPGMGNPMIHRPMSDPGVFSQHQAMERDSTGIVTPSGTFHQHVPAGYMDFPKVGGMPFSVYGNAMIPPVAPIPDGAGGPIFNGPHAADPSWNSLIKMVSSSTENNGPQTVWTGPWAPHMNSVHMNQLG

SEQ ID NO: 20381 - protein, 2602 aa, Homo sapiens
MEKATVPVAAATAAEGEGSPPAVAAVAGPPAAAEVGGGVGGSSRARSASSPRGMVRVCDLLLKKKPPQQQHHKAKRNRTCRPPSSSESSSDSDNSGGGGGGGGGGGGGGGTSSNNSEEEEDDDDEEEEVSEVESFILDQDDLENPMLETASKLLLSGTADGADLRTVDPETQARLEALLEAAGIGKLSTADGKAFADPEVLRRLTSSVSCALDEAAAALTRMRAESTANAGQSDNRSLAEACSEGDVNAVRKLLIEGRSVNEHTEEGESLLCLACSAGYYELAQVLLAMHANVEDRGIKGDITPLMAAANGGHVKIVKLLLAHKADVNAQSSTGNTALTYACAGGYVDVVKVLLESGASIEDHNENGHTPLMEAGSAGHVEVARLLLENGAGINTHSNEFKESALTLACYKGHLEMVRFLLEAGADQEHKTDEMHTALMEACMDGHVEVARLLLDSGAQVNMPADSFESPLTLAACGGHVELAALLIERGASLEEVNDEGYTPLMEAAREGHEEMVALLLGQGANINAQTEETQETALTLACCGGFLEVADFLIKAGADIELGCSTPLMEAAQEGHLELVKYLLAAGANVHATTATGDTALTYACENGHTDVADVLLQAGADLEHESEGGRTPLMKAARAGHVCTVQFLISKGANVNRTTANNDHTVLSLACAGGHLAVVELLLAHGADPTHRLKDGSTMLIEAAKGGHTSVVCYLLDYPNNLLSAPPPDVTQLTPPSHDLNRAPRVPVQALPMVVPPQEPDKPPANVATTLPIRNKAASKQKSSSHLPANSQDVQGYITNQSPESIVEEAQGKLTELEQRIKEAIEKNAQLQSLELAHADQLTKEKIEELNKTREEQIQKKQKILEELQKVERELQLKTQQQLKKQYLEVKAQRIQLQQQQQQSCQHLGLLTPVGVGEQLSEGDYARLQQVDPVLLKDEPQQTAAQMGFAPIQPLAMPQALPLAAGPLPPGSIANLTELQGVIVGQPVLGQAQLAGLGQGILTETQQGLMVASPAQTLNDTLDDIMAVSGRASAMSNTPTHSIAASISQPQTPTPSPIISPSAMLPIYPAIDIDAQTESNHDTALTLACAGGHEELVQTLLERGASIEHRDKKGFTPLILAATAGHVGVVEILLDNGADIEAQSERTKDTPLSLACSGGRQEVVELLLARGANKEHRNVSDYTPLSLAASGGYVNIIKILLNAGAEINSRTGSKLGISPLMLAAMNGHTAAVKLLLDMGSDINAQIETNRNTALTLACFQGRTEVVSLLLDRKANVEHRAKTGLTPLMEAASGGYAEVGRVLLDKGADVNAPPVPSSRDTALTIAADKGHYKFCELLIGRGAHIDVRNKKGNTPLWLAANGGHLDVVQLLVQAGADVDAADNRKITPLMAAFRKGHVKVVRYLVKEVNQFPSDSECMRYIATITDKEMLKKCHLCMESIVQAKDRQAAEANKNASILLEELDLEKLREESRRLALAAKREKRKEKRRKKKEEQRRKLEEIEAKNKENFELQAAQEKEKLKVEDEPEVLTEPPSATTTTTIGISATWTTLAGSHGKRNNTITTTSSKRKNRKNKITPENVQIIFDDPLPISYSQPEKVNGESKSSSTSESGDSDNMRISSCSDESSNSNSSRKSDNHSPAVVTTTVSSKKQPSVLVTFPKEERKSVSGKASIKLSETISEGTSNSLSTCTKSGPSPLSSPNGKLTVASPKRGQKREEGWKEVVRRSKKVSVPSTVISRVIGRGGCNINAIREFTGAHIDIDKQKDKTGDRIITIRGGTESTRQATQLINALIKDPDKEIDELIPKNRLKSSSANSKIGSSAPTTTAANTSLMGIKMTTVALSSTSQTATALTVPAISSASTHKTIKNPVNNVRPGFPVSLPLAYPPPQFAHALLAAQTFQQIRPPRLPMTHFGGTFPPAQSTWGPFPVRPLSPARATNSPKPHMVPRHSNQNSSGSQVNSAGSLTSSPTTTTSSSASTVPGTSTNGSPSSPSVRRQLFVTVVKTSNATTTTVTTTASNNNTAPTNATYPMPTAKEHYPVSSPSSPSPPAQPGGVSRNSPLDCGSASPNKVASSSEQEAGSPPVVETTNTRPPNSSSSSGSSSAHSNQQQPPGSVSQEPRPPLQQSQVPPPEVRMTVPPLATSSAPVAVPSTAPVTYPMPQTPMGCPQPTPKMETPAIRPPPHGTTAPHKNSASVQNSSVAVLSVNHIKRPHSVPSSVQLPSTLSTQSACQNSVHPANKPIAPNFSAPLPFGPFSTLFENSPTSAHAFWGGSVVSSQSTPESMLSGKSSYLPNSDPLHQSDTSKAPGFRPPLQRPAPSPSGIVNMDSPYGSVTPSSTHLGNFASNISGGQMYGPGAPLGGAPAAANFNRQHFSPLSLLTPCSSASNDSSAQSVSSGVRAPSPAPSSVPLGSEKPSNVSQDRKVPVPIGTERSARIRQTGTSAPSVIGSNLSTSVGHSGIWSFEGIGGNQDKVDWCNPGMGNPMIHRPMSDPGVFSQHQAMERDSTGIVTPSGTFHQHVPAGYMDFPKVGGMPFSVYGNAMIPPVAPIPDGAGGPIFNGPHAADPSWNSLIKMVSSSTENNGPQTVWTGPWAPHMNSVHMNQLG

SEQ ID NO: 20382 - protein, 1187 aa, Homo sapiens
MEKATVPVAAATAAEGEGSPPAVAAVAGPPAAAEVGGGVGGSSRARSASSPRGMVRVCDLLLKKKPPQQQHHKAKRNRTCRPPSSSESSSDSDNSGGGGGGGGGGGGGGGTSSNNSEEEEDDDDEEEEVSEVESFILDQDDLENPMLETASKLLLSGTADGADLRTVDPETQARLEALLEAAGIGKLSTADGKAFADPEVLRRLTSSVSCALDEAAAALTRMRAESTANAGQSDNRSLAEACSEGDVNAVRKLLIEGRSVNEHTEEGESLLCLACSAGYYELAQVLLAMHANVEDRGIKGDITPLMAAANGGHVKIVKLLLAHKADVNAQSSTGNTALTYACAGGYVDVVKVLLESGASIEDHNENGHTPLMEAGSAGHVEVARLLLENGAGINTHSNEFKESALTLACYKGHLEMVRFLLEAGADQEHKTDEMHTALMEACMDGHVEVARLLLDSGAQVNMPADSFESPLTLAACGGHVELAALLIERGASLEEVNDEGYTPLMEAAREGHEEMVALLLGQGANINAQTEETQETALTLACCGGFLEVADFLIKAGADIELGCSTPLMEAAQEGHLELVKYLLAAGANVHATTATGDTALTYACENGHTDVADVLLQAGADLEHESEGGRTPLMKAARAGHVCTVQFLISKGANVNRTTANNDHTVLSLACAGGHLAVVELLLAHGADPTHRLKDGSTMLIEAAKGGHTSVVCYLLDYPNNLLSAPPPDVTQLTPPSHDLNRAPRVPVQALPMVVPPQEPDKPPANVATTLPIRNKAASKQKSSSHLPANSQDVQGYITNQSPESIVEEAQGKLTELEQRIKEAIEKNAQLQSLELAHADQLTKEKIEELNKTREEQIQKKQKILEELQKVERELQLKTQQQLKKQYLEVKAQRIQLQQQQQQSCQHLGLLTPVGVGEQLSEGDYARLQQVDPVLLKDEPQQTAAQMGFAPIQPLAMPQALPLAAGPLPPGSIANLTELQGVIVGQPVLGQAQLAGLGQGILTETQQGLMVASPAQTLNDTLDDIMAAVSGRASAMSNTPTHSIAASISQPQTPTPSPIISPSAMLPIYPAIDIDAQTESNHDTALTLACAGGHEELVQTLLERGASIEHRDKKGFTPLILAATAGHVGVVEILLDNGADIEAQSERTKDTPLSLACSGGRQEVVELLLARGANYRSTGMVLITHL

SEQ ID NO: 20383 - protein, 2010 aa, Homo sapiens
MEKATVPVAAATAAEGEGSPPAVAAVAGPPAAAEVGGGVGGSSRARSASSPRGMVRVCDLLLKKKPPQQQHHKAKRNRTCRPPSSSESSSDSDNSGGGGGGGGGGGGGGGTSSNNSEEEEDDDDEEEEVSEVESFILDQDDLENPMLETASKLLLSGTADGADLRTVDPETQARLEALLEAAGIGKLSTADGKAFADPEVLRRLTSSVSCALDEAAAALTRMRAESTANAGQSDNRSLAEACSEGDVNAVRKLLIEGRSVNEHTEEGESLLCLACSAGYYELAQVLLAMHANVEDRGIKGDITPLMAAANGGHVKIVKLLLAHKADVNAQSSTGNTALTYACAGGYVDVVKVLLESGASIEDHNENGHTPLMEAGSAGHVEVARLLLENGAGINTHSNEFKESALTLACYKGHLEMVRFLLEAGADQEHKTDEMHTALMEACMDGHVEVARLLLDSGAQVNMPADSFESPLTLAACGGHVELAALLIERGASLEEVNDEGYTPLMEAAREGHEEMVALLLGQGANINAQTEETQETALTLACCGGFLEVADFLIKAGADIELGCSTPLMEAAQEGHLELVKYLLAAGANVHATTATGDTALTYACENGHTDVADVLLQAGADLEHESEGGRTPLMKAARAGHVCTVQFLISKGANVNRTTANNDHTVLSLACAGGHLAVVELLLAHGADPTHRLKDGSTMLIEAAKGGHTSVVCYLLDYPNNLLSAPPPDVTQLTPPSHDLNRAPRVPVQALPMVVPPQEPDKPPANVATTLPIRNKAASKQKSSSHLPANSQDVQGYITNQSPESIVEEAQGKLTELEQRIKEAIEKNAQLQSLELAHADQLTKEKIEELNKTREEQIQKKQKILEELQKVERELQLKTQQQLKKQYLEVKAQRIQLQQQQQQSCQHLGLLTPVGVGEQLSEGDYARLQQVDPVLLKDEPQQTAAQMGFAPIQPLAMPQALPLAAGPLPPGSIANLTELQVLSSLLQPCFLSTLPLILMHRLRVIMTRRKSSSTSESGDSDNMRISSCSDESSNSNSSRKSDNHSPAVVTTTVSSKKQPSVLVTFPKEERKSVSGKASIKLSETISEGTSNSLSTCTKSGPSPLSSPNGKLTVASPKRGQKREEGWKEVVRRSKKVSVPSTVISRVIGRGGCNINAIREFTGAHIDIDKQKDKTGDRIITIRGGTESTRQATQLINALIKDPDKEIDELIPKNRLKSSSANSKIGSSAPTTTAANTSLMGIKMTTVALSSTSQTATALTVPAISSASTHKTIKNPVNNVRPGFPVSLPLAYPPPQFAHALLAAQTFQQIRPPRLPMTHFGGTFPPAQSTWGPFPVRPLSPARATNSPKPHMVPRHSNQNSSGSQVNSAGSLTSSPTTTTSSSASTVPGTSTNGSPSSPSVRRQLFVTVVKTSNATTTTVTTTASNNNTAPTNATYPMPTAKEHYPVSSPSSPSPPAQPGGVSRNSPLDCGSASPNKVASSSEQEAGSPPVVETTNTRPPNSSSSSGSSSAHSNQQQPPGSVSQEPRPPLQQSQVPPPEVRMTVPPLATSSAPVAVPSTAPVTYPMPQTPMGCPQPTPKMETPAIRPPPHGTTAPHKNSASVQNSSVAVLSVNHIKRPHSVPSSVQLPSTLSTQSACQNSVHPANKPIAPNFSAPLPFGPFSTLFENSPTSAHAFWGGSVVSSQSTPESMLSGKSSYLPNSDPLHQSDTSKAPGFRPPLQRPAPSPSGIVNMDSPYGSVTPSSTHLGNFASNISGGQMYGPGAPLGGAPAAANFNRQHFSPLSLLTPCSSASNDSSAQSVSSGVRAPSPAPSSVPLGSEKPSNVSQDRKVPVPIGTERSARIRQTGTSAPSVIGSNLSTSVGHSGIWSFEGIGGNQDKVDWCNPGMGNPMIHRPMSDPGVFSQHQAMERDSTGIVTPSGTFHQHVPAGYMDFPKVGGMPFSVYGNAMIPPVAPIPDGAGGPIFNGPHAADPSWNSLIKMVSSSTENNGPQTVWTGPWAPHMNSVHMNQLG

SEQ ID NO: 20384 - protein, 751 aa, Homo sapiens
MEKATVPVAAATAAEGEGSPPAVAAVAGPPAAAEVGGGVGGSSRARSASSPRGMVRVCDLLLKKKPPQQQHHKAKRNRTCRPPSSSESSSDSDNSGGGGGGGGGGGGGGGTSSNNSEEEEDDDDEEEEVSEVESFILDQDDLENPMLETASKLLLSGTADGADLRTVDPETQARLEALLEAAGIGKLSTADGKAFADPEVLRRLTSSVSCALDEAAAALTRMRAESTANAGQSDNRSLAEACSEGDVNAVRKLLIEGRSVNEHTEEGESLLCLACSAGYYELAQVLLAMHANVEDRGIKGDITPLMAAANGGHVKIVKLLLAHKADVNAQSSTGNTALTYACAGGYVDVVKVLLESGASIEDHNENGHTPLMEAGSAGHVEVARLLLENGAGINTHSNEFKESALTLACYKGHLEMVRFLLEAGADQEHKTDEMHTALMEACMDGHVEVARLLLDSGAQVNMPADSFESPLTLAACGGHVELAALLIERGASLEEVNDEGYTPLMEAAREGHEEMVALLLGQGANINAQTEETQETALTLACCGGFLEVADFLIKAGADIELGCSTPLMEAAQEGHLELVKYLLAAGANVHATTATGDTALTYACENGHTDVADVLLQAGADLEHESEGGRTPLMKAARAGHVCTVQFLISKGANVNRTTANNDHTVLSLACAGGHLAVVELLLAHGADPTHRLKDGSTMLIEAAKGGHTSVVCYLLDYPNNLLSAPPPDVTQLTPPSHDLTDNIFPRLVC

SEQ ID NO: 20385 - protein, 2352 aa, Homo sapiens
MEKATVPVAAATAAEGEGSPPAVAAVAGPPAAAEVGGGVGGSSRARSASSPRGMVRVCDLLLKKKPPQQQHHKAKRNRTCRPPSSSESSSDSDNSGGGGGGGGGGGGGGGTSSNNSEEEEDDDDEEEEVSEVESFILDQDDLENPMLETASKLLLSGTADGADLRTVDPETQARLEALLEAAGIGKLSTADGKAFADPEVLRRLTSSVSCALDEAAAALTRMRAESTANAGQSDNRSLAEACSEGDVNAVRKLLIEGRSVNEHTEEGESLLCLACSAGYYELAQVLLAMHANVEDRGIKGDITPLMAAANGGHVKIVKLLLAHKADVNAQSSTGNTALTYACAGGYVDVVKVLLESGASIEDHNENGHTPLMEAGSAGHVEVARLLLENGAGINTHSNEFKESALTLACYKGHLEMVRFLLEAGADQEHKTDEMHTALMEACMDGHVEVARLLLDSGAQVNMPADSFESPLTLAACGGHVELAALLIERGASLEEVNDEGYTPLMEAAREGHEEMVALLLGQGANINAQTEETQETALTLACCGGFLEVADFLIKAGADIELGCSTPLMEAAQEGHLELVKYLLAAGANVHATTATGDTALTYACENGHTDVADVLLQAGADLEHESEGGRTPLMKAARAGHVCTVQFLISKGANVNRTTANNDHTVLSLACAGGHLAVVELLLAHGADPTHRLKDGSTMLIEAAKGGHTSVVCYLLDYPNNLLSAPPPDVTQLTPPSHDLNRAPRVPVQALPMVVPPQEPDKPPANVATTLPIRNKAVSGRASAMSNTPTHSIAASISQPQTPTPSPIISPSAMLPIYPAIDIDAQTESNHDTALTLACAGGHEELVQTLLERGASIEHRDKKGFTPLILAATAGHVGVVEILLDNGADIEAQSERTKDTPLSLACSGGRQEVVELLLARGANKEHRNVSDYTPLSLAASGGYVNIIKILLNAGAEINSRTGSKLGISPLMLAAMNGHTAAVKLLLDMGSDINAQIETNRNTALTLACFQGRTEVVSLLLDRKANVEHRAKTGLTPLMEAASGGYAEVGRVLLDKGADVNAPPVPSSRDTALTIAADKGHYKFCELLIGRGAHIDVRNKKGNTPLWLAANGGHLDVVQLLVQAGADVDAADNRKITPLMAAFRKGHVKVVRYLVKEVNQFPSDSECMRYIATITDKEMLKKCHLCMESIVQAKDRQAAEANKNASILLEELDLEKLREESRRLALAAKREKRKEKRRKKKEEQRRKLEEIEAKNKENFELQAAQEKEKLKVEDEPEVLTEPPSATTTTTIGISATWTTLAGSHGKRNNTITTTSSKRKNRKNKITPENVQIIFDDPLPISYSQPEKVNGESKSSSTSESGDSDNMRISSCSDESSNSNSSRKSDNHSPAVVTTTVSSKKQPSVLVTFPKEERKSVSGKASIKLSETISEGTSNSLSTCTKSGPSPLSSPNGKLTVASPKRGQKREEGWKEVVRRSKKVSVPSTVISRVIGRGGCNINAIREFTGAHIDIDKQKDKTGDRIITIRGGTESTRQATQLINALIKDPDKEIDELIPKNRLKSSSANSKIGSSAPTTTAANTSLMGIKMTTVALSSTSQTATALTVPAISSASTHKTIKNPVNNVRPGFPVSLPLAYPPPQFAHALLAAQTFQQIRPPRLPMTHFGGTFPPAQSTWGPFPVRPLSPARATNSPKPHMVPRHSNQNSSGSQVNSAGSLTSSPTTTTSSSASTVPGTSTNGSPSSPSVRRQLFVTVVKTSNATTTTVTTTASNNNTAPTNATYPMPTAKEHYPVSSPSSPSPPAQPGGVSRNSPLDCGSASPNKVASSSEQEAGSPPVVETTNTRPPNSSSSSGSSSAHSNQQQPPGSVSQEPRPPLQQSQVPPPEVRMTVPPLATSSAPVAVPSTAPVTYPMPQTPMGCPQPTPKMETPAIRPPPHGTTAPHKNSASVQNSSVAVLSVNHIKRPHSVPSSVQLPSTLSTQSACQNSVHPANKPIAPNFSAPLPFGPFSTLFENSPTSAHAFWGGSVVSSQSTPESMLSGKSSYLPNSDPLHQSDTSKAPGFRPPLQRPAPSPSGIVNMDSPYGSVTPSSTHLGNFASNISGGQMYGPGAPLGGAPAAANFNRQHFSPLSLLTPCSSASNDSSAQSVSSGVRAPSPAPSSVPLGSEKPSNVSQDRKVPVPIGTERSARIRQTGTSAPSVIGSNLSTSVGHSGIWSFEGIGGNQDKVDWCNPGMGNPMIHRPMSDPGVFSQHQAMERDSTGIVTPSGTFHQHVPAGYMDFPKVGGMPFSVYGNAMIPPVAPIPDGAGGPIFNGPHAADPSWNSLIKMVSSSTENNGPQTVWTGPWAPHMNSVHMNQLG

SEQ ID NO: 20386 - protein, 2490 aa, Homo sapiens
MVETAAEMEAYVLEDILEVESFILDQDDLENPMLETASKLLLSGTADGADLRTVDPETQARLEALLEAAGIGKLSTADGKAFADPEVLRRLTSSVSCALDEAAAALTRMRAESTANAGQSDNRSLAEACSEGDVNAVRKLLIEGRSVNEHTEEGESLLCLACSAGYYELAQVLLAMHANVEDRGIKGDITPLMAAANGGHVKIVKLLLAHKADVNAQSSTGNTALTYACAGGYVDVVKVLLESGASIEDHNENGHTPLMEAGSAGHVEVARLLLENGAGINTHSNEFKESALTLACYKGHLEMVRFLLEAGADQEHKTDEMHTALMEACMDGHVEVARLLLDSGAQVNMPADSFESPLTLAACGGHVELAALLIERGASLEEVNDEGYTPLMEAAREGHEEMVALLLGQGANINAQTEETQETALTLACCGGFLEVADFLIKAGADIELGCSTPLMEAAQEGHLELVKYLLAAGANVHATTATGDTALTYACENGHTDVADVLLQAGADLEHESEGGRTPLMKAARAGHVCTVQFLISKGANVNRTTANNDHTVLSLACAGGHLAVVELLLAHGADPTHRLKDGSTMLIEAAKGGHTSVVCYLLDYPNNLLSAPPPDVTQLTPPSHDLNRAPRVPVQALPMVVPPQEPDKPPANVATTLPIRNKAASKQKSSSHLPANSQDVQGYITNQSPESIVEEAQGKLTELEQRIKEAIEKNAQLQSLELAHADQLTKEKIEELNKTREEQIQKKQKILEELQKVERELQLKTQQQLKKQYLEVKAQRIQLQQQQQQSCQHLGLLTPVGVGEQLSEGDYARLQQVDPVLLKDEPQQTAAQMGFAPIQPLAMPQALPLAAGPLPPGSIANLTELQGVIVGQPVLGQAQLAGLGQGILTETQQGLMVASPAQTLNDTLDDIMAAVSGRASAMSNTPTHSIAASISQPQTPTPSPIISPSAMLPIYPAIDIDAQTESNHDTALTLACAGGHEELVQTLLERGASIEHRDKKGFTPLILAATAGHVGVVEILLDNGADIEAQSERTKDTPLSLACSGGRQEVVELLLARGANKEHRNVSDYTPLSLAASGGYVNIIKILLNAGAEINSRTGSKLGISPLMLAAMNGHTAAVKLLLDMGSDINAQIETNRNTALTLACFQGRTEVVSLLLDRKANVEHRAKTGLTPLMEAASGGYAEVGRVLLDKGADVNAPPVPSSRDTALTIAADKGHYKFCELLIGRGAHIDVRNKKGNTPLWLAANGGHLDVVQLLVQAGADVDAADNRKITPLMAAFRKGHVKVVRYLVKEVNQFPSDSECMRYIATITDKEMLKKCHLCMESIVQAKDRQAAEANKNASILLEELDLEKLREESRRLALAAKREKRKEKRRKKKEEQRRKLEEIEAKNKENFELQAAQEKEKLKVEDEPEVLTEPPSATTTTTIGISATWTTLAGSHGKRNNTITTTSSKRKNRKNKITPENVQIIFDDPLPISYSQPEKVNGESKSSSTSESGDSDNMRISSCSDESSNSNSSRKSDNHSPAVVTTTVSSKKQPSVLVTFPKEERKSVSGKASIKLSETISEGTSNSLSTCTKSGPSPLSSPNGKLTVASPKRGQKREEGWKEVVRRSKKVSVPSTVISRVIGRGGCNINAIREFTGAHIDIDKQKDKTGDRIITIRGGTESTRQATQLINALIKDPDKEIDELIPKNRLKSSSANSKIGSSAPTTTAANTSLMGIKMTTVALSSTSQTATALTVPAISSASTHKTIKNPVNNVRPGFPVSLPLAYPPPQFAHALLAAQTFQQIRPPRLPMTHFGGTFPPAQSTWGPFPVRPLSPARATNSPKPHMVPRHSNQNSSGSQVNSAGSLTSSPTTTTSSSASTVPGTSTNGSPSSPSVRRQLFVTVVKTSNATTTTVTTTASNNNTAPTNATYPMPTAKEHYPVSSPSSPSPPAQPGGVSRNSPLDCGSASPNKVASSSEQEAGSPPVVETTNTRPPNSSSSSGSSSAHSNQQQPPGSVSQEPRPPLQQSQVPPPEVRMTVPPLATSSAPVAVPSTAPVTYPMPQTPMGCPQPTPKMETPAIRPPPHGTTAPHKNSASVQNSSVAVLSVNHIKRPHSVPSSVQLPSTLSTQSACQNSVHPANKPIAPNFSAPLPFGPFSTLFENSPTSAHAFWGGSVVSSQSTPESMLSGKSSYLPNSDPLHQSDTSKAPGFRPPLQRPAPSPSGIVNMDSPYGSVTPSSTHLGNFASNISGGQMYGPGAPLGGAPAAANFNRQHFSPLSLLTPCSSASNDSSAQSVSSGVRAPSPAPSSVPLGSEKPSNVSQDRKVPVPIGTERSARIRQTGTSAPSVIGSNLSTSVGHSGIWSFEGIGGNQDKVDWCNPGMGNPMIHRPMSDPGVFSQHQAMERDSTGIVTPSGTFHQHVPAGYMDFPKVGGMPFSVYGNAMIPPVAPIPDGAGGPIFNGPHAADPSWNSLIKMVSSSTENNGPQTVWTGPWAPHMNSVHMNQLG

SEQ ID NO: 20387 - protein, 1188 aa, Homo sapiens
MEPNSLQWVGSPCGLHGPYIFYKAFQFHLEGKPRILSLGDFFFVRCTPKDPICIAELQLLWEERTSRQLLSSSKLYFLPEDTPQGRNSDHGEDEVIAVSEKVIVKLEDLVKWVHSDFSKWRCGFHAGPVKTEALGRNGQKEALLKYRQSTLNSGLNFKDVLKEKADLGEDEEETNVIVLSYPQYCRYRSMLKRIQDKPSSILTDQFALALGGIAVVSRNPQILYCRDTFDHPTLIENESICDEFAPNLKGRPRKKKPCPQRRDSFSGVKDSNNNSDGKAVAKVKCEARSALTKPKNNHNCKKVSNEEKPKVAIGEECRADEQAFLVALYKYMKERKTPIERIPYLGFKQINLWTMFQAAQKLGGYETITARRQWKHIYDELGGNPGSTSAATCTRRHYERLILPYERFIKGEEDKPLPPIKPRKQENSSQENENKTKVSGTKRIKHEIPKSKKEKENAPKPQDAAEVSSEQEKEQETLISQKSIPEPLPAADMKKKIEGYQEFSAKPLASRVDPEKDNETDQGSNSEKVAEEAGEKGPTPPLPSAPLAPEKDSALVPGASKQPLTSPSALVDSKQESKLCCFTESPESEPQEASFPSFPTTQPPLANQNETEDDKLPAMADYIANCTVKVDQLGSDDIHNALKQTPKVLVVQSFDMFKDKDLTGPMNENHGLNYTPLLYSRGNPGIMSPLAKKKLLSQVSGASLSSSYPYGSPPPLISKKKLIARDDLCSSLSQTHHGQSTDHMAVSRPSVIQHVQSFRSKPSEERKTINDIFKHEKLSRSDPHRCSFSKHHLNPLADSYVLKQEIQEGKDKLLEKRALPHSHMPSFLADFYSSPHLHSLYRHTEHHLHNEQTSKYPSRDMYRESENSSFPSHRHQEKLHVNYLTSLHLQDKKSAAAEAPTDDQPTDLSLPKNPHKPTGKVLGLAHSTTGPQESKGISQFQVLGSQSRDCHPKACRVSPMTMSGPKKYPESLSRSGKPHHVRLENFRKMEGMVHPILHRKMSPQNIGAARPIKRSLEDLDLVIAGKKARAVSPLDPSKEVSGKEKASEQESEGSKAAHGGHSGGGSEGHKLPLSSPIFPGLYSGSLCNSGLNSRLPAGYSHSLQYLKNQTVLSPLMQPLAFHSLVMQRGIFTSPTNSQQLYRHLAAATPVGSSYGDLLHNSIYPLAAINPQAAFPSSQLSSVHPSTKL

SEQ ID NO: 20388 - protein, 945 aa, Homo sapiens
MAPNLKGRPRKKKPCPQRRDSFSGVKDSNNNSDGKAVAKVKCEARSALTKPKNNHNCKKVSNEEKPKVAIGEECRADEQAFLVALYKYMKERKTPIERIPYLGFKQINLWTMFQAAQKLGGYETITARRQWKHIYDELGGNPGSTSAATCTRRHYERLILPYERFIKGEEDKPLPPIKPRKQENSSQENENKTKVSGTKRIKHEIPKSKKEKENAPKPQDAAEVSSEQEKEQETLISQKSIPEPLPAADMKKKIEGYQEFSAKPLASRVDPEKDNETDQGSNSEKVAEEAGEKGPTPPLPSAPLAPEKDSALVPGASKQPLTSPSALVDSKQESKLCCFTESPESEPQEASFPSFPTTQPPLANQNETEDDKLPAMADYIANCTVKVDQLGSDDIHNALKQTPKVLVVQSFDMFKDKDLTGPMNENHGLNYTPLLYSRGNPGIMSPLAKKKLLSQVSGASLSSSYPYGSPPPLISKKKLIARDDLCSSLSQTHHGQSTDHMAVSRPSVIQHVQSFRSKPSEERKTINDIFKHEKLSRSDPHRCSFSKHHLNPLADSYVLKQEIQEGKDKLLEKRALPHSHMPSFLADFYSSPHLHSLYRHTEHHLHNEQTSKYPSRDMYRESENSSFPSHRHQEKLHVNYLTSLHLQDKKSAAAEAPTDDQPTDLSLPKNPHKPTGKVLGLAHSTTGPQESKGISQFQVLGSQSRDCHPKACRVSPMTMSGPKKYPESLSRSGKPHHVRLENFRKMEGMVHPILHRKMSPQNIGAARPIKRSLEDLDLVIAGKKARAVSPLDPSKEVSGKEKASEQESEGSKAAHGGHSGGGSEGHKLPLSSPIFPGLYSGSLCNSGLNSRLPAGYSHSLQYLKNQTVLSPLMQPLAFHSLVMQRGIFTSPTNSQQLYRHLAAATPVGSSYGDLLHNSIYPLAAINPQAAFPSSQLSSVHPSTKL

SEQ ID NO: 20389 - protein, 318 aa, Homo sapiens
MEPNSLQWVGSPCGLHGPYIFYKAFQFHLEGKPRILSLGDFFFVRCTPKDPICIAELQLLWEERTSRQLLSSSKLYFLPEDTPQGRNSDHGEDEVIAVSEKVIVKLEDLVKWVHSDFSKWRCGFHAGPVKTEALGRNGQKEALLKYRQSTLNSGLNFKDVLKEKADLGEDEEETNVIVLSYPQYCRYRSMLKRIQDKPSSILTDQFALALGGIAVVSRNPQILYCRDTFDHPTLIENESICDEFAPNLKGRPRKKKPCPQRRDSFSGVKDSNNNSDGKAVAKVRSFTPRYSFRCIFLFLLFLFISLCLCLGGSFQFSI

SEQ ID NO: 20390 - protein, 1620 aa, Homo sapiens
MNPREEKVKIITEEFIENDEDADMGRQNKNSKVRRQPRKKQPPTAVPKEMVSEKSHLGNPQEPVQEEPKTRLLSMTVRRGPRSLPPIPSTSRTGFAEFSMRGRMREKLQAARSKAESALLQEIPTPRPRRLRSPSKKELETEFGTEPGKEVERTQQEVDSQSYSRVKFHDSARKIKPKPQVPPGFPSAEEAYNFFTFNFDPEPEGSEEKPKARHRAGTNQEEEEGEEEEPPAQGGGKEMDEEELLNGDDAEDFLLGLDHVADDFVAVRPADYESIHDRLQMEREMLFIPSRQTVPTYKKLPENVQPRFLEDEGLYTGVRPEVARTNQNIMENRLLMQDPERRWFGDDGRILALPNPIKPFPSRPPVLTQEQSIKAELETLYKKAVKYVHSSQHVIRSGDPPGNFQLDIDISGLIFTHHPCFSREHVLAAKLAQLYDQYLARHQRNKAKFLTDKLQALRNAVQTGLDPEKPHQSLDTIQKTINEYKSEIRQTRKFRDAEQEKDRTLLKTIIKVWKEMKSLREFQRFTNTPLKLVLRKEKADQKADEEAYEAEIQAEISELLEEHTEEYAQKMEEYRTSLQQWKAWRKVQRAKKKKRKQAAEEHPGDEIAEPYPEEDLVKPSPPEPTDRAVIEQEVRERAAQSRRRPWEPTLVPELSLAGSVTPNDQCPRAEVSRREDVKKRSVYLKVLFNNKEVSRTVSRPLGADFRVHFGQIFNLQIVNWPESLTLQVYETVGHSSPTLLAEVFLPIPETTVVTGRAPTEEVEFSSNQHVTLDHEGVGSGVPFSFEADGSNQLTLMTSGKVSHSVAWAIGENGIPLIPPLSQQNIGFRSALKKADAISSIGTSGLTDMKKLAKWAAESKLDPNDPNNAPLMQLISVATSGESYVPDFFRLEQLQQEFNFVSDQELNRSKRFRLLHLRSQEVPEFRNYKQVPVYDREIMEKVFQDYEKRLRDRNVIETKEHIDTHRAIVAKYLQQVRESVINRFLIAKQYFLLADMIVEEEVPNISILGLSLFKLAEQKRPLRPRRKGRKKVTAQNLSDGDIKLLVNIVRAYDIPVRKPAVSKFQQPSRSSRMFSEKHAASPSTYSPTHNADYPLGQVLVRPFVEVSFQRTVCHTTTAEGPNPSWNEELELPFRAPNGDYSTASLQSVKDVVFINIFDEVLHDVLEDDRERGSGIHTRIERHWLGCVKMPFSTIYFQARIDGTFKIDIPPVLLGYSKERNMILERGFDSVRSLSEGSYITLFITIEPQLVPGESIREKFESQEDEKLLQATEKFQAECALKFPNRQCLTTVIDISGKTVFITRYLKPLNPPQELLNVYPNNLQATAELVARYVSLIPFLPDTVSFGGICDLWSTSDQFLDLLAGDEEEHAVLLCNYFLSLGKKAWLLMGNAIPEGPTAYVLTWEQGRYLIWNPCSGHFYGQFDTFCPLKNVGCLIGPDNIWFNIQRYESPLRINFDVTRPKLWKSFFSRSLPYPGLSSVQPEELIYQRSDKAAAAELQDRIEKILKEKIMDWRPRHLTRWNRYCTSTLRHFLPLLEKSQGEDVEDDHRAELLKQLGDYRFSGFPLHMPYSEVKPLIDAVYSTGVHNIDVPNVEFALAVYIHPYPKNVLSVWIYVASLIRNR

SEQ ID NO: 20391 - protein, 1512 aa, Homo sapiens
MVSEKSHLGNPQEPVQEEPKTRLLSMTVRRGPRSLPPIPSTSRTGFAEFSMRGRMREKLQAARSKAESALLQEIPTPRPRRLRSPSKKELETEFGTEPGKEVERTQQEVDSQSYSRVKFHDSARKIKPKPQVPPGFPSAEEAYNFFTFNFDPEPEGSEEKPKARHRAGTNQEEEEGEEEEPPAQGGGKEMDEEELLNGDDAEDFLLGLDHVADDFVAVRPADYESIHDRLQMEREMLFIPSRQTVPTYKKLPENVQPRFLEDEGLYTGVRPEVARTNQNIMENRLLMQDPERRWFGDDGRILALPNPIKPFPSRPPVLTQEQSIKAELETLYKKAVKYVHSSQHVIRSGDPPGNFQLDIDISGLIFTHHPCFSREHVLAAKLAQLYDQYLARHQRNKAKFLTDKLQALRNAVQTGLDPEKPHQSLDTIQKTINEYKSEIRQTRKFRDAEQEKDRTLLKTIIKVWKEMKSLREFQRFTNTPLKLVLRKEKADQKADEEAYEAEIQAEISELLEEHTEEYAQKMEEYRTSLQQWKAWRKVQRAKKKKRKQAAEEHPGDEIAEPYPEEDLVKPSPPEPTDRAVIEQEVRERAAQSRRRPWEPTLVPELSLAGSVTPNDQCPRAEVSRREDVKKRSVYLKVLFNNKEVSRTVSRPLGADFRVHFGQIFNLQIVNWPESLTLQVYETVGHSSPTLLAEVFLPIPETTVVTGRAPTEEVEFSSNQHVTLDHEGVGSGVPFSFEADGSNQLTLMTSGKVSHSVAWAIGENGIPLIPPLSQQNIGFRSALKKADAISSIGTSGLTDMKKLAKWAAESKLDPNDPNNAPLMQLISVATSGESYVPDFFRLEQLQQEFNFVSDQELNRSKRFRLLHLRSQEVPEFRNYKQVPVYDREIMEKVFQDYEKRLRDRNVIETKEHIDTHRAIVAKYLQQVRESVINRFLIAKQYFLLADMIVEEEVPNISILGLSLFKLAEQKRPLRPRRKGRKKVTAQNLSDGDIKLLVNIVRAYDIPVRKPAVSKFQQPSRSSRMFSEKHAASPSTYSPTHNADYPLGQVLVRPFVEVSFQRTVCHTTTAEGPNPSWNEELELPFRAPNGDYSTASLQSVKDVVFINIFDEVLHDVLEDDRERGSGIHTRIERHWLGCVKMPFSTIYFQARFESQEDEKLLQATEKFQAECALKFPNRQCLTTVIDISGKTVFITRYLKPLNPPQELLNVYPNNLQATAELVARYVSLIPFLPDTVSFGGICDLWSTSDQFLDLLAGDEEEHAVLLCNYFLSLGKKAWLLMGNAIPEGPTAYVLTWEQGRYLIWNPCSGHFYGQFDTFCPLKNVGCLIGPDNIWFNIQRYESPLRINFDVTRPKLWKSFFSRSLPYPGLSSVQPEELIYQRSDKAAAAELQDRIEKILKEKIMDWRPRHLTRWNRYCTSTLRHFLPLLEKSQGEDVEDDHRAELLKQLGDYRFSGFPLHMPYSEVKPLIDAVYSTGVHNIDVPNVEFALAVYIHPYPKNVLSVWIYVASLIRNR

SEQ ID NO: 20392 - protein, 122 aa, Homo sapiens
MNPREEKVKIITEEFIENDEDADMGRQNKNSKVRRQPRKKQKPTPFSRACWQILPHLSAGVPLLGWEHPVQGKSFQATNCCPQGNGVRKIPPWQPPGACAGGAQDPPPEYDSPERPTERAGC

SEQ ID NO: 20393 - protein, 111 aa, Homo sapiens
MNPREEKVKIITEEFIENDEDADMGRQNKNSKVRRQPRKKQPPTAVPKEMVSEKSHLGNPQEPVQEEPKTRLLSMTVRRGPRRELVVKKSLGRPGTVTHVCNPSTLEGRGG

SEQ ID NO: 20394 - protein, 1835 aa, Homo sapiens
MANSTGKAPPDERRKGLAFLDELRQFHHSRGSPFKKIPAVGGKELDLHGLYTRVTTLGGFAKVSEKNQWGEIVEEFNFPRSCSNAAFALKQYYLRYLEKYEKVHHFGEDDDEVPPGNPKPQLPIGAIPSSYNYQQHSVSDYLRQSYGLSMDFNSPNDYNKLVLSLLSGLPNEVDFAINVCTLLSNESKHVMQLEKDPKIITLLLANAGVFDDTLGSFSTVFGEEWKEKTDRDFVKFWKDIVDDNEVRDLISDRNKSHEGTSGEWIWESLFHPPRKLGINDIEGQRVLQIAVILRNLSFEEGNVKLLAANRTCLRFLLLSAHSHFISLRQLGLDTLGNIAAELLLDPVDFKTTHLMFHTVTKCLMSRDRFLKMRGMEILGNLCKAEDNGVLICEYVDQDSYREIICHLTLPDVLLVISTLEVLYMLTEMGDVACTKIAKVEKSIDMLVCLVSMDIQMFGPDALAAVKLIEHPSSSHQMLSEIRPQAIEQVQTQTHVASAPASRAVVAQHVAPPPGIVEIDSEKFACQWLNAHFEVNPDCSVSRAEMYSEYLSTCSKLARGGILTSTGFYKCLRTVFPNHTVKRVEDSSSNGQAHIHVVGVKRRAIPLPIQMYYQQQPVSTSVVRVDSVPDVSPAPSPAGIPHGSQTIGNHFQRTPVANQSSNLTATQMSFPVQGVHTVAQTVSRIPQNPSPHTHQQQNAPVTVIQSKAPIPCEVVKATVIQNSIPQTGVPVSIAVGGGPPQSSVVQNHSTGPQPVTVVNSQTLLHHPSVIPQQSPLHTVVPGQIPSGTPVTVIQQAVPQSHMFGRVQNIPACTSTVSQGQQLITTSPQPVQTSSQQTSAGSQSQDTVIIAPPQYVTTSASNIVSATSVQNFQVATGQMVTIAGVPSPQASRVGFQNIAPKPLPSQQVSSTVVQQPIQQPQQPTQQSVVIVSQPAQQGQTYAPAIHQIVLANPAALPAGQTVQLTGQPNITPSSSPSPVPATNNQVPTAMSSSSTPQSQGPPPTVSQMLSVKRQQQQQHSPAPPPQQVQVQVQQPQQVQMQVQPQQSNAGVGQPASGESSLIKQLLLPKRGPSTPGGKLILPAPQIPPPNNARAPSPQVVYQVASNQAAGFGVQGQTPAQQLLVGQQNVQLVPSAMPPSGGVQTVPISNLQILPGPLISNSPATIFQGTSGNQVTITVVPNTSFAPATVSQGNATQLIAPAGITMSGTQTGVGLPVQTLPATQASPAGQSSCTTATPPFKGDKIICQKEEEAKEATGLHVHERKIEVMENPSCRRGATNTSNGDTKENEMHVGSLLNGRKYSDSSLPPSNSGKIQSETNQCSLISNGPSLELGENGASGKQNSEQIDMQDIKSDLRKPLVNGICDFDKGDGSHLSKNIPNHKTSNHVGNGEISPMEPQGTLDITQQDTAKGDQLERISNGPVLTLGGSSVSSIQEASNAATQQFSGTDLLNGPLASSLNSDVPQQRPSVVVSPHSTTSVIQGHQIIAVPDSGSKVSHSPALSSDVRSTNGTAECKTVKRPAEDTDRETVAGIPNKVGVRIVTISDPNNAGCSATMVAVPAGADPSTVAKVAIESAVQQKQQHPPTYVQNVVPQNTPMPPSPAVQVQGQPNSSQPSPFSGSSQPGDPMRKPGQNFMCLWQSCKKWFQTPSQVFYHAATEHGGKDVYPGQCLWEGCEPFQRQRFSFITHLQDKHCSKDALLAGLKQDEPGQAGSQKSSTKQPTVGGTSSTPRAQKAIVNHPSAALMALRRGSRNLVFRDFTDEKEGPITKHIRLTAALILKNIGKYSECGRRLLKRHENNLSVLAISNMEASSTLAKCLYELNFTVQSKEQEKDSEMLQ

SEQ ID NO: 20395 - protein, 1783 aa, Homo sapiens
MANSTGKAPPDERRKGLAFLDELRQFHHSRGSPFKKIPAVGGKELDLHGLYTRVTTLGGFAKVSEKNQWGEIVEEFNFPRSCSNAAFALKQYYLRYLEKYEKVHHFGEDDDEVPPGNPKPQLPIGAIPSSYNYQQHSVSDYLRQSYGLSMDFNSPNDYNKLVLSLLSGLPNEVDFAINVCTLLSNESKHVMQLEKDPKIITLLLANAGVFDDTLGSFSTVFGEEWKEKTDRDFVKFWKDIVDDNEVRDLISDRNKSHEGTSGEWIWESLFHPPRKLGINDIEGQRVLQIAVILRNLSFEEGNVKLLAANRTCLRFLLLSAHSHFISLRQLGLDTLGNIAAELLLDPVDFKTTHLMFHTVTKCLMSRDRFLKMRGMEILGNLCKAEDNGVLICEYVDQDSYREIICHLTLPDVLLVISTLEVLYMLTEMGDVACTKIAKVEKSIDMLVCLVSMDIQMFGPDALAAVKLIEHPSSSHQMLSEIRPQAIEQVQTQTHVASAPASRAVVAQHVAPPPGIVEIDSEKFACQWLNAHFEVNPDCSVSRAEMYSEYLSTCSKLARGGILTSTGFYKCLRTVFPNHTVKRVEDSSSNGQAHIHVVGVKRRAIPLPIQMYYQQQPVSTSVVRVDSVPDVSPAPSPAGIPHGSQTIGNHFQRTPVANQSSNLTATQMSFPVQGVHTVAQTVSRIPQNPSPHTHQQQNAPVTVIQSKAPIPCEVVKATVIQNSIPQTGVPVSIAVGGGPPQSSVVQNHSTGPQPVTVVNSQTLLHHPSVIPQQSPLHTVVPGQIPSGTPVTVIQQAVPQSHMFGRVQNIPACTSTVSQGQQLITTSPQPVQTSSQQTSAGSQSQDTVIIAPPQYVTTSASNIVSATSVQNFQVATGQMVTIAGVPSPQASRVGFQNIAPKPLPSQQVSSTVVQQPIQQPQQPTQQSVVIVSQPAQQGQTYAPAIHQIVLANPAALPAGQTVQLTGQPNITPSSSPSPVPATNNQVPTAMSSSSTPQSQGPPPTVSQMLSVKRQQQQQHSPAPPPQQVQVQVQQPQQVQMQVQPQQSNAGVGQPASGESSLIKQLLLPKRGPSTPGGKLILPAPQIPPPNNARAPSPQVVYQVASNQAAGFGVQGQTPAQQLLVGQQNVQLVPSAMPPSGGVQTVPISNLQILPGPLISNSPATIFQGTSGNQVTITVVPNTSFAPATVSQGNATQLIAPAGITMSGTQTGVGLPVQTLPATQASPAGQSSCTTATPPFKGDKIICQKEEEAKEATGLHVHERKIEVMENPSCRRGATNTSNGDTKENEMHVGSLLNGRKYSDSSLPPSNSGKIQSETNQCSLISNGPSLELGENGASGKQNSEQIDMQDIKSDLRKPLVNGICDFDKGDGSHLSKNIPNHKTSNHVGNGEISPMEPQGTLDITQQDTAKGDQLERISNGPVLTLGGSSVSSIQEASNAATQQFSGTDLLNGPLASSLNSDVPQQRPSVVVSPHSTTSVIQGHQIIAVPDSGSKVSHSPALSSDVRSTNGTAECKTVKRPAEDTDRETVAGIPNKVGVRIVTISDPNNAGCSATMVAVPAGADPSTVAKVAIESAVQQKQQHPPTYVQNVVPQNTPMPPSPAVQVQGQPNSSQPSPFSGSSQPGDPMRKPGQNFMCLWQSCKKWFQTPSQVFYHAATEHGGKDVYPGQCLWEGCEPFQRQRFSFITHLQDKHCSKDALLAGLKQDEPGQAGSQKSSTKQPTVGGTSSTPRAQKAIVNHPSAALMALRRGSRNLVFRDFTDEKEGPITKHIRLTAALILKNIGKYS

SEQ ID NO: 20396 - protein, 370 aa, Homo sapiens
MGGGDGAAFKRPGDGARLQRVLGLGSRREPRSLPAGGPAPRRTAPPPPGHASAGPAAMSSHIAKSESKTSLLKAAAAAASGGSRAPRHGPARDPGLPSRRLPGSCPATPQSSGDPSSRRPLCRPAPREEGARGSQRVLPQAHCRPREALPAAASRPSPSSPLPPARGRDGEERGLSPALGLRGSLRARGRGDSVPAAASEADPFLHRLRPMLSSAFGQDRSLRPEEIEELREAFREFDKDKDGYINCRDLGNCMRTMGYMPTEMELIELSQQINMNLGGHVDFDDFVELMGPKLLAETADMIGVKELRDAFREFDTNGDGEISTSELREAMRKLLGHQVGHRDIEEIIRDVDLNGDGRVDFEEFVRMMSR

SEQ ID NO: 20397 - protein, 227 aa, Homo sapiens
MGNCVKYPLRNLSRKMCQEEQTSYMVVQTSEEGLAADAELPGPLLMLAQNCAVMHNLLGPACIFLRKGFAENRQPDRSLRPEEIEELREAFREFDKDKDGYINCRDLGNCMRTMGYMPTEMELIELSQQINMNLGGHVDFDDFVELMGPKLLAETADMIGVKELRDAFREFDTNGDGEISTSELREAMRKLLGHQVGHRDIEEIIRDVDLNGDGRVDFEEFVRMMSR

SEQ ID NO: 20398 - protein, 167 aa, Homo sapiens
MGNCVKYPLRNLSRKDRSLRPEEIEELREAFREFDKDKDGYINCRDLGNCMRTMGYMPTEMELIELSQQINMNLGGHVDFDDFVELMGPKLLAETADMIGVKELRDAFREFDTNGDGEISTSELREAMRKLLGHQVGHRDIEEIIRDVDLNGDGRVDFEEFVRMMSR

SEQ ID NO: 20399 - protein, 70 aa, Homo sapiens
MIGVKELRDAFREFDTNGDGEISTSELREAMRKLLGHQVGHRDIEEIIRDVDLNGDGRVDFEEFVRMMSR

SEQ ID NO: 20400 - protein, 1467 aa, Homo sapiens
MSDESASGSDPDLDPDVELEDAEEEEEEEEVAVEECDRDDEEDLLDDPSLEGMCGTEHAQLGEDGQQPPRCTSTTSSQSEPSEQLRRHQGKNLASEDPKKKRAQKPSHMRRNIRKLLREDQLEPVTKAAQQEELERRKRLEQQRKDYAAPIPTVPLEFLPEEIALRASDGPQLPPRVLAQEVICLDSSSGSEDEKSSRDEVIELSSGEEDTLHIVDSSESVSEDDEEEEKGGTHVNDVLNQRDALGRVLVNLNHPPEEENVFLAPQLARAVKPHQIGGIRFLYDNLVESLERFKTSSGFGCILAHSMGLGKTLQVISFIDVLFRHTPAKTVLAIVPVNTLQNWLAEFNMWLPPPEALPADNKPEEVQPRFFKVHILNDEHKTMASRAKVMADWVSEGGVLLMGYEMYRLLTLKKSFATGRPKKTKKRSHPVIIDLDEEDRQQEFRREFEKALCRPGPDVVICDEGHRIKNCQASTSQALKNIRSRRRVVLTGYPLQNNLIEYWCMVDFVRPDFLGTRQEFSNMFERPILNGQCIDSTPQDVRLMRYRSHVLHSLLEGFVQRRGHTVLKIHLPAKEENVILVRLSKIQRDLYTQFMDRFRDCGSSGWLGLNPLKAFCVCCKIWNHPDVLYEALQKESLANEQDLDVEELGSAGTSARCPPQGTKGKGEDSTLASSMGEATNSKFLQGVGFNPFQERGNNIVTYEWAKDLLTNYQTGVLENSPKMVLLFHLIEESVKLGDKILVFSQSLSTLALIEEFLGKREVPCPPGTEGQGAQKWVRNISYFRLDGSTPAFERERLINQFNDPSNLTTWLFLLSTRAGCLGVNLIGANRVVVFDASWNPCHDAQAVCRVYRYGQKKPCYIYRLVADYTLEKKIYDRQISKQGMSDRVVDDLNPMLNFTRKEVENLLHFVEKEPAPQVSLNVKGIKESVLQLACLKYPHLITKEPFEHESLLLNRKDHKLTKAEKKAAKKSYEEDKRTSVPYTRPSYAQYYPASDQSLTSIPAFSQRNWQPTLKGDEKPVASVRPVQSTPIPMMPRHVPLGGSVSSASSTNPSMNFPINYLQRAGVLVQKVVTTTDIVIPGLNSSTDVQARINAGESIHIIRGTKGTYIRTSDGRIFAVRATGKPKVPEDGRMAASGSQGPSCESTSNGRHSASSPKAPDPEGLARPVSPDSPEIISELQQYADVAAARESRQSSPSTNAALPGPPAQLMDSSAVPGTALGTEPRLGGHCLNSSLLVTGQPCGDRHPVLDLRGHKRKLATPPAAQESSRRRSRKGHLPAPVQPYEHGYPVSGGFAMPPVSLNHNLTTPFTSQAGENSLFMGSTPSYYQLSNLLADARLVFPVTTDPLVPAGPVSSSSTATSVTASNPSFMLNPSVPGILPSYSLPFSQPLLSEPRMFAPFPSPVLPSNLSRGMSIYPGYMSPHAGYPAGGLLRSQVPPFDSHEVAEVGFSSNDDEDKDDDVIEVTGK

SEQ ID NO: 20401 - protein, 163 aa, Homo sapiens
MQSVDSMLGTVGGCGGGEAASTFSKDPSGCCVGNDCRDGGRGLERRHGRWSRGEGGESGLCSGGQMASEIEYWDGLAISVMEVEKAFGSTNVLWKTEPFSLWACTAACPPSLSPTLLALGLPRDGKELAEQGSLWTVLEPGGDWSHSQSQLGTPGRGKGALGF

SEQ ID NO: 20402 - protein, 2221 aa, Homo sapiens
MVNENTRMYIPEENHQGSNYGSPRPAHANMNANAAAGLAPEHIPTPGAALSWQAAIDAARQAKLMGSAGNATISTVSSTQRKRQQYGKPKKQGSTTATRPPRALLCLTLKNPIRRACISIVEWKPFEIIILLTIFANCVALAIYIPFPEDDSNATNSNLERVEYLFLIIFTVEAFLKVIAYGLLFHPNAYLRNGWNLLDFIIVVVGLFSAILEQATKADGANALGGKGAGFDVKALRAFRVLRPLRLVSGVPSLQVVLNSIIKAMVPLLHIALLVLFVIIIYAIIGLELFMGKMHKTCYNQEGIADVPAEDDPSPCALETGHGRQCQNGTVCKPGWDGPKHGITNFDNFAFAMLTVFQCITMEGWTDVLYWVNDAVGRDWPWIYFVTLIIIGSFFVLNLVLGVLSGEFSKEREKAKARGDFQKLREKQQLEEDLKGYLDWITQAEDIDPENEDEGMDEEKPRNMSMPTSETESVNTENVAGGDIEGENCGARLAHRISKSKFSRYWRRWNRFCRRKCRAAVKSNVFYWLVIFLVFLNTLTIASEHYNQPNWLTEVQDTANKALLALFTAEMLLKMYSLGLQAYFVSLFNRFDCFVVCGGILETILVETKIMSPLGISVLRCVRLLRIFKITRYWNSLSNLVASLLNSVRSIASLLLLLFLFIIIFSLLGMQLFGGKFNFDEMQTRRSTFDNFPQSLLTVFQILTGEDWNSVMYDGIMAYGGPSFPGMLVCIYFIILFICGNYILLNVFLAIAVDNLADAESLTSAQKEEEEEKERKKLARTASPEKKQELVEKPAVGESKEEKIELKSITADGESPPATKINMDDLQPNENEDKSPYPNPETTGEEDEEEPEMPVGPRPRPLSELHLKEKAVPMPEASAFFIFSSNNRFRLQCHRIVNDTIFTNLILFFILLSSISLAAEDPVQHTSFRNHILFYFDIVFTTIFTIEIALKILGNADYVFTSIFTLEIILKMTAYGAFLHKGSFCRNYFNILDLLVVSVSLISFGIQSSAINVVKILRVLRVLRPLRAINRAKGLKHVVQCVFVAIRTIGNIVIVTTLLQFMFACIGVQLFKGKLYTCSDSSKQTEAECKGNYITYKDGEVDHPIIQPRSWENSKFDFDNVLAAMMALFTVSTFEGWPELLYRSIDSHTEDKGPIYNYRVEISIFFIIYIIIIAFFMMNIFVGFVIVTFQEQGEQEYKNCELDKNQRQCVEYALKARPLRRYIPKNQHQYKVWYVVNSTYFEYLMFVLILLNTICLAMQHYGQSCLFKIAMNILNMLFTGLFTVEMILKLIAFKPKGYFSDPWNVFDFLIVIGSIIDVILSETNHYFCDAWNTFDALIVVGSIVDIAITEVNPAEHTQCSPSMNAEENSRISITFFRLFRVMRLVKLLSRGEGIRTLLWTFIKSFQALPYVALLIVMLFFIYAVIGMQVFGKIALNDTTEINRNNNFQTFPQAVLLLFRCATGEAWQDIMLACMPGKKCAPESEPSNSTEGETPCGSSFAVFYFISFYMLCAFLIINLFVAVIMDNFDYLTRDWSILGPHHLDEFKRIWAEYDPEAKGRIKHLDVVTLLRRIQPPLGFGKLCPHRVACKRLVSMNMPLNSDGTVMFNATLFALVRTALRIKTEGNLEQANEELRAIIKKIWKRTSMKLLDQVVPPAGDDEVTVGKFYATFLIQEYFRKFKKRKEQGLVGKPSQRNALSLQAGLRTLHDIGPEIRRAISGDLTAEEELDKAMKEAVSAASEDDIFRRAGGLFGNHVSYYQSDGRSAFPQTFTTQRPLHINKAGSSQGDTESPSHEKLVDSTFTPSSYSSTGSNANINNANNTALGRLPRPAGYPSTVSTVEGHGPPLSPAIRVQEVAWKLSSNRERHVPMCEDLELRRDSGSAGTQAHCLLLRKANPSRCHSRESQAAMAGQEETSQDETYEVKMNHDTEACSEPSLLSTEMLSYQDDENRQLTLPEEDKRDIRQSPKRGFLRSASLGRRASFHLECLKRQKDRGGDISQKTVLPLHLVHHQALAVAGLSPLLQRSHSPASFPRPFATPPATPGSRGWPPQPVPTLRLEGVESSEKLNSSFPSIHCGSWAETTPGGGGSSAARRVRPVSLMVPSQAGAPGRQFHGSASSLVEAVLISEGLGQFAQDPKFIEVTTQELADACDMTIEEMESAADNILSGGAPQSPNGALLPFVNCRDAGQDRAGGEEDAGCVRARGRPSEEELQDSRVYVSSL

SEQ ID NO: 20403 - protein, 2257 aa, Homo sapiens
MVNENTRMYIPEENHQGSNYGSPRPAHANMNANAAAGLAPEHIPTPGAALSWQAAIDAARQAKLMGSAGNATISTVSSTQRKRQQYGKPKKQGSTTATRPPRALLCLTLKNPIRRACISIVEWKPFEIIILLTIFANCVALAIYIPFPEDDSNATNSNLERVEYLFLIIFTVEAFLKVIAYGLLFHPNAYLRNGWNLLDFIIVVVGLFSAILEQATKADGANALGGKGAGFDVKALRAFRVLRPLRLVSGVPSLQVVLNSIIKAMVPLLHIALLVLFVIIIYAIIGLELFMGKMHKTCYNQEGIADVPAEDDPSPCALETGHGRQCQNGTVCKPGWDGPKHGITNFDNFAFAMLTVFQCITMEGWTDVLYWVNDAVGRDWPWIYFVTLIIIGSFFVLNLVLGVLSGEFSKEREKAKARGDFQKLREKQQLEEDLKGYLDWITQAEDIDPENEDEGMDEEKPRNMSMPTSETESVNTENVAGGDIEGENCGARLAHRISKSKFSRYWRRWNRFCRRKCRAAVKSNVFYWLVIFLVFLNTLTIASEHYNQPNWLTEVQDTANKALLALFTAEMLLKMYSLGLQAYFVSLFNRFDCFVVCGGILETILVETKIMSPLGISVLRCVRLLRIFKITRYWNSLSNLVASLLNSVRSIASLLLLLFLFIIIFSLLGMQLFGGKFNFDEMQTRRSTFDNFPQSLLTVFQILTGEDWNSVMYDGIMAYGGPSFPGMLVCIYFIILFICGNYILLNVFLAIAVDNLADAESLTSAQKEEEEEKERKKLARTASPEKKQELVEKPAVGESKEEKIELKSITADGESPPATKINMDDLQPNENEDKSPYPNPETTGEEDEEEPEMPVGPRPRPLSELHLKEKAVPMPEASAFFIFSSNNRFRLQCHRIVNDTIFTNLILFFILLSSISLAAEDPVQHTSFRNHILFYFDIVFTTIFTIEIALKILGNADYVFTSIFTLEIILKMTAYGAFLHKGSFCRNYFNILDLLVVSVSLISFGIQSSAINVVKILRVLRVLRPLRAINRAKGLKHVVQCVFVAIRTIGNIVIVTTLLQFMFACIGVQLFKGKLYTCSDSSKQTEAECKGNYITYKDGEVDHPIIQPRSWENSKFDFDNVLAAMMALFTVSTFEGWPELLYRSIDSHTEDKGPIYNYRVEISIFFIIYIIIIAFFMMNIFVGFVIVTFQEQGEQEYKNCELDKNQRQCVEYALKARPLRRYIPKNQHQYKVWYVVNSTYFEYLMFVLILLNTICLAMQHYGQSCLFKIAMNILNMLFTGLFTVEMILKLIAFKPKGYFSDPWNVFDFLIVIGSIIDVILSETNHYFCDAWNTFDALIVVGSIVDIAITEVNPAEHTQCSPSMNAEENSRISITFFRLFRVMRLVKLLSRGEGIRTLLWTFIKSFQALPYVALLIVMLFFIYAVIGMQVFGKIALNDTTEINRNNNFQTFPQAVLLLFRCATGEAWQDIMLACMPGKKCAPESEPSNSTEGETPCGSSFAVFYFISFYMLCAFLIINLFVAVIMDNFDYLTRDWSILGPHHLDEFKRIWAEYDPEAKGRIKHLDVVTLLRRIQPPLGFGKLCPHRVACKRLVSMNMPLNSDGTVMFNATLFALVRTALRIKTEGNLEQANEELRAIIKKIWKRTSMKLLDQVVPPAGDDEVTVGKFYATFLIQEYFRKFKKRKEQGLVGKPSQRNALSLQAGLRTLHDIGPEIRRAISGDLTAEEELDKAMKEAVSAASEDDIFRRAGGLFGNHVSYYQSDGRSAFPQTFTTQRPLHINKAGSSQGDTESPSHEKLVDSTFTPSSYSSTGSNANINNANNTALGRLPRPAGYPSTVSTVEGHGPPLSPAIRVQEVAWKLSSNRMHCCDMLDGGTFPPALGPRRAPPCLHQQLQGSLAGLREDTPCIVPGHASLCCSSRVGEWLPAGCTAPQHARCHSRESQAAMAGQEETSQDETYEVKMNHDTEACSEPSLLSTEMLSYQDDENRQLTLPEEDKRDIRQSPKRGFLRSASLGRRASFHLECLKRQKDRGGDISQKTVLPLHLVHHQALAVAGLSPLLQRSHSPASFPRPFATPPATPGSRGWPPQPVPTLRLEGVESSEKLNSSFPSIHCGSWAETTPGGGGSSAARRVRPVSLMVPSQAGAPGRQFHGSASSLVEAVLISEGLGQFAQDPKFIEVTTQELADACDMTIEEMESAADNILSGGAPQSPNGALLPFVNCRDAGQDRAGGEEDAGCVRARGRPSEEELQDSRVYVSSL

SEQ ID NO: 20404 - protein, 2221 aa, Homo sapiens
MVNENTRMYIPEENHQGSNYGSPRPAHANMNANAAAGLAPEHIPTPGAALSWQAAIDAARQAKLMGSAGNATISTVSSTQRKRQQYGKPKKQGSTTATRPPRALLCLTLKNPIRRACISIVEWKPFEIIILLTIFANCVALAIYIPFPEDDSNATNSNLERVEYLFLIIFTVEAFLKVIAYGLLFHPNAYLRNGWNLLDFIIVVVGLFSAILEQATKADGANALGGKGAGFDVKALRAFRVLRPLRLVSGVPSLQVVLNSIIKAMVPLLHIALLVLFVIIIYAIIGLELFMGKMHKTCYNQEGIADVPAEDDPSPCALETGHGRQCQNGTVCKPGWDGPKHGITNFDNFAFAMLTVFQCITMEGWTDVLYWMQDAMGYELPWVYFVSLVIFGSFFVLNLVLGVLSGEFSKEREKAKARGDFQKLREKQQLEEDLKGYLDWITQAEDIDPENEDEGMDEEKPRNMSMPTSETESVNTENVAGGDIEGENCGARLAHRISKSKFSRYWRRWNRFCRRKCRAAVKSNVFYWLVIFLVFLNTLTIASEHYNQPNWLTEVQDTANKALLALFTAEMLLKMYSLGLQAYFVSLFNRFDCFVVCGGILETILVETKIMSPLGISVLRCVRLLRIFKITRYWNSLSNLVASLLNSVRSIASLLLLLFLFIIIFSLLGMQLFGGKFNFDEMQTRRSTFDNFPQSLLTVFQILTGEDWNSVMYDGIMAYGGPSFPGMLVCIYFIILFICGNYILLNVFLAIAVDNLADAESLTSAQKEEEEEKERKKLARTASPEKKQELVEKPAVGESKEEKIELKSITADGESPPATKINMDDLQPNENEDKSPYPNPETTGEEDEEEPEMPVGPRPRPLSELHLKEKAVPMPEASAFFIFSSNNRFRLQCHRIVNDTIFTNLILFFILLSSISLAAEDPVQHTSFRNHILFYFDIVFTTIFTIEIALKILGNADYVFTSIFTLEIILKMTAYGAFLHKGSFCRNYFNILDLLVVSVSLISFGIQSSAINVVKILRVLRVLRPLRAINRAKGLKHVVQCVFVAIRTIGNIVIVTTLLQFMFACIGVQLFKGKLYTCSDSSKQTEAECKGNYITYKDGEVDHPIIQPRSWENSKFDFDNVLAAMMALFTVSTFEGWPELLYRSIDSHTEDKGPIYNYRVEISIFFIIYIIIIAFFMMNIFVGFVIVTFQEQGEQEYKNCELDKNQRQCVEYALKARPLRRYIPKNQHQYKVWYVVNSTYFEYLMFVLILLNTICLAMQHYGQSCLFKIAMNILNMLFTGLFTVEMILKLIAFKPKGYFSDPWNVFDFLIVIGSIIDVILSETNHYFCDAWNTFDALIVVGSIVDIAITEVNPAEHTQCSPSMNAEENSRISITFFRLFRVMRLVKLLSRGEGIRTLLWTFIKSFQALPYVALLIVMLFFIYAVIGMQVFGKIALNDTTEINRNNNFQTFPQAVLLLFRCATGEAWQDIMLACMPGKKCAPESEPSNSTEGETPCGSSFAVFYFISFYMLCAFLIINLFVAVIMDNFDYLTRDWSILGPHHLDEFKRIWAEYDPEAKGRIKHLDVVTLLRRIQPPLGFGKLCPHRVACKRLVSMNMPLNSDGTVMFNATLFALVRTALRIKTEGNLEQANEELRAIIKKIWKRTSMKLLDQVVPPAGDDEVTVGKFYATFLIQEYFRKFKKRKEQGLVGKPSQRNALSLQAGLRTLHDIGPEIRRAISGDLTAEEELDKAMKEAVSAASEDDIFRRAGGLFGNHVSYYQSDGRSAFPQTFTTQRPLHINKAGSSQGDTESPSHEKLVDSTFTPSSYSSTGSNANINNANNTALGRLPRPAGYPSTVSTVEGHGPPLSPAIRVQEVAWKLSSNRERHVPMCEDLELRRDSGSAGTQAHCLLLRKANPSRCHSRESQAAMAGQEETSQDETYEVKMNHDTEACSEPSLLSTEMLSYQDDENRQLTLPEEDKRDIRQSPKRGFLRSASLGRRASFHLECLKRQKDRGGDISQKTVLPLHLVHHQALAVAGLSPLLQRSHSPASFPRPFATPPATPGSRGWPPQPVPTLRLEGVESSEKLNSSFPSIHCGSWAETTPGGGGSSAARRVRPVSLMVPSQAGAPGRQFHGSASSLVEAVLISEGLGQFAQDPKFIEVTTQELADACDMTIEEMESAADNILSGGAPQSPNGALLPFVNCRDAGQDRAGGEEDAGCVRARGRPSEEELQDSRVYVSSL

SEQ ID NO: 20405 - protein, 2201 aa, Homo sapiens
MVNENTRMYIPEENHQGSNYGSPRPAHANMNANAAAGLAPEHIPTPGAALSWQAAIDAARQAKLMGSAGNATISTVSSTQRKRQQYGKPKKQGSTTATRPPRALLCLTLKNPIRRACISIVEWKPFEIIILLTIFANCVALAIYIPFPEDDSNATNSNLERVEYLFLIIFTVEAFLKVIAYGLLFHPNAYLRNGWNLLDFIIVVVGLFSAILEQATKADGANALGGKGAGFDVKALRAFRVLRPLRLVSGVPSLQVVLNSIIKAMVPLLHIALLVLFVIIIYAIIGLELFMGKMHKTCYNQEGIADVPAEDDPSPCALETGHGRQCQNGTVCKPGWDGPKHGITNFDNFAFAMLTVFQCITMEGWTDVLYWVNDAVGRDWPWIYFVTLIIIGSFFVLNLVLGVLSGEFSKEREKAKARGDFQKLREKQQLEEDLKGYLDWITQAEDIDPENEDEGMDEEKPRNMSMPTSETESVNTENVAGGDIEGENCGARLAHRISKSKFSRYWRRWNRFCRRKCRAAVKSNVFYWLVIFLVFLNTLTIASEHYNQPNWLTEVQDTANKALLALFTAEMLLKMYSLGLQAYFVSLFNRFDCFVVCGGILETILVETKIMSPLGISVLRCVRLLRIFKITRYWNSLSNLVASLLNSVRSIASLLLLLFLFIIIFSLLGMQLFGGKFNFDEMQTRRSTFDNFPQSLLTVFQILTGEDWNSVMYDGIMAYGGPSFPGMLVCIYFIILFICGNYILLNVFLAIAVDNLADAESLTSAQKEEEEEKERKKLARTASPEKKQELVEKPAVGESKEEKIELKSITADGESPPATKINMDDLQPNENEDKSPYPNPETTGEEDEEEPEMPVGPRPRPLSELHLKEKAVPMPEASAFFIFSSNNRFRLQCHRIVNDTIFTNLILFFILLSSISLAAEDPVQHTSFRNHILGNADYVFTSIFTLEIILKMTAYGAFLHKGSFCRNYFNILDLLVVSVSLISFGIQSSAINVVKILRVLRVLRPLRAINRAKGLKHVVQCVFVAIRTIGNIVIVTTLLQFMFACIGVQLFKGKLYTCSDSSKQTEAECKGNYITYKDGEVDHPIIQPRSWENSKFDFDNVLAAMMALFTVSTFEGWPELLYRSIDSHTEDKGPIYNYRVEISIFFIIYIIIIAFFMMNIFVGFVIVTFQEQGEQEYKNCELDKNQRQCVEYALKARPLRRYIPKNQHQYKVWYVVNSTYFEYLMFVLILLNTICLAMQHYGQSCLFKIAMNILNMLFTGLFTVEMILKLIAFKPKGYFSDPWNVFDFLIVIGSIIDVILSETNHYFCDAWNTFDALIVVGSIVDIAITEVNPAEHTQCSPSMNAEENSRISITFFRLFRVMRLVKLLSRGEGIRTLLWTFIKSFQALPYVALLIVMLFFIYAVIGMQVFGKIALNDTTEINRNNNFQTFPQAVLLLFRCATGEAWQDIMLACMPGKKCAPESEPSNSTEGETPCGSSFAVFYFISFYMLCAFLIINLFVAVIMDNFDYLTRDWSILGPHHLDEFKRIWAEYDPEAKGRIKHLDVVTLLRRIQPPLGFGKLCPHRVACKRLVSMNMPLNSDGTVMFNATLFALVRTALRIKTEGNLEQANEELRAIIKKIWKRTSMKLLDQVVPPAGDDEVTVGKFYATFLIQEYFRKFKKRKEQGLVGKPSQRNALSLQAGLRTLHDIGPEIRRAISGDLTAEEELDKAMKEAVSAASEDDIFRRAGGLFGNHVSYYQSDGRSAFPQTFTTQRPLHINKAGSSQGDTESPSHEKLVDSTFTPSSYSSTGSNANINNANNTALGRLPRPAGYPSTVSTVEGHGPPLSPAIRVQEVAWKLSSNRERHVPMCEDLELRRDSGSAGTQAHCLLLRKANPSRCHSRESQAAMAGQEETSQDETYEVKMNHDTEACSEPSLLSTEMLSYQDDENRQLTLPEEDKRDIRQSPKRGFLRSASLGRRASFHLECLKRQKDRGGDISQKTVLPLHLVHHQALAVAGLSPLLQRSHSPASFPRPFATPPATPGSRGWPPQPVPTLRLEGVESSEKLNSSFPSIHCGSWAETTPGGGGSSAARRVRPVSLMVPSQAGAPGRQFHGSASSLVEAVLISEGLGQFAQDPKFIEVTTQELADACDMTIEEMESAADNILSGGAPQSPNGALLPFVNCRDAGQDRAGGEEDAGCVRARGRPSEEELQDSRVYVSSL

SEQ ID NO: 20406 - protein, 2201 aa, Homo sapiens
MVNENTRMYIPEENHQGSNYGSPRPAHANMNANAAAGLAPEHIPTPGAALSWQAAIDAARQAKLMGSAGNATISTVSSTQRKRQQYGKPKKQGSTTATRPPRALLCLTLKNPIRRACISIVEWKPFEIIILLTIFANCVALAIYIPFPEDDSNATNSNLERVEYLFLIIFTVEAFLKVIAYGLLFHPNAYLRNGWNLLDFIIVVVGLFSAILEQATKADGANALGGKGAGFDVKALRAFRVLRPLRLVSGVPSLQVVLNSIIKAMVPLLHIALLVLFVIIIYAIIGLELFMGKMHKTCYNQEGIADVPAEDDPSPCALETGHGRQCQNGTVCKPGWDGPKHGITNFDNFAFAMLTVFQCITMEGWTDVLYWVNDAVGRDWPWIYFVTLIIIGSFFVLNLVLGVLSGEFSKEREKAKARGDFQKLREKQQLEEDLKGYLDWITQAEDIDPENEDEGMDEEKPRNMSMPTSETESVNTENVAGGDIEGENCGARLAHRISKSKFSRYWRRWNRFCRRKCRAAVKSNVFYWLVIFLVFLNTLTIASEHYNQPNWLTEVQDTANKALLALFTAEMLLKMYSLGLQAYFVSLFNRFDCFVVCGGILETILVETKIMSPLGISVLRCVRLLRIFKITRYWNSLSNLVASLLNSVRSIASLLLLLFLFIIIFSLLGMQLFGGKFNFDEMQTRRSTFDNFPQSLLTVFQILTGEDWNSVMYDGIMAYGGPSFPGMLVCIYFIILFICGNYILLNVFLAIAVDNLADAESLTSAQKEEEEEKERKKLARTASPEKKQELVEKPAVGESKEEKIELKSITADGESPPATKINMDDLQPNENEDKSPYPNPETTGEEDEEEPEMPVGPRPRPLSELHLKEKAVPMPEASAFFIFSSNNRFRLQCHRIVNDTIFTNLILFFILLSSISLAAEDPVQHTSFRNHILFYFDIVFTTIFTIEIALKMTAYGAFLHKGSFCRNYFNILDLLVVSVSLISFGIQSSAINVVKILRVLRVLRPLRAINRAKGLKHVVQCVFVAIRTIGNIVIVTTLLQFMFACIGVQLFKGKLYTCSDSSKQTEAECKGNYITYKDGEVDHPIIQPRSWENSKFDFDNVLAAMMALFTVSTFEGWPELLYRSIDSHTEDKGPIYNYRVEISIFFIIYIIIIAFFMMNIFVGFVIVTFQEQGEQEYKNCELDKNQRQCVEYALKARPLRRYIPKNQHQYKVWYVVNSTYFEYLMFVLILLNTICLAMQHYGQSCLFKIAMNILNMLFTGLFTVEMILKLIAFKPKGYFSDPWNVFDFLIVIGSIIDVILSETNHYFCDAWNTFDALIVVGSIVDIAITEVNPAEHTQCSPSMNAEENSRISITFFRLFRVMRLVKLLSRGEGIRTLLWTFIKSFQALPYVALLIVMLFFIYAVIGMQVFGKIALNDTTEINRNNNFQTFPQAVLLLFRCATGEAWQDIMLACMPGKKCAPESEPSNSTEGETPCGSSFAVFYFISFYMLCAFLIINLFVAVIMDNFDYLTRDWSILGPHHLDEFKRIWAEYDPEAKGRIKHLDVVTLLRRIQPPLGFGKLCPHRVACKRLVSMNMPLNSDGTVMFNATLFALVRTALRIKTEGNLEQANEELRAIIKKIWKRTSMKLLDQVVPPAGDDEVTVGKFYATFLIQEYFRKFKKRKEQGLVGKPSQRNALSLQAGLRTLHDIGPEIRRAISGDLTAEEELDKAMKEAVSAASEDDIFRRAGGLFGNHVSYYQSDGRSAFPQTFTTQRPLHINKAGSSQGDTESPSHEKLVDSTFTPSSYSSTGSNANINNANNTALGRLPRPAGYPSTVSTVEGHGPPLSPAIRVQEVAWKLSSNRERHVPMCEDLELRRDSGSAGTQAHCLLLRKANPSRCHSRESQAAMAGQEETSQDETYEVKMNHDTEACSEPSLLSTEMLSYQDDENRQLTLPEEDKRDIRQSPKRGFLRSASLGRRASFHLECLKRQKDRGGDISQKTVLPLHLVHHQALAVAGLSPLLQRSHSPASFPRPFATPPATPGSRGWPPQPVPTLRLEGVESSEKLNSSFPSIHCGSWAETTPGGGGSSAARRVRPVSLMVPSQAGAPGRQFHGSASSLVEAVLISEGLGQFAQDPKFIEVTTQELADACDMTIEEMESAADNILSGGAPQSPNGALLPFVNCRDAGQDRAGGEEDAGCVRARGRPSEEELQDSRVYVSSL

SEQ ID NO: 20407 - protein, 2193 aa, Homo sapiens
MVNENTRMYIPEENHQGSNYGSPRPAHANMNANAAAGLAPEHIPTPGAALSWQAAIDAARQAKLMGSAGNATISTVSSTQRKRQQYGKPKKQGSTTATRPPRALLCLTLKNPIRRACISIVEWKPFEIIILLTIFANCVALAIYIPFPEDDSNATNSNLERVEYLFLIIFTVEAFLKVIAYGLLFHPNAYLRNGWNLLDFIIVVVGLFSAILEQATKADGANALGGKGAGFDVKALRAFRVLRPLRLVSGVPSLQVVLNSIIKAMVPLLHIALLVLFVIIIYAIIGLELFMGKMHKTCYNQEGIADVPAEDDPSPCALETGHGRQCQNGTVCKPGWDGPKHGITNFDNFAFAMLTVFQCITMEGWTDVLYWVNDAVGRDWPWIYFVTLIIIGSFFVLNLVLGVLSGEFSKEREKAKARGDFQKLREKQQLEEDLKGYLDWITQAEDIDPENEDEGMDEEKPRNMSMPTSETESVNTENVAGGDIEGENCGARLAHRISKSKFSRYWRRWNRFCRRKCRAAVKSNVFYWLVIFLVFLNTLTIASEHYNQPNWLTEVQDTANKALLALFTAEMLLKMYSLGLQAYFVSLFNRFDCFVVCGGILETILVETKIMSPLGISVLRCVRLLRIFKITRYWNSLSNLVASLLNSVRSIASLLLLLFLFIIIFSLLGMQLFGGKFNFDEMQTRRSTFDNFPQSLLTVFQILTGEDWNSVMYDGIMAYGGPSFPGMLVCIYFIILFICGNYILLNVFLAIAVDNLADAESLTSAQKEEEEEKERKKLARTASPEKKQELVEKPAVGESKEEKIELKSITADGESPPATKINMDDLQPNENEDKSPYPNPETTGEEDEEEPEMPVGPRPRPLSELHLKEKAVPMPEASAFFIFSSNNRFRLQCHRIVNDTIFTNLILFFILLSSISLAAEDPVQHTSFRNHILFYFDIVFTTIFTIEIALKILGNADYVFTSIFTLEIILKMTAYGAFLHKGSFCRNYFNILDLLVVSVSLISFGIQSSAINVVKILRVLRVLRPLRAINRAKGLKHVVQCVFVAIRTIGNIVIVTTLLQFMFACIGVQLFKGKLYTCSDSSKQTEAECKGNYITYKDGEVDHPIIQPRSWENSKFDFDNVLAAMMALFTVSTFEGWPELLYRSIDSHTEDKGPIYNYRVEISIFFIIYIIIIAFFMMNIFVGFVIVTFQEQGEQEYKNCELDKNQRQCVEYALKARPLRRYIPKNQHQYKVWYVVNSTYFEYLMFVLILLNTICLAMQHYGQSCLFKIAMNILNMLFTGLFTVEMILKLIAFKPKHYFCDAWNTFDALIVVGSIVDIAITEVNPAEHTQCSPSMNAEENSRISITFFRLFRVMRLVKLLSRGEGIRTLLWTFIKSFQALPYVALLIVMLFFIYAVIGMQVFGKIALNDTTEINRNNNFQTFPQAVLLLFRCATGEAWQDIMLACMPGKKCAPESEPSNSTEGETPCGSSFAVFYFISFYMLCAFLIINLFVAVIMDNFDYLTRDWSILGPHHLDEFKRIWAEYDPEAKGRIKHLDVVTLLRRIQPPLGFGKLCPHRVACKRLVSMNMPLNSDGTVMFNATLFALVRTALRIKTEGNLEQANEELRAIIKKIWKRTSMKLLDQVVPPAGDDEVTVGKFYATFLIQEYFRKFKKRKEQGLVGKPSQRNALSLQAGLRTLHDIGPEIRRAISGDLTAEEELDKAMKEAVSAASEDDIFRRAGGLFGNHVSYYQSDGRSAFPQTFTTQRPLHINKAGSSQGDTESPSHEKLVDSTFTPSSYSSTGSNANINNANNTALGRLPRPAGYPSTVSTVEGHGPPLSPAIRVQEVAWKLSSNRERHVPMCEDLELRRDSGSAGTQAHCLLLRKANPSRCHSRESQAAMAGQEETSQDETYEVKMNHDTEACSEPSLLSTEMLSYQDDENRQLTLPEEDKRDIRQSPKRGFLRSASLGRRASFHLECLKRQKDRGGDISQKTVLPLHLVHHQALAVAGLSPLLQRSHSPASFPRPFATPPATPGSRGWPPQPVPTLRLEGVESSEKLNSSFPSIHCGSWAETTPGGGGSSAARRVRPVSLMVPSQAGAPGRQFHGSASSLVEAVLISEGLGQFAQDPKFIEVTTQELADACDMTIEEMESAADNILSGGAPQSPNGALLPFVNCRDAGQDRAGGEEDAGCVRARGRPSEEELQDSRVYVSSL

SEQ ID NO: 20408 - protein, 2193 aa, Homo sapiens
MVNENTRMYIPEENHQGSNYGSPRPAHANMNANAAAGLAPEHIPTPGAALSWQAAIDAARQAKLMGSAGNATISTVSSTQRKRQQYGKPKKQGSTTATRPPRALLCLTLKNPIRRACISIVEWKPFEIIILLTIFANCVALAIYIPFPEDDSNATNSNLERVEYLFLIIFTVEAFLKVIAYGLLFHPNAYLRNGWNLLDFIIVVVGLFSAILEQATKADGANALGGKGAGFDVKALRAFRVLRPLRLVSGVPSLQVVLNSIIKAMVPLLHIALLVLFVIIIYAIIGLELFMGKMHKTCYNQEGIADVPAEDDPSPCALETGHGRQCQNGTVCKPGWDGPKHGITNFDNFAFAMLTVFQCITMEGWTDVLYWVNDAVGRDWPWIYFVTLIIIGSFFVLNLVLGVLSGEFSKEREKAKARGDFQKLREKQQLEEDLKGYLDWITQAEDIDPENEDEGMDEEKPRNMSMPTSETESVNTENVAGGDIEGENCGARLAHRISKSKFSRYWRRWNRFCRRKCRAAVKSNVFYWLVIFLVFLNTLTIASEHYNQPNWLTEVQDTANKALLALFTAEMLLKMYSLGLQAYFVSLFNRFDCFVVCGGILETILVETKIMSPLGISVLRCVRLLRIFKITRYWNSLSNLVASLLNSVRSIASLLLLLFLFIIIFSLLGMQLFGGKFNFDEMQTRRSTFDNFPQSLLTVFQILTGEDWNSVMYDGIMAYGGPSFPGMLVCIYFIILFICGNYILLNVFLAIAVDNLADAESLTSAQKEEEEEKERKKLARTASPEKKQELVEKPAVGESKEEKIELKSITADGESPPATKINMDDLQPNENEDKSPYPNPETTGEEDEEEPEMPVGPRPRPLSELHLKEKAVPMPEASAFFIFSSNNRFRLQCHRIVNDTIFTNLILFFILLSSISLAAEDPVQHTSFRNHILFYFDIVFTTIFTIEIALKILGNADYVFTSIFTLEIILKMTAYGAFLHKGSFCRNYFNILDLLVVSVSLISFGIQSSAINVVKILRVLRVLRPLRAINRAKGLKHVVQCVFVAIRTIGNIVIVTTLLQFMFACIGVQLFKGKLYTCSDSSKQTEAECKGNYITYKDGEVDHPIIQPRSWENSKFDFDNVLAAMMALFTVSTFEGWPELLYRSIDSHTEDKGPIYNYRVEISIFFIIYIIIIAFFMMNIFVGFVIVTFQEQGEQEYKNCELDKNQRQCVEYALKARPLRRYIPKNQHQYKVWYVVNSTYFEYLMFVLILLNTICLAMQHYGQSCLFKIAMNILNMLFTGLFTVEMILKLIAFKPKGYFSDPWNVFDFLIVIGSIIDVILSETNPAEHTQCSPSMNAEENSRISITFFRLFRVMRLVKLLSRGEGIRTLLWTFIKSFQALPYVALLIVMLFFIYAVIGMQVFGKIALNDTTEINRNNNFQTFPQAVLLLFRCATGEAWQDIMLACMPGKKCAPESEPSNSTEGETPCGSSFAVFYFISFYMLCAFLIINLFVAVIMDNFDYLTRDWSILGPHHLDEFKRIWAEYDPEAKGRIKHLDVVTLLRRIQPPLGFGKLCPHRVACKRLVSMNMPLNSDGTVMFNATLFALVRTALRIKTEGNLEQANEELRAIIKKIWKRTSMKLLDQVVPPAGDDEVTVGKFYATFLIQEYFRKFKKRKEQGLVGKPSQRNALSLQAGLRTLHDIGPEIRRAISGDLTAEEELDKAMKEAVSAASEDDIFRRAGGLFGNHVSYYQSDGRSAFPQTFTTQRPLHINKAGSSQGDTESPSHEKLVDSTFTPSSYSSTGSNANINNANNTALGRLPRPAGYPSTVSTVEGHGPPLSPAIRVQEVAWKLSSNRERHVPMCEDLELRRDSGSAGTQAHCLLLRKANPSRCHSRESQAAMAGQEETSQDETYEVKMNHDTEACSEPSLLSTEMLSYQDDENRQLTLPEEDKRDIRQSPKRGFLRSASLGRRASFHLECLKRQKDRGGDISQKTVLPLHLVHHQALAVAGLSPLLQRSHSPASFPRPFATPPATPGSRGWPPQPVPTLRLEGVESSEKLNSSFPSIHCGSWAETTPGGGGSSAARRVRPVSLMVPSQAGAPGRQFHGSASSLVEAVLISEGLGQFAQDPKFIEVTTQELADACDMTIEEMESAADNILSGGAPQSPNGALLPFVNCRDAGQDRAGGEEDAGCVRARGRPSEEELQDSRVYVSSL

SEQ ID NO: 20409 - protein, 2210 aa, Homo sapiens
MVNENTRMYIPEENHQGSNYGSPRPAHANMNANAAAGLAPEHIPTPGAALSWQAAIDAARQAKLMGSAGNATISTVSSTQRKRQQYGKPKKQGSTTATRPPRALLCLTLKNPIRRACISIVEWKPFEIIILLTIFANCVALAIYIPFPEDDSNATNSNLERVEYLFLIIFTVEAFLKVIAYGLLFHPNAYLRNGWNLLDFIIVVVGLFSAILEQATKADGANALGGKGAGFDVKALRAFRVLRPLRLVSGVPSLQVVLNSIIKAMVPLLHIALLVLFVIIIYAIIGLELFMGKMHKTCYNQEGIADVPAEDDPSPCALETGHGRQCQNGTVCKPGWDGPKHGITNFDNFAFAMLTVFQCITMEGWTDVLYWVNDAVGRDWPWIYFVTLIIIGSFFVLNLVLGVLSGEFSKEREKAKARGDFQKLREKQQLEEDLKGYLDWITQAEDIDPENEDEGMDEEKPRNMSMPTSETESVNTENVAGGDIEGENCGARLAHRISKSKFSRYWRRWNRFCRRKCRAAVKSNVFYWLVIFLVFLNTLTIASEHYNQPNWLTEVQDTANKALLALFTAEMLLKMYSLGLQAYFVSLFNRFDCFVVCGGILETILVETKIMSPLGISVLRCVRLLRIFKITRYWNSLSNLVASLLNSVRSIASLLLLLFLFIIIFSLLGMQLFGGKFNFDEMQTRRSTFDNFPQSLLTVFQILTGEDWNSVMYDGIMAYGGPSFPGMLVCIYFIILFICGNYILLNVFLAIAVDNLADAESLTSAQKEEEEEKERKKLARTASPEKKQELVEKPAVGESKEEKIELKSITADGESPPATKINMDDLQPNENEDKSPYPNPETTGEEDEEEPEMPVGPRPRPLSELHLKEKAVPMPEASAFFIFSSNNRFRLQCHRIVNDTIFTNLILFFILLSSISLAAEDPVQHTSFRNHILFYFDIVFTTIFTIEIALKILGNADYVFTSIFTLEIILKMTAYGAFLHKGSFCRNYFNILDLLVVSVSLISFGIQSSAINVVKILRVLRVLRPLRAINRAKGLKHVVQCVFVAIRTIGNIVIVTTLLQFMFACIGVQLFKGKLYTCSDSSKQTEAECKGNYITYKDGEVDHPIIQPRSWENSKFDFDNVLAAMMALFTVSTFEGWPELLYRSIDSHTEDKGPIYNYRVEISIFFIIYIIIIAFFMMNIFVGFVIVTFQEQGEQEYKNCELDKNQRQCVEYALKARPLRRYIPKNQHQYKVWYVVNSTYFEYLMFVLILLNTICLAMQHYGQSCLFKIAMNILNMLFTGLFTVEMILKLIAFKPKGYFSDPWNVFDFLIVIGSIIDVILSETNHYFCDAWNTFDALIVVGSIVDIAITEVNNAEENSRISITFFRLFRVMRLVKLLSRGEGIRTLLWTFIKSFQALPYVALLIVMLFFIYAVIGMQVFGKIALNDTTEINRNNNFQTFPQAVLLLFRCATGEAWQDIMLACMPGKKCAPESEPSNSTEGETPCGSSFAVFYFISFYMLCAFLIINLFVAVIMDNFDYLTRDWSILGPHHLDEFKRIWAEYDPEAKGRIKHLDVVTLLRRIQPPLGFGKLCPHRVACKRLVSMNMPLNSDGTVMFNATLFALVRTALRIKTEGNLEQANEELRAIIKKIWKRTSMKLLDQVVPPAGDDEVTVGKFYATFLIQEYFRKFKKRKEQGLVGKPSQRNALSLQAGLRTLHDIGPEIRRAISGDLTAEEELDKAMKEAVSAASEDDIFRRAGGLFGNHVSYYQSDGRSAFPQTFTTQRPLHINKAGSSQGDTESPSHEKLVDSTFTPSSYSSTGSNANINNANNTALGRLPRPAGYPSTVSTVEGHGPPLSPAIRVQEVAWKLSSNRERHVPMCEDLELRRDSGSAGTQAHCLLLRKANPSRCHSRESQAAMAGQEETSQDETYEVKMNHDTEACSEPSLLSTEMLSYQDDENRQLTLPEEDKRDIRQSPKRGFLRSASLGRRASFHLECLKRQKDRGGDISQKTVLPLHLVHHQALAVAGLSPLLQRSHSPASFPRPFATPPATPGSRGWPPQPVPTLRLEGVESSEKLNSSFPSIHCGSWAETTPGGGGSSAARRVRPVSLMVPSQAGAPGRQFHGSASSLVEAVLISEGLGQFAQDPKFIEVTTQELADACDMTIEEMESAADNILSGGAPQSPNGALLPFVNCRDAGQDRAGGEEDAGCVRARGRPSEEELQDSRVYVSSL

SEQ ID NO: 20410 - protein, 2222 aa, Homo sapiens
MVNENTRMYIPEENHQGSNYGSPRPAHANMNANAAAGLAPEHIPTPGAALSWQAAIDAARQAKLMGSAGNATISTVSSTQRKRQQYGKPKKQGSTTATRPPRALLCLTLKNPIRRACISIVEWKPFEIIILLTIFANCVALAIYIPFPEDDSNATNSNLERVEYLFLIIFTVEAFLKVIAYGLLFHPNAYLRNGWNLLDFIIVVVGLFSAILEQATKADGANALGGKGAGFDVKALRAFRVLRPLRLVSGVPSLQVVLNSIIKAMVPLLHIALLVLFVIIIYAIIGLELFMGKMHKTCYNQEGIADVPAEDDPSPCALETGHGRQCQNGTVCKPGWDGPKHGITNFDNFAFAMLTVFQCITMEGWTDVLYWVNDAVGRDWPWIYFVTLIIIGSFFVLNLVLGVLSGEFSKEREKAKARGDFQKLREKQQLEEDLKGYLDWITQAEDIDPENEDEGMDEEKPRNMSMPTSETESVNTENVAGGDIEGENCGARLAHRISKSKFSRYWRRWNRFCRRKCRAAVKSNVFYWLVIFLVFLNTLTIASEHYNQPNWLTEVQDTANKALLALFTAEMLLKMYSLGLQAYFVSLFNRFDCFVVCGGILETILVETKIMSPLGISVLRCVRLLRIFKITRYWNSLSNLVASLLNSVRSIASLLLLLFLFIIIFSLLGMQLFGGKFNFDEMQTRRSTFDNFPQSLLTVFQILTGEDWNSVMYDGIMAYGGPSFPGMLVCIYFIILFICGNYILLNVFLAIAVDNLADAESLTSAQKEEEEEKERKKLARTASPEKKQELVEKPAVGESKEEKIELKSITADGESPPATKINMDDLQPNENEDKSPYPNPETTGEEDEEEPEMPVGPRPRPLSELHLKEKAVPMPEASAFFIFSSNNRFRLQCHRIVNDTIFTNLILFFILLSSISLAAEDPVQHTSFRNHILFYFDIVFTTIFTIEIALKILGNADYVFTSIFTLEIILKMTAYGAFLHKGSFCRNYFNILDLLVVSVSLISFGIQSSAINVVKILRVLRVLRPLRAINRAKGLKHVVQCVFVAIRTIGNIVIVTTLLQFMFACIGVQLFKGKLYTCSDSSKQTEAECKGNYITYKDGEVDHPIIQPRSWENSKFDFDNVLAAMMALFTVSTFEGWPELLYRSIDSHTEDKGPIYNYRVEISIFFIIYIIIIAFFMMNIFVGFVIVTFQEQGEQEYKNCELDKNQRQCVEYALKARPLRRYIPKNQHQYKVWYVVNSTYFEYLMFVLILLNTICLAMQHYGQSCLFKIAMNILNMLFTGLFTVEMILKLIAFKPKGYFSDPWNVFDFLIVIGSIIDVILSETNHYFCDAWNTFDALIVVGSIVDIAITEVNPAEHTQCSPSMNAEENSRISITFFRLFRVMRLVKLLSRGEGIRTLLWTFIKSFQALPYVALLIVMLFFIYAVIGMQVFGKIALNDTTEINRNNNFQTFPQAVLLLFRCATGEAWQDIMLACMPGKKCAPESEPSNSTEGETPCGSSFAVFYFISFYMLCAFLIINLFVAVIMDNFDYLTRDWSILGPHHLDEFKRIWAEYDPEAKGRIKHLDVVTLLRRIQPPLGFGKLCPHRVACKRLVSMNMPLNSDGTVMFNATLFALVRTALREAELSSQVQYQAKEASLLERRRKSSHPKSSTKPNKLLSSGGSTGWVEDARALEGQVLARGCGWLGSLEERERGPHHPPLGFQAGLRTLHDIGPEIRRAISGDLTAEEELDKAMKEAVSAASEDDIFRRAGGLFGNHVSYYQSDGRSAFPQTFTTQRPLHINKAGSSQGDTESPSHEKLVDSTFTPSSYSSTGSNANINNANNTALGRLPRPAGYPSTVSTVEGHGPPLSPAIRVQEVAWKLSSNRERHVPMCEDLELRRDSGSAGTQAHCLLLRKANPSRCHSRESQAAMAGQEETSQDETYEVKMNHDTEACSEPSLLSTEMLSYQDDENRQLTLPEEDKRDIRQSPKRGFLRSASLGRRASFHLECLKRQKDRGGDISQKTVLPLHLVHHQALAVAGLSPLLQRSHSPASFPRPFATPPATPGSRGWPPQPVPTLRLEGVESSEKLNSSFPSIHCGSWAETTPGGGGSSAARRVRPVSLMVPSQAGAPGRQFHGSASSLVEAVLISEGLGQFAQDPKFIEVTTQELADACDMTIEEMESAADNILSGGAPQSPNGALLPFVNCRDAGQDRAGGEEDAGCVRARGRPSEEELQDSRVYVSSL

SEQ ID NO: 20411 - protein, 2240 aa, Homo sapiens
MVNENTRMYIPEENHQGSNYGSPRPAHANMNANAAAGLAPEHIPTPGAALSWQAAIDAARQAKLMGSAGNATISTVSSTQRKRQQYGKPKKQGSTTATRPPRALLCLTLKNPIRRACISIVEWKPFEIIILLTIFANCVALAIYIPFPEDDSNATNSNLERVEYLFLIIFTVEAFLKVIAYGLLFHPNAYLRNGWNLLDFIIVVVGLFSAILEQATKADGANALGGKGAGFDVKALRAFRVLRPLRLVSGVPSLQVVLNSIIKAMVPLLHIALLVLFVIIIYAIIGLELFMGKMHKTCYNQEGIADVPAEDDPSPCALETGHGRQCQNGTVCKPGWDGPKHGITNFDNFAFAMLTVFQCITMEGWTDVLYWVNDAVGRDWPWIYFVTLIIIGSFFVLNLVLGVLSGEFSKEREKAKARGDFQKLREKQQLEEDLKGYLDWITQAEDIDPENEDEGMDEEKPRNMSMPTSETESVNTENVAGGDIEGENCGARLAHRISKSKFSRYWRRWNRFCRRKCRAAVKSNVFYWLVIFLVFLNTLTIASEHYNQPNWLTEVQDTANKALLALFTAEMLLKMYSLGLQAYFVSLFNRFDCFVVCGGILETILVETKIMSPLGISVLRCVRLLRIFKITRYWNSLSNLVASLLNSVRSIASLLLLLFLFIIIFSLLGMQLFGGKFNFDEMQTRRSTFDNFPQSLLTVFQILTGEDWNSVMYDGIMAYGGPSFPGMLVCIYFIILFICGNYILLNVFLAIAVDNLADAESLTSAQKEEEEEKERKKLARTASPEKKQELVEKPAVGESKEEKIELKSITADGESPPATKINMDDLQPNENEDKSPYPNPETTGEEDEEEPEMPVGPRPRPLSELHLKEKAVPMPEASAFFIFSSNNRFRLQCHRIVNDTIFTNLILFFILLSSISLAAEDPVQHTSFRNHILFYFDIVFTTIFTIEIALKILGNADYVFTSIFTLEIILKMTAYGAFLHKGSFCRNYFNILDLLVVSVSLISFGIQSSAINVVKILRVLRVLRPLRAINRAKGLKHVVQCVFVAIRTIGNIVIVTTLLQFMFACIGVQLFKGKLYTCSDSSKQTEAECKGNYITYKDGEVDHPIIQPRSWENSKFDFDNVLAAMMALFTVSTFEGWPELLYRSIDSHTEDKGPIYNYRVEISIFFIIYIIIIAFFMMNIFVGFVIVTFQEQGEQEYKNCELDKNQRQCVEYALKARPLRRYIPKNQHQYKVWYVVNSTYFEYLMFVLILLNTICLAMQHYGQSCLFKIAMNILNMLFTGLFTVEMILKLIAFKPKGYFSDPWNVFDFLIVIGSIIDVILSETNHYFCDAWNTFDALIVVGSIVDIAITEVNPAEHTQCSPSMNAEENSRISITFFRLFRVMRLVKLLSRGEGIRTLLWTFIKSFQALPYVALLIVMLFFIYAVIGMQVFGKIALNDTTEINRNNNFQTFPQAVLLLFRCATGEAWQDIMLACMPGKKCAPESEPSNSTEGETPCGSSFAVFYFISFYMLCAFLIINLFVAVIMDNFDYLTRDWSILGPHHLDEFKRIWAEYDPEAKGRIKHLDVVTLLRRIQPPLGFGKLCPHRVACKRLVSMNMPLNSDGTVMFNATLFALVRTALRIKTEEGPSPSEAHQGAEDPFRPAGNLEQANEELRAIIKKIWKRTSMKLLDQVVPPAGDDEVTVGKFYATFLIQEYFRKFKKRKEQGLVGKPSQRNALSLQAGLRTLHDIGPEIRRAISGDLTAEEELDKAMKEAVSAASEDDIFRRAGGLFGNHVSYYQSDGRSAFPQTFTTQRPLHINKAGSSQGDTESPSHEKLVDSTFTPSSYSSTGSNANINNANNTALGRLPRPAGYPSTVSTVEGHGPPLSPAIRVQEVAWKLSSNRERHVPMCEDLELRRDSGSAGTQAHCLLLRKANPSRCHSRESQAAMAGQEETSQDETYEVKMNHDTEACSEPSLLSTEMLSYQDDENRQLTLPEEDKRDIRQSPKRGFLRSASLGRRASFHLECLKRQKDRGGDISQKTVLPLHLVHHQALAVAGLSPLLQRSHSPASFPRPFATPPATPGSRGWPPQPVPTLRLEGVESSEKLNSSFPSIHCGSWAETTPGGGGSSAARRVRPVSLMVPSQAGAPGRQFHGSASSLVEAVLISEGLGQFAQDPKFIEVTTQELADACDMTIEEMESAADNILSGGAPQSPNGALLPFVNCRDAGQDRAGGEEDAGCVRARGRPSEEELQDSRVYVSSL

SEQ ID NO: 20412 - protein, 2186 aa, Homo sapiens
MVNENTRMYIPEENHQGSNYGSPRPAHANMNANAAAGLAPEHIPTPGAALSWQAAIDAARQAKLMGSAGNATISTVSSTQRKRQQYGKPKKQGSTTATRPPRALLCLTLKNPIRRACISIVEWKPFEIIILLTIFANCVALAIYIPFPEDDSNATNSNLERVEYLFLIIFTVEAFLKVIAYGLLFHPNAYLRNGWNLLDFIIVVVGLFSAILEQATKADGANALGGKGAGFDVKALRAFRVLRPLRLVSGVPSLQVVLNSIIKAMVPLLHIALLVLFVIIIYAIIGLELFMGKMHKTCYNQEGIADVPAEDDPSPCALETGHGRQCQNGTVCKPGWDGPKHGITNFDNFAFAMLTVFQCITMEGWTDVLYWVNDAVGRDWPWIYFVTLIIIGSFFVLNLVLGVLSGEFSKEREKAKARGDFQKLREKQQLEEDLKGYLDWITQAEDIDPENEDEGMDEEKPRNMSMPTSETESVNTENVAGGDIEGENCGARLAHRISKSKFSRYWRRWNRFCRRKCRAAVKSNVFYWLVIFLVFLNTLTIASEHYNQPNWLTEVQDTANKALLALFTAEMLLKMYSLGLQAYFVSLFNRFDCFVVCGGILETILVETKIMSPLGISVLRCVRLLRIFKITRYWNSLSNLVASLLNSVRSIASLLLLLFLFIIIFSLLGMQLFGGKFNFDEMQTRRSTFDNFPQSLLTVFQILTGEDWNSVMYDGIMAYGGPSFPGMLVCIYFIILFICGNYILLNVFLAIAVDNLADAESLTSAQKEEEEEKERKKLARTASPEKKQELVEKPAVGESKEEKIELKSITADGESPPATKINMDDLQPNENEDKSPYPNPETTGEEDEEEPEMPVGPRPRPLSELHLKEKAVPMPEASAFFIFSSNNRFRLQCHRIVNDTIFTNLILFFILLSSISLAAEDPVQHTSFRNHILFYFDIVFTTIFTIEIALKILGNADYVFTSIFTLEIILKMTAYGAFLHKGSFCRNYFNILDLLVVSVSLISFGIQSSAINVVKILRVLRVLRPLRAINRAKGLKHVVQCVFVAIRTIGNIVIVTTLLQFMFACIGVQLFKGKLYTCSDSSKQTEAECKGNYITYKDGEVDHPIIQPRSWENSKFDFDNVLAAMMALFTVSTFEGWPELLYRSIDSHTEDKGPIYNYRVEISIFFIIYIIIIAFFMMNIFVGFVIVTFQEQGEQEYKNCELDKNQRQCVEYALKARPLRRYIPKNQHQYKVWYVVNSTYFEYLMFVLILLNTICLAMQHYGQSCLFKIAMNILNMLFTGLFTVEMILKLIAFKPKGYFSDPWNVFDFLIVIGSIIDVILSETNHYFCDAWNTFDALIVVGSIVDIAITEVNPAEHTQCSPSMNAEENSRISITFFRLFRVMRLVKLLSRGEGIRTLLWTFIKSFQALPYVALLIVMLFFIYAVIGMQVFGKIALNDTTEINRNNNFQTFPQAVLLLFRCATGEAWQDIMLACMPGKKCAPESEPSNSTEGETPCGSSFAVFYFISFYMLCAFLIINLFVAVIMDNFDYLTRDWSILGPHHLDEFKRIWAEYDPEAKGRIKHLDVVTLLRRIQPPLGFGKLCPHRVACKRLVSMNMPLNSDGTVMFNATLFALVRTALRIKTEGNLEQANEELRAIIKKIWKRTSMKLLDQVVPPAGDDEVTVGKFYATFLIQEYFRKFKKRKEQGLVGKPSQRNALSLQAGLRTLHDIGPEIRRAISGDLTAEEELDKAMKEAVSAASEDDIFRRAGGLFGNHVSYYQSDGRSAFPQTFTTQRPLHINKAGSSQGDTESPSHEKLVDSTFTPSSYSSTGSNANINNANNTALGRLPRPAGYPSTVSTVEGHGPPLSPAIRVQEVAWKLSSNRCHSRESQAAMAGQEETSQDETYEVKMNHDTEACSEPSLLSTEMLSYQDDENRQLTLPEEDKRDIRQSPKRGFLRSASLGRRASFHLECLKRQKDRGGDISQKTVLPLHLVHHQALAVAGLSPLLQRSHSPASFPRPFATPPATPGSRGWPPQPVPTLRLEGVESSEKLNSSFPSIHCGSWAETTPGGGGSSAARRVRPVSLMVPSQAGAPGRQFHGSASSLVEAVLISEGLGQFAQDPKFIEVTTQELADACDMTIEEMESAADNILSGGAPQSPNGALLPFVNCRDAGQDRAGGEEDAGCVRARGRPSEEELQDSRVYVSSL

SEQ ID NO: 20413 - protein, 2138 aa, Homo sapiens
MVNENTRMYIPEENHQGSNYGSPRPAHANMNANAAAGLAPEHIPTPGAALSWQAAIDAARQAKLMGSAGNATISTVSSTQRKRQQYGKPKKQGSTTATRPPRALLCLTLKNPIRRACISIVEWKPFEIIILLTIFANCVALAIYIPFPEDDSNATNSNLERVEYLFLIIFTVEAFLKVIAYGLLFHPNAYLRNGWNLLDFIIVVVGLFSAILEQATKADGANALGGKGAGFDVKALRAFRVLRPLRLVSGVPSLQVVLNSIIKAMVPLLHIALLVLFVIIIYAIIGLELFMGKMHKTCYNQEGIADVPAEDDPSPCALETGHGRQCQNGTVCKPGWDGPKHGITNFDNFAFAMLTVFQCITMEGWTDVLYWVNDAVGRDWPWIYFVTLIIIGSFFVLNLVLGVLSGEFSKEREKAKARGDFQKLREKQQLEEDLKGYLDWITQAEDIDPENEDEGMDEEKPRNMSMPTSETESVNTENVAGGDIEGENCGARLAHRISKSKFSRYWRRWNRFCRRKCRAAVKSNVFYWLVIFLVFLNTLTIASEHYNQPNWLTEVQDTANKALLALFTAEMLLKMYSLGLQAYFVSLFNRFDCFVVCGGILETILVETKIMSPLGISVLRCVRLLRIFKITRYWNSLSNLVASLLNSVRSIASLLLLLFLFIIIFSLLGMQLFGGKFNFDEMQTRRSTFDNFPQSLLTVFQILTGEDWNSVMYDGIMAYGGPSFPGMLVCIYFIILFICGNYILLNVFLAIAVDNLADAESLTSAQKEEEEEKERKKLARTASPEKKQELVEKPAVGESKEEKIELKSITADGESPPATKINMDDLQPNENEDKSPYPNPETTGEEDEEEPEMPVGPRPRPLSELHLKEKAVPMPEASAFFIFSSNNRFRLQCHRIVNDTIFTNLILFFILLSSISLAAEDPVQHTSFRNHILFYFDIVFTTIFTIEIALKMTAYGAFLHKGSFCRNYFNILDLLVVSVSLISFGIQSSAINVVKILRVLRVLRPLRAINRAKGLKHVVQCVFVAIRTIGNIVIVTTLLQFMFACIGVQLFKGKLYTCSDSSKQTEAECKGNYITYKDGEVDHPIIQPRSWENSKFDFDNVLAAMMALFTVSTFEGWPELLYRSIDSHTEDKGPIYNYRVEISIFFIIYIIIIAFFMMNIFVGFVIVTFQEQGEQEYKNCELDKNQRQCVEYALKARPLRRYIPKNQHQYKVWYVVNSTYFEYLMFVLILLNTICLAMQHYGQSCLFKIAMNILNMLFTGLFTVEMILKLIAFKPKHYFCDAWNTFDALIVVGSIVDIAITEVNPAEHTQCSPSMNAEENSRISITFFRLFRVMRLVKLLSRGEGIRTLLWTFIKSFQALPYVALLIVMLFFIYAVIGMQVFGKIALNDTTEINRNNNFQTFPQAVLLLFRCATGEAWQDIMLACMPGKKCAPESEPSNSTEGETPCGSSFAVFYFISFYMLCAFLIINLFVAVIMDNFDYLTRDWSILGPHHLDEFKRIWAEYDPEAKGRIKHLDVVTLLRRIQPPLGFGKLCPHRVACKRLVSMNMPLNSDGTVMFNATLFALVRTALRIKTEGNLEQANEELRAIIKKIWKRTSMKLLDQVVPPAGDDEVTVGKFYATFLIQEYFRKFKKRKEQGLVGKPSQRNALSLQAGLRTLHDIGPEIRRAISGDLTAEEELDKAMKEAVSAASEDDIFRRAGGLFGNHVSYYQSDGRSAFPQTFTTQRPLHINKAGSSQGDTESPSHEKLVDSTFTPSSYSSTGSNANINNANNTALGRLPRPAGYPSTVSTVEGHGPPLSPAIRVQEVAWKLSSNRCHSRESQAAMAGQEETSQDETYEVKMNHDTEACSEPSLLSTEMLSYQDDENRQLTLPEEDKRDIRQSPKRGFLRSASLGRRASFHLECLKRQKDRGGDISQKTVLPLHLVHHQALAVAGLSPLLQRSHSPASFPRPFATPPATPGSRGWPPQPVPTLRLEGVESSEKLNSSFPSIHCGSWAETTPGGGGSSAARRVRPVSLMVPSQAGAPGRQFHGSASSLVEAVLISEGLGQFAQDPKFIEVTTQELADACDMTIEEMESAADNILSGGAPQSPNGALLPFVNCRDAGQDRAGGEEDAGCVRARGRPSEEELQDSRVYVSSL

SEQ ID NO: 20414 - protein, 2157 aa, Homo sapiens
MVNENTRMYIPEENHQGSNYGSPRPAHANMNANAAAGLAPEHIPTPGAALSWQAAIDAARQAKLMGSAGNATISTVSSTQRKRQQYGKPKKQGSTTATRPPRALLCLTLKNPIRRACISIVEWKPFEIIILLTIFANCVALAIYIPFPEDDSNATNSNLERVEYLFLIIFTVEAFLKVIAYGLLFHPNAYLRNGWNLLDFIIVVVGLFSAILEQATKADGANALGGKGAGFDVKALRAFRVLRPLRLVSGVPSLQVVLNSIIKAMVPLLHIALLVLFVIIIYAIIGLELFMGKMHKTCYNQEGIADVPAEDDPSPCALETGHGRQCQNGTVCKPGWDGPKHGITNFDNFAFAMLTVFQCITMEGWTDVLYWVNDAVGRDWPWIYFVTLIIIGSFFVLNLVLGVLSGEFSKEREKAKARGDFQKLREKQQLEEDLKGYLDWITQAEDIDPENEDEGMDEEKPRNMSMPTSETESVNTENVAGGDIEGENCGARLAHRISKSKFSRYWRRWNRFCRRKCRAAVKSNVFYWLVIFLVFLNTLTIASEHYNQPNWLTEVQDTANKALLALFTAEMLLKMYSLGLQAYFVSLFNRFDCFVVCGGILETILVETKIMSPLGISVLRCVRLLRIFKITRYWNSLSNLVASLLNSVRSIASLLLLLFLFIIIFSLLGMQLFGGKFNFDEMQTRRSTFDNFPQSLLTVFQILTGEDWNSVMYDGIMAYGGPSFPGMLVCIYFIILFICGNYILLNVFLAIAVDNLADAESLTSAQKEEEEEKERKKLARTASPEKKQELVEKPAVGESKEEKIELKSITADGESPPATKINMDDLQPNENEDKSPYPNPETTGEEDEEEPEMPVGPRPRPLSELHLKEKAVPMPEASAFFIFSSNNRFRLQCHRIVNDTIFTNLILFFILLSSISLAAEDPVQHTSFRNHILFYFDIVFTTIFTIEIALKMTAYGAFLHKGSFCRNYFNILDLLVVSVSLISFGIQSSAINVVKILRVLRVLRPLRAINRAKGLKHVVQCVFVAIRTIGNIVIVTTLLQFMFACIGVQLFKGKLYTCSDSSKQTEAECKGNYITYKDGEVDHPIIQPRSWENSKFDFDNVLAAMMALFTVSTFEGWPELLYRSIDSHTEDKGPIYNYRVEISIFFIIYIIIIAFFMMNIFVGFVIVTFQEQGEQEYKNCELDKNQRQCVEYALKARPLRRYIPKNQHQYKVWYVVNSTYFEYLMFVLILLNTICLAMQHYGQSCLFKIAMNILNMLFTGLFTVEMILKLIAFKPKGYFSDPWNVFDFLIVIGSIIDVILSETNPAEHTQCSPSMNAEENSRISITFFRLFRVMRLVKLLSRGEGIRTLLWTFIKSFQALPYVALLIVMLFFIYAVIGMQVFGKIALNDTTEINRNNNFQTFPQAVLLLFRCATGEAWQDIMLACMPGKKCAPESEPSNSTEGETPCGSSFAVFYFISFYMLCAFLIINLFVAVIMDNFDYLTRDWSILGPHHLDEFKRIWAEYDPEAKGRIKHLDVVTLLRRIQPPLGFGKLCPHRVACKRLVSMNMPLNSDGTVMFNATLFALVRTALRIKTEEGPSPSEAHQGAEDPFRPAGNLEQANEELRAIIKKIWKRTSMKLLDQVVPPAGDDEVTVGKFYATFLIQEYFRKFKKRKEQGLVGKPSQRNALSLQAGLRTLHDIGPEIRRAISGDLTAEEELDKAMKEAVSAASEDDIFRRAGGLFGNHVSYYQSDGRSAFPQTFTTQRPLHINKAGSSQGDTESPSHEKLVDSTFTPSSYSSTGSNANINNANNTALGRLPRPAGYPSTVSTVEGHGPPLSPAIRVQEVAWKLSSNRCHSRESQAAMAGQEETSQDETYEVKMNHDTEACSEPSLLSTEMLSYQDDENRQLTLPEEDKRDIRQSPKRGFLRSASLGRRASFHLECLKRQKDRGGDISQKTVLPLHLVHHQALAVAGLSPLLQRSHSPASFPRPFATPPATPGSRGWPPQPVPTLRLEGVESSEKLNSSFPSIHCGSWAETTPGGGGSSAARRVRPVSLMVPSQAGAPGRQFHGSASSLVEAVLISEGLGQFAQDPKFIEVTTQELADACDMTIEEMESAADNILSGGAPQSPNGALLPFVNCRDAGQDRAGGEEDAGCVRARGRPSEEELQDSRVYVSSL

SEQ ID NO: 20415 - protein, 2179 aa, Homo sapiens
MVNENTRMYIPEENHQGSNYGSPRPAHANMNANAAAGLAPEHIPTPGAALSWQAAIDAARQAKLMGSAGNATISTVSSTQRKRQQYGKPKKQGSTTATRPPRALLCLTLKNPIRRACISIVEWKPFEIIILLTIFANCVALAIYIPFPEDDSNATNSNLERVEYLFLIIFTVEAFLKVIAYGLLFHPNAYLRNGWNLLDFIIVVVGLFSAILEQATKADGANALGGKGAGFDVKALRAFRVLRPLRLVSGVPSLQVVLNSIIKAMVPLLHIALLVLFVIIIYAIIGLELFMGKMHKTCYNQEGIADVPAEDDPSPCALETGHGRQCQNGTVCKPGWDGPKHGITNFDNFAFAMLTVFQCITMEGWTDVLYWVNDAVGRDWPWIYFVTLIIIGSFFVLNLVLGVLSGEFSKEREKAKARGDFQKLREKQQLEEDLKGYLDWITQAEDIDPENEDEGMDEEKPRNMSMPTSETESVNTENVAGGDIEGENCGARLAHRISKSKFSRYWRRWNRFCRRKCRAAVKSNVFYWLVIFLVFLNTLTIASEHYNQPNWLTEVQDTANKALLALFTAEMLLKMYSLGLQAYFVSLFNRFDCFVVCGGILETILVETKIMSPLGISVLRCVRLLRIFKITRYWNSLSNLVASLLNSVRSIASLLLLLFLFIIIFSLLGMQLFGGKFNFDEMQTRRSTFDNFPQSLLTVFQILTGEDWNSVMYDGIMAYGGPSFPGMLVCIYFIILFICGNYILLNVFLAIAVDNLADAESLTSAQKEEEEEKERKKLARTASPEKKQELVEKPAVGESKEEKIELKSITADGESPPATKINMDDLQPNENEDKSPYPNPETTGEEDEEEPEMPVGPRPRPLSELHLKEKAVPMPEASAFFIFSSNNRFRLQCHRIVNDTIFTNLILFFILLSSISLAAEDPVQHTSFRNHILFYFDIVFTTIFTIEIALKMTAYGAFLHKGSFCRNYFNILDLLVVSVSLISFGIQSSAINVVKILRVLRVLRPLRAINRAKGLKHVVQCVFVAIRTIGNIVIVTTLLQFMFACIGVQLFKGKLYTCSDSSKQTEAECKGNYITYKDGEVDHPIIQPRSWENSKFDFDNVLAAMMALFTVSTFEGWPELLYRSIDSHTEDKGPIYNYRVEISIFFIIYIIIIAFFMMNIFVGFVIVTFQEQGEQEYKNCELDKNQRQCVEYALKARPLRRYIPKNQHQYKVWYVVNSTYFEYLMFVLILLNTICLAMQHYGQSCLFKIAMNILNMLFTGLFTVEMILKLIAFKPKHYFCDAWNTFDALIVVGSIVDIAITEVNPAEHTQCSPSMGPSCSHPPLAVLTAPPVADGFQNAEENSRISITFFRLFRVMRLVKLLSRGEGIRTLLWTFIKSFQALPYVALLIVMLFFIYAVIGMQVFGKIALNDTTEINRNNNFQTFPQAVLLLFRCATGEAWQDIMLACMPGKKCAPESEPSNSTEGETPCGSSFAVFYFISFYMLCAFLIINLFVAVIMDNFDYLTRDWSILGPHHLDEFKRIWAEYDPEAKGRIKHLDVVTLLRRIQPPLGFGKLCPHRVACKRLVSMNMPLNSDGTVMFNATLFALVRTALRIKTEEGPSPSEAHQGAEDPFRPAGNLEQANEELRAIIKKIWKRTSMKLLDQVVPPAGDDEVTVGKFYATFLIQEYFRKFKKRKEQGLVGKPSQRNALSLQAGLRTLHDIGPEIRRAISGDLTAEEELDKAMKEAVSAASEDDIFRRAGGLFGNHVSYYQSDGRSAFPQTFTTQRPLHINKAGSSQGDTESPSHEKLVDSTFTPSSYSSTGSNANINNANNTALGRLPRPAGYPSTVSTVEGHGPPLSPAIRVQEVAWKLSSNRCHSRESQAAMAGQEETSQDETYEVKMNHDTEACSEPSLLSTEMLSYQDDENRQLTLPEEDKRDIRQSPKRGFLRSASLGRRASFHLECLKRQKDRGGDISQKTVLPLHLVHHQALAVAGLSPLLQRSHSPASFPRPFATPPATPGSRGWPPQPVPTLRLEGVESSEKLNSSFPSIHCGSWAETTPGGGGSSAARRVRPVSLMVPSQAGAPGRQFHGSASSLVEAVLISEGLGQFAQDPKFIEVTTQELADACDMTIEEMESAADNILSGGAPQSPNGALLPFVNCRDAGQDRAGGEEDAGCVRARGRPSEEELQDSRVYVSSL

SEQ ID NO: 20416 - protein, 2144 aa, Homo sapiens
MVNENTRMYIPEENHQGSNYGSPRPAHANMNANAAAGLAPEHIPTPGAALSWQAAIDAARQAKLMGSAGNATISTVSSTQRKRQQYGKPKKQGSTTATRPPRALLCLTLKNPIRRACISIVEWKPFEIIILLTIFANCVALAIYIPFPEDDSNATNSNLERVEYLFLIIFTVEAFLKVIAYGLLFHPNAYLRNGWNLLDFIIVVVGLFSAILEQATKADGANALGGKGAGFDVKALRAFRVLRPLRLVSGVPSLQVVLNSIIKAMVPLLHIALLVLFVIIIYAIIGLELFMGKMHKTCYNQEGIADVPAEDDPSPCALETGHGRQCQNGTVCKPGWDGPKHGITNFDNFAFAMLTVFQCITMEGWTDVLYWVNDAVGRDWPWIYFVTLIIIGSFFVLNLVLGVLSGEFSKEREKAKARGDFQKLREKQQLEEDLKGYLDWITQAEDIDPENEDEGMDEEKPRNMSMPTSETESVNTENVAGGDIEGENCGARLAHRISKSKFSRYWRRWNRFCRRKCRAAVKSNVFYWLVIFLVFLNTLTIASEHYNQPNWLTEVQDTANKALLALFTAEMLLKMYSLGLQAYFVSLFNRFDCFVVCGGILETILVETKIMSPLGISVLRCVRLLRIFKITRYWNSLSNLVASLLNSVRSIASLLLLLFLFIIIFSLLGMQLFGGKFNFDEMQTRRSTFDNFPQSLLTVFQILTGEDWNSVMYDGIMAYGGPSFPGMLVCIYFIILFICGNYILLNVFLAIAVDNLADAESLTSAQKEEEEEKERKKLARTASPEKKQELVEKPAVGESKEEKIELKSITADGESPPATKINMDDLQPNENEDKSPYPNPETTGEEDEEEPEMPVGPRPRPLSELHLKEKAVPMPEASAFFIFSSNNRFRLQCHRIVNDTIFTNLILFFILLSSISLAAEDPVQHTSFRNHILFYFDIVFTTIFTIEIALKMTAYGAFLHKGSFCRNYFNILDLLVVSVSLISFGIQSSAINVVKILRVLRVLRPLRAINRAKGLKHVVQCVFVAIRTIGNIVIVTTLLQFMFACIGVQLFKGKLYTCSDSSKQTEAECKGNYITYKDGEVDHPIIQPRSWENSKFDFDNVLAAMMALFTVSTFEGWPELLYRSIDSHTEDKGPIYNYRVEISIFFIIYIIIIAFFMMNIFVGFVIVTFQEQGEQEYKNCELDKNQRQCVEYALKARPLRRYIPKNQHQYKVWYVVNSTYFEYLMFVLILLNTICLAMQHYGQSCLFKIAMNILNMLFTGLFTVEMILKLIAFKPKHYFCDAWNTFDALIVVGSIVDIAITENAEENSRISITFFRLFRVMRLVKLLSRGEGIRTLLWTFIKSFQALPYVALLIVMLFFIYAVIGMQVFGKIALNDTTEINRNNNFQTFPQAVLLLFRCATGEAWQDIMLACMPGKKCAPESEPSNSTEGETPCGSSFAVFYFISFYMLCAFLIINLFVAVIMDNFDYLTRDWSILGPHHLDEFKRIWAEYDPEAKGRIKHLDVVTLLRRIQPPLGFGKLCPHRVACKRLVSMNMPLNSDGTVMFNATLFALVRTALRIKTEEGPSPSEAHQGAEDPFRPAGNLEQANEELRAIIKKIWKRTSMKLLDQVVPPAGDDEVTVGKFYATFLIQEYFRKFKKRKEQGLVGKPSQRNALSLQAGLRTLHDIGPEIRRAISGDLTAEEELDKAMKEAVSAASEDDIFRRAGGLFGNHVSYYQSDGRSAFPQTFTTQRPLHINKAGSSQGDTESPSHEKLVDSTFTPSSYSSTGSNANINNANNTALGRLPRPAGYPSTVSTVEGHGPPLSPAIRVQEVAWKLSSNRCHSRESQAAMAGQEETSQDETYEVKMNHDTEACSEPSLLSTEMLSYQDDENRQLTLPEEDKRDIRQSPKRGFLRSASLGRRASFHLECLKRQKDRGGDISQKTVLPLHLVHHQALAVAGLSPLLQRSHSPASFPRPFATPPATPGSRGWPPQPVPTLRLEGVESSEKLNSSFPSIHCGSWAETTPGGGGSSAARRVRPVSLMVPSQAGAPGRQFHGSASSLVEAVLISEGLGQFAQDPKFIEVTTQELADACDMTIEEMESAADNILSGGAPQSPNGALLPFVNCRDAGQDRAGGEEDAGCVRARGRPSEEELQDSRVYVSSL

SEQ ID NO: 20417 - protein, 2144 aa, Homo sapiens
MNANAAAGLAPEHIPTPGAALSWQAAIDAARQAKLMGSAGNATISTVSSTQRKRQQYGKPKKQGSTTATRPPRALLCLTLKNPIRRACISIVEWKPFEIIILLTIFANCVALAIYIPFPEDDSNATNSNLERVEYLFLIIFTVEAFLKVIAYGLLFHPNAYLRNGWNLLDFIIVVVGLFSAILEQATKADGANALGGKGAGFDVKALRAFRVLRPLRLVSGVPSLQVVLNSIIKAMVPLLHIALLVLFVIIIYAIIGLELFMGKMHKTCYNQEGIADVPAEDDPSPCALETGHGRQCQNGTVCKPGWDGPKHGITNFDNFAFAMLTVFQCITMEGWTDVLYWMQDAMGYELPWVYFVSLVIFGSFFVLNLVLGVLSGEFSKEREKAKARGDFQKLREKQQLEEDLKGYLDWITQAEDIDPENEDEGMDEEKPRNMSMPTSETESVNTENVAGGDIEGENCGARLAHRISKSKFSRYWRRWNRFCRRKCRAAVKSNVFYWLVIFLVFLNTLTIASEHYNQPNWLTEVQDTANKALLALFTAEMLLKMYSLGLQAYFVSLFNRFDCFVVCGGILETILVETKIMSPLGISVLRCVRLLRIFKITRYWNSLSNLVASLLNSVRSIASLLLLLFLFIIIFSLLGMQLFGGKFNFDEMQTRRSTFDNFPQSLLTVFQILTGEDWNSVMYDGIMAYGGPSFPGMLVCIYFIILFICGNYILLNVFLAIAVDNLADAESLTSAQKEEEEEKERKKLARTASPEKKQELVEKPAVGESKEEKIELKSITADGESPPATKINMDDLQPNENEDKSPYPNPETTGEEDEEEPEMPVGPRPRPLSELHLKEKAVPMPEASAFFIFSSNNRFRLQCHRIVNDTIFTNLILFFILLSSISLAAEDPVQHTSFRNHILFYFDIVFTTIFTIEIALKMTAYGAFLHKGSFCRNYFNILDLLVVSVSLISFGIQSSAINVVKILRVLRVLRPLRAINRAKGLKHVVQCVFVAIRTIGNIVIVTTLLQFMFACIGVQLFKGKLYTCSDSSKQTEAECKGNYITYKDGEVDHPIIQPRSWENSKFDFDNVLAAMMALFTVSTFEGWPELLYRSIDSHTEDKGPIYNYRVEISIFFIIYIIIIAFFMMNIFVGFVIVTFQEQGEQEYKNCELDKNQRQCVEYALKARPLRRYIPKNQHQYKVWYVVNSTYFEYLMFVLILLNTICLAMQHYGQSCLFKIAMNILNMLFTGLFTVEMILKLIAFKPKGYFSDPWNVFDFLIVIGSIIDVILSETNPAEHTQCSPSMNAEENSRISITFFRLFRVMRLVKLLSRGEGIRTLLWTFIKSFQALPYVALLIVMLFFIYAVIGMQVFGKIALNDTTEINRNNNFQTFPQAVLLLFRCATGEAWQDIMLACMPGKKCAPESEPSNSTEGETPCGSSFAVFYFISFYMLCAFLIINLFVAVIMDNFDYLTRDWSILGPHHLDEFKRIWAEYDPEAKGRIKHLDVVTLLRRIQPPLGFGKLCPHRVACKRLVSMNMPLNSDGTVMFNATLFALVRTALRIKTEGNLEQANEELRAIIKKIWKRTSMKLLDQVVPPAGDDEVTVGKFYATFLIQEYFRKFKKRKEQGLVGKPSQRNALSLQAGLRTLHDIGPEIRRAISGDLTAEEELDKAMKEAVSAASEDDIFRRAGGLFGNHVSYYQSDGRSAFPQTFTTQRPLHINKAGSSQGDTESPSHEKLVDSTFTPSSYSSTGSNANINNANNTALGRLPRPAGYPSTVSTVEGHGPPLSPAIRVQEVAWKLSSNRERHVPMCEDLELRRDSGSAGTQAHCLLLRKANPSRCHSRESQAAMAGQEETSQDETYEVKMNHDTEACSEPSLLSTEMLSYQDDENRQLTLPEEDKRDIRQSPKRGFLRSASLGRRASFHLECLKRQKDRGGDISQKTVLPLHLVHHQALAVAGLSPLLQRSHSPASFPRPFATPPATPGSRGWPPQPVPTLRLEGVESSEKLNSSFPSIHCGSWAETTPGGGGSSAARRVRPVSLMVPSQAGAPGRQFHGSASSLVEAVLISEGLGQFAQDPKFIEVTTQELADACDMTIEEMESAADNILSGGAPQSPNGALLPFVNCRDAGQDRAGGEEDAGCVRARGRPSEEELQDSRVYVSSL

SEQ ID NO: 20418 - protein, 2109 aa, Homo sapiens
MNANAAAGLAPEHIPTPGAALSWQAAIDAARQAKLMGSAGNATISTVSSTQRKRQQYGKPKKQGSTTATRPPRALLCLTLKNPIRRACISIVEWKPFEIIILLTIFANCVALAIYIPFPEDDSNATNSNLERVEYLFLIIFTVEAFLKVIAYGLLFHPNAYLRNGWNLLDFIIVVVGLFSAILEQATKADGANALGGKGAGFDVKALRAFRVLRPLRLVSGVPSLQVVLNSIIKAMVPLLHIALLVLFVIIIYAIIGLELFMGKMHKTCYNQEGIADVPAEDDPSPCALETGHGRQCQNGTVCKPGWDGPKHGITNFDNFAFAMLTVFQCITMEGWTDVLYWMQDAMGYELPWVYFVSLVIFGSFFVLNLVLGVLSGEFSKEREKAKARGDFQKLREKQQLEEDLKGYLDWITQAEDIDPENEDEGMDEEKPRNMSMPTSETESVNTENVAGGDIEGENCGARLAHRISKSKFSRYWRRWNRFCRRKCRAAVKSNVFYWLVIFLVFLNTLTIASEHYNQPNWLTEVQDTANKALLALFTAEMLLKMYSLGLQAYFVSLFNRFDCFVVCGGILETILVETKIMSPLGISVLRCVRLLRIFKITRYWNSLSNLVASLLNSVRSIASLLLLLFLFIIIFSLLGMQLFGGKFNFDEMQTRRSTFDNFPQSLLTVFQILTGEDWNSVMYDGIMAYGGPSFPGMLVCIYFIILFICGNYILLNVFLAIAVDNLADAESLTSAQKEEEEEKERKKLARTASPEKKQELVEKPAVGESKEEKIELKSITADGESPPATKINMDDLQPNENEDKSPYPNPETTGEEDEEEPEMPVGPRPRPLSELHLKEKAVPMPEASAFFIFSSNNRFRLQCHRIVNDTIFTNLILFFILLSSISLAAEDPVQHTSFRNHILFYFDIVFTTIFTIEIALKMTAYGAFLHKGSFCRNYFNILDLLVVSVSLISFGIQSSAINVVKILRVLRVLRPLRAINRAKGLKHVVQCVFVAIRTIGNIVIVTTLLQFMFACIGVQLFKGKLYTCSDSSKQTEAECKGNYITYKDGEVDHPIIQPRSWENSKFDFDNVLAAMMALFTVSTFEGWPELLYRSIDSHTEDKGPIYNYRVEISIFFIIYIIIIAFFMMNIFVGFVIVTFQEQGEQEYKNCELDKNQRQCVEYALKARPLRRYIPKNQHQYKVWYVVNSTYFEYLMFVLILLNTICLAMQHYGQSCLFKIAMNILNMLFTGLFTVEMILKLIAFKPKGYFSDPWNVFDFLIVIGSIIDVILSETNPAEHTQCSPSMNAEENSRISITFFRLFRVMRLVKLLSRGEGIRTLLWTFIKSFQALPYVALLIVMLFFIYAVIGMQVFGKIALNDTTEINRNNNFQTFPQAVLLLFRCATGEAWQDIMLACMPGKKCAPESEPSNSTEGETPCGSSFAVFYFISFYMLCAFLIINLFVAVIMDNFDYLTRDWSILGPHHLDEFKRIWAEYDPEAKGRIKHLDVVTLLRRIQPPLGFGKLCPHRVACKRLVSMNMPLNSDGTVMFNATLFALVRTALRIKTEGNLEQANEELRAIIKKIWKRTSMKLLDQVVPPAGDDEVTVGKFYATFLIQEYFRKFKKRKEQGLVGKPSQRNALSLQAGLRTLHDIGPEIRRAISGDLTAEEELDKAMKEAVSAASEDDIFRRAGGLFGNHVSYYQSDGRSAFPQTFTTQRPLHINKAGSSQGDTESPSHEKLVDSTFTPSSYSSTGSNANINNANNTALGRLPRPAGYPSTVSTVEGHGPPLSPAIRVQEVAWKLSSNRCHSRESQAAMAGQEETSQDETYEVKMNHDTEACSEPSLLSTEMLSYQDDENRQLTLPEEDKRDIRQSPKRGFLRSASLGRRASFHLECLKRQKDRGGDISQKTVLPLHLVHHQALAVAGLSPLLQRSHSPASFPRPFATPPATPGSRGWPPQPVPTLRLEGVESSEKLNSSFPSIHCGSWAETTPGGGGSSAARRVRPVSLMVPSQAGAPGRQFHGSASSLVEAVLISEGLGQFAQDPKFIEVTTQELADACDMTIEEMESAADNILSGGAPQSPNGALLPFVNCRDAGQDRAGGEEDAGCVRARGRPSEEELQDSRVYVSSL

SEQ ID NO: 20419 - protein, 2180 aa, Homo sapiens
MNANAAAGLAPEHIPTPGAALSWQAAIDAARQAKLMGSAGNATISTVSSTQRKRQQYGKPKKQGSTTATRPPRALLCLTLKNPIRRACISIVEWKPFEIIILLTIFANCVALAIYIPFPEDDSNATNSNLERVEYLFLIIFTVEAFLKVIAYGLLFHPNAYLRNGWNLLDFIIVVVGLFSAILEQATKADGANALGGKGAGFDVKALRAFRVLRPLRLVSGVPSLQVVLNSIIKAMVPLLHIALLVLFVIIIYAIIGLELFMGKMHKTCYNQEGIADVPAEDDPSPCALETGHGRQCQNGTVCKPGWDGPKHGITNFDNFAFAMLTVFQCITMEGWTDVLYWMQDAMGYELPWVYFVSLVIFGSFFVLNLVLGVLSGEFSKEREKAKARGDFQKLREKQQLEEDLKGYLDWITQAEDIDPENEDEGMDEEKPRNMSMPTSETESVNTENVAGGDIEGENCGARLAHRISKSKFSRYWRRWNRFCRRKCRAAVKSNVFYWLVIFLVFLNTLTIASEHYNQPNWLTEVQDTANKALLALFTAEMLLKMYSLGLQAYFVSLFNRFDCFVVCGGILETILVETKIMSPLGISVLRCVRLLRIFKITRYWNSLSNLVASLLNSVRSIASLLLLLFLFIIIFSLLGMQLFGGKFNFDEMQTRRSTFDNFPQSLLTVFQILTGEDWNSVMYDGIMAYGGPSFPGMLVCIYFIILFICGNYILLNVFLAIAVDNLADAESLTSAQKEEEEEKERKKLARTASPEKKQELVEKPAVGESKEEKIELKSITADGESPPATKINMDDLQPNENEDKSPYPNPETTGEEDEEEPEMPVGPRPRPLSELHLKEKAVPMPEASAFFIFSSNNRFRLQCHRIVNDTIFTNLILFFILLSSISLAAEDPVQHTSFRNHILFYFDIVFTTIFTIEIALKMTAYGAFLHKGSFCRNYFNILDLLVVSVSLISFGIQSSAINVVKILRVLRVLRPLRAINRAKGLKHVVQCVFVAIRTIGNIVIVTTLLQFMFACIGVQLFKGKLYTCSDSSKQTEAECKGNYITYKDGEVDHPIIQPRSWENSKFDFDNVLAAMMALFTVSTFEGWPELLYRSIDSHTEDKGPIYNYRVEISIFFIIYIIIIAFFMMNIFVGFVIVTFQEQGEQEYKNCELDKNQRQCVEYALKARPLRRYIPKNQHQYKVWYVVNSTYFEYLMFVLILLNTICLAMQHYGQSCLFKIAMNILNMLFTGLFTVEMILKLIAFKPKGYFSDPWNVFDFLIVIGSIIDVILSETNPAEHTQCSPSMNAEENSRISITFFRLFRVMRLVKLLSRGEGIRTLLWTFIKSFQALPYVALLIVMLFFIYAVIGMQVFGKIALNDTTEINRNNNFQTFPQAVLLLFRCATGEAWQDIMLACMPGKKCAPESEPSNSTEGETPCGSSFAVFYFISFYMLCAFLIINLFVAVIMDNFDYLTRDWSILGPHHLDEFKRIWAEYDPEAKGRIKHLDVVTLLRRIQPPLGFGKLCPHRVACKRLVSMNMPLNSDGTVMFNATLFALVRTALRIKTEGNLEQANEELRAIIKKIWKRTSMKLLDQVVPPAGDDEVTVGKFYATFLIQEYFRKFKKRKEQGLVGKPSQRNALSLQAGLRTLHDIGPEIRRAISGDLTAEEELDKAMKEAVSAASEDDIFRRAGGLFGNHVSYYQSDGRSAFPQTFTTQRPLHINKAGSSQGDTESPSHEKLVDSTFTPSSYSSTGSNANINNANNTALGRLPRPAGYPSTVSTVEGHGPPLSPAIRVQEVAWKLSSNRMHCCDMLDGGTFPPALGPRRAPPCLHQQLQGSLAGLREDTPCIVPGHASLCCSSRVGEWLPAGCTAPQHARCHSRESQAAMAGQEETSQDETYEVKMNHDTEACSEPSLLSTEMLSYQDDENRQLTLPEEDKRDIRQSPKRGFLRSASLGRRASFHLECLKRQKDRGGDISQKTVLPLHLVHHQALAVAGLSPLLQRSHSPASFPRPFATPPATPGSRGWPPQPVPTLRLEGVESSEKLNSSFPSIHCGSWAETTPGGGGSSAARRVRPVSLMVPSQAGAPGRQFHGSASSLVEAVLISEGLGQFAQDPKFIEVTTQELADACDMTIEEMESAADNILSGGAPQSPNGALLPFVNCRDAGQDRAGGEEDAGCVRARGRPSEEELQDSRVYVSSL

SEQ ID NO: 20420 - protein, 2127 aa, Homo sapiens
MVNENTRMYIPEENHQGSNYGSPRPAHANMNANAAAGLAPEHIPTPGAALSWQAAIDAARQAKLMGSAGNATISTVSSTQRKRQQYGKPKKQGSTTATRPPRALLCLTLKNPIRRACISIVEWKPFEIIILLTIFANCVALAIYIPFPEDDSNATNSNLERVEYLFLIIFTVEAFLKVIAYGLLFHPNAYLRNGWNLLDFIIVVVGLFSAILEQATKADGANALGGKGAGFDVKALRAFRVLRPLRLVSGVPSLQVVLNSIIKAMVPLLHIALLVLFVIIIYAIIGLELFMGKMHKTCYNQEGIADVPAEDDPSPCALETGHGRQCQNGTVCKPGWDGPKHGITNFDNFAFAMLTVFQCITMEGWTDVLYWVNDAVGRDWPWIYFVTLIIIGSFFVLNLVLGVLSGEFSKEREKAKARGDFQKLREKQQLEEDLKGYLDWITQAEDIDPENEDEGMDEEKPRNMSMPTSETESVNTENVAGGDIEGENCGARLAHRISKSKFSRYWRRWNRFCRRKCRAAVKSNVFYWLVIFLVFLNTLTIASEHYNQPNWLTEVQDTANKALLALFTAEMLLKMYSLGLQAYFVSLFNRFDCFVVCGGILETILVETKIMSPLGISVLRCVRLLRIFKITRYWNSLSNLVASLLNSVRSIASLLLLLFLFIIIFSLLGMQLFGGKFNFDEMQTRRSTFDNFPQSLLTVFQILTGEDWNSVMYDGIMAYGGPSFPGMLVCIYFIILFICGNYILLNVFLAIAVDNLADAESLTSAQKEEEEEKERKKLARTASPEKKQELVEKPAVGESKEEKIELKSITADGESPPATKINMDDLQPNENEDKSPYPNPETTGEEDEEEPEMPVGPRPRPLSELHLKEKAVPMPEASAFFIFSSNNRFRLQCHRIVNDTIFTNLILFFILLSSISLAAEDPVQHTSFRNHILGNADYVFTSIFTLEIILKMTAYGAFLHKGSFCRNYFNILDLLVVSVSLISFGIQSSAINVVKILRVLRVLRPLRAINRAKGLKHVVQCVFVAIRTIGNIVIVTTLLQFMFACIGVQLFKGKLYTCSDSSKQTEAECKGNYITYKDGEVDHPIIQPRSWENSKFDFDNVLAAMMALFTVSTFEGWPELLYRSIDSHTEDKGPIYNYRVEISIFFIIYIIIIAFFMMNIFVGFVIVTFQEQGEQEYKNCELDKNQRQCVEYALKARPLRRYIPKNQHQYKVWYVVNSTYFEYLMFVLILLNTICLAMQHYGQSCLFKIAMNILNMLFTGLFTVEMILKLIAFKPKHYFCDAWNTFDALIVVGSIVDIAITEVNNAEENSRISITFFRLFRVMRLVKLLSRGEGIRTLLWTFIKSFQALPYVALLIVMLFFIYAVIGMQVFGKIALNDTTEINRNNNFQTFPQAVLLLFRCATGEAWQDIMLACMPGKKCAPESEPSNSTEGETPCGSSFAVFYFISFYMLCAFLIINLFVAVIMDNFDYLTRDWSILGPHHLDEFKRIWAEYDPEAKGRIKHLDVVTLLRRIQPPLGFGKLCPHRVACKRLVSMNMPLNSDGTVMFNATLFALVRTALRIKTEGNLEQANEELRAIIKKIWKRTSMKLLDQVVPPAGDDEVTVGKFYATFLIQEYFRKFKKRKEQGLVGKPSQRNALSLQAGLRTLHDIGPEIRRAISGDLTAEEELDKAMKEAVSAASEDDIFRRAGGLFGNHVSYYQSDGRSAFPQTFTTQRPLHINKAGSSQGDTESPSHEKLVDSTFTPSSYSSTGSNANINNANNTALGRLPRPAGYPSTVSTVEGHGPPLSPAIRVQEVAWKLSSNRCHSRESQAAMAGQEETSQDETYEVKMNHDTEACSEPSLLSTEMLSYQDDENRQLTLPEEDKRDIRQSPKRGFLRSASLGRRASFHLECLKRQKDRGGDISQKTVLPLHLVHHQALAVAGLSPLLQRSHSPASFPRPFATPPATPGSRGWPPQPVPTLRLEGVESSEKLNSSFPSIHCGSWAETTPGGGGSSAARRVRPVSLMVPSQAGAPGRQFHGSASSLVEAVLISEGLGQFAQDPKFIEVTTQELADACDMTIEEMESAADNILSGGAPQSPNGALLPFVNCRDAGQDRAGGEEDAGCVRARGRPSEEELQDSRVYVSSL

SEQ ID NO: 20421 - protein, 2138 aa, Homo sapiens
MVNENTRMYIPEENHQGSNYGSPRPAHANMNANAAAGLAPEHIPTPGAALSWQAAIDAARQAKLMGSAGNATISTVSSTQRKRQQYGKPKKQGSTTATRPPRALLCLTLKNPIRRACISIVEWKPFEIIILLTIFANCVALAIYIPFPEDDSNATNSNLERVEYLFLIIFTVEAFLKVIAYGLLFHPNAYLRNGWNLLDFIIVVVGLFSAILEQATKADGANALGGKGAGFDVKALRAFRVLRPLRLVSGVPSLQVVLNSIIKAMVPLLHIALLVLFVIIIYAIIGLELFMGKMHKTCYNQEGIADVPAEDDPSPCALETGHGRQCQNGTVCKPGWDGPKHGITNFDNFAFAMLTVFQCITMEGWTDVLYWVNDAVGRDWPWIYFVTLIIIGSFFVLNLVLGVLSGEFSKEREKAKARGDFQKLREKQQLEEDLKGYLDWITQAEDIDPENEDEGMDEEKPRNMSMPTSETESVNTENVAGGDIEGENCGARLAHRISKSKFSRYWRRWNRFCRRKCRAAVKSNVFYWLVIFLVFLNTLTIASEHYNQPNWLTEVQDTANKALLALFTAEMLLKMYSLGLQAYFVSLFNRFDCFVVCGGILETILVETKIMSPLGISVLRCVRLLRIFKITRYWNSLSNLVASLLNSVRSIASLLLLLFLFIIIFSLLGMQLFGGKFNFDEMQTRRSTFDNFPQSLLTVFQILTGEDWNSVMYDGIMAYGGPSFPGMLVCIYFIILFICGNYILLNVFLAIAVDNLADAESLTSAQKEEEEEKERKKLARTASPEKKQELVEKPAVGESKEEKIELKSITADGESPPATKINMDDLQPNENEDKSPYPNPETTGEEDEEEPEMPVGPRPRPLSELHLKEKAVPMPEASAFFIFSSNNRFRLQCHRIVNDTIFTNLILFFILLSSISLAAEDPVQHTSFRNHILGNADYVFTSIFTLEIILKMTAYGAFLHKGSFCRNYFNILDLLVVSVSLISFGIQSSAINVVKILRVLRVLRPLRAINRAKGLKHVVQCVFVAIRTIGNIVIVTTLLQFMFACIGVQLFKGKLYTCSDSSKQTEAECKGNYITYKDGEVDHPIIQPRSWENSKFDFDNVLAAMMALFTVSTFEGWPELLYRSIDSHTEDKGPIYNYRVEISIFFIIYIIIIAFFMMNIFVGFVIVTFQEQGEQEYKNCELDKNQRQCVEYALKARPLRRYIPKNQHQYKVWYVVNSTYFEYLMFVLILLNTICLAMQHYGQSCLFKIAMNILNMLFTGLFTVEMILKLIAFKPKHYFCDAWNTFDALIVVGSIVDIAITEVNPAEHTQCSPSMNAEENSRISITFFRLFRVMRLVKLLSRGEGIRTLLWTFIKSFQALPYVALLIVMLFFIYAVIGMQVFGKIALNDTTEINRNNNFQTFPQAVLLLFRCATGEAWQDIMLACMPGKKCAPESEPSNSTEGETPCGSSFAVFYFISFYMLCAFLIINLFVAVIMDNFDYLTRDWSILGPHHLDEFKRIWAEYDPEAKGRIKHLDVVTLLRRIQPPLGFGKLCPHRVACKRLVSMNMPLNSDGTVMFNATLFALVRTALRIKTEGNLEQANEELRAIIKKIWKRTSMKLLDQVVPPAGDDEVTVGKFYATFLIQEYFRKFKKRKEQGLVGKPSQRNALSLQAGLRTLHDIGPEIRRAISGDLTAEEELDKAMKEAVSAASEDDIFRRAGGLFGNHVSYYQSDGRSAFPQTFTTQRPLHINKAGSSQGDTESPSHEKLVDSTFTPSSYSSTGSNANINNANNTALGRLPRPAGYPSTVSTVEGHGPPLSPAIRVQEVAWKLSSNRCHSRESQAAMAGQEETSQDETYEVKMNHDTEACSEPSLLSTEMLSYQDDENRQLTLPEEDKRDIRQSPKRGFLRSASLGRRASFHLECLKRQKDRGGDISQKTVLPLHLVHHQALAVAGLSPLLQRSHSPASFPRPFATPPATPGSRGWPPQPVPTLRLEGVESSEKLNSSFPSIHCGSWAETTPGGGGSSAARRVRPVSLMVPSQAGAPGRQFHGSASSLVEAVLISEGLGQFAQDPKFIEVTTQELADACDMTIEEMESAADNILSGGAPQSPNGALLPFVNCRDAGQDRAGGEEDAGCVRARGRPSEEELQDSRVYVSSL

SEQ ID NO: 20422 - protein, 2138 aa, Homo sapiens
MVNENTRMYIPEENHQGSNYGSPRPAHANMNANAAAGLAPEHIPTPGAALSWQAAIDAARQAKLMGSAGNATISTVSSTQRKRQQYGKPKKQGSTTATRPPRALLCLTLKNPIRRACISIVEWKPFEIIILLTIFANCVALAIYIPFPEDDSNATNSNLERVEYLFLIIFTVEAFLKVIAYGLLFHPNAYLRNGWNLLDFIIVVVGLFSAILEQATKADGANALGGKGAGFDVKALRAFRVLRPLRLVSGVPSLQVVLNSIIKAMVPLLHIALLVLFVIIIYAIIGLELFMGKMHKTCYNQEGIADVPAEDDPSPCALETGHGRQCQNGTVCKPGWDGPKHGITNFDNFAFAMLTVFQCITMEGWTDVLYWVNDAVGRDWPWIYFVTLIIIGSFFVLNLVLGVLSGEFSKEREKAKARGDFQKLREKQQLEEDLKGYLDWITQAEDIDPENEDEGMDEEKPRNMSMPTSETESVNTENVAGGDIEGENCGARLAHRISKSKFSRYWRRWNRFCRRKCRAAVKSNVFYWLVIFLVFLNTLTIASEHYNQPNWLTEVQDTANKALLALFTAEMLLKMYSLGLQAYFVSLFNRFDCFVVCGGILETILVETKIMSPLGISVLRCVRLLRIFKITRYWNSLSNLVASLLNSVRSIASLLLLLFLFIIIFSLLGMQLFGGKFNFDEMQTRRSTFDNFPQSLLTVFQILTGEDWNSVMYDGIMAYGGPSFPGMLVCIYFIILFICGNYILLNVFLAIAVDNLADAESLTSAQKEEEEEKERKKLARTASPEKKQELVEKPAVGESKEEKIELKSITADGESPPATKINMDDLQPNENEDKSPYPNPETTGEEDEEEPEMPVGPRPRPLSELHLKEKAVPMPEASAFFIFSSNNRFRLQCHRIVNDTIFTNLILFFILLSSISLAAEDPVQHTSFRNHILGNADYVFTSIFTLEIILKMTAYGAFLHKGSFCRNYFNILDLLVVSVSLISFGIQSSAINVVKILRVLRVLRPLRAINRAKGLKHVVQCVFVAIRTIGNIVIVTTLLQFMFACIGVQLFKGKLYTCSDSSKQTEAECKGNYITYKDGEVDHPIIQPRSWENSKFDFDNVLAAMMALFTVSTFEGWPELLYRSIDSHTEDKGPIYNYRVEISIFFIIYIIIIAFFMMNIFVGFVIVTFQEQGEQEYKNCELDKNQRQCVEYALKARPLRRYIPKNQHQYKVWYVVNSTYFEYLMFVLILLNTICLAMQHYGQSCLFKIAMNILNMLFTGLFTVEMILKLIAFKPKGYFSDPWNVFDFLIVIGSIIDVILSETNPAEHTQCSPSMNAEENSRISITFFRLFRVMRLVKLLSRGEGIRTLLWTFIKSFQALPYVALLIVMLFFIYAVIGMQVFGKIALNDTTEINRNNNFQTFPQAVLLLFRCATGEAWQDIMLACMPGKKCAPESEPSNSTEGETPCGSSFAVFYFISFYMLCAFLIINLFVAVIMDNFDYLTRDWSILGPHHLDEFKRIWAEYDPEAKGRIKHLDVVTLLRRIQPPLGFGKLCPHRVACKRLVSMNMPLNSDGTVMFNATLFALVRTALRIKTEGNLEQANEELRAIIKKIWKRTSMKLLDQVVPPAGDDEVTVGKFYATFLIQEYFRKFKKRKEQGLVGKPSQRNALSLQAGLRTLHDIGPEIRRAISGDLTAEEELDKAMKEAVSAASEDDIFRRAGGLFGNHVSYYQSDGRSAFPQTFTTQRPLHINKAGSSQGDTESPSHEKLVDSTFTPSSYSSTGSNANINNANNTALGRLPRPAGYPSTVSTVEGHGPPLSPAIRVQEVAWKLSSNRCHSRESQAAMAGQEETSQDETYEVKMNHDTEACSEPSLLSTEMLSYQDDENRQLTLPEEDKRDIRQSPKRGFLRSASLGRRASFHLECLKRQKDRGGDISQKTVLPLHLVHHQALAVAGLSPLLQRSHSPASFPRPFATPPATPGSRGWPPQPVPTLRLEGVESSEKLNSSFPSIHCGSWAETTPGGGGSSAARRVRPVSLMVPSQAGAPGRQFHGSASSLVEAVLISEGLGQFAQDPKFIEVTTQELADACDMTIEEMESAADNILSGGAPQSPNGALLPFVNCRDAGQDRAGGEEDAGCVRARGRPSEEELQDSRVYVSSL

SEQ ID NO: 20423 - protein, 2138 aa, Homo sapiens
MVNENTRMYIPEENHQGSNYGSPRPAHANMNANAAAGLAPEHIPTPGAALSWQAAIDAARQAKLMGSAGNATISTVSSTQRKRQQYGKPKKQGSTTATRPPRALLCLTLKNPIRRACISIVEWKPFEIIILLTIFANCVALAIYIPFPEDDSNATNSNLERVEYLFLIIFTVEAFLKVIAYGLLFHPNAYLRNGWNLLDFIIVVVGLFSAILEQATKADGANALGGKGAGFDVKALRAFRVLRPLRLVSGVPSLQVVLNSIIKAMVPLLHIALLVLFVIIIYAIIGLELFMGKMHKTCYNQEGIADVPAEDDPSPCALETGHGRQCQNGTVCKPGWDGPKHGITNFDNFAFAMLTVFQCITMEGWTDVLYWVNDAVGRDWPWIYFVTLIIIGSFFVLNLVLGVLSGEFSKEREKAKARGDFQKLREKQQLEEDLKGYLDWITQAEDIDPENEDEGMDEEKPRNMSMPTSETESVNTENVAGGDIEGENCGARLAHRISKSKFSRYWRRWNRFCRRKCRAAVKSNVFYWLVIFLVFLNTLTIASEHYNQPNWLTEVQDTANKALLALFTAEMLLKMYSLGLQAYFVSLFNRFDCFVVCGGILETILVETKIMSPLGISVLRCVRLLRIFKITRYWNSLSNLVASLLNSVRSIASLLLLLFLFIIIFSLLGMQLFGGKFNFDEMQTRRSTFDNFPQSLLTVFQILTGEDWNSVMYDGIMAYGGPSFPGMLVCIYFIILFICGNYILLNVFLAIAVDNLADAESLTSAQKEEEEEKERKKLARTASPEKKQELVEKPAVGESKEEKIELKSITADGESPPATKINMDDLQPNENEDKSPYPNPETTGEEDEEEPEMPVGPRPRPLSELHLKEKAVPMPEASAFFIFSSNNRFRLQCHRIVNDTIFTNLILFFILLSSISLAAEDPVQHTSFRNHILFYFDIVFTTIFTIEIALKMTAYGAFLHKGSFCRNYFNILDLLVVSVSLISFGIQSSAINVVKILRVLRVLRPLRAINRAKGLKHVVQCVFVAIRTIGNIVIVTTLLQFMFACIGVQLFKGKLYTCSDSSKQTEAECKGNYITYKDGEVDHPIIQPRSWENSKFDFDNVLAAMMALFTVSTFEGWPELLYRSIDSHTEDKGPIYNYRVEISIFFIIYIIIIAFFMMNIFVGFVIVTFQEQGEQEYKNCELDKNQRQCVEYALKARPLRRYIPKNQHQYKVWYVVNSTYFEYLMFVLILLNTICLAMQHYGQSCLFKIAMNILNMLFTGLFTVEMILKLIAFKPKGYFSDPWNVFDFLIVIGSIIDVILSETNPAEHTQCSPSMNAEENSRISITFFRLFRVMRLVKLLSRGEGIRTLLWTFIKSFQALPYVALLIVMLFFIYAVIGMQVFGKIALNDTTEINRNNNFQTFPQAVLLLFRCATGEAWQDIMLACMPGKKCAPESEPSNSTEGETPCGSSFAVFYFISFYMLCAFLIINLFVAVIMDNFDYLTRDWSILGPHHLDEFKRIWAEYDPEAKGRIKHLDVVTLLRRIQPPLGFGKLCPHRVACKRLVSMNMPLNSDGTVMFNATLFALVRTALRIKTEGNLEQANEELRAIIKKIWKRTSMKLLDQVVPPAGDDEVTVGKFYATFLIQEYFRKFKKRKEQGLVGKPSQRNALSLQAGLRTLHDIGPEIRRAISGDLTAEEELDKAMKEAVSAASEDDIFRRAGGLFGNHVSYYQSDGRSAFPQTFTTQRPLHINKAGSSQGDTESPSHEKLVDSTFTPSSYSSTGSNANINNANNTALGRLPRPAGYPSTVSTVEGHGPPLSPAIRVQEVAWKLSSNRCHSRESQAAMAGQEETSQDETYEVKMNHDTEACSEPSLLSTEMLSYQDDENRQLTLPEEDKRDIRQSPKRGFLRSASLGRRASFHLECLKRQKDRGGDISQKTVLPLHLVHHQALAVAGLSPLLQRSHSPASFPRPFATPPATPGSRGWPPQPVPTLRLEGVESSEKLNSSFPSIHCGSWAETTPGGGGSSAARRVRPVSLMVPSQAGAPGRQFHGSASSLVEAVLISEGLGQFAQDPKFIEVTTQELADACDMTIEEMESAADNILSGGAPQSPNGALLPFVNCRDAGQDRAGGEEDAGCVRARGRPSEEELQDSRVYVSSL

SEQ ID NO: 20424 - protein, 2138 aa, Homo sapiens
MVNENTRMYIPEENHQGSNYGSPRPAHANMNANAAAGLAPEHIPTPGAALSWQAAIDAARQAKLMGSAGNATISTVSSTQRKRQQYGKPKKQGSTTATRPPRALLCLTLKNPIRRACISIVEWKPFEIIILLTIFANCVALAIYIPFPEDDSNATNSNLERVEYLFLIIFTVEAFLKVIAYGLLFHPNAYLRNGWNLLDFIIVVVGLFSAILEQATKADGANALGGKGAGFDVKALRAFRVLRPLRLVSGVPSLQVVLNSIIKAMVPLLHIALLVLFVIIIYAIIGLELFMGKMHKTCYNQEGIADVPAEDDPSPCALETGHGRQCQNGTVCKPGWDGPKHGITNFDNFAFAMLTVFQCITMEGWTDVLYWMQDAMGYELPWVYFVSLVIFGSFFVLNLVLGVLSGEFSKEREKAKARGDFQKLREKQQLEEDLKGYLDWITQAEDIDPENEDEGMDEEKPRNMSMPTSETESVNTENVAGGDIEGENCGARLAHRISKSKFSRYWRRWNRFCRRKCRAAVKSNVFYWLVIFLVFLNTLTIASEHYNQPNWLTEVQDTANKALLALFTAEMLLKMYSLGLQAYFVSLFNRFDCFVVCGGILETILVETKIMSPLGISVLRCVRLLRIFKITRYWNSLSNLVASLLNSVRSIASLLLLLFLFIIIFSLLGMQLFGGKFNFDEMQTRRSTFDNFPQSLLTVFQILTGEDWNSVMYDGIMAYGGPSFPGMLVCIYFIILFICGNYILLNVFLAIAVDNLADAESLTSAQKEEEEEKERKKLARTASPEKKQELVEKPAVGESKEEKIELKSITADGESPPATKINMDDLQPNENEDKSPYPNPETTGEEDEEEPEMPVGPRPRPLSELHLKEKAVPMPEASAFFIFSSNNRFRLQCHRIVNDTIFTNLILFFILLSSISLAAEDPVQHTSFRNHILGNADYVFTSIFTLEIILKMTAYGAFLHKGSFCRNYFNILDLLVVSVSLISFGIQSSAINVVKILRVLRVLRPLRAINRAKGLKHVVQCVFVAIRTIGNIVIVTTLLQFMFACIGVQLFKGKLYTCSDSSKQTEAECKGNYITYKDGEVDHPIIQPRSWENSKFDFDNVLAAMMALFTVSTFEGWPELLYRSIDSHTEDKGPIYNYRVEISIFFIIYIIIIAFFMMNIFVGFVIVTFQEQGEQEYKNCELDKNQRQCVEYALKARPLRRYIPKNQHQYKVWYVVNSTYFEYLMFVLILLNTICLAMQHYGQSCLFKIAMNILNMLFTGLFTVEMILKLIAFKPKHYFCDAWNTFDALIVVGSIVDIAITEVNPAEHTQCSPSMNAEENSRISITFFRLFRVMRLVKLLSRGEGIRTLLWTFIKSFQALPYVALLIVMLFFIYAVIGMQVFGKIALNDTTEINRNNNFQTFPQAVLLLFRCATGEAWQDIMLACMPGKKCAPESEPSNSTEGETPCGSSFAVFYFISFYMLCAFLIINLFVAVIMDNFDYLTRDWSILGPHHLDEFKRIWAEYDPEAKGRIKHLDVVTLLRRIQPPLGFGKLCPHRVACKRLVSMNMPLNSDGTVMFNATLFALVRTALRIKTEGNLEQANEELRAIIKKIWKRTSMKLLDQVVPPAGDDEVTVGKFYATFLIQEYFRKFKKRKEQGLVGKPSQRNALSLQAGLRTLHDIGPEIRRAISGDLTAEEELDKAMKEAVSAASEDDIFRRAGGLFGNHVSYYQSDGRSAFPQTFTTQRPLHINKAGSSQGDTESPSHEKLVDSTFTPSSYSSTGSNANINNANNTALGRLPRPAGYPSTVSTVEGHGPPLSPAIRVQEVAWKLSSNRCHSRESQAAMAGQEETSQDETYEVKMNHDTEACSEPSLLSTEMLSYQDDENRQLTLPEEDKRDIRQSPKRGFLRSASLGRRASFHLECLKRQKDRGGDISQKTVLPLHLVHHQALAVAGLSPLLQRSHSPASFPRPFATPPATPGSRGWPPQPVPTLRLEGVESSEKLNSSFPSIHCGSWAETTPGGGGSSAARRVRPVSLMVPSQAGAPGRQFHGSASSLVEAVLISEGLGQFAQDPKFIEVTTQELADACDMTIEEMESAADNILSGGAPQSPNGALLPFVNCRDAGQDRAGGEEDAGCVRARGRPSEEELQDSRVYVSSL

SEQ ID NO: 20425 - protein, 2157 aa, Homo sapiens
MVNENTRMYIPEENHQGSNYGSPRPAHANMNANAAAGLAPEHIPTPGAALSWQAAIDAARQAKLMGSAGNATISTVSSTQRKRQQYGKPKKQGSTTATRPPRALLCLTLKNPIRRACISIVEWKPFEIIILLTIFANCVALAIYIPFPEDDSNATNSNLERVEYLFLIIFTVEAFLKVIAYGLLFHPNAYLRNGWNLLDFIIVVVGLFSAILEQATKADGANALGGKGAGFDVKALRAFRVLRPLRLVSGVPSLQVVLNSIIKAMVPLLHIALLVLFVIIIYAIIGLELFMGKMHKTCYNQEGIADVPAEDDPSPCALETGHGRQCQNGTVCKPGWDGPKHGITNFDNFAFAMLTVFQCITMEGWTDVLYWVNDAVGRDWPWIYFVTLIIIGSFFVLNLVLGVLSGEFSKEREKAKARGDFQKLREKQQLEEDLKGYLDWITQAEDIDPENEDEGMDEEKPRNMSMPTSETESVNTENVAGGDIEGENCGARLAHRISKSKFSRYWRRWNRFCRRKCRAAVKSNVFYWLVIFLVFLNTLTIASEHYNQPNWLTEVQDTANKALLALFTAEMLLKMYSLGLQAYFVSLFNRFDCFVVCGGILETILVETKIMSPLGISVLRCVRLLRIFKITRYWNSLSNLVASLLNSVRSIASLLLLLFLFIIIFSLLGMQLFGGKFNFDEMQTRRSTFDNFPQSLLTVFQILTGEDWNSVMYDGIMAYGGPSFPGMLVCIYFIILFICGNYILLNVFLAIAVDNLADAESLTSAQKEEEEEKERKKLARTASPEKKQELVEKPAVGESKEEKIELKSITADGESPPATKINMDDLQPNENEDKSPYPNPETTGEEDEEEPEMPVGPRPRPLSELHLKEKAVPMPEASAFFIFSSNNRFRLQCHRIVNDTIFTNLILFFILLSSISLAAEDPVQHTSFRNHILFYFDIVFTTIFTIEIALKMTAYGAFLHKGSFCRNYFNILDLLVVSVSLISFGIQSSAINVVKILRVLRVLRPLRAINRAKGLKHVVQCVFVAIRTIGNIVIVTTLLQFMFACIGVQLFKGKLYTCSDSSKQTEAECKGNYITYKDGEVDHPIIQPRSWENSKFDFDNVLAAMMALFTVSTFEGWPELLYRSIDSHTEDKGPIYNYRVEISIFFIIYIIIIAFFMMNIFVGFVIVTFQEQGEQEYKNCELDKNQRQCVEYALKARPLRRYIPKNQHQYKVWYVVNSTYFEYLMFVLILLNTICLAMQHYGQSCLFKIAMNILNMLFTGLFTVEMILKLIAFKPKHYFCDAWNTFDALIVVGSIVDIAITEVNPAEHTQCSPSMNAEENSRISITFFRLFRVMRLVKLLSRGEGIRTLLWTFIKSFQALPYVALLIVMLFFIYAVIGMQVFGKIALNDTTEINRNNNFQTFPQAVLLLFRCATGEAWQDIMLACMPGKKCAPESEPSNSTEGETPCGSSFAVFYFISFYMLCAFLIINLFVAVIMDNFDYLTRDWSILGPHHLDEFKRIWAEYDPEAKGRIKHLDVVTLLRRIQPPLGFGKLCPHRVACKRLVSMNMPLNSDGTVMFNATLFALVRTALRIKTEEGPSPSEAHQGAEDPFRPAGNLEQANEELRAIIKKIWKRTSMKLLDQVVPPAGDDEVTVGKFYATFLIQEYFRKFKKRKEQGLVGKPSQRNALSLQAGLRTLHDIGPEIRRAISGDLTAEEELDKAMKEAVSAASEDDIFRRAGGLFGNHVSYYQSDGRSAFPQTFTTQRPLHINKAGSSQGDTESPSHEKLVDSTFTPSSYSSTGSNANINNANNTALGRLPRPAGYPSTVSTVEGHGPPLSPAIRVQEVAWKLSSNRCHSRESQAAMAGQEETSQDETYEVKMNHDTEACSEPSLLSTEMLSYQDDENRQLTLPEEDKRDIRQSPKRGFLRSASLGRRASFHLECLKRQKDRGGDISQKTVLPLHLVHHQALAVAGLSPLLQRSHSPASFPRPFATPPATPGSRGWPPQPVPTLRLEGVESSEKLNSSFPSIHCGSWAETTPGGGGSSAARRVRPVSLMVPSQAGAPGRQFHGSASSLVEAVLISEGLGQFAQDPKFIEVTTQELADACDMTIEEMESAADNILSGGAPQSPNGALLPFVNCRDAGQDRAGGEEDAGCVRARGRPSEEELQDSRVYVSSL

SEQ ID NO: 20426 - protein, 2146 aa, Homo sapiens
MVNENTRMYIPEENHQGSNYGSPRPAHANMNANAAAGLAPEHIPTPGAALSWQAAIDAARQAKLMGSAGNATISTVSSTQRKRQQYGKPKKQGSTTATRPPRALLCLTLKNPIRRACISIVEWKPFEIIILLTIFANCVALAIYIPFPEDDSNATNSNLERVEYLFLIIFTVEAFLKVIAYGLLFHPNAYLRNGWNLLDFIIVVVGLFSAILEQATKADGANALGGKGAGFDVKALRAFRVLRPLRLVSGVPSLQVVLNSIIKAMVPLLHIALLVLFVIIIYAIIGLELFMGKMHKTCYNQEGIADVPAEDDPSPCALETGHGRQCQNGTVCKPGWDGPKHGITNFDNFAFAMLTVFQCITMEGWTDVLYWVNDAVGRDWPWIYFVTLIIIGSFFVLNLVLGVLSGEFSKEREKAKARGDFQKLREKQQLEEDLKGYLDWITQAEDIDPENEDEGMDEEKPRNMSMPTSETESVNTENVAGGDIEGENCGARLAHRISKSKFSRYWRRWNRFCRRKCRAAVKSNVFYWLVIFLVFLNTLTIASEHYNQPNWLTEVQDTANKALLALFTAEMLLKMYSLGLQAYFVSLFNRFDCFVVCGGILETILVETKIMSPLGISVLRCVRLLRIFKITRYWNSLSNLVASLLNSVRSIASLLLLLFLFIIIFSLLGMQLFGGKFNFDEMQTRRSTFDNFPQSLLTVFQILTGEDWNSVMYDGIMAYGGPSFPGMLVCIYFIILFICGNYILLNVFLAIAVDNLADAESLTSAQKEEEEEKERKKLARTASPEKKQELVEKPAVGESKEEKIELKSITADGESPPATKINMDDLQPNENEDKSPYPNPETTGEEDEEEPEMPVGPRPRPLSELHLKEKAVPMPEASAFFIFSSNNRFRLQCHRIVNDTIFTNLILFFILLSSISLAAEDPVQHTSFRNHILFYFDIVFTTIFTIEIALKMTAYGAFLHKGSFCRNYFNILDLLVVSVSLISFGIQSSAINVVKILRVLRVLRPLRAINRAKGLKHVVQCVFVAIRTIGNIVIVTTLLQFMFACIGVQLFKGKLYTCSDSSKQTEAECKGNYITYKDGEVDHPIIQPRSWENSKFDFDNVLAAMMALFTVSTFEGWPELLYRSIDSHTEDKGPIYNYRVEISIFFIIYIIIIAFFMMNIFVGFVIVTFQEQGEQEYKNCELDKNQRQCVEYALKARPLRRYIPKNQHQYKVWYVVNSTYFEYLMFVLILLNTICLAMQHYGQSCLFKIAMNILNMLFTGLFTVEMILKLIAFKPKHYFCDAWNTFDALIVVGSIVDIAITEVNNAEENSRISITFFRLFRVMRLVKLLSRGEGIRTLLWTFIKSFQALPYVALLIVMLFFIYAVIGMQVFGKIALNDTTEINRNNNFQTFPQAVLLLFRCATGEAWQDIMLACMPGKKCAPESEPSNSTEGETPCGSSFAVFYFISFYMLCAFLIINLFVAVIMDNFDYLTRDWSILGPHHLDEFKRIWAEYDPEAKGRIKHLDVVTLLRRIQPPLGFGKLCPHRVACKRLVSMNMPLNSDGTVMFNATLFALVRTALRIKTEEGPSPSEAHQGAEDPFRPAGNLEQANEELRAIIKKIWKRTSMKLLDQVVPPAGDDEVTVGKFYATFLIQEYFRKFKKRKEQGLVGKPSQRNALSLQAGLRTLHDIGPEIRRAISGDLTAEEELDKAMKEAVSAASEDDIFRRAGGLFGNHVSYYQSDGRSAFPQTFTTQRPLHINKAGSSQGDTESPSHEKLVDSTFTPSSYSSTGSNANINNANNTALGRLPRPAGYPSTVSTVEGHGPPLSPAIRVQEVAWKLSSNRCHSRESQAAMAGQEETSQDETYEVKMNHDTEACSEPSLLSTEMLSYQDDENRQLTLPEEDKRDIRQSPKRGFLRSASLGRRASFHLECLKRQKDRGGDISQKTVLPLHLVHHQALAVAGLSPLLQRSHSPASFPRPFATPPATPGSRGWPPQPVPTLRLEGVESSEKLNSSFPSIHCGSWAETTPGGGGSSAARRVRPVSLMVPSQAGAPGRQFHGSASSLVEAVLISEGLGQFAQDPKFIEVTTQELADACDMTIEEMESAADNILSGGAPQSPNGALLPFVNCRDAGQDRAGGEEDAGCVRARGRPSEEELQDSRVYVSSL

SEQ ID NO: 20427 - protein, 2139 aa, Homo sapiens
MVNENTRMYIPEENHQGSNYGSPRPAHANMNANAAAGLAPEHIPTPGAALSWQAAIDAARQAKLMGSAGNATISTVSSTQRKRQQYGKPKKQGSTTATRPPRALLCLTLKNPIRRACISIVEWKPFEIIILLTIFANCVALAIYIPFPEDDSNATNSNLERVEYLFLIIFTVEAFLKVIAYGLLFHPNAYLRNGWNLLDFIIVVVGLFSAILEQATKADGANALGGKGAGFDVKALRAFRVLRPLRLVSGVPSLQVVLNSIIKAMVPLLHIALLVLFVIIIYAIIGLELFMGKMHKTCYNQEGIADVPAEDDPSPCALETGHGRQCQNGTVCKPGWDGPKHGITNFDNFAFAMLTVFQCITMEGWTDVLYWVNDAVGRDWPWIYFVTLIIIGSFFVLNLVLGVLSGEFSKEREKAKARGDFQKLREKQQLEEDLKGYLDWITQAEDIDPENEDEGMDEEKPRNMSMPTSETESVNTENVAGGDIEGENCGARLAHRISKSKFSRYWRRWNRFCRRKCRAAVKSNVFYWLVIFLVFLNTLTIASEHYNQPNWLTEVQDTANKALLALFTAEMLLKMYSLGLQAYFVSLFNRFDCFVVCGGILETILVETKIMSPLGISVLRCVRLLRIFKITRYWNSLSNLVASLLNSVRSIASLLLLLFLFIIIFSLLGMQLFGGKFNFDEMQTRRSTFDNFPQSLLTVFQILTGEDWNSVMYDGIMAYGGPSFPGMLVCIYFIILFICGNYILLNVFLAIAVDNLADAESLTSAQKEEEEEKERKKLARTASPEKKQELVEKPAVGESKEEKIELKSITADGESPPATKINMDDLQPNENEDKSPYPNPETTGEEDEEEPEMPVGPRPRPLSELHLKEKAVPMPEASAFFIFSSNNRFRLQCHRIVNDTIFTNLILFFILLSSISLAAEDPVQHTSFRNHILGNADYVFTSIFTLEIILKMTAYGAFLHKGSFCRNYFNILDLLVVSVSLISFGIQSSAINVVKILRVLRVLRPLRAINRAKGLKHVVQCVFVAIRTIGNIVIVTTLLQFMFACIGVQLFKGKLYTCSDSSKQTEAECKGNYITYKDGEVDHPIIQPRSWENSKFDFDNVLAAMMALFTVSTFEGWPELLYRSIDSHTEDKGPIYNYRVEISIFFIIYIIIIAFFMMNIFVGFVIVTFQEQGEQEYKNCELDKNQRQCVEYALKARPLRRYIPKNQHQYKVWYVVNSTYFEYLMFVLILLNTICLAMQHYGQSCLFKIAMNILNMLFTGLFTVEMILKLIAFKPKHYFCDAWNTFDALIVVGSIVDIAITEVNPAEHTQCSPSMNAEENSRISITFFRLFRVMRLVKLLSRGEGIRTLLWTFIKSFQALPYVALLIVMLFFIYAVIGMQVFGKIALNDTTEINRNNNFQTFPQAVLLLFRCATGEAWQDIMLACMPGKKCAPESEPSNSTEGETPCGSSFAVFYFISFYMLCAFLIINLFVAVIMDNFDYLTRDWSILGPHHLDEFKRIWAEYDPEAKGRIKHLDVVTLLRRIQPPLGFGKLCPHRVACKRLVSMNMPLNSDGTVMFNATLFALVRTALREAELSSQVQYQAKEASLLERRRKSSHPKSSTKPNKLLSSGGSTGWVEDARALEGQVLARGCGWLGSLEERERGPHHPPLGFQAGLRTLHDIGPEIRRAISGDLTAEEELDKAMKEAVSAASEDDIFRRAGGLFGNHVSYYQSDGRSAFPQTFTTQRPLHINKAGSSQGDTESPSHEKLVDSTFTPSSYSSTGSNANINNANNTALGRLPRPAGYPSTVSTVEGHGPPLSPAIRVQEVAWKLSSNRCHSRESQAAMAGQEETSQDETYEVKMNHDTEACSEPSLLSTEMLSYQDDENRQLTLPEEDKRDIRQSPKRGFLRSASLGRRASFHLECLKRQKDRGGDISQKTVLPLHLVHHQALAVAGLSPLLQRSHSPASFPRPFATPPATPGSRGWPPQPVPTLRLEGVESSEKLNSSFPSIHCGSWAETTPGGGGSSAARRVRPVSLMVPSQAGAPGRQFHGSASSLVEAVLISEGLGQFAQDPKFIEVTTQELADACDMTIEEMESAADNILSGGAPQSPNGALLPFVNCRDAGQDRAGGEEDAGCVRARGRPSEEELQDSRVYVSSL

SEQ ID NO: 20428 - protein, 2157 aa, Homo sapiens
MVNENTRMYIPEENHQGSNYGSPRPAHANMNANAAAGLAPEHIPTPGAALSWQAAIDAARQAKLMGSAGNATISTVSSTQRKRQQYGKPKKQGSTTATRPPRALLCLTLKNPIRRACISIVEWKPFEIIILLTIFANCVALAIYIPFPEDDSNATNSNLERVEYLFLIIFTVEAFLKVIAYGLLFHPNAYLRNGWNLLDFIIVVVGLFSAILEQATKADGANALGGKGAGFDVKALRAFRVLRPLRLVSGVPSLQVVLNSIIKAMVPLLHIALLVLFVIIIYAIIGLELFMGKMHKTCYNQEGIADVPAEDDPSPCALETGHGRQCQNGTVCKPGWDGPKHGITNFDNFAFAMLTVFQCITMEGWTDVLYWVNDAVGRDWPWIYFVTLIIIGSFFVLNLVLGVLSGEFSKEREKAKARGDFQKLREKQQLEEDLKGYLDWITQAEDIDPENEDEGMDEEKPRNMSMPTSETESVNTENVAGGDIEGENCGARLAHRISKSKFSRYWRRWNRFCRRKCRAAVKSNVFYWLVIFLVFLNTLTIASEHYNQPNWLTEVQDTANKALLALFTAEMLLKMYSLGLQAYFVSLFNRFDCFVVCGGILETILVETKIMSPLGISVLRCVRLLRIFKITRYWNSLSNLVASLLNSVRSIASLLLLLFLFIIIFSLLGMQLFGGKFNFDEMQTRRSTFDNFPQSLLTVFQILTGEDWNSVMYDGIMAYGGPSFPGMLVCIYFIILFICGNYILLNVFLAIAVDNLADAESLTSAQKEEEEEKERKKLARTASPEKKQELVEKPAVGESKEEKIELKSITADGESPPATKINMDDLQPNENEDKSPYPNPETTGEEDEEEPEMPVGPRPRPLSELHLKEKAVPMPEASAFFIFSSNNRFRLQCHRIVNDTIFTNLILFFILLSSISLAAEDPVQHTSFRNHILGNADYVFTSIFTLEIILKMTAYGAFLHKGSFCRNYFNILDLLVVSVSLISFGIQSSAINVVKILRVLRVLRPLRAINRAKGLKHVVQCVFVAIRTIGNIVIVTTLLQFMFACIGVQLFKGKLYTCSDSSKQTEAECKGNYITYKDGEVDHPIIQPRSWENSKFDFDNVLAAMMALFTVSTFEGWPELLYRSIDSHTEDKGPIYNYRVEISIFFIIYIIIIAFFMMNIFVGFVIVTFQEQGEQEYKNCELDKNQRQCVEYALKARPLRRYIPKNQHQYKVWYVVNSTYFEYLMFVLILLNTICLAMQHYGQSCLFKIAMNILNMLFTGLFTVEMILKLIAFKPKHYFCDAWNTFDALIVVGSIVDIAITEVNPAEHTQCSPSMNAEENSRISITFFRLFRVMRLVKLLSRGEGIRTLLWTFIKSFQALPYVALLIVMLFFIYAVIGMQVFGKIALNDTTEINRNNNFQTFPQAVLLLFRCATGEAWQDIMLACMPGKKCAPESEPSNSTEGETPCGSSFAVFYFISFYMLCAFLIINLFVAVIMDNFDYLTRDWSILGPHHLDEFKRIWAEYDPEAKGRIKHLDVVTLLRRIQPPLGFGKLCPHRVACKRLVSMNMPLNSDGTVMFNATLFALVRTALRIKTEEGPSPSEAHQGAEDPFRPAGNLEQANEELRAIIKKIWKRTSMKLLDQVVPPAGDDEVTVGKFYATFLIQEYFRKFKKRKEQGLVGKPSQRNALSLQAGLRTLHDIGPEIRRAISGDLTAEEELDKAMKEAVSAASEDDIFRRAGGLFGNHVSYYQSDGRSAFPQTFTTQRPLHINKAGSSQGDTESPSHEKLVDSTFTPSSYSSTGSNANINNANNTALGRLPRPAGYPSTVSTVEGHGPPLSPAIRVQEVAWKLSSNRCHSRESQAAMAGQEETSQDETYEVKMNHDTEACSEPSLLSTEMLSYQDDENRQLTLPEEDKRDIRQSPKRGFLRSASLGRRASFHLECLKRQKDRGGDISQKTVLPLHLVHHQALAVAGLSPLLQRSHSPASFPRPFATPPATPGSRGWPPQPVPTLRLEGVESSEKLNSSFPSIHCGSWAETTPGGGGSSAARRVRPVSLMVPSQAGAPGRQFHGSASSLVEAVLISEGLGQFAQDPKFIEVTTQELADACDMTIEEMESAADNILSGGAPQSPNGALLPFVNCRDAGQDRAGGEEDAGCVRARGRPSEEELQDSRVYVSSL

SEQ ID NO: 20429 - protein, 2169 aa, Homo sapiens
MNANAAAGLAPEHIPTPGAALSWQAAIDAARQAKLMGSAGNATISTVSSTQRKRQQYGKPKKQGSTTATRPPRALLCLTLKNPIRRACISIVEWKPFEIIILLTIFANCVALAIYIPFPEDDSNATNSNLERVEYLFLIIFTVEAFLKVIAYGLLFHPNAYLRNGWNLLDFIIVVVGLFSAILEQATKADGANALGGKGAGFDVKALRAFRVLRPLRLVSGVPSLQVVLNSIIKAMVPLLHIALLVLFVIIIYAIIGLELFMGKMHKTCYNQEGIADVPAEDDPSPCALETGHGRQCQNGTVCKPGWDGPKHGITNFDNFAFAMLTVFQCITMEGWTDVLYWMQDAMGYELPWVYFVSLVIFGSFFVLNLVLGVLSGEFSKEREKAKARGDFQKLREKQQLEEDLKGYLDWITQAEDIDPENEDEGMDEEKPRNMSMPTSETESVNTENVAGGDIEGENCGARLAHRISKSKFSRYWRRWNRFCRRKCRAAVKSNVFYWLVIFLVFLNTLTIASEHYNQPNWLTEVQDTANKALLALFTAEMLLKMYSLGLQAYFVSLFNRFDCFVVCGGILETILVETKIMSPLGISVLRCVRLLRIFKITRYWNSLSNLVASLLNSVRSIASLLLLLFLFIIIFSLLGMQLFGGKFNFDEMQTRRSTFDNFPQSLLTVFQILTGEDWNSVMYDGIMAYGGPSFPGMLVCIYFIILFICGNYILLNVFLAIAVDNLADAESLTSAQKEEEEEKERKKLARTASPEKKQELVEKPAVGESKEEKIELKSITADGESPPATKINMDDLQPNENEDKSPYPNPETTGEEDEEEPEMPVGPRPRPLSELHLKEKAVPMPEASAFFIFSSNNRFRLQCHRIVNDTIFTNLILFFILLSSISLAAEDPVQHTSFRNHILFYFDIVFTTIFTIEIALKMTAYGAFLHKGSFCRNYFNILDLLVVSVSLISFGIQSSAINVVKILRVLRVLRPLRAINRAKGLKHVVQCVFVAIRTIGNIVIVTTLLQFMFACIGVQLFKGKLYTCSDSSKQTEAECKGNYITYKDGEVDHPIIQPRSWENSKFDFDNVLAAMMALFTVSTFEGWPELLYRSIDSHTEDKGPIYNYRVEISIFFIIYIIIIAFFMMNIFVGFVIVTFQEQGEQEYKNCELDKNQRQCVEYALKARPLRRYIPKNQHQYKVWYVVNSTYFEYLMFVLILLNTICLAMQHYGQSCLFKIAMNILNMLFTGLFTVEMILKLIAFKPKHYFCDAWNTFDALIVVGSIVDIAITEVNNAEENSRISITFFRLFRVMRLVKLLSRGEGIRTLLWTFIKSFQALPYVALLIVMLFFIYAVIGMQVFGKIALNDTTEINRNNNFQTFPQAVLLLFRCATGEAWQDIMLACMPGKKCAPESEPSNSTEGETPCGSSFAVFYFISFYMLCAFLIINLFVAVIMDNFDYLTRDWSILGPHHLDEFKRIWAEYDPEAKGRIKHLDVVTLLRRIQPPLGFGKLCPHRVACKRLVSMNMPLNSDGTVMFNATLFALVRTALRIKTEGNLEQANEELRAIIKKIWKRTSMKLLDQVVPPAGDDEVTVGKFYATFLIQEYFRKFKKRKEQGLVGKPSQRNALSLQAGLRTLHDIGPEIRRAISGDLTAEEELDKAMKEAVSAASEDDIFRRAGGLFGNHVSYYQSDGRSAFPQTFTTQRPLHINKAGSSQGDTESPSHEKLVDSTFTPSSYSSTGSNANINNANNTALGRLPRPAGYPSTVSTVEGHGPPLSPAIRVQEVAWKLSSNRMHCCDMLDGGTFPPALGPRRAPPCLHQQLQGSLAGLREDTPCIVPGHASLCCSSRVGEWLPAGCTAPQHARCHSRESQAAMAGQEETSQDETYEVKMNHDTEACSEPSLLSTEMLSYQDDENRQLTLPEEDKRDIRQSPKRGFLRSASLGRRASFHLECLKRQKDRGGDISQKTVLPLHLVHHQALAVAGLSPLLQRSHSPASFPRPFATPPATPGSRGWPPQPVPTLRLEGVESSEKLNSSFPSIHCGSWAETTPGGGGSSAARRVRPVSLMVPSQAGAPGRQFHGSASSLVEAVLISEGLGQFAQDPKFIEVTTQELADACDMTIEEMESAADNILSGGAPQSPNGALLPFVNCRDAGQDRAGGEEDAGCVRARGRPSEEELQDSRVYVSSL

SEQ ID NO: 20430 - protein, 2146 aa, Homo sapiens
MVNENTRMYIPEENHQGSNYGSPRPAHANMNANAAAGLAPEHIPTPGAALSWQAAIDAARQAKLMGSAGNATISTVSSTQRKRQQYGKPKKQGSTTATRPPRALLCLTLKNPIRRACISIVEWKPFEIIILLTIFANCVALAIYIPFPEDDSNATNSNLERVEYLFLIIFTVEAFLKVIAYGLLFHPNAYLRNGWNLLDFIIVVVGLFSAILEQATKADGANALGGKGAGFDVKALRAFRVLRPLRLVSGVPSLQVVLNSIIKAMVPLLHIALLVLFVIIIYAIIGLELFMGKMHKTCYNQEGIADVPAEDDPSPCALETGHGRQCQNGTVCKPGWDGPKHGITNFDNFAFAMLTVFQCITMEGWTDVLYWVNDAVGRDWPWIYFVTLIIIGSFFVLNLVLGVLSGEFSKEREKAKARGDFQKLREKQQLEEDLKGYLDWITQAEDIDPENEDEGMDEEKPRNMSMPTSETESVNTENVAGGDIEGENCGARLAHRISKSKFSRYWRRWNRFCRRKCRAAVKSNVFYWLVIFLVFLNTLTIASEHYNQPNWLTEVQDTANKALLALFTAEMLLKMYSLGLQAYFVSLFNRFDCFVVCGGILETILVETKIMSPLGISVLRCVRLLRIFKITRYWNSLSNLVASLLNSVRSIASLLLLLFLFIIIFSLLGMQLFGGKFNFDEMQTRRSTFDNFPQSLLTVFQILTGEDWNSVMYDGIMAYGGPSFPGMLVCIYFIILFICGNYILLNVFLAIAVDNLADAESLTSAQKEEEEEKERKKLARTASPEKKQELVEKPAVGESKEEKIELKSITADGESPPATKINMDDLQPNENEDKSPYPNPETTGEEDEEEPEMPVGPRPRPLSELHLKEKAVPMPEASAFFIFSSNNRFRLQCHRIVNDTIFTNLILFFILLSSISLAAEDPVQHTSFRNHILGNADYVFTSIFTLEIILKMTAYGAFLHKGSFCRNYFNILDLLVVSVSLISFGIQSSAINVVKILRVLRVLRPLRAINRAKGLKHVVQCVFVAIRTIGNIVIVTTLLQFMFACIGVQLFKGKLYTCSDSSKQTEAECKGNYITYKDGEVDHPIIQPRSWENSKFDFDNVLAAMMALFTVSTFEGWPELLYRSIDSHTEDKGPIYNYRVEISIFFIIYIIIIAFFMMNIFVGFVIVTFQEQGEQEYKNCELDKNQRQCVEYALKARPLRRYIPKNQHQYKVWYVVNSTYFEYLMFVLILLNTICLAMQHYGQSCLFKIAMNILNMLFTGLFTVEMILKLIAFKPKHYFCDAWNTFDALIVVGSIVDIAITEVNNAEENSRISITFFRLFRVMRLVKLLSRGEGIRTLLWTFIKSFQALPYVALLIVMLFFIYAVIGMQVFGKIALNDTTEINRNNNFQTFPQAVLLLFRCATGEAWQDIMLACMPGKKCAPESEPSNSTEGETPCGSSFAVFYFISFYMLCAFLIINLFVAVIMDNFDYLTRDWSILGPHHLDEFKRIWAEYDPEAKGRIKHLDVVTLLRRIQPPLGFGKLCPHRVACKRLVSMNMPLNSDGTVMFNATLFALVRTALRIKTEEGPSPSEAHQGAEDPFRPAGNLEQANEELRAIIKKIWKRTSMKLLDQVVPPAGDDEVTVGKFYATFLIQEYFRKFKKRKEQGLVGKPSQRNALSLQAGLRTLHDIGPEIRRAISGDLTAEEELDKAMKEAVSAASEDDIFRRAGGLFGNHVSYYQSDGRSAFPQTFTTQRPLHINKAGSSQGDTESPSHEKLVDSTFTPSSYSSTGSNANINNANNTALGRLPRPAGYPSTVSTVEGHGPPLSPAIRVQEVAWKLSSNRCHSRESQAAMAGQEETSQDETYEVKMNHDTEACSEPSLLSTEMLSYQDDENRQLTLPEEDKRDIRQSPKRGFLRSASLGRRASFHLECLKRQKDRGGDISQKTVLPLHLVHHQALAVAGLSPLLQRSHSPASFPRPFATPPATPGSRGWPPQPVPTLRLEGVESSEKLNSSFPSIHCGSWAETTPGGGGSSAARRVRPVSLMVPSQAGAPGRQFHGSASSLVEAVLISEGLGQFAQDPKFIEVTTQELADACDMTIEEMESAADNILSGGAPQSPNGALLPFVNCRDAGQDRAGGEEDAGCVRARGRPSEEELQDSRVYVSSL

SEQ ID NO: 20431 - protein, 2158 aa, Homo sapiens
MVNENTRMYIPEENHQGSNYGSPRPAHANMNANAAAGLAPEHIPTPGAALSWQAAIDAARQAKLMGSAGNATISTVSSTQRKRQQYGKPKKQGSTTATRPPRALLCLTLKNPIRRACISIVEWKPFEIIILLTIFANCVALAIYIPFPEDDSNATNSNLERVEYLFLIIFTVEAFLKVIAYGLLFHPNAYLRNGWNLLDFIIVVVGLFSAILEQATKADGANALGGKGAGFDVKALRAFRVLRPLRLVSGVPSLQVVLNSIIKAMVPLLHIALLVLFVIIIYAIIGLELFMGKMHKTCYNQEGIADVPAEDDPSPCALETGHGRQCQNGTVCKPGWDGPKHGITNFDNFAFAMLTVFQCITMEGWTDVLYWVNDAVGRDWPWIYFVTLIIIGSFFVLNLVLGVLSGEFSKEREKAKARGDFQKLREKQQLEEDLKGYLDWITQAEDIDPENEDEGMDEEKPRNMSMPTSETESVNTENVAGGDIEGENCGARLAHRISKSKFSRYWRRWNRFCRRKCRAAVKSNVFYWLVIFLVFLNTLTIASEHYNQPNWLTEVQDTANKALLALFTAEMLLKMYSLGLQAYFVSLFNRFDCFVVCGGILETILVETKIMSPLGISVLRCVRLLRIFKITRYWNSLSNLVASLLNSVRSIASLLLLLFLFIIIFSLLGMQLFGGKFNFDEMQTRRSTFDNFPQSLLTVFQILTGEDWNSVMYDGIMAYGGPSFPGMLVCIYFIILFICGNYILLNVFLAIAVDNLADAESLTSAQKEEEEEKERKKLARTASPEKKQELVEKPAVGESKEEKIELKSITADGESPPATKINMDDLQPNENEDKSPYPNPETTGEEDEEEPEMPVGPRPRPLSELHLKEKAVPMPEASAFFIFSSNNRFRLQCHRIVNDTIFTNLILFFILLSSISLAAEDPVQHTSFRNHILFYFDIVFTTIFTIEIALKILGNADYVFTSIFTLEIILKMTAYGAFLHKGSFCRNYFNILDLLVVSVSLISFGIQSSAINVVKILRVLRVLRPLRAINRAKGLKHVVQCVFVAIRTIGNIVIVTTLLQFMFACIGVQLFKGKLYTCSDSSKQTEAECKGNYITYKDGEVDHPIIQPRSWENSKFDFDNVLAAMMALFTVSTFEGWPELLYRSIDSHTEDKGPIYNYRVEISIFFIIYIIIIAFFMMNIFVGFVIVTFQEQGEQEYKNCELDKNQRQCVEYALKARPLRRYIPKNQHQYKVWYVVNSTYFEYLMFVLILLNTICLAMQHYGQSCLFKIAMNILNMLFTGLFTVEMILKLIAFKPKHYFCDAWNTFDALIVVGSIVDIAITEVNPAEHTQCSPSMNAEENSRISITFFRLFRVMRLVKLLSRGEGIRTLLWTFIKSFQALPYVALLIVMLFFIYAVIGMQVFGKIALNDTTEINRNNNFQTFPQAVLLLFRCATGEAWQDIMLACMPGKKCAPESEPSNSTEGETPCGSSFAVFYFISFYMLCAFLIINLFVAVIMDNFDYLTRDWSILGPHHLDEFKRIWAEYDPEAKGRIKHLDVVTLLRRIQPPLGFGKLCPHRVACKRLVSMNMPLNSDGTVMFNATLFALVRTALRIKTEGNLEQANEELRAIIKKIWKRTSMKLLDQVVPPAGDDEVTVGKFYATFLIQEYFRKFKKRKEQGLVGKPSQRNALSLQAGLRTLHDIGPEIRRAISGDLTAEEELDKAMKEAVSAASEDDIFRRAGGLFGNHVSYYQSDGRSAFPQTFTTQRPLHINKAGSSQGDTESPSHEKLVDSTFTPSSYSSTGSNANINNANNTALGRLPRPAGYPSTVSTVEGHGPPLSPAIRVQEVAWKLSSNRCHSRESQAAMAGQEETSQDETYEVKMNHDTEACSEPSLLSTEMLSYQDDENRQLTLPEEDKRDIRQSPKRGFLRSASLGRRASFHLECLKRQKDRGGDISQKTVLPLHLVHHQALAVAGLSPLLQRSHSPASFPRPFATPPATPGSRGWPPQPVPTLRLEGVESSEKLNSSFPSIHCGSWAETTPGGGGSSAARRVRPVSLMVPSQAGAPGRQFHGSASSLVEAVLISEGLGQFAQDPKFIEVTTQELADACDMTIEEMESAADNILSGGAPQSPNGALLPFVNCRDAGQDRAGGEEDAGCVRARGRPSEEELQDSRVYVSSL

SEQ ID NO: 20432 - protein, 2166 aa, Homo sapiens
MVNENTRMYIPEENHQGSNYGSPRPAHANMNANAAAGLAPEHIPTPGAALSWQAAIDAARQAKLMGSAGNATISTVSSTQRKRQQYGKPKKQGSTTATRPPRALLCLTLKNPIRRACISIVEWKPFEIIILLTIFANCVALAIYIPFPEDDSNATNSNLERVEYLFLIIFTVEAFLKVIAYGLLFHPNAYLRNGWNLLDFIIVVVGLFSAILEQATKADGANALGGKGAGFDVKALRAFRVLRPLRLVSGVPSLQVVLNSIIKAMVPLLHIALLVLFVIIIYAIIGLELFMGKMHKTCYNQEGIADVPAEDDPSPCALETGHGRQCQNGTVCKPGWDGPKHGITNFDNFAFAMLTVFQCITMEGWTDVLYWVNDAVGRDWPWIYFVTLIIIGSFFVLNLVLGVLSGEFSKEREKAKARGDFQKLREKQQLEEDLKGYLDWITQAEDIDPENEDEGMDEEKPRNMSMPTSETESVNTENVAGGDIEGENCGARLAHRISKSKFSRYWRRWNRFCRRKCRAAVKSNVFYWLVIFLVFLNTLTIASEHYNQPNWLTEVQDTANKALLALFTAEMLLKMYSLGLQAYFVSLFNRFDCFVVCGGILETILVETKIMSPLGISVLRCVRLLRIFKITRYWNSLSNLVASLLNSVRSIASLLLLLFLFIIIFSLLGMQLFGGKFNFDEMQTRRSTFDNFPQSLLTVFQILTGEDWNSVMYDGIMAYGGPSFPGMLVCIYFIILFICGNYILLNVFLAIAVDNLADAESLTSAQKEEEEEKERKKLARTASPEKKQELVEKPAVGESKEEKIELKSITADGESPPATKINMDDLQPNENEDKSPYPNPETTGEEDEEEPEMPVGPRPRPLSELHLKEKAVPMPEASAFFIFSSNNRFRLQCHRIVNDTIFTNLILFFILLSSISLAAEDPVQHTSFRNHILFYFDIVFTTIFTIEIALKMTAYGAFLHKGSFCRNYFNILDLLVVSVSLISFGIQSSAINVVKILRVLRVLRPLRAINRAKGLKHVVQCVFVAIRTIGNIVIVTTLLQFMFACIGVQLFKGKLYTCSDSSKQTEAECKGNYITYKDGEVDHPIIQPRSWENSKFDFDNVLAAMMALFTVSTFEGWPELLYRSIDSHTEDKGPIYNYRVEISIFFIIYIIIIAFFMMNIFVGFVIVTFQEQGEQEYKNCELDKNQRQCVEYALKARPLRRYIPKNQHQYKVWYVVNSTYFEYLMFVLILLNTICLAMQHYGQSCLFKIAMNILNMLFTGLFTVEMILKLIAFKPKGYFSDPWNVFDFLIVIGSIIDVILSETNHYFCDAWNTFDALIVVGSIVDIAITEVNPAEHTQCSPSMNAEENSRISITFFRLFRVMRLVKLLSRGEGIRTLLWTFIKSFQALPYVALLIVMLFFIYAVIGMQVFGKIALNDTTEINRNNNFQTFPQAVLLLFRCATGEAWQDIMLACMPGKKCAPESEPSNSTEGETPCGSSFAVFYFISFYMLCAFLIINLFVAVIMDNFDYLTRDWSILGPHHLDEFKRIWAEYDPEAKGRIKHLDVVTLLRRIQPPLGFGKLCPHRVACKRLVSMNMPLNSDGTVMFNATLFALVRTALRIKTEGNLEQANEELRAIIKKIWKRTSMKLLDQVVPPAGDDEVTVGKFYATFLIQEYFRKFKKRKEQGLVGKPSQRNALSLQAGLRTLHDIGPEIRRAISGDLTAEEELDKAMKEAVSAASEDDIFRRAGGLFGNHVSYYQSDGRSAFPQTFTTQRPLHINKAGSSQGDTESPSHEKLVDSTFTPSSYSSTGSNANINNANNTALGRLPRPAGYPSTVSTVEGHGPPLSPAIRVQEVAWKLSSNRCHSRESQAAMAGQEETSQDETYEVKMNHDTEACSEPSLLSTEMLSYQDDENRQLTLPEEDKRDIRQSPKRGFLRSASLGRRASFHLECLKRQKDRGGDISQKTVLPLHLVHHQALAVAGLSPLLQRSHSPASFPRPFATPPATPGSRGWPPQPVPTLRLEGVESSEKLNSSFPSIHCGSWAETTPGGGGSSAARRVRPVSLMVPSQAGAPGRQFHGSASSLVEAVLISEGLGQFAQDPKFIEVTTQELADACDMTIEEMESAADNILSGGAPQSPNGALLPFVNCRDAGQDRAGGEEDAGCVRARGRPSEEELQDSRVYVSSL

SEQ ID NO: 20433 - protein, 2155 aa, Homo sapiens
MVNENTRMYIPEENHQGSNYGSPRPAHANMNANAAAGLAPEHIPTPGAALSWQAAIDAARQAKLMGSAGNATISTVSSTQRKRQQYGKPKKQGSTTATRPPRALLCLTLKNPIRRACISIVEWKPFEIIILLTIFANCVALAIYIPFPEDDSNATNSNLERVEYLFLIIFTVEAFLKVIAYGLLFHPNAYLRNGWNLLDFIIVVVGLFSAILEQATKADGANALGGKGAGFDVKALRAFRVLRPLRLVSGVPSLQVVLNSIIKAMVPLLHIALLVLFVIIIYAIIGLELFMGKMHKTCYNQEGIADVPAEDDPSPCALETGHGRQCQNGTVCKPGWDGPKHGITNFDNFAFAMLTVFQCITMEGWTDVLYWVNDAVGRDWPWIYFVTLIIIGSFFVLNLVLGVLSGEFSKEREKAKARGDFQKLREKQQLEEDLKGYLDWITQAEDIDPENEDEGMDEEKPRNMSMPTSETESVNTENVAGGDIEGENCGARLAHRISKSKFSRYWRRWNRFCRRKCRAAVKSNVFYWLVIFLVFLNTLTIASEHYNQPNWLTEVQDTANKALLALFTAEMLLKMYSLGLQAYFVSLFNRFDCFVVCGGILETILVETKIMSPLGISVLRCVRLLRIFKITRYWNSLSNLVASLLNSVRSIASLLLLLFLFIIIFSLLGMQLFGGKFNFDEMQTRRSTFDNFPQSLLTVFQILTGEDWNSVMYDGIMAYGGPSFPGMLVCIYFIILFICGNYILLNVFLAIAVDNLADAESLTSAQKEEEEEKERKKLARTASPEKKQELVEKPAVGESKEEKIELKSITADGESPPATKINMDDLQPNENEDKSPYPNPETTGEEDEEEPEMPVGPRPRPLSELHLKEKAVPMPEASAFFIFSSNNRFRLQCHRIVNDTIFTNLILFFILLSSISLAAEDPVQHTSFRNHILGNADYVFTSIFTLEIILKMTAYGAFLHKGSFCRNYFNILDLLVVSVSLISFGIQSSAINVVKILRVLRVLRPLRAINRAKGLKHVVQCVFVAIRTIGNIVIVTTLLQFMFACIGVQLFKGKLYTCSDSSKQTEAECKGNYITYKDGEVDHPIIQPRSWENSKFDFDNVLAAMMALFTVSTFEGWPELLYRSIDSHTEDKGPIYNYRVEISIFFIIYIIIIAFFMMNIFVGFVIVTFQEQGEQEYKNCELDKNQRQCVEYALKARPLRRYIPKNQHQYKVWYVVNSTYFEYLMFVLILLNTICLAMQHYGQSCLFKIAMNILNMLFTGLFTVEMILKLIAFKPKGYFSDPWNVFDFLIVIGSIIDVILSETNHYFCDAWNTFDALIVVGSIVDIAITEVNNAEENSRISITFFRLFRVMRLVKLLSRGEGIRTLLWTFIKSFQALPYVALLIVMLFFIYAVIGMQVFGKIALNDTTEINRNNNFQTFPQAVLLLFRCATGEAWQDIMLACMPGKKCAPESEPSNSTEGETPCGSSFAVFYFISFYMLCAFLIINLFVAVIMDNFDYLTRDWSILGPHHLDEFKRIWAEYDPEAKGRIKHLDVVTLLRRIQPPLGFGKLCPHRVACKRLVSMNMPLNSDGTVMFNATLFALVRTALRIKTEGNLEQANEELRAIIKKIWKRTSMKLLDQVVPPAGDDEVTVGKFYATFLIQEYFRKFKKRKEQGLVGKPSQRNALSLQAGLRTLHDIGPEIRRAISGDLTAEEELDKAMKEAVSAASEDDIFRRAGGLFGNHVSYYQSDGRSAFPQTFTTQRPLHINKAGSSQGDTESPSHEKLVDSTFTPSSYSSTGSNANINNANNTALGRLPRPAGYPSTVSTVEGHGPPLSPAIRVQEVAWKLSSNRCHSRESQAAMAGQEETSQDETYEVKMNHDTEACSEPSLLSTEMLSYQDDENRQLTLPEEDKRDIRQSPKRGFLRSASLGRRASFHLECLKRQKDRGGDISQKTVLPLHLVHHQALAVAGLSPLLQRSHSPASFPRPFATPPATPGSRGWPPQPVPTLRLEGVESSEKLNSSFPSIHCGSWAETTPGGGGSSAARRVRPVSLMVPSQAGAPGRQFHGSASSLVEAVLISEGLGQFAQDPKFIEVTTQELADACDMTIEEMESAADNILSGGAPQSPNGALLPFVNCRDAGQDRAGGEEDAGCVRARGRPSEEELQDSRVYVSSL

SEQ ID NO: 20434 - protein, 2173 aa, Homo sapiens
MVNENTRMYIPEENHQGSNYGSPRPAHANMNANAAAGLAPEHIPTPGAALSWQAAIDAARQAKLMGSAGNATISTVSSTQRKRQQYGKPKKQGSTTATRPPRALLCLTLKNPIRRACISIVEWKPFEIIILLTIFANCVALAIYIPFPEDDSNATNSNLERVEYLFLIIFTVEAFLKVIAYGLLFHPNAYLRNGWNLLDFIIVVVGLFSAILEQATKADGANALGGKGAGFDVKALRAFRVLRPLRLVSGVPSLQVVLNSIIKAMVPLLHIALLVLFVIIIYAIIGLELFMGKMHKTCYNQEGIADVPAEDDPSPCALETGHGRQCQNGTVCKPGWDGPKHGITNFDNFAFAMLTVFQCITMEGWTDVLYWVNDAVGRDWPWIYFVTLIIIGSFFVLNLVLGVLSGEFSKEREKAKARGDFQKLREKQQLEEDLKGYLDWITQAEDIDPENEDEGMDEEKPRNMSMPTSETESVNTENVAGGDIEGENCGARLAHRISKSKFSRYWRRWNRFCRRKCRAAVKSNVFYWLVIFLVFLNTLTIASEHYNQPNWLTEVQDTANKALLALFTAEMLLKMYSLGLQAYFVSLFNRFDCFVVCGGILETILVETKIMSPLGISVLRCVRLLRIFKITRYWNSLSNLVASLLNSVRSIASLLLLLFLFIIIFSLLGMQLFGGKFNFDEMQTRRSTFDNFPQSLLTVFQILTGEDWNSVMYDGIMAYGGPSFPGMLVCIYFIILFICGNYILLNVFLAIAVDNLADAESLTSAQKEEEEEKERKKLARTASPEKKQELVEKPAVGESKEEKIELKSITADGESPPATKINMDDLQPNENEDKSPYPNPETTGEEDEEEPEMPVGPRPRPLSELHLKEKAVPMPEASAFFIFSSNNRFRLQCHRIVNDTIFTNLILFFILLSSISLAAEDPVQHTSFRNHILGNADYVFTSIFTLEIILKMTAYGAFLHKGSFCRNYFNILDLLVVSVSLISFGIQSSAINVVKILRVLRVLRPLRAINRAKGLKHVVQCVFVAIRTIGNIVIVTTLLQFMFACIGVQLFKGKLYTCSDSSKQTEAECKGNYITYKDGEVDHPIIQPRSWENSKFDFDNVLAAMMALFTVSTFEGWPELLYRSIDSHTEDKGPIYNYRVEISIFFIIYIIIIAFFMMNIFVGFVIVTFQEQGEQEYKNCELDKNQRQCVEYALKARPLRRYIPKNQHQYKVWYVVNSTYFEYLMFVLILLNTICLAMQHYGQSCLFKIAMNILNMLFTGLFTVEMILKLIAFKPKHYFCDAWNTFDALIVVGSIVDIAITEVNPAEHTQCSPSMNAEENSRISITFFRLFRVMRLVKLLSRGEGIRTLLWTFIKSFQALPYVALLIVMLFFIYAVIGMQVFGKIALNDTTEINRNNNFQTFPQAVLLLFRCATGEAWQDIMLACMPGKKCAPESEPSNSTEGETPCGSSFAVFYFISFYMLCAFLIINLFVAVIMDNFDYLTRDWSILGPHHLDEFKRIWAEYDPEAKGRIKHLDVVTLLRRIQPPLGFGKLCPHRVACKRLVSMNMPLNSDGTVMFNATLFALVRTALRIKTEGNLEQANEELRAIIKKIWKRTSMKLLDQVVPPAGDDEVTVGKFYATFLIQEYFRKFKKRKEQGLVGKPSQRNALSLQAGLRTLHDIGPEIRRAISGDLTAEEELDKAMKEAVSAASEDDIFRRAGGLFGNHVSYYQSDGRSAFPQTFTTQRPLHINKAGSSQGDTESPSHEKLVDSTFTPSSYSSTGSNANINNANNTALGRLPRPAGYPSTVSTVEGHGPPLSPAIRVQEVAWKLSSNRERHVPMCEDLELRRDSGSAGTQAHCLLLRKANPSRCHSRESQAAMAGQEETSQDETYEVKMNHDTEACSEPSLLSTEMLSYQDDENRQLTLPEEDKRDIRQSPKRGFLRSASLGRRASFHLECLKRQKDRGGDISQKTVLPLHLVHHQALAVAGLSPLLQRSHSPASFPRPFATPPATPGSRGWPPQPVPTLRLEGVESSEKLNSSFPSIHCGSWAETTPGGGGSSAARRVRPVSLMVPSQAGAPGRQFHGSASSLVEAVLISEGLGQFAQDPKFIEVTTQELADACDMTIEEMESAADNILSGGAPQSPNGALLPFVNCRDAGQDRAGGEEDAGCVRARGRPSEEELQDSRVYVSSL

SEQ ID NO: 20435 - protein, 2251 aa, Homo sapiens
MLRAFVQPGTPAYQPLPSHLSANTEVKFKGTLVHEAQLNYFYISPGGSNYGSPRPAHANMNANAAAGLAPEHIPTPGAALSWQAAIDAARQAKLMGSAGNATISTVSSTQRKRQQYGKPKKQGSTTATRPPRALLCLTLKNPIRRACISIVEWKPFEIIILLTIFANCVALAIYIPFPEDDSNATNSNLERVEYLFLIIFTVEAFLKVIAYGLLFHPNAYLRNGWNLLDFIIVVVGLFSAILEQATKADGANALGGKGAGFDVKALRAFRVLRPLRLVSGVPSLQVVLNSIIKAMVPLLHIALLVLFVIIIYAIIGLELFMGKMHKTCYNQEGIADVPAEDDPSPCALETGHGRQCQNGTVCKPGWDGPKHGITNFDNFAFAMLTVFQCITMEGWTDVLYWVNDAVGRDWPWIYFVTLIIIGSFFVLNLVLGVLSGEFSKEREKAKARGDFQKLREKQQLEEDLKGYLDWITQAEDIDPENEDEGMDEEKPRNMSMPTSETESVNTENVAGGDIEGENCGARLAHRISKSKFSRYWRRWNRFCRRKCRAAVKSNVFYWLVIFLVFLNTLTIASEHYNQPNWLTEVQDTANKALLALFTAEMLLKMYSLGLQAYFVSLFNRFDCFVVCGGILETILVETKIMSPLGISVLRCVRLLRIFKITRYWNSLSNLVASLLNSVRSIASLLLLLFLFIIIFSLLGMQLFGGKFNFDEMQTRRSTFDNFPQSLLTVFQILTGEDWNSVMYDGIMAYGGPSFPGMLVCIYFIILFICGNYILLNVFLAIAVDNLADAESLTSAQKEEEEEKERKKLARTASPEKKQELVEKPAVGESKEEKIELKSITADGESPPATKINMDDLQPNENEDKSPYPNPETTGEEDEEEPEMPVGPRPRPLSELHLKEKAVPMPEASAFFIFSSNNRFRLQCHRIVNDTIFTNLILFFILLSSISLAAEDPVQHTSFRNHILFYFDIVFTTIFTIEIALKILGNADYVFTSIFTLEIILKMTAYGAFLHKGSFCRNYFNILDLLVVSVSLISFGIQSSAINVVKILRVLRVLRPLRAINRAKGLKHVVQCVFVAIRTIGNIVIVTTLLQFMFACIGVQLFKGKLYTCSDSSKQTEAECKGNYITYKDGEVDHPIIQPRSWENSKFDFDNVLAAMMALFTVSTFEGWPELLYRSIDSHTEDKGPIYNYRVEISIFFIIYIIIIAFFMMNIFVGFVIVTFQEQGEQEYKNCELDKNQRQCVEYALKARPLRRYIPKNQHQYKVWYVVNSTYFEYLMFVLILLNTICLAMQHYGQSCLFKIAMNILNMLFTGLFTVEMILKLIAFKPKGYFSDPWNVFDFLIVIGSIIDVILSETNHYFCDAWNTFDALIVVGSIVDIAITEVNPAEHTQCSPSMNAEENSRISITFFRLFRVMRLVKLLSRGEGIRTLLWTFIKSFQALPYVALLIVMLFFIYAVIGMQVFGKIALNDTTEINRNNNFQTFPQAVLLLFRCATGEAWQDIMLACMPGKKCAPESEPSNSTEGETPCGSSFAVFYFISFYMLCAFLIINLFVAVIMDNFDYLTRDWSILGPHHLDEFKRIWAEYDPEAKGRIKHLDVVTLLRRIQPPLGFGKLCPHRVACKRLVSMNMPLNSDGTVMFNATLFALVRTALRIKTEGNLEQANEELRAIIKKIWKRTSMKLLDQVVPPAGDDEVTVGKFYATFLIQEYFRKFKKRKEQGLVGKPSQRNALSLQAGLRTLHDIGPEIRRAISGDLTAEEELDKAMKEAVSAASEDDIFRRAGGLFGNHVSYYQSDGRSAFPQTFTTQRPLHINKAGSSQGDTESPSHEKLVDSTFTPSSYSSTGSNANINNANNTALGRLPRPAGYPSTVSTVEGHGPPLSPAIRVQEVAWKLSSNRERHVPMCEDLELRRDSGSAGTQAHCLLLRKANPSRCHSRESQAAMAGQEETSQDETYEVKMNHDTEACSEPSLLSTEMLSYQDDENRQLTLPEEDKRDIRQSPKRGFLRSASLGRRASFHLECLKRQKDRGGDISQKTVLPLHLVHHQALAVAGLSPLLQRSHSPASFPRPFATPPATPGSRGWPPQPVPTLRLEGVESSEKLNSSFPSIHCGSWAETTPGGGGSSAARRVRPVSLMVPSQAGAPGRQFHGSASSLVEAVLISEGLGQFAQDPKFIEVTTQELADACDMTIEEMESAADNILSGGAPQSPNGALLPFVNCRDAGQDRAGGEEDAGCVRARGRPSEEELQDSRVYVSSL

SEQ ID NO: 20436 - protein, 2135 aa, Homo sapiens
MVNENTRMYIPEENHQGSNYGSPRPAHANMNANAAAGLAPEHIPTPGAALSWQAAIDAARQAKLMGSAGNATISTVSSTQRKRQQYGKPKKQGSTTATRPPRALLCLTLKNPIRRACISIVEWKPFEIIILLTIFANCVALAIYIPFPEDDSNATNSNLERVEYLFLIIFTVEAFLKVIAYGLLFHPNAYLRNGWNLLDFIIVVVGLFSAILEQATKADGANALGGKGAGFDVKALRAFRVLRPLRLVSGVPSLQVVLNSIIKAMVPLLHIALLVLFVIIIYAIIGLELFMGKMHKTCYNQEGIAAEDDPSPCALETGHGRQCQNGTVCKPGWDGPKHGITNFDNFAFAMLTVFQCITMEGWTDVLYWVNDAVGRDWPWIYFVTLIIIGSFFVLNLVLGVLSGEFSKEREKAKARGDFQKLREKQQLEEDLKGYLDWITQAEDIDPENEDEGMDEEKPRNMSMPTSETESVNTENVAGGDIEGENCGARLAHRISKSKFSRYWRRWNRFCRRKCRAAVKSNVFYWLVIFLVFLNTLTIASEHYNQPNWLTEVQDTANKALLALFTAEMLLKMYSLGLQAYFVSLFNRFDCFVVCGGILETILVETKIMSPLGISVLRCVRLLRIFKITRYWNSLSNLVASLLNSVRSIASLLLLLFLFIIIFSLLGMQLFGGKFNFDEMQTRRSTFDNFPQSLLTVFQILTGEDWNSVMYDGIMAYGGPSFPGMLVCIYFIILFICGNYILLNVFLAIAVDNLADAESLTSAQKEEEEEKERKKLARTASPEKKQELVEKPAVGESKEEKIELKSITADGESPPATKINMDDLQPNENEDKSPYPNPETTGEEDEEEPEMPVGPRPRPLSELHLKEKAVPMPEASAFFIFSSNNRFRLQCHRIVNDTIFTNLILFFILLSSISLAAEDPVQHTSFRNHILFYFDIVFTTIFTIEIALKMTAYGAFLHKGSFCRNYFNILDLLVVSVSLISFGIQSSAINVVKILRVLRVLRPLRAINRAKGLKHVVQCVFVAIRTIGNIVIVTTLLQFMFACIGVQLFKGKLYTCSDSSKQTEAECKGNYITYKDGEVDHPIIQPRSWENSKFDFDNVLAAMMALFTVSTFEGWPELLYRSIDSHTEDKGPIYNYRVEISIFFIIYIIIIAFFMMNIFVGFVIVTFQEQGEQEYKNCELDKNQRQCVEYALKARPLRRYIPKNQHQYKVWYVVNSTYFEYLMFVLILLNTICLAMQHYGQSCLFKIAMNILNMLFTGLFTVEMILKLIAFKPKGYFSDPWNVFDFLIVIGSIIDVILSETNPAEHTQCSPSMNAEENSRISITFFRLFRVMRLVKLLSRGEGIRTLLWTFIKSFQALPYVALLIVMLFFIYAVIGMQVFGKIALNDTTEINRNNNFQTFPQAVLLLFRCATGEAWQDIMLACMPGKKCAPESEPSNSTEGETPCGSSFAVFYFISFYMLCAFLIINLFVAVIMDNFDYLTRDWSILGPHHLDEFKRIWAEYDPEAKGRIKHLDVVTLLRRIQPPLGFGKLCPHRVACKRLVSMNMPLNSDGTVMFNATLFALVRTALRIKTEGNLEQANEELRAIIKKIWKRTSMKLLDQVVPPAGDDEVTVGKFYATFLIQEYFRKFKKRKEQGLVGKPSQRNALSLQAGLRTLHDIGPEIRRAISGDLTAEEELDKAMKEAVSAASEDDIFRRAGGLFGNHVSYYQSDGRSAFPQTFTTQRPLHINKAGSSQGDTESPSHEKLVDSTFTPSSYSSTGSNANINNANNTALGRLPRPAGYPSTVSTVEGHGPPLSPAIRVQEVAWKLSSNRCHSRESQAAMAGQEETSQDETYEVKMNHDTEACSEPSLLSTEMLSYQDDENRQLTLPEEDKRDIRQSPKRGFLRSASLGRRASFHLECLKRQKDRGGDISQKTVLPLHLVHHQALAVAGLSPLLQRSHSPASFPRPFATPPATPGSRGWPPQPVPTLRLEGVESSEKLNSSFPSIHCGSWAETTPGGGGSSAARRVRPVSLMVPSQAGAPGRQFHGSASSLVEAVLISEGLGQFAQDPKFIEVTTQELADACDMTIEEMESAADNILSGGAPQSPNGALLPFVNCRDAGQDRAGGEEDAGCVRARGRPSEEELQDSRVYVSSL

SEQ ID NO: 20437 - protein, 2173 aa, Homo sapiens
MVNENTRMYIPEENHQGSNYGSPRPAHANMNANAAAGLAPEHIPTPGAALSWQAAIDAARQAKLMGSAGNATISTVSSTQRKRQQYGKPKKQGSTTATRPPRALLCLTLKNPIRRACISIVEWKPFEIIILLTIFANCVALAIYIPFPEDDSNATNSNLERVEYLFLIIFTVEAFLKVIAYGLLFHPNAYLRNGWNLLDFIIVVVGLFSAILEQATKADGANALGGKGAGFDVKALRAFRVLRPLRLVSGVPSLQVVLNSIIKAMVPLLHIALLVLFVIIIYAIIGLELFMGKMHKTCYNQEGIADVPAEDDPSPCALETGHGRQCQNGTVCKPGWDGPKHGITNFDNFAFAMLTVFQCITMEGWTDVLYWMQDAMGYELPWVYFVSLVIFGSFFVLNLVLGVLSGEFSKEREKAKARGDFQKLREKQQLEEDLKGYLDWITQAEDIDPENEDEGMDEEKPRNMSMPTSETESVNTENVAGGDIEGENCGARLAHRISKSKFSRYWRRWNRFCRRKCRAAVKSNVFYWLVIFLVFLNTLTIASEHYNQPNWLTEVQDTANKALLALFTAEMLLKMYSLGLQAYFVSLFNRFDCFVVCGGILETILVETKIMSPLGISVLRCVRLLRIFKITRYWNSLSNLVASLLNSVRSIASLLLLLFLFIIIFSLLGMQLFGGKFNFDEMQTRRSTFDNFPQSLLTVFQILTGEDWNSVMYDGIMAYGGPSFPGMLVCIYFIILFICGNYILLNVFLAIAVDNLADAESLTSAQKEEEEEKERKKLARTASPEKKQELVEKPAVGESKEEKIELKSITADGESPPATKINMDDLQPNENEDKSPYPNPETTGEEDEEEPEMPVGPRPRPLSELHLKEKAVPMPEASAFFIFSSNNRFRLQCHRIVNDTIFTNLILFFILLSSISLAAEDPVQHTSFRNHILFYFDIVFTTIFTIEIALKMTAYGAFLHKGSFCRNYFNILDLLVVSVSLISFGIQSSAINVVKILRVLRVLRPLRAINRAKGLKHVVQCVFVAIRTIGNIVIVTTLLQFMFACIGVQLFKGKLYTCSDSSKQTEAECKGNYITYKDGEVDHPIIQPRSWENSKFDFDNVLAAMMALFTVSTFEGWPELLYRSIDSHTEDKGPIYNYRVEISIFFIIYIIIIAFFMMNIFVGFVIVTFQEQGEQEYKNCELDKNQRQCVEYALKARPLRRYIPKNQHQYKVWYVVNSTYFEYLMFVLILLNTICLAMQHYGQSCLFKIAMNILNMLFTGLFTVEMILKLIAFKPKGYFSDPWNVFDFLIVIGSIIDVILSETNPAEHTQCSPSMNAEENSRISITFFRLFRVMRLVKLLSRGEGIRTLLWTFIKSFQALPYVALLIVMLFFIYAVIGMQVFGKIALNDTTEINRNNNFQTFPQAVLLLFRCATGEAWQDIMLACMPGKKCAPESEPSNSTEGETPCGSSFAVFYFISFYMLCAFLIINLFVAVIMDNFDYLTRDWSILGPHHLDEFKRIWAEYDPEAKGRIKHLDVVTLLRRIQPPLGFGKLCPHRVACKRLVSMNMPLNSDGTVMFNATLFALVRTALRIKTEGNLEQANEELRAIIKKIWKRTSMKLLDQVVPPAGDDEVTVGKFYATFLIQEYFRKFKKRKEQGLVGKPSQRNALSLQAGLRTLHDIGPEIRRAISGDLTAEEELDKAMKEAVSAASEDDIFRRAGGLFGNHVSYYQSDGRSAFPQTFTTQRPLHINKAGSSQGDTESPSHEKLVDSTFTPSSYSSTGSNANINNANNTALGRLPRPAGYPSTVSTVEGHGPPLSPAIRVQEVAWKLSSNRERHVPMCEDLELRRDSGSAGTQAHCLLLRKANPSRCHSRESQAAMAGQEETSQDETYEVKMNHDTEACSEPSLLSTEMLSYQDDENRQLTLPEEDKRDIRQSPKRGFLRSASLGRRASFHLECLKRQKDRGGDISQKTVLPLHLVHHQALAVAGLSPLLQRSHSPASFPRPFATPPATPGSRGWPPQPVPTLRLEGVESSEKLNSSFPSIHCGSWAETTPGGGGSSAARRVRPVSLMVPSQAGAPGRQFHGSASSLVEAVLISEGLGQFAQDPKFIEVTTQELADACDMTIEEMESAADNILSGGAPQSPNGALLPFVNCRDAGQDRAGGEEDAGCVRARGRPSEEELQDSRVYVSSL

SEQ ID NO: 20438 - protein, 2138 aa, Homo sapiens
MVNENTRMYIPEENHQGSNYGSPRPAHANMNANAAAGLAPEHIPTPGAALSWQAAIDAARQAKLMGSAGNATISTVSSTQRKRQQYGKPKKQGSTTATRPPRALLCLTLKNPIRRACISIVEWKPFEIIILLTIFANCVALAIYIPFPEDDSNATNSNLERVEYLFLIIFTVEAFLKVIAYGLLFHPNAYLRNGWNLLDFIIVVVGLFSAILEQATKADGANALGGKGAGFDVKALRAFRVLRPLRLVSGVPSLQVVLNSIIKAMVPLLHIALLVLFVIIIYAIIGLELFMGKMHKTCYNQEGIADVPAEDDPSPCALETGHGRQCQNGTVCKPGWDGPKHGITNFDNFAFAMLTVFQCITMEGWTDVLYWMQDAMGYELPWVYFVSLVIFGSFFVLNLVLGVLSGEFSKEREKAKARGDFQKLREKQQLEEDLKGYLDWITQAEDIDPENEDEGMDEEKPRNMSMPTSETESVNTENVAGGDIEGENCGARLAHRISKSKFSRYWRRWNRFCRRKCRAAVKSNVFYWLVIFLVFLNTLTIASEHYNQPNWLTEVQDTANKALLALFTAEMLLKMYSLGLQAYFVSLFNRFDCFVVCGGILETILVETKIMSPLGISVLRCVRLLRIFKITRYWNSLSNLVASLLNSVRSIASLLLLLFLFIIIFSLLGMQLFGGKFNFDEMQTRRSTFDNFPQSLLTVFQILTGEDWNSVMYDGIMAYGGPSFPGMLVCIYFIILFICGNYILLNVFLAIAVDNLADAESLTSAQKEEEEEKERKKLARTASPEKKQELVEKPAVGESKEEKIELKSITADGESPPATKINMDDLQPNENEDKSPYPNPETTGEEDEEEPEMPVGPRPRPLSELHLKEKAVPMPEASAFFIFSSNNRFRLQCHRIVNDTIFTNLILFFILLSSISLAAEDPVQHTSFRNHILFYFDIVFTTIFTIEIALKMTAYGAFLHKGSFCRNYFNILDLLVVSVSLISFGIQSSAINVVKILRVLRVLRPLRAINRAKGLKHVVQCVFVAIRTIGNIVIVTTLLQFMFACIGVQLFKGKLYTCSDSSKQTEAECKGNYITYKDGEVDHPIIQPRSWENSKFDFDNVLAAMMALFTVSTFEGWPELLYRSIDSHTEDKGPIYNYRVEISIFFIIYIIIIAFFMMNIFVGFVIVTFQEQGEQEYKNCELDKNQRQCVEYALKARPLRRYIPKNQHQYKVWYVVNSTYFEYLMFVLILLNTICLAMQHYGQSCLFKIAMNILNMLFTGLFTVEMILKLIAFKPKGYFSDPWNVFDFLIVIGSIIDVILSETNPAEHTQCSPSMNAEENSRISITFFRLFRVMRLVKLLSRGEGIRTLLWTFIKSFQALPYVALLIVMLFFIYAVIGMQVFGKIALNDTTEINRNNNFQTFPQAVLLLFRCATGEAWQDIMLACMPGKKCAPESEPSNSTEGETPCGSSFAVFYFISFYMLCAFLIINLFVAVIMDNFDYLTRDWSILGPHHLDEFKRIWAEYDPEAKGRIKHLDVVTLLRRIQPPLGFGKLCPHRVACKRLVSMNMPLNSDGTVMFNATLFALVRTALRIKTEGNLEQANEELRAIIKKIWKRTSMKLLDQVVPPAGDDEVTVGKFYATFLIQEYFRKFKKRKEQGLVGKPSQRNALSLQAGLRTLHDIGPEIRRAISGDLTAEEELDKAMKEAVSAASEDDIFRRAGGLFGNHVSYYQSDGRSAFPQTFTTQRPLHINKAGSSQGDTESPSHEKLVDSTFTPSSYSSTGSNANINNANNTALGRLPRPAGYPSTVSTVEGHGPPLSPAIRVQEVAWKLSSNRCHSRESQAAMAGQEETSQDETYEVKMNHDTEACSEPSLLSTEMLSYQDDENRQLTLPEEDKRDIRQSPKRGFLRSASLGRRASFHLECLKRQKDRGGDISQKTVLPLHLVHHQALAVAGLSPLLQRSHSPASFPRPFATPPATPGSRGWPPQPVPTLRLEGVESSEKLNSSFPSIHCGSWAETTPGGGGSSAARRVRPVSLMVPSQAGAPGRQFHGSASSLVEAVLISEGLGQFAQDPKFIEVTTQELADACDMTIEEMESAADNILSGGAPQSPNGALLPFVNCRDAGQDRAGGEEDAGCVRARGRPSEEELQDSRVYVSSL

SEQ ID NO: 20439 - protein, 871 aa, Homo sapiens
MGEGGLPPAFQLLLRACDQGDTETARRLLEPGAAEPAERGAEPEAGAEPAGAEVAGPGAAAAGAVGAPVPVDCSDEAGNTALQFAAAGGHEPLVRFLLRRGASVNSRNHYGWSALMQAARFGHVSVAHLLLDHGADVNAQNRLGASVLTVASRGGHLGVVKLLLEAGAFVDHHHPSGEQLGLGGSRDEPLDITALMAAIQHGHEAVVRLLMEWGADPNHAARTVGWSPLMLAALTGRLGVAQQLVEKGANPDHLSVLEKTAFEVALDCKHRDLVDYLDPLTTVRPKTDEEKRRPDIFHALKMGNFQLVKEIADEDPSHVNLVNGDGATPLMLAAVTGQLALVQLLVERHADVDKQDSVHGWTALMQATYHGNKEIVKYLLNQGADVTLRAKNGYTAFDLVMLLNDPDTELVRLLASVCMQVNKDKGRPSHQPPLPHSKVRQPWSIPVLPDDKGGLKSWWNRMSNRFRKLKLMQTLPRGLSSNQPLPFSDEPEPALDSTMRAAPQDKTSRSALPDAAPVTKDNGPGSTRGEKEDTLLTTMLRNGAPLTRLPSDKLKAVIPPFLPPSSFELWSSDRSRTRHNGKADPMKTALPQRASRGHPVGGGGTDTTPVRPVKFPSLPRSPASSANSGNFNHSPHSSGGSSGVGVSRHGGELLNRSGGSIDNVLSQIAAQRKKAAGLLEQKPSHRSSPVGPAPGSSPSELPASPAGGSAPVGKKLETSKRPPSGTSTTSKSTSPTLTPSPSPKGHTAESSVSSSSSHRQSKSSGGSSSGTITDEDELTGILKKLSLEKYQPIFEEQEVDMEAFLTLTDGDLKELGIKTDGSRQQILAAISELNAGKGRERQILQETIHNFHSSFESSASNTRAPGNSPCA

SEQ ID NO: 20440 - protein, 335 aa, Homo sapiens
MGEGGLPPAFQLLLRACDQGDTETARRLLEPGAAEPAERGAEPEAGAEPAGAEVAGPGAAAAGAVGAPVPVDCSDEAGNTALQFAAAGGHEPLVRFLLRRGASVNSRNHYGWSALMQAARFGHVSVAHLLLDHGADVNAQNRLGASVLTVASRGGHLGVVKLLLEAGAFVDHHHPSGEQLGLGGSRDEPLDITALMAAIQHGHEAVVRLLMEWGADPNHAARTVGWSPLMLAALTGRLGVAQQLVEKGANPDHLSVLEKTAFEVALDCKHRDLVDYLDPLTTVRPKTGQAACPPWLHRGPQIVFMWLKLRIALLEGHAELRVQPCRPLRLRKWCA

SEQ ID NO: 20441 - protein, 872 aa, Homo sapiens
MGEGGLPPAFQLLLRACDQGDTETARRLLEPGAAEPAERGAEPEAGAEPAGAEVAGPGAAAAGAVGAPVPVDCSDEAGNTALQFAAAGGHEPLVRFLLRRGASVNSRNHYGWSALMQAARFGHVSVAHLLLDHGADVNAQNRLGASVLTVASRGGHLGVVKLLLEAGAFVDHHHPSGEQLGLGGSRDEPLDITALMAAIQHGHEAVVRLLMEWGADPNHAARTVGWSPLMLAALTGRLGVAQQLVEKGANPDHLSVLEKTAFEVALDCKHRDLVDYLDPLTTVRPKTDEEKRRPDIFHALKMGNFQLVKEIADEDPSHVNLVNGDGATPLMLAAVTGQLALVQLLVERHADVDKQDSVHGWTALMQATYHGNKEIVKYLLNQGADVTLRAKNGYTAFDLVMLLNDPDTELVRLLASVCMQVNKDKGRPSHQPPLPHSKVRQPWSIPVLPDDKGGLKSWWNRMSNRFRKLKLMQTLPRGLSSNQPLPFSDEPEPALDSTMRAAPQDKTSRSALPDAAPVTKDNGPGSTRGEKEDTLLTTMLRNGAPLTRLPSDKLKAVIPPFLPPSSFELWSSDRSRTRHNGKADPMKTALPQRASRGHPVGGGGTDTTPVRPVKFPSLPRSPASSANSGNFNHSPHSSGGSSGVGVSRHGGELLNRSGGSIDNVLSQIAAQRKKAAGLLEQKPSHRSSPVGPAPGSSPSELPASPAGGSAPVGKQKLETSKRPPSGTSTTSKSTSPTLTPSPSPKGHTAESSVSSSSSHRQSKSSGGSSSGTITDEDELTGILKKLSLEKYQPIFEEQEVDMEAFLTLTDGDLKELGIKTDGSRQQILAAISELNAGKGRERQILQETIHNFHSSFESSASNTRAPGNSPCA

SEQ ID NO: 20442 - protein, 1142 aa, Homo sapiens
MAEPGGAAGRSHPEDGSASEGEKEGNNESHMVSPPEKDDGQKGEEAVGSTEHPEEVTTQAEAAIEEGEVETEGEAAVEGEEEAVSYGDAESEEEYYYTETSSPEGQISAADTTYPYFSPPQELPGEEAYDSVSGEAGLQGFQQEATGPPESRERRVTSPEPSHGVLGPSEQMGQVTSGPAVGRLTGSTEEPQGQVLPMGVQHRFRLSHGSDIESSDLEEFVSQEPVIPPGVPDAHPREGDLPVFQDQIQQPSTEEGAMAERVESEGSDEEAEDEGSQLVVLDPDHPLMVRFQAALKNYLNRQIEKLKLDLQELVVATKQSRAQRQELGVNLYEVQQHLVHLQKLLEKSHDRHAMASSERRQKEEELQAARALYTKTCAAANEERKKLAALQTEMENLALHLFYMQNIDQDMRDDIRVMTQVVKKAETERIRAEIEKKKQDLYVDQLTTRAQQLEEDIALFEAQYLAQAEDTRILRKAVSEACTEIDAISVEKRRIMQQWASSLVGMKHRDEAHRAVLEALRGCQHQAKSTDGEIEAYKKSIMKEEEKNEKLASILNRTETEATLLQKLTTQCLTKQVALQSQFNTYRLTLQDTEDALSQDQLEQMILTEELQAIRQAIQGELELRRKTDAAIREKLQEHMTSNKTTKYFNQLILRLQKEKTNMMTHLSKINGDIAQTTLDITHTSSRLDAHQKTLVELDQDVKKVNELITNSQSEISRRTILIERKQGLINFLNKQLERMVSELGGEEVGPLELEIKRLSKLIDEHDGKAVQAQVTWLRLQQEMVKVTQEQEEQLASLDASKKELHIMEQKKLRVESKIEQEKKEQKEIEHHMKDLDNDLKKLNMLMNKNRCSSEELEQNNRVTENEFVRSLKASERETIKMQDKLNQLSEEKATLLNQLVEAEHQIMLWEKKIQLAKEMRSSVDSEIGQTEIRAMKGEIHRMKVRLGQLLKQQEKMIRAMELAVARRETVTTQAEGQRKMDRKALTRTDFHHKQLELRRKIRDVRKATDECTKTVLELEETQRNVSSSLLEKQEKLSVIQADFDTLEADLTRLGALKRQNLSEIVALQTRLKHLQAVKEGRYVFLFRSKQSLVLERQRLDKRLALIATILDRVRDEYPQFQEALHKVSQMIANKLESPGPS

SEQ ID NO: 20443 - protein, 1030 aa, Homo sapiens
MAEPGGAAGRSHPEDGSASEGEKEGNNESHMVSPPEKDDGQKGEEAVGSTEHPEEVTTQAEAAIEEGEVETEGEAAVEGEEEAVSYGDAESEEEYYYTETSSPEGQISAADTTYPYFSPPQELPGEEAYDSVSGEAGLQGFQQEATGPPESRERRVTSPEPSHGVLGPSEQMGQVTSGPAVGRLTGSTEEPQGQVLPMGVQHRFRLSHGSDIESSDLEEFVSQEPVIPPGVPDAHPREGDLPVFQDQIQQPSTEEGAMAERVESEGSDEEAEDEGSQLVVLDPDHPLMVRFQAALKNYLNRQIEKLKLDLQELVVATKQSRAQRQELGVNLYEVQQHLVHLQKLLEKSHDRHAMASSERRQKEEELQAARALYTKTCAAANEERKKLAALQTEMENLALHLFYMQNIDQDMRDDIRVMTQVVKKAETERIRAEIEKKKQDLYVDQLTTRAQQLEEDIALFEAQYLAQAEDTRILRKAVSEACTEIDAISVEKRRIMQQWASSLVGMKHRDEAHRAVLEALRGCQHQAKSTDGEIEAYKKSIMKEEEKNEKLASILNRTETEATLLQKLTTQCLTKQVALQSQFNTYRLTLQDTEDALSQDQLEQMILTEELQAIRQAIQGELELRRKTDAAIREKLQEHMTSNKTTKYFNQLILRLQKEKTNMMTHLSKINGDIAQTTLDITHTSSRLDAHQKTLVELDQDVKKVNELITNSQSEISRRTILIERKQGLINFLNKQLERMVSELGGEEVGPLELEIKRLSKLIDEHDGKAVQAQVTWLRLQQEMVKVTQEQEEQLASLDASKKELHIMEQKKLRVESKIEQEKKEQKEIEHHMKDLDNDLKKLNMLMNKNRCSSEELEQNNRVTENEFVRSLKASERETIKMQDKLNQLSEEKATLLNQLVEAEHQIMLWEKKIQLAKEMRSSVDSEIGQTEIRAMKGEIHRMKKYCRTTQDAHRHVHEQHGTHAGTCTKNTGRAQARARTTRDARGHVHEQHGTRAGTCTNNTGRAQARARTRDARRHVHEHRTHTARA

SEQ ID NO: 20444 - protein, 925 aa, Homo sapiens
MVSLSLPPVIPPGVPDAHPREGDLPVFQDQIQQPSTEEGAMAERVESEGSDEEAEDEGSQLVVLDPDHPLMVRFQAALKNYLNRQIEKLKLDLQELVVATKQSRAQRQELGVNLYEVQQHLVHLQKLLEKSHDRHAMASSERRQKEEELQAARALYTKTCAAANEERKKLAALQTEMENLALHLFYMQNIDQDMRDDIRVMTQVVKKAETERIRAEIEKKKQDLYVDQLTTRAQQLEEDIALFEAQYLAQAEDTRILRKAVSEACTEIDAISVEKRRIMQQWASSLVGMKHRDEAHRAVLEALRGCQHQAKSTDGEIEAYKKSIMKEEEKNEKLASILNRTETEATLLQKLTTQCLTKQVALQSQFNTYRLTLQDTEDALSQDQLEQMILTEELQAIRQAIQGELELRRKTDAAIREKLQEHMTSNKTTKYFNQLILRLQKEKTNMMTHLSKINGDIAQTTLDITHTSSRLDAHQKTLVELDQDVKKVNELITNSQSEISRRTILIERKQGLINFLNKQLERMVSELGGEEVGPLELEIKRLSKLIDEHDGKAVQAQVTWLRLQQEMVKVTQEQEEQLASLDASKKELHIMEQKKLRVESKIEQEKKEQKEIEHHMKDLDNDLKKLNMLMNKNRCSSEELEQNNRVTENEFVRSLKASERETIKMQDKLNQLSEEKATLLNQLVEAEHQIMLWEKKIQLAKEMRSSVDSEIGQTEIRAMKGEIHRMKVRLGQLLKQQEKMIRAMELAVARRETVTTQAEGQRKMDRKALTRTDFHHKQLELRRKIRDVRKATDECTKTVLELEETQRNVSSSLLEKQEKLSVIQADFDTLEADLTRLGALKRQNLSEIVALQTRLKHLQAVKEGRYVFLFRSKQSLVLERQRLDKRLALIATILDRVRDEYPQFQEALHKVSQMIANKLESPGPS

SEQ ID NO: 20445 - protein, 579 aa, Homo sapiens
MAEPGGAAGRSHPEDGSASEGEKEGNNESHMVSPPEKDDGQKGEEAVGSTEHPEEVTTQAEAAIEEGEVETEGEAAVEGEEEAVSYGDAESEEEYYYTETSSPEGQISAADTTYPYFSPPQELPGEEAYDSVSGEAGLQGFQQEATGPPESRERRVTSPEPSHGVLGPSEQMGQVTSGPAVGRLTGSTEEPQGQVLPMGVQHRFRLSHGSDIESSDLEEFVSQEPVIPPGVPDAHPREGDLPVFQDQIQQPSTEEGAMAERVESEGSDEEAEDEGSQLVVLDPDHPLMVRFQAALKNYLNRQIEKLKLDLQELVVATKQSRAQRQELGVNLYEVQQHLVHLQKLLEKSHDRHAMASSERRQKEEELQAARALYTKTCAAANEERKKLAALQTEMENLALHLFYMQNIDQDMRDDIRVMTQVVKKAETERIRAEIEKKKQDLYVDQLTTRAQQLEEDIALFEAQYLAQAEDTRILRKAVSEACTEIDAISVEKRRIMQQWASSLVGMKHRDEAHRAVLEALSVSLERFPSQNINTARSRLSTTWHSAGILLRGSFLPGASRAFASVCYGGAAVDNRIREC

SEQ ID NO: 20446 - protein, 478 aa, Homo sapiens
MAEPGGAAGRSHPEDGSASEGEKEGNNESHMVSPPEKDDGQKGEEAVGSTEHPEEVTTQAEAAIEEGEVETEGEAAVEGEEEAVSYGDAESEEEYYYTETSSPEGQISAADTTYPYFSPPQELPGEEAYDSVSGEAGLQGFQQEATGPPESRERRVTSPEPSHGVLGPSEQMGQVTSGPAVGRLTGSTEEPQGQVLPMGVQHRFRLSHGSDIESSDLEEFVSQEPVIPPGVPDAHPREGDLPVFQDQIQQPSTEEGAMAERVESEGSDEEAEDEGSQLVVLDPDHPLMVRFQAALKNYLNRQIEKLKLDLQELVVATKQSRAQRQELGVNLYEVQQHLVHLQKLLEKSHDRHAMASSERRQKEEELQAARALYTKTCAAANEERKKLAALQTEMENLALHLFYMQNIDQDMRDDIRVMTQVVKKAETERIRAEIEKKKQGVGDTGAAFIPKTTQGDQVSGRGKKKPGTVVARVSPAEL

SEQ ID NO: 20447 - protein, 101 aa, Homo sapiens
MSRGQFGQGQEPLDMFFWVNEISGEITYPPQKADAPAVSPESPQKKPPFQPRSVQEAPCSPQGPPAQRPALAPPSKPSLKDSGSRNPCPSAPTWARPKPEE

SEQ ID NO: 20448 - protein, 224 aa, Homo sapiens
MAAPSEVAAIAPGEGDGGGGGFGSWLDGRLEALGVDRAVYGAYILGILQEEEEEEKLDALQGILSAFLEEDSLLNICKEIVERWSETQNVVTKVKKEDEVQAIATLIEKQAQIVVKPRMVSEEEKQRKAALLAQYADVTDEEDEADEKDDSGATTMNIGSDKLLFRNTNVEDVLNARKLERDSLRDESQRKKEQDKLQRERDKLAKQERKEKEKKRTQRGERKR

SEQ ID NO: 20449 - protein, 154 aa, Homo sapiens
MAAPSEVAAIAPGEGDGGGGGFGSWLDGRLEALGVDRAVYGAYILGILQEEEEEEKLDALQGILSAFLEEDSLLNICKEIVERWSETQNVVTKVKKEDEVQAIATLIEKQAQIVVKPRMVSEEEKQRKAALLAQYADVTDEEDSVPKHQCGRCP

SEQ ID NO: 20450 - protein, 192 aa, Homo sapiens
MGNISSNISAFQSLHIVMLGLDSAGKTTVLYRLKFNEFVNTVPTIGFNTEKIKLSNGTAKGISCHFWDVGGQEKLRPLWKSYSRCTDGIIYVVDSVDVDRLEEAKTELHKVTKFAENQGTPLLVIANKQDLPKSLPVAEIEKQLALHELIPATTYHVQPACAIIGEGLTEGMDKLYEMILKRRKSLKQKKKR

SEQ ID NO: 20451 - protein, 201 aa, Homo sapiens
MGNISSNISAFQSLHIVMLGLDSAGKTTVLYRLKFNEFVNTVPTIGFNTEKIKLSNGTAKGISCHFWDVGGQEKLRPLWKSYSRCTDGIIYVVDSVDVDRLEEAKTELHKVTKFAENQGTPLLVIANKQDLPKSLPVAEIEKQLALHELIPATTYHVQPACAIIGEGLTEGMDKLYEMILKRRKSLKQKKKRTGDLRSCEV

SEQ ID NO: 20452 - protein, 260 aa, Homo sapiens
MNNLNDPPNWNIRPNSRADGGDGSRWNYALLVPMLGLAAFRWIWSRESQKEVEKEREAYRRRTAAFQQDLEAKYHAMISENRRAVAQLSLELEKEQNRTASYREALISQGRKLVEEKKLLEQERAQVMQEKRQVQPLRSAYLSCLQREENWQRRARLLLKEFEAVLTERQNIYCSLFLPRSKRLEIEKSLLVRASVDPVAADLEMAAGLTDIFQHDTYCGDVWNTNKRQNGRLMWLYLKYWELVVELKKFKRVEEAILEK

SEQ ID NO: 20453 - protein, 292 aa, Homo sapiens
MGRQKELVSRCGEMLHIRYRLLRQALAECLGTLILVMFGCGSVAQVVLSRGTHGGFLTINLAFGFAVTLGILIAGQVSGAHLNPAVTFAMCFLAREPWIKLPIYTLAQTLGAFLGAGIVFGLYYDAIWHFADNQLFVSGPNGTAGIFATYPSGHLDMINGFFDQFIGTASLIVCVLAIVDPYNNPVPRGLEAFTVGLVVLVIGTSMGFNSGYAVNPARDFGPRLFTALAGWGSAVFTTGQHWWWVPIVSPLLGSIAGVFVYQLMIGCHLEQPPPSNEEENVKLAHVKHKEQI

SEQ ID NO: 20454 - protein, 281 aa, Homo sapiens
MGRQKELVSRCGEMLHIRYRLLRQALAECLGTLILVMFGCGSVAQVVLSRGTHGGFLTINLAFGFAVTLGILIAGQVSGAHLNPAVTFAMCFLAREPWIKLPIYTLAQTLGAFLGAGIVFGLYYDAIWHFADNQLFVSGPNGTAGIFATYPSGHLDMINGFFDQDRPALVVGAHRVPTPGLHCGCLRVPADDRLPPGAAPTLQRGRECEAGPCEAQGADLSGKGHLPLRCPGLEHPLTVQGHSQEAPLHDPPFQAKELPIYPHPTKTAPSGFPLDLAQIAP

SEQ ID NO: 20455 - protein, 179 aa, Homo sapiens
MGILFTRIWRLFNHQEHKVIIVGLDNAGKTTILYQFSMNEVVHTSPTIGSNVEEIVINNTRFLMWDIGGQESLRSSWNTYYTNTEFVIVVVDSTDRERISVTREELYKMLAHEDLRKAGLLIFANKQDVKECMTVAEISQFLKLTSIKDHQWHIQACCALTGEGLCQGLEWMMSRLKIR

SEQ ID NO: 20456 - protein, 142 aa, Homo sapiens
MNEVVHTSPTIGSNVEEIVINNTRFLMWDIGGQESLRSSWNTYYTNTEFVIVVVDSTDRERISVTREELYKMLAHEDLRKAGLLIFANKQDVKECMTVAEISQFLKLTSIKDHQWHIQACCALTGEGLCQGLEWMMSRLKIR

SEQ ID NO: 20457 - protein, 229 aa, Homo sapiens
MDLLQFLAFLFVLLLSGMGATGTLRTSLDPSLEIYKKMFEVKRREQLLALKNLAQLNDIHQQYKILDVMLKGLFKVLEDSRTVLTAADVLPDGPFPQDEKLKDAFSHVVENTAFFGDVVLRFPRIVHYYFDHNSNWNLLIRWGISFCNQTGVFNQGPHSPILSLMAQELGISEKDSNFQNPFKIDRTEFIPSTDPFQKALREEEKRRKKEEKRKEIRKGPRISRSQSEL

SEQ ID NO: 20458 - protein, 371 aa, Homo sapiens
MAAAEAANCIMENFVATLANGMSLQPPLEEVSCGQAESSEKPNAEDMTSKDYYFDSYAHFGIHEEMLKDEVRTLTYRNSMFHNRHLFKDKVVLDVGSGTGILCMFAAKAGARKVIGIECSSISDYAVKIVKANKLDHVVTIIKGKVEEVELPVEKVDIIISEWMGYCLFYESMLNTVLYARDKWLAPDGLIFPDRATLYVTAIEDRQYKDYKIHWWENVYGFDMSCIKDVAIKEPLVDVVDPKQLVTNACLIKEVDIYTVKVEDLTFTSPFCLQVKRNDYVHALVAYFNIEFTRCHKRTGFSTSPESPYTHWKQTVFYMEDYLTVKTGEEIFGTIGMRPNAKNNRDLDFTIDLDFKGQLCELSCSTDYRMR

SEQ ID NO: 20459 - protein, 347 aa, Homo sapiens
MVGVAEVSCGQAESSEKPNAEDMTSKDYYFDSYAHFGIHEEMLKDEVRTLTYRNSMFHNRHLFKDKVVLDVGSGTGILCMFAAKAGARKVIGIECSSISDYAVKIVKANKLDHVVTIIKGKVEEVELPVEKVDIIISEWMGYCLFYESMLNTVLYARDKWLAPDGLIFPDRATLYVTAIEDRQYKDYKIHWWENVYGFDMSCIKDVAIKEPLVDVVDPKQLVTNACLIKEVDIYTVKVEDLTFTSPFCLQVKRNDYVHALVAYFNIEFTRCHKRTGFSTSPESPYTHWKQTVFYMEDYLTVKTGEEIFGTIGMRPNAKNNRDLDFTIDLDFKGQLCELSCSTDYRMR

SEQ ID NO: 20460 - protein, 353 aa, Homo sapiens
MAAAEAANCIMEVSCGQAESSEKPNAEDMTSKDYYFDSYAHFGIHEEMLKDEVRTLTYRNSMFHNRHLFKDKVVLDVGSGTGILCMFAAKAGARKVIGIECSSISDYAVKIVKANKLDHVVTIIKGKVEEVELPVEKVDIIISEWMGYCLFYESMLNTVLYARDKWLAPDGLIFPDRATLYVTAIEDRQYKDYKIHWWENVYGFDMSCIKDVAIKEPLVDVVDPKQLVTNACLIKEVDIYTVKVEDLTFTSPFCLQVKRNDYVHALVAYFNIEFTRCHKRTGFSTSPESPYTHWKQTVFYMEDYLTVKTGEEIFGTIGMRPNAKNNRDLDFTIDLDFKGQLCELSCSTDYRMR

SEQ ID NO: 20461 - protein, 285 aa, Homo sapiens
MAAAEAANCIMEVSCGQAESSEKPNAEDMTSKDYYFDSYAHFGIHEEMLKDEVRTLTYRNSMFHNRHLFKDKVVLDVGSGTGILCMFAAKAGARKVIGIECSSISDYAVKIVKANKLDHVVTIIKGKVEEVELPVEKVDIIISEWMGYCLFYESMLNTVLYARDKWLEVDIYTVKVEDLTFTSPFCLQVKRNDYVHALVAYFNIEFTRCHKRTGFSTSPESPYTHWKQTVFYMEDYLTVKTGEEIFGTIGMRPNAKNNRDLDFTIDLDFKGQLCELSCSTDYRMR

SEQ ID NO: 20462 - protein, 186 aa, Homo sapiens
MGLLDRLSVLLGLKKKEVHVLCLGLDNSGKTTIINKLKPSNAQSQNILPTIGFSIEKFKSSSLSFTVFDMSGQGRYRNLWEHYYKEGQAIIFVIDSSDRLRMVVAKEELDTLLNHPDIKHRRIPILFFANKMDLRDAVTSVKVSQLLCLENIKDKPWHICASDAIKGEGLQEGVDWLQDQIQTVKT

SEQ ID NO: 20463 - protein, 193 aa, Homo sapiens
MGLLDRLSVLLGLKKKEVHVLCLGLDNSGKTTIINKLKPSNAQSQNILPTIGFSIEKFKSSSLSFTVFDMSGQGRYRNLWEHYYKEGQAIIFVIDSSDRLRMVVAKEELDTLLNHPDIKHRRIPILFFANKMDLRDAVTSVKVSQLLCLENIKDKPWHICASDAIKGEGLQEGVDWLQEKTIQSDPDCEDMKR

SEQ ID NO: 20464 - protein, 951 aa, Homo sapiens
MHKRKGPPGPPGRGAAAARQLGLLVDLSPDGLMIPEDGANDEELEAEFLALVGGQPPALEKLKGKGPLPMEAIEKMASLCMRDPDEDEEEGTDEDDLEADDDLLAELNEVLGEEQKASETPPPVAQPKPEAPHPGLETTLQERLALYQTAIESARQAGDSAKMRRYDRGLKTLENLLASIRKGNAIDEADIPPPVAIGKGPASTPTYSPAPTQPAPRIASAPEPRVTLEGPSATAPASSPGLAKPQMPPGPCSPGPLAQLQSRQRDYKLAALHAKQQGDTTAAARHFRVAKSFDAVLEALSRGEPVDLSCLPPPPDQLPPDPPSPPSQPPTPATAPSTTEVPPPPRTLLEALEQRMERYQVAAAQAKSKGDQRKARMHERIVKQYQDAIRAHKAGRAVDVAELPVPPGFPPIQGLEATKPTQQSLVGVLETAMKLANQDEGPEDEEDEVPKKQNSPVAPTAQPKAPPSRTPQSGSAPTAKAPPKATSTRAQQQLAFLEGRKKQLLQAALRAKQKNDVEGAKMHLRQAKGLEPMLEASRNGLPVDITKVPPAPVNKDDFALVQRPGPGLSQEAARRYGELTKLIRQQHEMCLNHSNQFTQLGNITETTKFEKLAEDCKRSMDILKQAFVRGLPTPTARFEQRTFSVIKIFPDLSSNDMLLFIVKGINLPTPPGLSPGDLDVFVRFDFPYPNVEEAQKDKTSVIKNTDSPEFKEQFKLCINRSHRGFRRAIQTKGIKFEVVHKGGLFKTDRVLGTAQLKLDALEIACEVREILEVLDGRRPTGGRLEVMVRIREPLTAQQLETTTERWLVIDPVPAAVPTQVAGPKGKAPPVPAPARESGNRSARPLHSLSVLAFDQERLERKILALRQARRPVPPEVAQQYQDIMQRSQWQRAQLEQGGVGIRREYAAQLERQLQFYTEAARRLGNDGSRDAAKEALYRRNLVESELQRLRR

SEQ ID NO: 20465 - protein, 950 aa, Homo sapiens
MHKRKGPPGPPGRGAAAARQLGLLVDLSPDGLMIPEDGANDEELEAEFLALVGGQPPALEKLKGKGPLPMEAIEKMASLCMRDPDEDEEEGTDEDDLEADDDLLAELNEVLGEEQKASETPPPVAQPKPEAPHPGLETTLQERLALYQTAIESARQAGDSAKMRRYDRGLKTLENLLASIRKGNAIDEADIPPPVAIGKGPASTPTYSPAPTQPAPRIASAPEPRVTLEGPSATAPASSPGLAKPQMPPGPCSPGPLAQLQSRQRDYKLAALHAKQQGDTTAAARHFRVAKSFDAVLEALSRGEPVDLSCLPPPPDQLPPDPPSPPSQPPTPATAPSTTEVPPPPRTLLEALEQRMERYQVAAAQAKSKGDQRKARMHERIVKQYQDAIRAHKAGRAVDVAELPVPPGFPPIQGLEATKPTQQSLVGVLETAMKLANQDEGPEDEEDEVPKKQNSPVAPTAQPKAPPSRTPQSGSAPTAKAPPKATSTRAQQQLAFLEGRKKQLLQAALRAKQKNDVEGAKMHLRQAKGLEPMLEASRNGLPVDITKVPPAPVNKDDFALVQRPGPGLSQEAARRYGELTKLIRQQHEMCLNHSNQFTQLGNITETTKFEKLAEDCKRSMDILKQAFVRGLPTPTARFEQRTFSVIKIFPDLSSNDMLLFIVKGINLPTPPGLSPGDLDVFVRFDFPYPNVEEAQKDKTSVIKNTDSPEFKEQFKLCINRSHRGFRRAIQTKGIKFEVVHKGGLFKTDRVLGTAQLKLDALEIACEVREILEVLDGRRPTGGRLEVMVRIREPLTAQQLETTTERWLVIDPVPAAVPTVAGPKGKAPPVPAPARESGNRSARPLHSLSVLAFDQERLERKILALRQARRPVPPEVAQQYQDIMQRSQWQRAQLEQGGVGIRREYAAQLERQLQFYTEAARRLGNDGSRDAAKEALYRRNLVESELQRLRR

SEQ ID NO: 20466 - protein, 394 aa, Homo sapiens
MGMKHSSRCLLLRRKMAENAAESTEVNSPPSQPPQPVVPAKPVQCVHHVSTQPSCPGRGKMSKLLNPEEMTSRDYYFDSYAHFGIHEEMLKDEVRTLTYRNSMYHNKHVFKDKVVLDVGSGTGILSMFAAKAGAKKVFGIECSSISDYSEKIIKANHLDNIITIFKGKVEEVELPVEKVDIIISEWMGYCLFYESMLNTVIFARDKWLKPGGLMFPDRAALYVVAIEDRQYKDFKIHWWENVYGFDMTCIRDVAMKEPLVDIVDPKQVVTNACLIKEVDIYTVKTEELSFTSAFCLQIQRNDYVHALVTYFNIEFTKCHKKMGFSTAPDAPYTHWKQTVFYLEDYLTVRRGEEIYGTISMKPNAKNVRDLDFTVDLDFKGQLCETSVSNDYKMR

SEQ ID NO: 20467 - protein, 385 aa, Homo sapiens
MESLASDGFKLKEVSSVNSPPSQPPQPVVPAKPVQCVHHVSTQPSCPGRGKMSKLLNPEEMTSRDYYFDSYAHFGIHEEMLKDEVRTLTYRNSMYHNKHVFKDKVVLDVGSGTGILSMFAAKAGAKKVFGIECSSISDYSEKIIKANHLDNIITIFKGKVEEVELPVEKVDIIISEWMGYCLFYESMLNTVIFARDKWLKPGGLMFPDRAALYVVAIEDRQYKDFKIHWWENVYGFDMTCIRDVAMKEPLVDIVDPKQVVTNACLIKEVDIYTVKTEELSFTSAFCLQIQRNDYVHALVTYFNIEFTKCHKKMGFSTAPDAPYTHWKQTVFYLEDYLTVRRGEEIYGTISMKPNAKNVRDLDFTVDLDFKGQLCETSVSNDYKMR

SEQ ID NO: 20468 - protein, 1519 aa, Homo sapiens
MEPEPVEDCVQSTLAALYPPFEATAPTLLGQVFQVVERTYREDALRYTLDFLVPAKHLLAKVQQEACAQYSGFLFFHEGWPLCLHEQVVVQLAALPWQLLRPGDFYLQVVPSAAQAPRLALKCLAPGGGRVQEVPVPNEACAYLFTPEWLQGINKDRPTGRLSTCLLSAPSGIQRLPWAELICPRFVHKEGLMVGHQPSTLPPELPSGPPGLPSPPLPEEALGTRSPGDGHNAPVEGPEGEYVELLEVTLPVRGSPTDAEGSPGLSRVRTVPTRKGAGGKGRHRRHRAWMHQKGLGPRGQDGARPPGEGSSTGASPESPPGAEAVPEAAVLEVSEPPAEAVGEASGSCPLRPGELRGGGGGGQGAEGPPGTPRRTGKGNRRKKRAAGRGALSRGGDSAPLSPGDKEDASHQEALGNLPSPSEHKLPECHLVKEEYEGSGKPESEPKELKTAGEKEPQLSEACGPTEEGAGERELEGPGLLCMAGHTGPEGPLSDTPTPPLETVQEGKGDNIPEEALAVSVSDHPDVAWDLMASGFLILTGGVDQSGRALLTITPPCPPEEPPPSRDTLNTTLHYLHSLLRPDLQTLGLSVLLDLRQAPPLPPALIPALSQLQDSGDPPLVQRLLILIHDDLPTELCGFQGAEVLSENDLKRVAKPEELQWELGGHRDPSPSHWVEIHQEVVRLCRLCQGVLGSVRQAIEELEGAAEPEEEEAVGMPKPLQKVLADPRLTALQRDGGAILMRLRSTPSSKLEGQGPATLYQEVDEAIHQLVRLSNLHVQQQEQRQCLRRLQQVLQWLSGPGEEQLASFAMPGDTLSALQETELRFRAFSAEVQERLAQAREALALEENATSQKVLDIFEQRLEQVESGLHRALRLQRFFQQAHEWVDEGFARLAGAGPGREAVLAALALRRAPEPSAGTFQEMRALALDLGSPAALREWGRCQARCQELERRIQQHVGEEASPRGYRRRRADGASSGGAQWGPRSPSPSLSSLLLPSSPGPRPAPSHCSLAPCGEDYEEEGPELAPEAEGRPPRAVLIRGLEVTSTEVVDRTCSPREHVLLGRARGPDGPWGVGTPRMERKRSISAQQRLVSELIACEQDYVATLSEPVPPPGPELTPELRGTWAAALSARERLRSFHRTHFLRELQGCATHPLRIGACFLRHGDQFSLYAQYVKHRHKLENGLAALSPLSKGSMEAGPYLPRALQQPLEQLTRYGRLLEELLREAGPELSSECRALGAAVQLLREQEARGRDLLAVEAVRGCEIDLKEQGQLLHRDPFTVICGRKKCLRHVFLFEHLLLFSKLKGPEGGSEMFVYKQAFKTADMGLTENIGDSGLCFELWFRRRRAREAYTLQATSPEIKLKWTSSIAQLLWRQAAHNKELRVQQMVSMGIGNKPFLDIKALGERTLSALLTGRAARTRASVAVSSFEHAGPSLPGLSPGACSLPARVEEEAWDLDVKQISLAPETLDSSGDVSPGPRNSPSLQPPHPGSSTPTLASRGILGLSRQSHARALSDPTTPL

SEQ ID NO: 20469 - protein, 805 aa, Homo sapiens
MPKPLQKVLADPRLTALQRDGGAILMRLRSTPSSKLEGQGPATLYQEVDEAIHQLVRLSNLHVQQQEQRQCLRRLQQVLQWLSGPGEEQLASFAMPGDTLSALQETELRFRAFSAEVQERLAQAREALALEENATSQKVLDIFEQRLEQVESGLHRALRLQRFFQQAHEWVDEGFARLAGAGPGREAVLAALALRRAPEPSAGTFQEMRALALDLGSPAALREWGRCQARCQELERRIQQHVGEEASPRGYRRRRADGASSGGAQWGPRSPSPSLSSLLLPSSPGPRPAPSHCSLAPCGEDYEEEGPELAPEAEGRPPRAVLIRGLEVTSTEVVDRTCSPREHVLLGRARGPDGPWGVGTPRMERKRSISAQQRLVSELIACEQDYVATLSEPVPPPGPELTPELRGTWAAALSARERLRSFHRTHFLRELQGCATHPLRIGACFLRHGDQFSLYAQYVKHRHKLENGLAALSPLSKGSMEAGPYLPRALQQPLEQLTRYGRLLEELLREAGPELSSECRALGAAVQLLREQEARGRDLLAVEAVRGCEIDLKEQGQLLHRDPFTVICGRKKCLRHVFLFEHLLLFSKLKGPEGGSEMFVYKQAFKTADMGLTENIGDSGLCFELWFRRRRAREAYTLQATSPEIKLKWTSSIAQLLWRQAAHNKELRVQQMVSMGIGNKPFLDIKALGERTLSALLTGRAARTRASVAVSSFEHAGPSLPGLSPGACSLPARVEEEAWDLDVKQISLAPETLDSSGDVSPGPRNSPSLQPPHPGSSTPTLASRGILGLSRQSHARALSDPTTPL

SEQ ID NO: 20470 - protein, 1498 aa, Homo sapiens
MEPEPVEDCVQSTLAALYPPFEATAPTLLGQVFQVVERTYREDALRYTLDFLVPAKHLLAKVQQEACAQYSGFLFFHEGWPLCLHEQVVVQLAALPWQLLRPGDFYLQVVPSAAQAPRLALKCLAPGGGRVQEVPVPNEACAYLFTPEWLQGINKDRPTGRLSTCLLSAPSGIQRLPWAELICPRFVHKEGLMVGHQPSTLPPELPSGPPGLPSPPLPEEALGTRSPGDGHNAPVEGPEGEYVELLEVTLPVRGSPTDAEGSPGLSRVRTVPTRKGAGGKGRHRRHRAWMHQKGLGPRGQDGARPPGEGSSTGASPESPPGAEAVPEAAVLEVSEPPAEAVGEASGSCPLRPGELRGGGGGGQGAEGPPGTPRRTGKGNRRKKRAAGRGALSRGGDSAPLSPGDKEDASHQEALGNLPSPSEHKLPECHLVKEEYEGSGKPESEPKELKTAGEKEPQLSEACGPTEEGAGERELEGPGLLCMAGHTGPEGPLSDTPTPPLETVQEGKGDNIPEEALAVSVSDHPDVAWDLMASGFLILTGGVDQSGRALLTITPPCPPEEPPPSRDTLNTTLHYLHSLLRPDLQTLGLSVLLDLRQAPPLPPALIPALSQLQDSGDPPLVQRLLILIHDDLPTELCGFQGAEVLSENDLKRVAKPEELQWELGGHRDPSPSHWVEIHQEVVRLCRLCQGVLGSVRQAIEELEGAAEPEEEEAVGMPKPLQKVLADPRLTALQRDGGAILMRLRSTPSSKLEGQGPATLYQEVDEAIHQLVRLSNLHVQQQEQRQCLRRLQQVLQWLSGPGEEQLASFAMPGDTLSALQETELRFRAFSAEVQERLAQAREALALEENATSQKVLDIFEQRLEQVESGLHRALRLQRFFQQAHEWVDEGFARLAGAGPGREAVLAALALRRAPEPSAGTFQEMRALALDLGSPAALREWGRCQARCQELERRIQQHVGEEASPRGYRRRRADGASSGGAQWGPRSPSPSLSSLLLPSSPGPRPAPSHCSLAPCGEDYEEEGPELAPEAEGRPPRAVLIRGLEVTSTEVVDRTCSPREHVLLGRARGPDGPWGVGTPRMERKRSISAQQRLVSELIACEQDYVATLSEPVPPPGPELTPELRGTWAAALSARERLRSFHRTHFLRELQGCATHPLRIGACFLRHGDQFSLYAQYVKHRHKLENGLAALSPLSKGSMEAGPYLPRALQQPLEQLTRYGRLLEELLREAGPELSSECRALGAAVQLLREQEARGRDLLAVEAVRGCEIDLKEQGQLLHRDPFTVICGRKKCLRHVFLFEHLLLFSKLKGPEGGSEMFVYKQAFKTADMGLTENIGDSGLCFELWFRRRRAREAYTLQATSPEIKLKWTSSIAQLLWRQAAHNKELRVQQMVSMGIGNKPFLDIKALGERTLSALLTGRGEGQGAGGWPPGVKTLTMRIQRGGMVESQERHLVPKSVGLAGRPSVRLRVIPGSQEGFPTPAPHPPLPTLCSRPHPGLRGRVIL

SEQ ID NO: 20471 - protein, 1471 aa, Homo sapiens
MEPEPVEDCVQSTLAALYPPFEATAPTLLGQVFQVVERTYREDALRYTLDFLVPAKHLLAKVQQEACAQYSGFLFFHEGWPLCLHEQVVVQLAALPWQLLRPGDFYLQVVPSAAQAPRLALKCLAPGGGRVQEVPVPNEACAYLFTPEWLQGINKDRPTGRLSTCLLSAPSGIQRLPWAELICPRFVHKEGLMVGHQPSTLPPELPSGPPGLPSPPLPEEALGTRSPGDGHNAPVEGPEGEYVELLEVTLPVRGSPTDAEGSPGLSRVRTVPTRKGAGGKGRHRRHRAWMHQKGLGPRGQDGARPPGEGSSTGASPESPPGAEAVPEAAVLEVSEPPAEAVGEASGSCPLRPGELRGGGGGGQGAEGPPGTPRRTGKGNRRKKRAAGRGALSRGGDSAPLSPGDKEDASHQEALGNLPSPSEHKLPECHLVKEEYEGSGKPESEPKELKTAGEKEPQLSEACGPTEEGAGERELEGPGLLCMAGHTGPEGPLSDTPTPPLETVQEGKGDNIPEEALAVSVSDHPDVAWDLMASGFLILTGGVDQSGRALLTITPPCPPEEPPPSRDTLNTTLHYLHSLLRPDLQTLGLSVLLDLRQAPPLPPALIPALSQLQDSGDPPLVQRLLILIHDDLPTELCGFQGAEVLSENDLKRVAKPEELQWELGGHRDPSPSHWVEIHQEVVRLCRLCQGVLGSVRQAIEELEGAAEPEEEEAVGMPKPLQKVLADPRLTALQRDGGAILMRLRSTPSSKLEGQGPATLYQEVDEAIHQLVRLSNLHVQQQEQRQCLRRLQQVLQWLSGPGEEQLASFAMPGDTLSALQETELRFRAFSAEVQERLAQAREALALEENATSQKVLDIFEQRLEQVESGLHRALRLQRFFQQAHEWVDEGFARLAGAGPGREAVLAALALRRAPEPSAGTFQEMRALALDLGSPAALREWGRCQARCQELERRIQQHVGEEASPRGYRRRRADGASSGGAQWGPRSPSPSLSSLLLPSSPGPRPAPSHCSLAPCGEDYEEEGPELAPEAEGRPPRAVLIRGLEVTSTEVVDRTCSPREHVLLGRARGPDGPWGVGTPRMERKRSISAQQRLVSELIACEQDYVATLSEPVPPPGPELTPELRGTWAAALSARERLRSFHRTHFLRELQGCATHPLRIGACFLRHGDQFSLYAQYVKHRHKLENGLAALSPLSKGSMEAGPYLPRALQQPLEQLTRYGRLLEELLREAGPELSSECRALGAAVQLLREQEARGRDLLAVEAVRGCEIDLKEQGQLLHRDPFTVICGRKKCLRHVFLFEHLLLFSKLKGPEGGSEMFVYKQAFKTADMGLTENIGDSGLCFELWFRRRRAREAYTLQATSPEIKLKWTSSIAQLLWRQAAHNKELRVQQMVSMGIGNKPFLDIKALGERTLSALLTGRAPETLDSSGDVSPGPRNSPSLQPPHPGSSTPTLASRGILGLSRQSHARALSDPTTPL

SEQ ID NO: 20472 - protein, 321 aa, Homo sapiens
MRRSSGFGGQKGQGPSCSFTGCWCCRGDDVAESDDSPFAQCGYNIQEKHLGKLHRAASRGEVSKVECILSSGSADLDERDKKKRTALHLACANGHPEVVALLVDRGCQLDVFDNKNRTALLKAVQCQEEECATILLEHGADPDLPDVYGNTTLHYAIYNEDIPMTKKLLLHHANIESANKDELTPFLLAVHEQKQQMEDFLRKQKENLTAVKLESIHQVMSEYKENETPRNPQNSNPEGTSNKMACLGEGAAGAKVDEIPGNPVKRLFNKPSIDDSRPMSANEDFDFDTEEKATEPANGKRQNGMGIIESAPQEHTNNENI

SEQ ID NO: 20473 - protein, 661 aa, Homo sapiens
MAFDVSCFFWVVLFSAGCKVITSWDQMCIEKEANKTYNCENLGLSEIPDTLPNTTEFLEFSFNFLPTIHNRTFSRLMNLTFLDLTRCQINWIHEDTFQSHHQLSTLVLTGNPLIFMAETSLNGPKSLKHLFLIQTGISNLEFIPVHNLENLESLYLGSNHISSIKFPKDFPARNLKVLDFQNNAIHYISREDMRSLEQAINLSLNFNGNNVKGIELGAFDSTIFQSLNFGGTPNLSVIFNGLQNSTTQSLWLGTFEDIDDEDISSAMLKGLCEMSVESLNLQEHRFSDISSTTFQCFTQLQELDLTATHLKGLPSGMKGLNLLKKLVLSVNHFDQLCQISAANFPSLTHLYIRGNVKKLHLGVGCLEKLGNLQTLDLSHNDIEASDCCSLQLKNLSHLQTLNLSHNEPLGLQSQAFKECPQLELLDLAFTRLHINAPQSPFQNLHFLQVLNLTYCFLDTSNQHLLAGLPVLRHLNLKGNHFQDGTITKTNLLQTVGSLEVLILSSCGLLSIDQQAFHSLGKMSHVDLSHNSLTCDSIDSLSHLKGIYLNLAANSINIISPRLLPILSQQSTINLSHNPLDCTCSNIHFLTWYKENLHKLEGSEETTCANPPSLRGVKLSDVKLSCGITAIGIFFLIVFLLLLAILLFFAVKYLLRWKYQHI

SEQ ID NO: 20474 - protein, 437 aa, Homo sapiens
MLWKLTDNIKYEDCEDRHDGTSNGTARLPQLGTVGQSPYTSAPPLSHTPNADFQPPYFPPPYQPIYPQSQDPYSHVNDPYSLNPLHAQPQPQHPGWPGQRQSQESGLLHTHRGLPHQLSGLDPRRDYRRHEDLLHGPHALSSGLGDLSIHSLPHAIEEVPHVEDPGINIPDQTVIKKGPVSLSKSNSNAVSAIPINKDNLFGGVVNPNEVFCSVPGRLSLLSSTSKYKVTVAEVQRRLSPPECLNASLLGGVLRRAKSKNGGRSLREKLDKIGLNLPAGRRKAANVTLLTSLVEGEAVHLARDFGYVCETEFPAKAVAEFLNRQHSDPNEQVTRKNMLLATKQICKEFTDLLAQDRSPLGNSRPNPILEPGIQSCLTHFNLISHGFGSPAVCAAVTALQNYLTEALKAMDKMYLSNNPNSHTDNNAKSSDKEEKHRK

SEQ ID NO: 20475 - protein, 431 aa, Homo sapiens
MLVHSFSAMDRHDGTSNGTARLPQLGTVGQSPYTSAPPLSHTPNADFQPPYFPPPYQPIYPQSQDPYSHVNDPYSLNPLHAQPQPQHPGWPGQRQSQESGLLHTHRGLPHQLSGLDPRRDYRRHEDLLHGPHALSSGLGDLSIHSLPHAIEEVPHVEDPGINIPDQTVIKKGPVSLSKSNSNAVSAIPINKDNLFGGVVNPNEVFCSVPGRLSLLSSTSKYKVTVAEVQRRLSPPECLNASLLGGVLRRAKSKNGGRSLREKLDKIGLNLPAGRRKAANVTLLTSLVEGEAVHLARDFGYVCETEFPAKAVAEFLNRQHSDPNEQVTRKNMLLATKQICKEFTDLLAQDRSPLGNSRPNPILEPGIQSCLTHFNLISHGFGSPAVCAAVTALQNYLTEALKAMDKMYLSNNPNSHTDNNAKSSDKEEKHRK

SEQ ID NO: 20476 - protein, 365 aa, Homo sapiens
MLWKLTDNIKYEDCEDRHDGTSNGTARLPQLGTVGQSPYTSAPPLSHTPNADFQPPYFPPPYQPIYPQSQDPYSHVNDPYSLNPLHAQPQPQHPGWPGQRQSQESGLLHTHRGLPHQLSGLDPRRDYRRHEDLLHGPHALSSGLGDLSIHSLPHAIEEVPHVEDPGINIPDQTVIKKGPVSLSKSNSNAVSAIPINKDNLFGGVVNPNEVFCSVPGRLSLLSSTSKYKVTVAEVQRRLSPPECLNASLLGGVLRRAKSKNGGRSLREKLDKIGLNLPAGRRKAANVTLLTSLVEGKRIHLLTRRNFLLGKWIIFSGQMFGRILCQLGSFIFAENIARCEWNYFMAKRNICMYSYTSILLPSFPLP

SEQ ID NO: 20477 - protein, 433 aa, Homo sapiens
MSILAKMGDWQDRHDGTSNGTARLPQLGTVGQSPYTSAPPLSHTPNADFQPPYFPPPYQPIYPQSQDPYSHVNDPYSLNPLHAQPQPQHPGWPGQRQSQESGLLHTHRGLPHQLSGLDPRRDYRRHEDLLHGPHALSSGLGDLSIHSLPHAIEEVPHVEDPGINIPDQTVIKKGPVSLSKSNSNAVSAIPINKDNLFGGVVNPNEVFCSVPGRLSLLSSTSKYKVTVAEVQRRLSPPECLNASLLGGVLRRAKSKNGGRSLREKLDKIGLNLPAGRRKAANVTLLTSLVEGEAVHLARDFGYVCETEFPAKAVAEFLNRQHSDPNEQVTRKNMLLATKQICKEFTDLLAQDRSPLGNSRPNPILEPGIQSCLTHFNLISHGFGSPAVCAAVTALQNYLTEALKAMDKMYLSNNPNSHTDNNAKSSDKEEKHRK

SEQ ID NO: 20478 - protein, 435 aa, Homo sapiens
MIGGLFIYNHKGEVLISRVYRDDIGRNAVDAFRVNVIHARQQVRSPVTNIARTSFFHVKRSNIWLAAVTKQNVNAAMVFEFLYKMCDVMAAYFGKISEENIKNNFVLIYELLDEILDFGYPQNSETGALKTFITQQGIKSQHQTKEEQSQITSQVTGQIGWRREGIKYRRNELFLDVLESVNLLMSPQGQVLSAHVSGRVVMKSYLSGMPECKFGMNDKIVIEKQGKGTADETSKSGKQSIAIDDCTFHQCVRLSKFDSERSISFIPPDGEFELMRYRTTKDIILPFRVIPLVREVGRTKLEVKVVIKSNFKPSLLAQKIEVRIPTPLNTSGVQVICMKGKAKYKASENAIVWKIKRMAGMKESQISAEIELLPTNDKKKWARPPISMNFEVPFAPSGLKVRYLKVFEPKLNYSDHDVIKWVRYIGRSGIYETRC

SEQ ID NO: 20479 - protein, 433 aa, Homo sapiens
MIGGLFIYNHKGEVLISRVYRDDIGRNAVDAFRVNVIHARQQVRSPVTNIARTSFFHVKRSNIWLAAVTKQNVNAAMVFEFLYKMCDVMAAYFGKISEENIKNNFVLIYELLDEILDFGYPQNSETGALKTFITQQGIKSQTKEEQSQITSQVTGQIGWRREGIKYRRNELFLDVLESVNLLMSPQGQVLSAHVSGRVVMKSYLSGMPECKFGMNDKIVIEKQGKGTADETSKSGKQSIAIDDCTFHQCVRLSKFDSERSISFIPPDGEFELMRYRTTKDIILPFRVIPLVREVGRTKLEVKVVIKSNFKPSLLAQKIEVRIPTPLNTSGVQVICMKGKAKYKASENAIVWKIKRMAGMKESQISAEIELLPTNDKKKWARPPISMNFEVPFAPSGLKVRYLKVFEPKLNYSDHDVIKWVRYIGRSGIYETRC

SEQ ID NO: 20480 - protein, 493 aa, Homo sapiens
MEKYENLGLVGEGSYGMVMKCRNKDTGRIVAIKKFLESDDDKMVKKIAMREIKLLKQLRHENLVNLLEVCKKKKRWYLVFEFVDHTILDDLELFPNGLDYQVVQKYLFQIINGIGFCHSHNIIHRDIKPENILVSQSGVVKLCDFGFARTLAAPGEVYTDYVATRWYRAPELLVGDVKYGKAVDVWAIGCLVTEMFMGEPLFPGDSDIDQLYHIMMCLGNLIPRHQELFNKNPVFAGVRLPEIKEREPLERRYPKLSEVVIDLAKKCLHIDPDKRPFCAELLHHDFFQMDGFAERFSQELQLKVQKDARNVSLSKKSQNRKKEKEKDDSLVEERKTLVVQDTNADPKIKDYKLFKIKGSKIDGEKAEKGNRASNASCLHDSRTSHNKIVPSTSLKDCSNVSVDHTRNPSVAIPPLTHNLSAVAPSINSGMGTETIPIQGYRVDEKTKKCSIPFVKPNRHSPSGIYNINVTTLVSGPPLSDDSGADLPQMEHQH

SEQ ID NO: 20481 - protein, 267 aa, Homo sapiens
MHLLLFQLLVLLPLGKTTRHQDGRQNQSSLSPVLLPRNQRELPTGNHEEAEEKPDLFVAVPHLVATSPAGEGQRQREKMLSRFGRFWKKPEREMHPSRDSDSEPFPPGTQSLIQPIDGMKMEKSPLREEAKKFWHHFMFRKTPASQGVILPIKSHEVHWETCRTVPFSQTITHEGCEKVVVQNNLCFGKCGSVHFPGAAQHSHTSCSHCLPAKFTTMHLPLNCTELSSVIKVVMLVEECQCKVKTEHEDGHILHAGSQDSFIPGVSA

SEQ ID NO: 20482 - protein, 1094 aa, Homo sapiens
MSSNSFPYNEQSGGGEATELGQEATSTISPSGAFGLFSSDLKKNEDLKQMLESNKDSAKLDAMKRIVGMIAKGKNASELFPAVVKNVASKNIEIKKLVYVYLVRYAEEQQDLALLSISTFQRALKDPNQLIRASALRVLSSIRVPIIVPIMMLAIKEASADLSPYVRKNAAHAIQKLYSLDPEQKEMLIEVIEKLLKDKSTLVAGSVVMAFEEVCPDRIDLIHKNYRKLCNLLVDVEEWGQVVIIHMLTRYARTQFVSPWKEGDELEDNGKNFYESDDDQKEKTDKKKKPYTMDPDHRLLIRNTKPLLQSRNAAVVMAVAQLYWHISPKSEAGIISKSLVRLLRSNREVQYIVLQNIATMSIQRKGMFEPYLKSFYVRSTDPTMIKTLKLEILTNLANEANISTLLREFQTYVKSQDKQFAAATIQTIGRCATNILEVTDTCLNGLVCLLSNRDEIVVAESVVVIKKLLQMQPAQHGEIIKHMAKLLDSITVPVARASILWLIGENCERVPKIAPDVLRKMAKSFTSEDDLVKLQILNLGAKLYLTNSKQTKLLTQYILNLGKYDQNYDIRDRTRFIRQLIVPNVKSGALSKYAKKIFLAQKPAPLLESPFKDRDHFQLGTLSHTLNIKATGYLELSNWPEVAPDPSVRNVEVIELAKEWTPAGKAKQENSAKKFYSESEEEEDSSDSSSDSESESGSESGEQGESGEEGDSNEDSSEDSSSEQDSESGRESGLENKRTAKRNSKAKGKSDSEDGEKENEKSKTSDSSNDESSSIEDSSSDSESESEPESESESRRVTKEKEKKTKQDRTPLTKDVSLLDLDDFNPVSTPVALPTPALSPSLMADLEGLHLSTSSSVISVSTPAFVPTKTHVLLHRMSGKGLAAHYFFPRQPCIFGDKMVSIQITLNNTTDRKIENIHIGEKKLPIGMKMHVFNPIDSLEPEGSITVSMGIDFCDSTQTASFQLCTKDDCFNVNIQPPVGELLLPVAMSEKDFKKEQGVLTGMNETSAVIIAAPQNFTPSVIFQKVVNVANVGAVPSGQDNIHRFAAKTVHSGSLMLVTVELKEGSTAQLIINTEKTVIGSVLLRELKPVLSQG

SEQ ID NO: 20483 - protein, 1045 aa, Homo sapiens
MLESNKDSAKLDAMKRIVGMIAKGKNASELFPAVVKNVASKNIEIKKLVYVYLVRYAEEQQDLALLSISTFQRALKDPNQLIRASALRVLSSIRVPIIVPIMMLAIKEASADLSPYVRKNAAHAIQKLYSLDPEQKEMLIEVIEKLLKDKSTLVAGSVVMAFEEVCPDRIDLIHKNYRKLCNLLVDVEEWGQVVIIHMLTRYARTQFVSPWKEGDELEDNGKNFYESDDDQKEKTDKKKKPYTMDPDHRLLIRNTKPLLQSRNAAVVMAVAQLYWHISPKSEAGIISKSLVRLLRSNREVQYIVLQNIATMSIQRKGMFEPYLKSFYVRSTDPTMIKTLKLEILTNLANEANISTLLREFQTYVKSQDKQFAAATIQTIGRCATNILEVTDTCLNGLVCLLSNRDEIVVAESVVVIKKLLQMQPAQHGEIIKHMAKLLDSITVPVARASILWLIGENCERVPKIAPDVLRKMAKSFTSEDDLVKLQILNLGAKLYLTNSKQTKLLTQYILNLGKYDQNYDIRDRTRFIRQLIVPNVKSGALSKYAKKIFLAQKPAPLLESPFKDRDHFQLGTLSHTLNIKATGYLELSNWPEVAPDPSVRNVEVIELAKEWTPAGKAKQENSAKKFYSESEEEEDSSDSSSDSESESGSESGEQGESGEEGDSNEDSSEDSSSEQDSESGRESGLENKRTAKRNSKAKGKSDSEDGEKENEKSKTSDSSNDESSSIEDSSSDSESESEPESESESRRVTKEKEKKTKQDRTPLTKDVSLLDLDDFNPVSTPVALPTPALSPSLMADLEGLHLSTSSSVISVSTPAFVPTKTHVLLHRMSGKGLAAHYFFPRQPCIFGDKMVSIQITLNNTTDRKIENIHIGEKKLPIGMKMHVFNPIDSLEPEGSITVSMGIDFCDSTQTASFQLCTKDDCFNVNIQPPVGELLLPVAMSEKDFKKEQGVLTGMNETSAVIIAAPQNFTPSVIFQKVVNVANVGAVPSGQDNIHRFAAKTVHSGSLMLVTVELKEGSTAQLIINTEKTVIGSVLLRELKPVLSQG

SEQ ID NO: 20484 - protein, 990 aa, Homo sapiens
MGPPSSSGFYVSRAVALLLAGLVAALLLALAVLAALYGHCERVPPSELPGLRDLEAESSPPLRQKPTPTPKPSSARELAVTTTPSNWRPPGPWDQLRLPPWLVPLHYDLELWPQLRPDELPAGSLPFTGRVNITVRCTVATSRLLLHSLFQDCERAEVRGPLSPGTGNATVGRVPVDDVWFALDTEYMVLELSEPLKPGSSYELQLSFSGLVKEDLREGLFLNVYTDQGERRALLASQLEPTFARYVFPCFDEPALKATFNITMIHHPSYVALSNMPKLGQSEKEDVNGSKWTVTTFSTTPHMPTYLVAFVICDYDHVNRTERGKEIRIWARKDAIANGSADFALNITGPIFSFLEDLFNISYSLPKTDIIALPSFDNHAMENWGLMIFDESGLLLEPKDQLTEKKTLISYVVSHEIGHQWFGNLVTMNWWNNIWLNEGFASYFEFEVINYFNPKLPRNEIFFSNILHNILREDHALVTRAVAMKVENFKTSEIQELFDIFTYSKGASMARMLSCFLNEHLFVSALKSYLKTFSYSNAEQDDLWRHFQMAIDDQSTVILPATIKNIMDSWTHQSGFPVITLNVSTGVMKQEPFYLENIKNRTLLTSNDTWIVPILWIKNGTTQPLVWLDQSSKVFPEMQVSDSDHDWVILNLNMTGYYRVNYDKLGWKKLNQQLEKDPKAIPVIHRLQLIDDAFSLSKNNYIEIETALELTKYLAEEDEIIVWHTVLVNLVTRDLVSEVNIYDIYSLLKRYLLKRLNLIWNIYSTIIRENVLALQDDYLALISLEKLFVTACWLGLEDCLQLSKELFAKWVDHPENEIPYPIKDVVLCYGIALGSDKEWDILLNTYTNTTNKEEKIQLAYAMSCSKDPWILNRYMEYAISTSPFTSNETNIIEVVASSEVGRYVAKDFLVNNWQAVSKRYGTQSLINLIYTIGRTVTTDLQIVELQQFFSNMLEEHQRIRVHANLQTIKNENLKNKKLSARIAAWLRRNT

SEQ ID NO: 20485 - protein, 701 aa, Homo sapiens
MGPPSSSGFYVSRAVALLLAGLVAALLLALAVLAALYGHCERVPPSELPGLRDLEAESSPPLRQKPTPTPKPSSARELAVTTTPSNWRPPGPWDQLRLPPWLVPLHYDLELWPQLRPDELPAGSLPFTGRVNITVRCTVATSRLLLHSLFQDCERAEVRGPLSPGTGNATVGRVPVDDVWFALDTEYMVLELSEPLKPGSSYELQLSFSGLVKEDLREGLFLNVYTDQGERRALLASQLEPTFARYVFPCFDEPALKATFNITMIHHPSYVALSNMPKLGQSEKEDVNGSKWTVTTFSTTPHMPTYLVAFVICDYDHVNRTERGKEIRIWARKDAIANGSADFALNITGPIFSFLEDLFNISYSLPKTDIIALPSFDNHAMENWGLMIFDESGLLLEPKDQLTEKKTLISYVVSHEIGHQWFGNLVTMNWWNNIWLNEGFASYFEFEVINYFNPKLPRNEIFFSNILHNILREDHALVTRAVAMKVENFKTSEIQELFDIFTYSKGASMARMLSCFLNEHLFVSALKSYLKTFSYSNAEQDDLWRHFQMAIDDQSTVILPATIKNIMDSWTHQSGFPVITLNVSTGVMKQEPFYLENIKNRTLLTSNDTWIVPILWIKNGTTQPLVWLDQSSKVFPEMQVSDSDHDWVILNLNMTGYYRVNYDKLGWKKLNQQLEKDPKAIPVIHRLQLIDDAFSLSKGTY

SEQ ID NO: 20486 - protein, 226 aa, Homo sapiens
MKVENFKTSEIQELFDIFTYSKGASMARMLSCFLNEHLFVSALKSYLKTFSYSNAEQDDLWRHFQMAIDDQSTVILPATIKNIMDSWTHQSGFPVITLNVSTGVMKQEPFYLENIKNRTLLTSNDTWIVPILWIKNGTTQPLVWLDQSSKVFPEMQVSDSDHDWVILNLNMTGYYRVNYDKLGWKKLNQQLEKDPKAIPVIHRLQLIDDAFSLSNLQDFGHLKVPN

SEQ ID NO: 20487 - protein, 198 aa, Homo sapiens
MKVENFKTSEIQELFDIFTYSKGASMARMLSCFLNEHLFVSALKSYLKTFSYSNAEQDDLWRHFQMAIDDQSTVILPATIKNIMDSWTHQSGFPVITLNVSTGVMKQEPFYLENIKNRTLLTSNDTWIVPILWIKNGTTQPLVWLDQSSKVFPEMQVSDSDHDWVILNLNMTGYYRVNYDKLGWKKLNQQLEKDPKMR

SEQ ID NO: 20488 - protein, 780 aa, Homo sapiens
MNVRIFYSVSQSPHSLLSLLFYCAILESRISATMPLFKLPAEEKQIDDAMRNFAEKVFASEVKDEGGRQEISPFDVDEICPISHHEMQAHIFHLETLSTSTEARRKKRFQGRKTVNLSIPLSETSSTKLSHIDEYISSSPTYQTVPDFQRVQITGDYASGVTVEDFEIVCKGLYRALCIREKYMQKSFQRFPKTPSKYLRNIDGEAWVANESFYPVFTPPVKKGEDPFRTDNLPENLGYHLKMKDGVVYVYPNEAAVSKDEPKPLPYPNLDTFLDDMNFLLALIAQGPVKTYTHRRLKFLSSKFQVHQMLNEMDELKELKNNPHRDFYNCRKVDTHIHAAACMNQKHLLRFIKKSYQIDADRVVYSTKEKNLTLKELFAKLKMHPYDLTVDSLDVHAGRQTFQRFDKFNDKYNPVGASELRDLYLKTDNYINGEYFATIIKEVGADLVEAKYQHAEPRLSIYGRSPDEWSKLSSWFVCNRIHCPNMTWMIQVPRIYDVFRSKNFLPHFGKMLENIFMPVFEATINPQADPELSVFLKHITGFDSVDDESKHSGHMFSSKSPKPQEWTLEKNPSYTYYAYYMYANIMVLNSLRKERGMNTFLFRPHCGEAGALTHLMTAFMIADDISHGLNLKKSPVLQYLFFLAQIPIAMSPLSNNSLFLEYAKNPFLDFLQKGLMISLSTDDPMQFHFTKEPLMEEYAIAAQVFKLSTCDMCEVARNSVLQCGISHEEKVKFLGDNYLEEGPAGNDIRRTNVAQIRMAYRYETWCYELNLIAEGLKSTE

SEQ ID NO: 20489 - protein, 776 aa, Homo sapiens
MNVRIFYSVSQSPHSLLSLLFYCAILESRISATMPLFKLPEIDDAMRNFAEKVFASEVKDEGGRQEISPFDVDEICPISHHEMQAHIFHLETLSTSTEARRKKRFQGRKTVNLSIPLSETSSTKLSHIDEYISSSPTYQTVPDFQRVQITGDYASGVTVEDFEIVCKGLYRALCIREKYMQKSFQRFPKTPSKYLRNIDGEAWVANESFYPVFTPPVKKGEDPFRTDNLPENLGYHLKMKDGVVYVYPNEAAVSKDEPKPLPYPNLDTFLDDMNFLLALIAQGPVKTYTHRRLKFLSSKFQVHQMLNEMDELKELKNNPHRDFYNCRKVDTHIHAAACMNQKHLLRFIKKSYQIDADRVVYSTKEKNLTLKELFAKLKMHPYDLTVDSLDVHAGRQTFQRFDKFNDKYNPVGASELRDLYLKTDNYINGEYFATIIKEVGADLVEAKYQHAEPRLSIYGRSPDEWSKLSSWFVCNRIHCPNMTWMIQVPRIYDVFRSKNFLPHFGKMLENIFMPVFEATINPQADPELSVFLKHITGFDSVDDESKHSGHMFSSKSPKPQEWTLEKNPSYTYYAYYMYANIMVLNSLRKERGMNTFLFRPHCGEAGALTHLMTAFMIADDISHGLNLKKSPVLQYLFFLAQIPIAMSPLSNNSLFLEYAKNPFLDFLQKGLMISLSTDDPMQFHFTKEPLMEEYAIAAQVFKLSTCDMCEVARNSVLQCGISHEEKVKFLGDNYLEEGPAGNDIRRTNVAQIRMAYRYETWCYELNLIAEGLKSTE

SEQ ID NO: 20490 - protein, 1338 aa, Homo sapiens
MDRASELLFYVNGRKVIEKNVDPETMLLPYLRKKLRLTGTKYGCGGGGCGACTVMISRYNPITKRIRHHPANACLIPICSLYGAAVTTVEGIGSTHTRIHPVQERIAKCHGTQCGFCTPGMVMSIYTLLRNHPEPTLDQLTDALGGNLCRCTGYRPIIDACKTFCKTSGCCQSKENGVCCLDQGINGLPEFEEGSKTSPKLFAEEEFLPLDPTQELIFPPELMIMAEKQSQRTRVFGSERMMWFSPVTLKELLEFKFKYPQAPVIMGNTSVGPEVKFKGVFHPVIISPDRIEELSVVNHAYNGLTLGAGLSLAQVKDILADVVQKLPEEKTQMYHALLKHLGTLAGSQIRNMASLGGHIISRHPDSDLNPILAVGNCTLNLLSKEGKRQIPLNEQFLSKCPNADLKPQEILVSVNIPYSRKWEFVSAFRQAQRQENALAIVNSGMRVFFGEGDGIIRELCISYGGVGPATICAKNSCQKLIGRHWNEQMLDIACRLILNEVSLLGSAPGGKVEFKRTLIISFLFKFYLEVSQILKKMDPVHYPSLADKYESALEDLHSKHHCSTLKYQNIGPKQHPEDPIGHPIMHLSGVKHATGEAIYCDDMPLVDQELFLTFVTSSRAHAKIVSIDLSEALSMPGVVDIMTAEHLSDVNSFCFFTEAEKFLATDKVFCVGQLVCAVLADSEVQAKRAAKRVKIVYQDLEPLILTIEESIQHNSSFKPERKLEYGNVDEAFKVVDQILEGEIHMGGQEHFYMETQSMLVVPKGEDQEMDVYVSTQFPKYIQDIVASTLKLPANKVMCHVRRVGGAFGGKVLKTGIIAAVTAFAANKHGRAVRCVLERGEDMLITGGRHPYLGKYKAGFMNDGRILALDMEHYSNAGASLDESLFVIEMGLLKMDNAYKFPNLRCRGWACRTNLPSNTAFRGFGFPQAALITESCITEVAAKCGLSPEKVRIINMYKEIDQTPYKQEINAKNLIQCWRECMAMSSYSLRKVAVEKFNAENYWKKKGLAMVPLKFPVGLGSRAAGQAAALVHIYLDGSVLVTHGGIEMGQGVHTKMIQVVSRELRMPMSNVHLRGTSTETVPNANISGGSVVADLNGLAVKDACQTLLKRLEPIISKNPKGTWKDWAQTAFDESINLSAVGYFRGYESDMNWEKGEGQPFEYFVYGAACSEVEIDCLTGDHKNIRTDIVMDVGCSINPAIDIGQIEGAFIQGMGLYTIEELNYSPQGILHTRGPDQYKIPAICDMPTELHIALLPPSQNSNTLYSSKGLGESGVFLGCSVFFAIHDAVSAARQERGLHGPLTLNSPLTPEKIRMACEDKFTKMIPRDEPGSYVPWNVPI

SEQ ID NO: 20491 - protein, 624 aa, Homo sapiens
MSDNQSWNSSGSEEDPETESGPPVERCGVLSKWTNYIHGWQDRWVVLKNNALSYYKSEDETEYGCRGSICLSKAVITPHDFDECRFDISVNDSVWYLRAQDPDHRQQWIDAIEQHKTESGYGSESSLRRHGSMVSLVSGASGYSATSTSSFKKGHSLREKLAEMETFRDILCRQVDTLQKYFDACADAVSKDELQRDKVVEDDEDDFPTTRSDGDFLHSTNGNKEKLFPHVTPKGINGIDFKGEAITFKATTAGILATLSHCIELMVKREDSWQKRLDKETEKKRRTEEAYKNAMTELKKKSHFGGPDYEEGPNSLINEEEFFDAVEAALDRQDKIEEQSQSEKVRLHWPTSLPSGDAFSSVGTHRFVQKPYSRSSSMSSIDLVSASDDVHRFSSQVEEMVQNHMTYSLQDVGGDANWQLVVEEGEMKVYRREVEENGIVLDPLKATHAVKGVTGHEVCNYFWNVDVRNDWETTIENFHVVETLADNAIIIYQTHKRVWPASQRDVLYLSVIRKIPALTENDPETWIVCNFSVDHDSAPLNNRCVRAKINVAMICQTLVSPPEGNQEISRDNILCKITYVANVNPGGWAPASVLRAVAKREYPKFLKRFTSYVQEKTAGKPILF

SEQ ID NO: 20492 - protein, 598 aa, Homo sapiens
MSDNQSWNSSGSEEDPETESGPPVERCGVLSKWTNYIHGWQDRWVVLKNNALSYYKSEDETEYGCRGSICLSKAVITPHDFDECRFDISVNDSVWYLRAQDPDHRQQWIDAIEQHKTESGYGSESSLRRHGSMVSLVSGASGYSATSTSSFKKGHSLREKLAEMETFRDILCRQVDTLQKYFDACADAVSKDELQRDKVVEDDEDDFPTTRSDGDFLHSTNGNKEKLFPHVTPKGINGIDFKGEAITFKATTAGILATLSHCIELMVKREDSWQKRLDKETEKKRRTEEAYKNAMTELKKKSHFGGPDYEEGPNSLINEEEFFDAVEAALDRQDKIEEQSQSEKVRLHWPTSLPSGDAFSSVGTHRFVQKVEEMVQNHMTYSLQDVGGDANWQLVVEEGEMKVYRREVEENGIVLDPLKATHAVKGVTGHEVCNYFWNVDVRNDWETTIENFHVVETLADNAIIIYQTHKRVWPASQRDVLYLSVIRKIPALTENDPETWIVCNFSVDHDSAPLNNRCVRAKINVAMICQTLVSPPEGNQEISRDNILCKITYVANVNPGGWAPASVLRAVAKREYPKFLKRFTSYVQEKTAGKPILF

SEQ ID NO: 20493 - protein, 752 aa, Homo sapiens
MQHSCIPTPPSPFSAPPAFLPVVTRESRRGLSSGGSAGRNAGVTATAAAADGWKGRLPSPLVLLPRSARCQARRRRGGRTSSLLLLPPTPERALFASPSPDPSPRGLGASSGAAEGAGAGLLLGCRASMSDNQSWNSSGSEEDPETESGPPVERCGVLSKWTNYIHGWQDRWVVLKNNALSYYKSEDETEYGCRGSICLSKAVITPHDFDECRFDISVNDSVWYLRAQDPDHRQQWIDAIEQHKTESGYGSESSLRRHGSMVSLVSGASGYSATSTSSFKKGHSLREKLAEMETFRDILCRQVDTLQKYFDACADAVSKDELQRDKVVEDDEDDFPTTRSDGDFLHSTNGNKEKLFPHVTPKGINGIDFKGEAITFKATTAGILATLSHCIELMVKREDSWQKRLDKETEKKRRTEEAYKNAMTELKKKSHFGGPDYEEGPNSLINEEEFFDAVEAALDRQDKIEEQSQSEKVRLHWPTSLPSGDAFSSVGTHRFVQKPYSRSSSMSSIDLVSASDDVHRFSSQVEEMVQNHMTYSLQDVGGDANWQLVVEEGEMKVYRREVEENGIVLDPLKATHAVKGVTGHEVCNYFWNVDVRNDWETTIENFHVVETLADNAIIIYQTHKRVWPASQRDVLYLSVIRKIPALTENDPETWIVCNFSVDHDSAPLNNRCVRAKINVAMICQTLVSPPEGNQEISRDNILCKITYVANVNPGGWAPASVLRAVAKREYPKFLKRFTSYVQEKTAGKPILF

SEQ ID NO: 20494 - protein, 193 aa, Homo sapiens
MIQAILVFNNHGKPRLVRFYQRFPEEIQQQIVRETFHLVLKRDDNICNFLEGGSLIGGSDYKLIYRHYATLYFVFCVDSSESELGILDLIQVFVETLDKCFENVCELDLIFHMDKVHYILQEVVMGGMVLETNMNEIVAQIEAQNRLEKSEGGLSAAPARAVSAVKNINLPEIPRNINIGDLNIKVPNLSQFV

SEQ ID NO: 20495 - protein, 124 aa, Homo sapiens
MIQAILVFNNHGKPRLVRFYQRFPEEIQQQIVRETFHLVLKRDDNICNFLEGGSLIGGSDYKLIYRHYATLYFVFCVDSSESELGILDLIQLKKRERKKSQCNTLQTGTLALWEQGPDIRTRRL

SEQ ID NO: 20496 - protein, 1137 aa, Homo sapiens
MSDIVEKTLTALPGLFLQNQPGGGPAAAKASFSSRLGSLVRGITALTSKHEEEKLIQQELSSLKATVSAPTTTLKMMKECMVRLIYCEMLGYDASFGYIHAIKLAQQGNLLEKRVGYLAVSLFLHESHELLLLLVNTVVKDLQSTNLVEVCMALTVVSQIFPCEMIPAVLPLIEDKLQHSKEIVRRKAVLALYKFHLIAPNQVQHIHIKFRKALCDRDVGVMAASLHIYLRMIKENSSGYKDLTGSFVTILKQVVGGKLPVEFNYHSVPAPWLQIQLLRILGLLGKDDQRTSELMYDVLDESLRRAELNHNVTYAILFECVHTVYSIYPKSELLEKAAKCIGKFVLSPKINLKYLGLKALTYVIQQDPTLALQHQMTIIECLDHPDPIIKRETLELLYRITNAQNITVIVQKMLEYLHQSKEEYVIVNLVGKIAELAEKYAPDNAWFIQTMNAVFSVGGDVMHPDIPNNFLRLLAEGFDDETEDQQLRLYAVQSYLTLLDMENVFYPQRFLQVMSWVLGEYSYLLDKETPEEVIAKLYKLLMNDSVSSETKAWLIAAVTKLTSQAHSSNTVERLIHEFTISLDTCMRQHAFELKHLHENVELMKSLLPVDRSCEDLVVDASLSFLDGFVAEGLSQGAAPYKPPHQRQEEKLSQEKVLNFEPYGLSFSSSGFTGRQSPAGISLGSDVSGNSAETGLKETNSLKLEGIKKLWGKEGYLPKKESKTGDESGALPVPQESIMENVDQAITKKDQSQVLTQSKEEKEKQLLASSLFVGLGSESTINLLGKADTVSHKFRRKSKVKEAKSGETTSTHNMTCSSFSSLSNVAYEDDYYSNTLHDTGDKELKKFSLTSELLDSESLTELPLVEKFSYCSLSTPSLFANNNMEIFHPPQSTAASVAKESSLASSFLEETTEYIHSNAMEVCNNETISVSSYKIWKDDCLLMVWSVTNKSGLELKSADLEIFPAENFKVTEQPGCCLPVMEAESTKSFQYSVQIEKPFTEGNLTGFISYHMMDTHSAQLEFSVNLSLLDFIRPLKISSDDFGKLWLSFANDVKQNVKMSESQAALPSALKTLQQKLRLHIIEIIGNEGLLACQLLPSIPCLLHCRVHADVLALWFRSSCSTLPDYLLYQCQKVMEGS

SEQ ID NO: 20497 - protein, 1062 aa, Homo sapiens
MMKECMVRLIYCEMLGYDASFGYIHAIKLAQQGNLLEKRVGYLAVSLFLHESHELLLLLVNTVVKDLQSTNLVEVCMALTVVSQIFPCEMIPAVLPLIEDKLQHSKEIVRRKAVLALYKFHLIAPNQVQHIHIKFRKALCDRDVGVMAASLHIYLRMIKENSSGYKDLTGSFVTILKQVVGGKLPVEFNYHSVPAPWLQIQLLRILGLLGKDDQRTSELMYDVLDESLRRAELNHNVTYAILFECVHTVYSIYPKSELLEKAAKCIGKFVLSPKINLKYLGLKALTYVIQQDPTLALQHQMTIIECLDHPDPIIKRETLELLYRITNAQNITVIVQKMLEYLHQSKEEYVIVNLVGKIAELAEKYAPDNAWFIQTMNAVFSVGGDVMHPDIPNNFLRLLAEGFDDETEDQQLRLYAVQSYLTLLDMENVFYPQRFLQVMSWVLGEYSYLLDKETPEEVIAKLYKLLMNDSVSSETKAWLIAAVTKLTSQAHSSNTVERLIHEFTISLDTCMRQHAFELKHLHENVELMKSLLPVDRSCEDLVVDASLSFLDGFVAEGLSQGAAPYKPPHQRQEEKLSQEKVLNFEPYGLSFSSSGFTGRQSPAGISLGSDVSGNSAETGLKETNSLKLEGIKKLWGKEGYLPKKESKTGDESGALPVPQESIMENVDQAITKKDQSQVLTQSKEEKEKQLLASSLFVGLGSESTINLLGKADTVSHKFRRKSKVKEAKSGETTSTHNMTCSSFSSLSNVAYEDDYYSNTLHDTGDKELKKFSLTSELLDSESLTELPLVEKFSYCSLSTPSLFANNNMEIFHPPQSTAASVAKESSLASSFLEETTEYIHSNAMEVCNNETISVSSYKIWKDDCLLMVWSVTNKSGLELKSADLEIFPAENFKVTEQPGCCLPVMEAESTKSFQYSVQIEKPFTEGNLTGFISYHMMDTHSAQLEFSVNLSLLDFIRPLKISSDDFGKLWLSFANDVKQNVKMSESQAALPSALKTLQQKLRLHIIEIIGNEGLLACQLLPSIPCLLHCRVHADVLALWFRSSCSTLPDYLLYQCQKVMEGS

SEQ ID NO: 20498 - protein, 213 aa, Homo sapiens
MASLFKKKTVDDVIKEQNRELRGTQRAIIRDRAALEKQEKQLELEIKKMAKIGNKEACKVLAKQLVHLRKQKTRTFAVSSKVTSMSTQTKVMNSQMKMAGAMSTTAKTMQAVNKKMDPQKTLQTMQNFQKENMKMEMTEEMINDTLDDIFDGSDDEEESQDIVNQVLDEIGIEISGKMAKAPSAARSLPSASTSKATISDEEIERQLKALGVD

SEQ ID NO: 20499 - protein, 172 aa, Homo sapiens
MELEIKKMAKIGNKEACKVLAKQLVHLRKQKTRTFAVSSKVTSMSTQTKVMNSQMKMAGAMSTTAKTMQAVNKKMDPQKTLQTMQNFQKENMKMEMTEEMINDTLDDIFDGSDDEEESQDIVNQVLDEIGIEISGKMAKAPSAARSLPSASTSKATISDEEIERQLKALGVD

SEQ ID NO: 20500 - protein, 301 aa, Homo sapiens
MVFTQAPAEIMGHLRIRSLLARQCLAEFLGVFVLMLLTQGAVAQAVTSGETKGNFFTMFLAGSLAVTIAIYVGGNVSGAHLNPAFSLAMCIVGRLPWVKLPIYILVQLLSAFCASGATYVLYHDALQNYTGGNLTVTGPKETASIFATYPAPYLSLNNGFLDQVLGTGMLIVGLLAILDRRNKGVPAGLEPVVVGMLILALGLSMGANCGIPLNPARDLGPRLFTYVAGWGPEVFSAGNGWWWVPVVAPLVGATVGTATYQLLVALHHPEGPEPAQDLVSAQHKASELETPASAQMLECKL

SEQ ID NO: 20501 - protein, 264 aa, Homo sapiens
MVFTQAPAEIMGHLRIRSLLARQCLAEFLGVFVLMLLTQGAVAQAVTSGETKGNFFTMFLAGSLAVTIAIYVGGNVSGAHLNPAFSLAMCIVGRLPWVKLPIYILVQLLSAFCASGATYVLYHDALQNYTGGNLTVTGPKETASIFATYPAPYLSLNNGFLDQVLGTGMLIVGLLAILDRRNKGVPAGLEPVVVGMLILALGLSMGANCGIPLNPARDLGPRLFTYVAGWGPEVFRWETDSPGAGLHSPSSAKGSVPGSTALCL

SEQ ID NO: 20502 - protein, 519 aa, Homo sapiens
MFLLPLPAAGRVVVRRLAVRRFGSRSLSTADMTKGLVLGIYSKEKEDDVPQFTSAGENFDKLLAGKLRETLNISGPPLKAGKTRTFYGLHQDFPSVVLVGLGKKAAGIDEQENWHEGKENIRAAVAAGCRQIQDLELSSVEVDPCGDAQAAAEGAVLGLYEYDDLKQKKKMAVSAKLYGSGDQEAWQKGVLFASGQNLARQLMETPANEMTPTRFAEIIEKNLKSASSKTEVHIRPKSWIEEQAMGSFLSVAKGSDEPPVFLEIHYKGSPNANEPPLVFVGKGITFDSGGISIKASANMDLMRADMGGAATICSAIVSAAKLNLPINIIGLAPLCENMPSGKANKPGDVVRAKNGKTIQVDNTDAEGRLILADALCYAHTFNPKVILNAATLTGAMDVALGSGATGVFTNSSWLWNKLFEASIETGDRVWRMPLFEHYTRQVVDCQLADVNNIGKYRSAGACTAAAFLKEFVTHPKWAHLDIAGVMTNKDEVPYLRKGMTGRPTRTLIEFLLRFSQDNA

SEQ ID NO: 20503 - protein, 488 aa, Homo sapiens
MTKGLVLGIYSKEKEDDVPQFTSAGENFDKLLAGKLRETLNISGPPLKAGKTRTFYGLHQDFPSVVLVGLGKKAAGIDEQENWHEGKENIRAAVAAGCRQIQDLELSSVEVDPCGDAQAAAEGAVLGLYEYDDLKQKKKMAVSAKLYGSGDQEAWQKGVLFASGQNLARQLMETPANEMTPTRFAEIIEKNLKSASSKTEVHIRPKSWIEEQAMGSFLSVAKGSDEPPVFLEIHYKGSPNANEPPLVFVGKGITFDSGGISIKASANMDLMRADMGGAATICSAIVSAAKLNLPINIIGLAPLCENMPSGKANKPGDVVRAKNGKTIQVDNTDAEGRLILADALCYAHTFNPKVILNAATLTGAMDVALGSGATGVFTNSSWLWNKLFEASIETGDRVWRMPLFEHYTRQVVDCQLADVNNIGKYRSAGACTAAAFLKEFVTHPKWAHLDIAGVMTNKDEVPYLRKGMTGRPTRTLIEFLLRFSQDNA

SEQ ID NO: 20504 - protein, 271 aa, Homo sapiens
MSPLLGLRSELQDTCTSLGLMLSVVLLMGLARVVARQQLHRPVAHAFVLEFLATFQLCCCTHELQLLSEQHPAHPTWTLTLVYFFSLVHGLTLVGTSSNPCGVMMQMMLGGMSPETGAVRLLAQLVSALCSRYCTSALWSLGLTQYHVSERSFACKNPIRVDLLKAVITEAVCSFLFHSALLHFQEVRTKLRIHLLAALITFLVYAGGSLTGAVFNPALALSLHFMCFDEAFPQFFIVYWLAPSLGILLMILMFSFFLPWLHNNHTINKKE

SEQ ID NO: 20505 - protein, 268 aa, Homo sapiens
MEMKKKINLELRNRSPEEVTELVLDNCLCVNGEIEGLNDTFKELEFLSMANVELSSLARLPSLNKLRKLELSDNIISGGLEVLAEKCPNLTYLNLSGNKIKDLSTVEALQNLKNLKSLDLFNCEITNLEDYRESIFELLQQITYLDGFDQEDNEAPDSEEEDDEDGDEDDEEEEENEAGPPEGYEEEEEEEEEEDEDEDEDEDEAGSELGEGEEEVGLSYLMKEEIQDEEDDDDYVEEGEEEEEEEEGGLRGEKRKRDAEDDGEEEDD

SEQ ID NO: 20506 - protein, 227 aa, Homo sapiens
MEMKKKINLELRNRSPEEVTELVLDNCLCVNGEIEGLNDTFKELEFLSMANVELSSLARLPSLNKLRKQNLKNLKSLDLFNCEITNLEDYRESIFELLQQITYLDGFDQEDNEAPDSEEEDDEDGDEDDEEEEENEAGPPEGYEEEEEEEEEEDEDEDEDEDEAGSELGEGEEEVGLSYLMKEEIQDEEDDDDYVEEGEEEEEEEEGGLRGEKRKRDAEDDGEEEDD

SEQ ID NO: 20507 - protein, 220 aa, Homo sapiens
MANVELSSLARLPSLNKLRKLELSDNIISGGLEVLAEKCPNLTYLNLSGNKIKDLSTVEALQNLKNLKSLDLFNCEITNLEDYRESIFELLQQITYLDGFDQEDNEAPDSEEEDDEDGDEDDEEEEENEAGPPEGYEEEEEEEEEEDEDEDEDEDEAGSELGEGEEEVGLSYLMKEEIQDEEDDDDYVEEGEEEEEEEEGGLRGEKRKRDAEDDGEEEDD

SEQ ID NO: 20508 - protein, 1915 aa, Homo sapiens
MEDGKRERWPTLMERLCSDGFAFPQYPIKPYHLKRIHRAVLHGNLEKLKYLLLTYYDANKRDRKERTALHLACATGQPEMVHLLVSRRCELNLCDREDRTPLIKAVQLRQEACATLLLQNGANPNITDFFGRTALHYAVYNEDTSMIEKLLSHGTNIEECSKCEYQPLLFAVSRRKVKMVEFLLKKKANVNAIDYLGRSALIHAVTLGEKDIVILLLQHNIDVLSRDAFRKIAGDYAIEAKNRVIFDLIYEYERKRYEDLPINSNPVSSQKQPALKATSGKEDSISNIATEIKDGQKSGTVSSQKQPALKDTSDKDDSVSNTATEIKDEQKSGTVLPAVEQCLNRSLYRPDAVAQPVTENEFSLESEIISKLYIPKRKIISPRSIKDVLPPVEEAVDRCLYLLDRFAQPVTKDKFALESENISEPYFTNRRTISQQSAENLDAACGIDKTENGNMFEDQNVDKEGKALPATGQKANVSPEQPPLFTHTVKDRDHISTRFLGGMDSLTSSEESSERPPLSTLTLKEADPSSKAAMRRKDSPPPGKVSSQKQPAEKATSDDKDSVSNIATEIKEGPISGTVSSQKQPAEKATSDEKDSVSNIATEIKKGQQSGTVSPQKQSAWKVIFKKKVSLLNIATRIMGGGKSGTVSSQKQPASKATSDKTDSALNIATEIKDGLQCGTVSSQKQPALKATTDEEDSVSNIATEIKDGEKSGTVSSQKQPALKATTDEEDSVSNIATEIKDGEKSGTVSSQKQPALKATTDEKDSVSNIATEIKDGEKSGTVSSQKPPALTATSDEEGSVLSIARENKDGEKSRTVSSRKKPALKATSDEKDSFSNITRGKKDGEISRKVSSQKPPTLKGTSDEEDSVLGIARENKDGEKSRTVSSEKPPGLKASSAEKDSVLNIARGKKDGEKTKRVSSRKKPSLEATSDEKDSFSNITREKKDGEISRKVSSQKPPALKGTSDEEDSVLGIARENKDGEKSRTVSSEKPPGLKATSDEKDSVLNIARGKKDGEKTRTVSSQKPPTLKATSDEEDSVLSIARENKDGEKSRTVSSEKPSGLKATSAEKDSVLNIARGKKYGEKTKRVSSRKKPALKATSDEKDSVLYIAREKKDGEKSRTVSSPKQPALKAICDKEDSVPNMATEKKDEQISGTVSCQKQPALKATSDKKDSVSNIPTEIKDGQQSGTVSSQKQPAWKATSVKKDSVSNIATEIKDGQIRGTVSPQKQSAQKVIFKKKVSLLNIATRITGGWKSGTEYPENLPTLKATIENKNSVLNTATKMKDVQTSTPAEQDLEMASEGEQKRLEEYENNQPQVKNQIHSRDDLDDIIQSSQTVSEDGDSLCCNCKNVILLIDQHEMKCKDCVHLLKIKNTFCLWKRLIKLKDNHCEQLRVKIRKLKNKASVLQKRISEKEEIKSQLKHEILELEKELCSLRFAIQQEKKKRRNVEEVHQKVREKLRITEEQYRIEADVTKPIKPALKSAEVELKTGGNNSNQVSETDEKEDLLHENRLMQDEIARLRLEKDTIKNQNLEKKYLKDFEIVKRKHEDLQKALKRNGETLAKTIACYSGQLAALTDENTTLRSKLEKQRESRQRLETEMQSYHCRLNAARCDHDQSHSSKRDQELAFQGTVDKCRHLQENLNSHVLILSLQLSKAESKSRVLKTELHYTGEALKEKALVFEHVQSELKQKQSQMKDIEKMYKSGYNTMEKCIEKQERFCQLKKQNMLLQQQLDDARNKADNQEKAILNIQARCDARVQNLQAECRKHRLLLEEDNKMLVNELNHSKEKECQYEKEKAEREVAVRQLQQKRDDVLNKGSATKALLDASSRHCTYLENGMQDSRKKLDQMRSQFQEIQDQLTATIRCTKEMEGDTQKLEVEHVMMRKIIKKQDDQIERLEKILQHSSLMLQVFES

SEQ ID NO: 20509 - protein, 716 aa, Homo sapiens
MYPFCFSVSSQKQPALKATSDKKDSVSNIPTEIKDGQQSGTVSSQKQPAWKATSVKKDSVSNIATEIKDGQIRGTVSPQKQSAQKVIFKKKVSLLNIATRITGGWKSGTEYPENLPTLKATIENKNSVLNTATKMKDVQTSTPEQDLEMASEGEQKRLEEYENNQPQVKNQIHSRDDLDDIIQSSQTVSEDGDSLCCNCKNVILLIDQHEMKCKDCVHLLKIKNTFCLWKRLIKLKDNHCEQLRVKIRKLKNKASVLQKRISEKEEIKSQLKHEILELEKELCSLRFAIQQEKKKRRNVEEVHQKVREKLRITEEQYRIEADVTKPIKPALKSAEVELKTGGNNSNQVSETDEKEDLLHENRLMQDEIARLRLEKDTIKNQNLEKKYLKDFEIVKRKHEDLQKALKRNGETLAKTIACYSGQLAALTDENTTLRSKLEKQRESRQRLETEMQSYHCRLNAARCDHDQSHSSKRDQELAFQGTVDKCRHLQENLNSHVLILSLQLSKAESKSRVLKTELHYTGEALKEKALVFEHVQSELKQKQSQMKDIEKMYKSGYNTMEKCIEKQERFCQLKKQNMLLQQQLDDARNKADNQEKAILNIQARCDARVQNLQAECRKHRLLLEEDNKMLVNELNHSKEKECQYEKEKAEREVAVRQLQQKRDDVLNKGSATKALLDASSRHCTYLENGMQDSRKKLDQMRSQVCMQLCTPTTVNL

SEQ ID NO: 20510 - protein, 163 aa, Homo sapiens
MEDGKRERWPTLMERLCSDGFAFPQYPIKPYHLKRIHRAVLHGNLEKLKYLLLTYYDANKRDRKERTALHLACATGQPEMVHLLVSRRCELNLCDREDRTPLIKAVQLRQEACATLLLQNGANPNITDFFGRTALHYAVYNEDTSMIEKLLSHGTNIEECSKV

SEQ ID NO: 20511 - protein, 170 aa, Homo sapiens
MEDGKRERWPTLMERLCSDGFAFPQYPIKPYHLKRIHRAVLHGNLEKLKYLLLTYYDANKRDRKERTALHLACATGQPEMVHLLVSRRCELNLCDREDRTPLIKAVQLRQEACATLLLQNGANPNITDFFGRTALHYAVYNEDTSMIEKLLSHGTNIEECSKCLLRNNQP

SEQ ID NO: 20512 - protein, 1778 aa, Homo sapiens
MDDKEPKRWPTLRDRLCSDGFLFPQYPIKPYHLKGIHRAVFYRDLEELKFVLLTRYDINKRDRKERTALHLACATGQPEMVHLLVSRRCELNLCDREDRTPLIKAVQLRQEACATLLLQNGADPNITDVFGRTALHYAVYNEDTSMIEKLLSYGANIEECSEDEYPPLFLAVSQRKVKMVEFLLKKKANINAVDYLGRSALIHAVTLGEKDIVILLLQHNIDVFSRDVYGKLAEDYASEAKNRVIFELIYEYERKKHEELSINSNPVSSQKQPALKATSGKEDSISNIATEIKDGQKSGTVSSQKQPALKGTSDKNDSVSNTATEIKDEQKSGTVSSQKQPALKDTSDKNDSVSNTATEIKDEQKSGTVLPAVEQCLNRSLYRPDAVAQPVTEDEFALESEIISKLYIPKRKIISPRSIEDVLPPVEEAVDRCLYLLDRFAQAVTKDKFALESENISEPYFTNRRTISQQSAEKLDAACGIDKTENGTLFEDQNVDKEGKALPATGQKANVSPEQPPLFTHTVKDSDHISTRFLGSMDSLTSSEESSERPPLSTLTLKEADPSSKAAMRRKDSPPPGKVSSQKQPAEKATSDDKDSVSNIATEIKEGPISGTVSSQKQPAEKATSDEKDSVSNIATEIKEGQQSGTVSPQKQSAWKVIFKKKVSLLNIATRITGGGKSGTVSSQKQPPSKATSDKTDSALNIATEIKDGLQCGTVSSQKQPALKATTDEEDSVSNIATEIKDGEKSGTVSSQKQPALKATTDEEDSVSIIATEIKDGEKSGTVSSRKKPALKATSDEKDSFSNITREKKDGEISRTVTSEKPAGLKATSDEEDSVLNIARGKEDGEKTRRVSSRKKPALKATSDEKDSFSNITREKKDGETSRTVSSQKPPALKATSDEEDSVLNIAREKKDGEKSRTVSSEKPSGLKATSDEKDSVLNIARGKKHGEKTRRVSSHKQPALKATSDKENSVPNMATETKDEQISGTVSSQKQPALKATSDKKDSVSNIPTEIKDGQQSGTVSSQKQLAWKATSVKKDSVSNIATEIKDGQIRGTVSSQRQPALKATGDEKDSVSNIAREIKDGEKSGTVSPQKQSAQKVIFKKKVSLLNIATRITGGWKSGTEYPENLPTLKATIENKNSVLNTATKMKDVQTSTPEQDLEMASEGEQKRLEEYENNQPQVKNQIHSRDDLDDIIQSSQTVSEDGDSLCCNCKNVILLIDQHEMKCKDCVHLLKIKKTFCLCKRLTELKDNHCEQLRVKIRKLKNKASVLQKRLSEKEEIKSQLKHETLELEKELCSLRFAIQQEKKKRRNVEELHQKVREKLRITEEQYRIEADVTKPIKPALKSAEVELKTGGNNSNQVSETDEKEDLLHENRLMQDEIARLRLEKDTIKNQNLEKKYLKDFEIVKRKHEDLQKALKRNEETLAETIACYSGQLAALTDENTTLRSKLEKQRESGQRLETEMQSYRCRLNAALCDHDQSHSSKRDQELAFQGTVDKCCHLQENLNSHVLILSLQLSKAESKFRVLETELHYTGEALKEKALVFEHVQSELKQKQSQMKDIEKMYKSGYNTMEKCIEKQERFCQLKKQNMLLQQQLDDARNKADNQEKAILNIQARCDARVENLQAECRKHRLLLEEDNKMLVNELNHSKEKKCQYEKEKAEREVAVRQLQQKQDDVLNKRSATKALLDASSRHCIYLENGMQDSRKKLDQMRSQFQEIQDQLTATIRCTKEMEGDAQKLEVENVMMRKIIKKQDEQIERFEKILQHSSLMLQVFES

SEQ ID NO: 20513 - protein, 805 aa, Homo sapiens
MATETKDEQISGTVSSQKQPALKATSDKKDSVSNIPTEIKDGQQSGTVSSQKQLAWKATSVKKDSVSNIATEIKDGQIRGTVSSQRQPALKATGDEKDSVSNIAREIKDGEKSGTVSPQKQSAQKVIFKKKVSLLNIATRITGGWKSGTEYPENLPTLKATIENKNSVLNTATKMKDVQTSTPEQDLEMASEGEQKRLEEYENNQPQVKNQIHSRDDLDDIIQSSQTVSEDGDSLCCNCKNVILLIDQHEMKCKDCVHLLKIKKTFCLCKRLTELKDNHCEQLRVKIRKLKNKASVLQKRLSEKEEIKSQLKHETLELEKELCSLRFAIQQEKKKRRNVEELHQKVREKLRITEEQYRIEADVTKPIKPALKSAEVELKTGGNNSNQVSETDEKEDLLHENRLMQDEIARLRLEKDTIKNQNLEKKYLKDFEIVKRKHEDLQKALKRNEETLAETIACYSGQLAALTDENTTLRSKLEKQRESGQRLETEMQSYRCRLNAALCDHDQSHSSKRDQELAFQGTVDKCCHLQENLNSHVLILSLQLSKAESKFRVLETELHYTGEALKEKALVFEHVQSELKQKQSQMKDIEKMYKSGYNTMEKCIEKQERFCQLKKQNMLLQQQLDDARNKADNQEKAILNIQARCDARVENLQAECRKHRLLLEEDNKMLVNELNHSKEKKCQYEKEKAEREVAVRQLQQKQDDVLNKRSATKALLDASSRHCIYLENGMQDSRKKLDQMRSQFQEIQDQLTATIRCTKEMEGDAQKLEVENVMMRKIIKKQDEQIERFEKILQHSSLMLQVFES

SEQ ID NO: 20514 - protein, 618 aa, Homo sapiens
MRRKDSPPPGKVSSQKQPAEKATSDDKDSVSNIATEIKEGPISGTVSSQKQPAEKATSDEKDSVSNIATEIKEGQQSGTVSPQKQSAWKVIFKKKVSLLNIATRITGGGKSGTVSSQKQPPSKATSDKTDSALNIATEIKDGLQCGTVSSQKQPALKATTDEEDSVSNIATEIKDGEKSGTVSSQKQPALKATTDEEDSVSIIATEIKDGEKSGTVSSRKKPALKATSDEKDSFSNITREKKDGEISRTVTSEKPAGLKATSDEEDSVLNIARGKEDGEKTRRVSSRKKPALKATSDEKDSFSNITREKKDGETSRTVSSQKPPALKATSDEEDSVLNIAREKKDGEKSRTVSSEKPSGLKATSDEKDSVLNIARGKKHGEKTRRVSSHKQPALKATSDKENSVPNMATETKDEQISGTVSSQKQPALKATSDKKDSVSNIPTEIKDGQQSGTVSSQKQLAWKATSVKKDSVSNIATEIKDGQIRGTVSSQRQPALKATGDEKDSVSNIAREIKDGEKSGTVSPQKQSAQKVIFKKKVSLLNIATRITGGWKSGTEYPENLPTLKATIENKNSVLNTATKMKDVQTSTPEQDLEMASEGEQKRLEEYENNQPQIVFTY

SEQ ID NO: 20515 - protein, 127 aa, Homo sapiens
MSLLRNRLQALPALCLCVLVLACIGACQPEAQEGTLSPPPKLKMSRWSLVRGRMKELLETVVNRTRDGWQWFWSPSTFRGFMQTYYDDHLRDLGPLTKAWFLESKDSLLKKTHSLCPRLVCGDKDQG

SEQ ID NO: 20516 - protein, 1237 aa, Homo sapiens
MSVLTSPRGKVEVVHCRRTESQDVYCIKSLIRKFTCKLFGKLNIIYLLEKANLAVTLCNDKEEIMAQATFLDYPNWNVAKQDDWVSVFRELDSDIPCTPLNTLFMHLFVAVDEYSVGCCKEILRTVYKAVPELHFIFLIVPSYMSLGSTLITVFDQVGNIPCLTYEEDFAVHICHRHSHYPQLHVRKARVEDHDDLMPIFMRYDTILKETYGEYFLAELIEAQDEENHAVVCEVEGTAVGFMSVCSRVNMQLLHECFDLGPFHGLCFPHPDDVLESPQDLSVRRSQDAELRSSSQGSQKIVEELQEPVSPDTMENIQGNIAREAASEEALTAVQSGNVSEPEDIEKLSDISTGYAQYHHVSSRSLASLVLPEEPVHFRPIYRGASAAFCIQLFCIDEKYEARSLDFMNFVFSLFSDKNFCVISLPHLTPEFFLIQNFVKMVPFNTCTLEQDLYVFHRAGLLKSINIRFATLLDTPGVENLVSTLMLNKSILEDLDRYNKARKDPDGTLLQAFVAEVAEQIVGIAVIRNEMDIEYIRSHYNIEDFIYFSHHQREEHGHMHHFALNPIFRHYTKFFLKEILRLGFKSCLYYRVYPKSREGKFQNPYAHSLTSALHYLVPVRPRRQIVYPLEKLGINAPSKAVSKDPMSYALNHTNRKLTLEPKITVNAKIIVVGASSVGISFLETLVFCSHMKFNNLTLISTHGLPGKKLLDTEQRKFLASDHCFNDKDYALMSLCSWVNVVVGRMTGIDRAAKHVVLSTDEIVPYDHLILCTGQQYQVPCPTEADISQHLTNREVPNSSQRRYTGKVPCNHFTLNEEEDCFKALIWIRNNSITTEGNIIVYGNTIDTYTTVETLLNLGVSGSRIHLVQPPPASTITCINNYSVESAVADALGAAGVTMYRDAILAQWNDGLHPDPIYSASFTTPTKPFRLQCSMFFSFCEKNVDYETFKALNDACLVYDSRLVIDTNFHTNDIAIRAAGSLTKFSNRYYSNEWTHSNFSSKEIGFQLAAAMLHLFDPTLEPVTEPPANLDRLIPMYKGAKIQGGILPGSYHYLHIAKPAIPTPLEVQMAQPNYGLELVTGSAKNGTYFRIHINKYKMVETITCLSREPFPASNYIRLFGQHEQLLNNLCARYDENLITDLYSYFTEPWCLALFHDRFIDLRKELRQILASKEEEDLPSIEQLAHQIEDEEINPTEKPRQYLKRVFEESIYKTLVERSTLDYLHYNRYHLPMYAWPGIV

SEQ ID NO: 20517 - protein, 470 aa, Homo sapiens
MSVLTSPRGKVEVVHCRRTESQDVYCIKSLIRKFTCKLFGKLNIIYLLEKANLAVTLCNDKEEIMAQATFLDYPNWNVAKQDDWVSVFRELDSDIPCTPLNTLFMHLFVAVDEYSVGCCKEILRTVYKAVPELHFIFLIVPSYMSLGSTLITVFDQVGNIPCLTYEEDFAVHICHRHSHYPQLHVRKARVEDHDDLMPIFMRYDTILKETYGEYFLAELIEAQDEENHAVVCEVEGTAVGFMSVCSRVNMQLLHECFDLGPFHGLCFPHPDDVLESPQDLSVRRSQDAELRSSSQGSQKIVEELQEPVSPDTMENIQGNIAREAASEEALTAVQSGNVSEPEDIEKLSDISTGYAQYHHVSSRSLASLVLPEEPVHFRPIYRGASAAFCIQLFCIDEKYEARSLDFMNFVFSLFSDKNFCVISLPHLTPEFFLIQNFVKMVPFNTCTLEQDLYVFHRAGLLKNICLGRSS

SEQ ID NO: 20518 - protein, 1177 aa, Homo sapiens
MSVLTSPRGKVEVVHCRRTESQDVYCIKSLIRKFTCKLFGKLNIIYLLEKANLAVTLCNDKEEIMAQATFLDYPNWNVAKQDDWVSVFRELDSDIPCTPLNTLFMHLFVAVDEYSVGCCKEILRTVYKAVPELHFIFLIVPSYMSLGSTLITVFDQVGNIPCLTYEEDFAVHICHRHSHYPQLHVRKARVEDHDDLMPIFMRYDTILKETYGEYFLAELIEAQDEENHAVVCEVEGTAVGFMSVCSRVNMQLLHECFDLGPFHGLCFPHPDDVLESPQDLSVRRSQDAELRSSSQGSQKIVEELQEPVSPDTMENIQGNIAREAASEEALTAVQSGNVSEPESLDFMNFVFSLFSDKNFCVISLPHLTPEFFLIQNFVKMVPFNTCTLEQDLYVFHRAGLLKSINIRFATLLDTPGVENLVSTLMLNKSILEDLDRYNKARKDPDGTLLQAFVAEVAEQIVGIAVIRNEMDIEYIRSHYNIEDFIYFSHHQREEHGHMHHFALNPIFRHYTKFFLKEILRLGFKSCLYYRVYPKSREGKFQNPYAHSLTSALHYLVPVRPRRQIVYPLEKLGINAPSKAVSKDPMSYALNHTNRKLTLEPKITVNAKIIVVGASSVGISFLETLVFCSHMKFNNLTLISTHGLPGKKLLDTEQRKFLASDHCFNDKDYALMSLCSWVNVVVGRMTGIDRAAKHVVLSTDEIVPYDHLILCTGQQYQVPCPTEADISQHLTNREVPNSSQRRYTGKVPCNHFTLNEEEDCFKALIWIRNNSITTEGNIIVYGNTIDTYTTVETLLNLGVSGSRIHLVQPPPASTITCINNYSVESAVADALGAAGVTMYRDAILAQWNDGLHPDPIYSASFTTPTKPFRLQCSMFFSFCEKNVDYETFKALNDACLVYDSRLVIDTNFHTNDIAIRAAGSLTKFSNRYYSNEWTHSNFSSKEIGFQLAAAMLHLFDPTLEPVTEPPANLDRLIPMYKGAKIQGGILPGSYHYLHIAKPAIPTPLEVQMAQPNYGLELVTGSAKNGTYFRIHINKYKMVETITCLSREPFPASNYIRLFGQHEQLLNNLCARYDENLITDLYSYFTEPWCLALFHDRFIDLRKELRQILASKEEEDLPSIEQLAHQIEDEEINPTEKPRQYLKRVFEESIYKTLVERSTLDYLHYNRYHLPMYAWPGIV

SEQ ID NO: 20519 - protein, 200 aa, Homo sapiens
MSYALNHTNRKLTLEPKITVNAKIIVVGASSVGISFLETLVFCSHMKFNNLTLISTHGLPGKKLLDTEQRKFLASDHCFNDKDYALMSLCSWVNVVVGRMTGIDRAAKHVVLSTDEIVPYDHLILCTGQQYQVPCPTEADISQHLTNREVPNSSQRRYTGKVPCNHFTLNEEEDCFKALIWIRNNSITTEDGGRASVLFC

SEQ ID NO: 20520 - protein, 320 aa, Homo sapiens
MSYALNHTNRKLTLEPKITVNAKIIVVGASSVGISFLETLVFCSHMKFNNLTLISTHGLPGKKLLDTEQRKFLASDHCFNDKDYALMSLCSWVNVVVGRMTGIDRAAKHVVLSTDEIVPYDHLILCTGQQYQVPCPTEADISQHLTNREVPNSSQRRYTGKVPCNHFTLNEEEDCFKALIWIRNNSITTEGNIIVYGNTIDTYTTVETLLNLGVSGSRIHLVQPPPASTITCINNYSVESAVADALGAAGVTMYRDAILAQWNDGLHPDPIYSASFTTPTKPFRLQCSGAFFLGLTIICILPSLPFQLPWRYKWHSLIMV

SEQ ID NO: 20521 - protein, 269 aa, Homo sapiens
MASEFKKKLFWRAVVAEFLATTLFVFISIGSALGFKYPVGNNQTAVQDNVKVSLAFGLSIATLAQSVGHISGAHLNPAVTLGLLLSCQISIFRALMYIIAQCVGAIVATAILSGITSSLTGNSLGRNDLADGVNSGQGLGIEIIGTLQLVLCVLATTDRRRRDLGGSAPLAIGLSVALGHLLAIDYTGCGINPARSFGSAVITHNFSNHWIFWVGPFIGGALAVLIYDFILAPRSSDLTDRVKVWTSGQVEEYDLDADDINSRVEMKPK

SEQ ID NO: 20522 - protein, 186 aa, Homo sapiens
MPGARPLPLVLVPQNTLAWMQLDAKAPAHPRPLQLLGRVGPGSRQLADGVNSGQGLGIEIIGTLQLVLCVLATTDRRRRDLGGSAPLAIGLSVALGHLLAIDYTGCGINPARSFGSAVITHNFSNHWIFWVGPFIGGALAVLIYDFILAPRSSDLTDRVKVWTSGQVEEYDLDADDINSRVEMKPK

SEQ ID NO: 20523 - protein, 218 aa, Homo sapiens
MFWTFGYEAVSPAGPSHLFASLLLGVLLTITFMPGARPLPLVLVPQNTLAWMQLDAKAPAHPRPLQLLGRVGPGSRQLADGVNSGQGLGIEIIGTLQLVLCVLATTDRRRRDLGGSAPLAIGLSVALGHLLAIDYTGCGINPARSFGSAVITHNFSNHWIFWVGPFIGGALAVLIYDFILAPRSSDLTDRVKVWTSGQVEEYDLDADDINSRVEMKPK

SEQ ID NO: 20524 - protein, 154 aa, Homo sapiens
MQSGMGWNVLDFWLADGVNSGQGLGIEIIGTLQLVLCVLATTDRRRRDLGGSAPLAIGLSVALGHLLAIDYTGCGINPARSFGSAVITHNFSNHWIFWVGPFIGGALAVLIYDFILAPRSSDLTDRVKVWTSGQVEEYDLDADDINSRVEMKPK

SEQ ID NO: 20525 - protein, 154 aa, Homo sapiens; identical to SEQ ID NO: 211

SEQ ID NO: 20526 - protein, 164 aa, Homo sapiens; identical to SEQ ID NO: 212

SEQ ID NO: 20527 - protein, 154 aa, Homo sapiens; identical to SEQ ID NO: 214

SEQ ID NO: 20528 - protein, 104 aa, Homo sapiens; identical to SEQ ID NO: 213

SEQ ID NO: 20529 - protein, 743 aa, Homo sapiens
MEAVAVAAAVGVLLLAGAGGAAGDEAREAAAVRALVARLLGPGPAADFSVSVERALAAKPGLDTYSLGGGGAARVRVRGSTGVAAAAGLHRYLRDFCGCHVAWSGSQLRLPRPLPAVPGELTEATPNRYRYYQNVCTQSYSFVWWDWARWEREIDWMALNGINLALAWSGQEAIWQRVYLALGLTQAEINEFFTGPAFLAWGRMGNLHTWDGPLPPSWHIKQLYLQHRVLDQMRSFGMTPVLPAFAGHVPEAVTRVFPQVNVTKMGSWGHFNCSYSCSFLLAPEDPIFPIIGSLFLRELIKEFGTDHIYGADTFNEMQPPSSEPSYLAAATTAVYEAMTAVDTEAVWLLQGWLFQHQPQFWGPAQIRAVLGAVPRGRLLVLDLFAESQPVYTRTASFQGQPFIWCMLHNFGGNHGLFGALEAVNGGPEAARLFPNSTMVGTGMAPEGISQNEVVYSLMAELGWRKDPVPDLAAWVTSFAARRYGVSHPDAGAAWRLLLRSVYNCSGEACRGHNRSPLVRRPSLQMNTSIWYNRSDVFEAWRLLLTSAPSLATSPAFRYDLLDLTRQAVQELVSLYYEEARSAYLSKELASLLRAGGVLAYELLPALDEVLASDSRFLLGSWLEQARAAAVSEAEADFYEQNSRYQLTLWGPEGNILDYANKQLAGLVANYYTPRWRLFLEALVDSVAQGIPFQQHQFDKNVFQLEQAFVLSKQRYPSQPRGDTVDLAKKIFLKYYPRWVAGSW

SEQ ID NO: 20530 - protein, 343 aa, Homo sapiens
MDNQAERESEAGVGLQRDEDDAPLCEDVELQDGDLSPEEKIFLREFPRLKEDLKGNIDKLRALADDIDKTHKKFTKANMVATSTAVISGVMSLLGLALAPATGGGSLLLSTAGQGLATAAGVTSIVSGTLERSKNKEAQARAEDILPTYDQEDREDEEEKADYVTAAGKIIYNLRNTLKYAKKNVRAFWKLRANPRLANATKRLLTTGQVSSRSRVQVQKAFAGTTLAMTKNARVLGGVMSAFSLGYDLATLSKEWKHLKEGARTKFAEELRAKALELERKLTELTQLYKSLQQKVRSRARGVGKDLTGTCETEAYWKELREHVWMWLWLCVCLCVCVYVQFT

SEQ ID NO: 20531 - protein, 631 aa, Homo sapiens
MGSHESLGPYFLVFLLLLLLPPPLFRAGSLRYHGPDWRIFHRLALGSRRAHHHHGPGWRQHWRQGQAGHRCQGSFDLYFILDKSGSVNNNWIDLYMWVEETVARFQSPNIRMCFITYSTDGQTVLPLTSDKNRIKNGLDQLQKIVPDGHTFMQAGFRKAIQQIESFNSGNKVPSMIIAMTDGELVAHAFQDTLREAQKARKLGANVYTLGVADYNLDQITAIADSPGHVFAVENGFKALRSTIDALTSKVCLDVTSVEPSSECVGEPYHVVIHGNGFQNLKKRDEVICRFIFNESTIIDEKPTSIDNNSMNCPGPKLEKPGEEYSIEVSLNKGKTFFKSNVSITSTTCGIFRNWLYFVPLLLLVPLLLCCVWRLCRKQTVKEPPPVQKPEKEPEQEKPPSPPPPPPPPPPPLPPPPPAPVNTCPTVIICCCGCQGVGGMRRIEGNLDTFCDLSHASCHQVPWMCCQSRDQGRYLSLALAQSQYAQAPCCPRICFPHSQECLSLPQAPCSPRMCLRHSRECLALKQARCSPNICLRHSQHSRECLARKQAPCSPRICLRHSPEYFSQAQTLCNPKSCLQPSRECLPLTCSSRCRLPPARCLRPPSRMLPLLSPLLRHTAEPPLSLPPSEPNF

SEQ ID NO: 20532 - protein, 346 aa, Homo sapiens
MAMVSEFLKQAWFIENEEQEYVQTVKSSKGGPGSAVSPYPTFNPSSDVAALHKAIMVKGVDEATIIDILTKRNNAQRQQIKAAYLQETGKPLDETLKKALTGHLEEVVLALLKTPAQFDADELRAAMKGLGTDEDTLIEILASRTNKEIRDINRVYREELKRDLAKDITSDTSGDFRNALLSLAKGDRSEDFGVNEDLADSDARALYEAGERRKGTDVNVFNTILTTRSYPQLRRVFQKYTKYSKHDMNKVLDLELKGDIEKCLTAIVKCATSKPAFFAEKLHQAMKGVGTRHKALIRIMVSRSEIDMNDIKAFYQKMYGISLCQAILDETKGDYEKILVALCGGN

SEQ ID NO: 20533 - protein, 920 aa, Homo sapiens
MEVQLGLGRVYPRPPSKTYRGAFQNLFQSVREVIQNPGPRHPEAASAAPPGASLLLLQQQQQQQQQQQQQQQQQQQQQQQETSPRQQQQQQGEDGSPQAHRRGPTGYLVLDEEQQPSQPQSALECHPERGCVPEPGAAVAASKGLPQQLPAPPDEDDSAAPSTLSLLGPTFPGLSSCSADLKDILSEASTMQLLQQQQQEAVSEGSSSGRAREASGAPTSSKDNYLGGTSTISDNAKELCKAVSVSMGLGVEALEHLSPGEQLRGDCMYAPLLGVPPAVRPTPCAPLAECKGSLLDDSAGKSTEDTAEYSPFKGGYTKGLEGESLGCSGSAAAGSSGTLELPSTLSLYKSGALDEAAAYQSRDYYNFPLALAGPPPPPPPPHPHARIKLENPLDYGSAWAAAAAQCRYGDLASLHGAGAAGPGSGSPSAAASSSWHTLFTAEEGQLYGPCGGGGGGGGGGGGGGGGGGGGGGGEAGAVAPYGYTRPPQGLAGQESDFTAPDVWYPGGMVSRVPYPSPTCVKSEMGPWMDSYSGPYGDMRLETARDHVLPIDYYFPPQKTCLICGDEASGCHYGALTCGSCKVFFKRAAEGKQKYLCASRNDCTIDKFRRKNCPSCRLRKCYEAGMTLGARKLKKLGNLKLQEEGEASSTTSPTEETTQKLTVSHIEGYECQPIFLNVLEAIEPGVVCAGHDNNQPDSFAALLSSLNELGERQLVHVVKWAKALPGFRNLHVDDQMAVIQYSWMGLMVFAMGWRSFTNVNSRMLYFAPDLVFNEYRMHKSRMYSQCVRMRHLSQEFGWLQITPQEFLCMKALLLFSIIPVDGLKNQKFFDELRMNYIKELDRIIACKRKNPTSCSRRFYQLTKLLDSVQPIARELHQFTFDLLIKSHMVSVDFPEMMAEIISVQVPKILSGKVKPIYFHTQ

SEQ ID NO: 20534 - protein, 388 aa, Homo sapiens
MILWLHSLETARDHVLPIDYYFPPQKTCLICGDEASGCHYGALTCGSCKVFFKRAAEGKQKYLCASRNDCTIDKFRRKNCPSCRLRKCYEAGMTLGARKLKKLGNLKLQEEGEASSTTSPTEETTQKLTVSHIEGYECQPIFLNVLEAIEPGVVCAGHDNNQPDSFAALLSSLNELGERQLVHVVKWAKALPGFRNLHVDDQMAVIQYSWMGLMVFAMGWRSFTNVNSRMLYFAPDLVFNEYRMHKSRMYSQCVRMRHLSQEFGWLQITPQEFLCMKALLLFSIIPVDGLKNQKFFDELRMNYIKELDRIIACKRKNPTSCSRRFYQLTKLLDSVQPIARELHQFTFDLLIKSHMVSVDFPEMMAEIISVQVPKILSGKVKPIYFHTQ

SEQ ID NO: 20535 - protein, 644 aa, Homo sapiens
MEVQLGLGRVYPRPPSKTYRGAFQNLFQSVREVIQNPGPRHPEAASAAPPGASLLLLQQQQQQQQQQQQQQQQQQQQQQQETSPRQQQQQQGEDGSPQAHRRGPTGYLVLDEEQQPSQPQSALECHPERGCVPEPGAAVAASKGLPQQLPAPPDEDDSAAPSTLSLLGPTFPGLSSCSADLKDILSEASTMQLLQQQQQEAVSEGSSSGRAREASGAPTSSKDNYLGGTSTISDNAKELCKAVSVSMGLGVEALEHLSPGEQLRGDCMYAPLLGVPPAVRPTPCAPLAECKGSLLDDSAGKSTEDTAEYSPFKGGYTKGLEGESLGCSGSAAAGSSGTLELPSTLSLYKSGALDEAAAYQSRDYYNFPLALAGPPPPPPPPHPHARIKLENPLDYGSAWAAAAAQCRYGDLASLHGAGAAGPGSGSPSAAASSSWHTLFTAEEGQLYGPCGGGGGGGGGGGGGGGGGGGGGGGEAGAVAPYGYTRPPQGLAGQESDFTAPDVWYPGGMVSRVPYPSPTCVKSEMGPWMDSYSGPYGDMRLETARDHVLPIDYYFPPQKTCLICGDEASGCHYGALTCGSCKVFFKRAAEGKQKYLCASRNDCTIDKFRRKNCPSCRLRKCYEAGMTLGEKFRVGNCKHLKMTRP

SEQ ID NO: 20536 - protein, 648 aa, Homo sapiens
MEVQLGLGRVYPRPPSKTYRGAFQNLFQSVREVIQNPGPRHPEAASAAPPGASLLLLQQQQQQQQQQQQQQQQQQQQQQQETSPRQQQQQQGEDGSPQAHRRGPTGYLVLDEEQQPSQPQSALECHPERGCVPEPGAAVAASKGLPQQLPAPPDEDDSAAPSTLSLLGPTFPGLSSCSADLKDILSEASTMQLLQQQQQEAVSEGSSSGRAREASGAPTSSKDNYLGGTSTISDNAKELCKAVSVSMGLGVEALEHLSPGEQLRGDCMYAPLLGVPPAVRPTPCAPLAECKGSLLDDSAGKSTEDTAEYSPFKGGYTKGLEGESLGCSGSAAAGSSGTLELPSTLSLYKSGALDEAAAYQSRDYYNFPLALAGPPPPPPPPHPHARIKLENPLDYGSAWAAAAAQCRYGDLASLHGAGAAGPGSGSPSAAASSSWHTLFTAEEGQLYGPCGGGGGGGGGGGGGGGGGGGGGGGEAGAVAPYGYTRPPQGLAGQESDFTAPDVWYPGGMVSRVPYPSPTCVKSEMGPWMDSYSGPYGDMRLETARDHVLPIDYYFPPQKTCLICGDEASGCHYGALTCGSCKVFFKRAAEGKQKYLCASRNDCTIDKFRRKNCPSCRLRKCYEAGMTLGAAVVVSERILRVFGVSEWLP

SEQ ID NO: 20537 - protein, 170 aa, Homo sapiens
MKTMATRKRCKLSRTGPEFENVIKRLLCARTFHTRIGGDLTHGIINRGRRANAEQMGLQGSAQHFNIFPLDLWTQGKKTEVQKREGTDSIPAAGRSGTANQPSIAPHRCLFSRGITALDGLKRGRGCNGAAHLVRGDAWKTKLGEPWVSIALALAGPGAILILELSWFLG

SEQ ID NO: 20538 - protein, 78 aa, Homo sapiens
MKTMATRKRCKLSRTGPEFENVIKRLLCARTFHTRIGGDLTHGIINRGRRANAEQMGLQGSAQHFNIFPLDLWTQGKK

SEQ ID NO: 20539 - protein, 119 aa, Homo sapiens
MKTMATRKRCKLSRTGPEFENVIKRLLCARTFHTRIGGDLTHGIINRGRRANAEQMGLQGSAQHFNIFPLDLWTQGDCMLVSLAKNKVNVFGAIINMAASVSGVIGGLKFSRTYYVKGI

SEQ ID NO: 20540 - protein, 198 aa, Homo sapiens
MPVPALCLLWALAMVTRPASAAPMGGPELAQHEELTLLFHGTLQLGQALNGVYRTTEGRLTKARNSLGLYGRTIELLGQEVSRGRDAAQELRASLLETQMEEDILQLQAEATAEVLGEVAQAQKVLRDSVQRLEVQLRSAWLGPAYREFEVLKAHADKQSHILWALTGHVQRQRREMVAQQHRLRQIQERLHTAALPA

SEQ ID NO: 20541 - protein, 267 aa, Homo sapiens
MKAAVLTLAVLFLTGSQARHFWQQDEPPQSPWDRVKDLATVYVDVLKDSGRDYVSQFEGSALGKQLNLKLLDNWDSVTSTFSKLREQLGPVTQEFWDNLEKETEGLRQEMSKDLEEVKAKVQPYLDDFQKKWQEEMELYRQKVEPLRAELQEGARQKLHELQEKLSPLGEEMRDRARAHVDALRTHLAPYSDELRQRLAARLEALKENGGARLAEYHAKATEHLSTLSEKAKPALEDLRQGLLPVLESFKVSFLSALEEYTKKLNTQ

SEQ ID NO: 20542 - protein, 147 aa, Homo sapiens
MVMGLGVLLLVFVLGLGLTPPTLAQDNSRYTHFLTQHYDAKPQGRDDRYCESIMRRRGLTSPCKDINTFIHGNKRSIKAICENKNGNPHRENLRISKSSFQVTTCKLHGGSPWPPCQYRATAGFRNVVVACENGLPVHLDQSIFRRP

SEQ ID NO: 20543 - protein, 4377 aa, Homo sapiens
MAHAASQLKKNRDLEINAEEEPEKKRKHRKRSRDRKKKSDANASYLRAARAGHLEKALDYIKNGVDINICNQNGLNALHLASKEGHVEVVSELLQREANVDAATKKGNTALHIASLAGQAEVVKVLVTNGANVNAQSQNGFTPLYMAAQENHLEVVKFLLDNGASQSLATEDGFTPLAVALQQGHDQVVSLLLENDTKGKVRLPALHIAARKDDTKAAALLLQNDNNADVESKSGFTPLHIAAHYGNINVATLLLNRAAAVDFTARNDITPLHVASKRGNANMVKLLLDRGAKIDAKTRDGLTPLHCGARSGHEQVVEMLLDRAAPILSKTKNGLSPLHMATQGDHLNCVQLLLQHNVPVDDVTNDYLTALHVAAHCGHYKVAKVLLDKKANPNAKALNGFTPLHIACKKNRIKVMELLLKHGASIQAVTESGLTPIHVAAFMGHVNIVSQLMHHGASPNTTNVRGETALHMAARSGQAEVVRYLVQDGAQVEAKAKDDQTPLHISARLGKADIVQQLLQQGASPNAATTSGYTPLHLSAREGHEDVAAFLLDHGASLSITTKKGFTPLHVAAKYGKLEVANLLLQKSASPDAAGKSGLTPLHVAAHYDNQKVALLLLDQGASPHAAAKNGYTPLHIAAKKNQMDIATTLLEYGADANAVTRQGIASVHLAAQEGHVDMVSLLLGRNANVNLSNKSGLTPLHLAAQEDRVNVAEVLVNQGAHVDAQTKMGYTPLHVGCHYGNIKIVNFLLQHSAKVNAKTKNGYTPLHQAAQQGHTHIINVLLQNNASPNELTVNGNTALGIARRLGYISVVDTLKIVTEETMTTTTVTEKHKMNVPETMNEVLDMSDDEVRKANAPEMLSDGEYISDVEEGEDAMTGDTDKYLGPQDLKELGDDSLPAEGYMGFSLGARSASLRSFSSDRSYTLNRSSYARDSMMIEELLVPSKEQHLTFTREFDSDSLRHYSWAADTLDNVNLVSSPIHSGFLVSFMVDARGGSMRGSRHHGMRIIIPPRKCTAPTRITCRLVKRHKLANPPPMVEGEGLASRLVEMGPAGAQFLGPVIVEIPHFGSMRGKERELIVLRSENGETWKEHQFDSKNEDLTELLNGMDEELDSPEELGKKRICRIITKDFPQYFAVVSRIKQESNQIGPEGGILSSTTVPLVQASFPEGALTKRIRVGLQAQPVPDEIVKKILGNKATFSPIVTVEPRRRKFHKPITMTIPVPPPSGEGVSNGYKGDTTPNLRLLCSITGGTSPAQWEDITGTTPLTFIKDCVSFTTNVSARFWLADCHQVLETVGLATQLYRELICVPYMAKFVVFAKMNDPVESSLRCFCMTDDKVDKTLEQQENFEEVARSKDIEVLEGKPIYVDCYGNLAPLTKGGQQLVFNFYSFKENRLPFSIKIRDTSQEPCGRLSFLKEPKTTKGLPQTAVCNLNITLPAHKKETESDQDDEIEKTDRRQSFASLALRKRYSYLTEPGMIERSTGATRSLPTTYSYKPFFSTRPYQSWTTAPITVPGPAKSGFTSLSSSSSNTPSASPLKSIWSVSTPSPIKSTLGASTTSSVKSISDVASPIRSFRTMSSPIKTVVSQSPYNIQVSSGTLARAPAVTEATPLKGLASNSTFSSRTSPVTTAGSLLERSSITMTPPASPKSNINMYSSSLPFKSIITSAAPLISSPLKSVVSPVKSAVDVISSAKITMASSLSSPVKQMPGHAEVALVNGSISPLKYPSSSTLINGCKATATLQEKISSATNSVSSVVSAATDTVEKVFSTTTAMPFSPLRSYVSAAPSAFQSLRTPSASALYTSLGSSISATTSSVTSSIITVPVYSVVNVLPEPALKKLPDSNSFTKSAAALLSPIKTLTTETHPQPHFSRTSSPVKSSLFLAPSALKLSTPSSLSSSQEILKDVAEMKEDLMRMTAILQTDVPEEKPFQPELPKEGRIDDEEPFKIVEKVKEDLVKVSEILKKDVCVDNKGSPKSPKSDKGHSPEDDWIEFSSEEIREARQQAAASQSPSLPERVQVKAKAASEKDYNLTKVIDYLTNDIGSSSLTNLKYKFEDAKKDGEERQKRVLKPAIALQEHKLKMPPASMRTSTSEKELCKMADSFFGTDTILESPDDFSQHDQDKSPLSDSGFETRSEKTPSAPQSAESTGPKPLFHEVPIPPVITETRTEVVHVIRSYDPSAGDVPQTQPEEPVSPKPSPTFMELEPKPTTSSIKEKVKAFQMKASSEEDDHNRVLSKGMRVKEETHITTTTRMVYHSPPGGEGASERIEETMSVHDIMKAFQSGRDPSKELAGLFEHKSAVSPDVHKSAAETSAQHAEKDNQMKPKLERIIEVHIEKGNQAEPTEVIIRETKKHPEKEMYVYQKDLSRGDINLKDFLPEKHDAFPCSEEQGQQEEEELTAEESLPSYLESSRVNTPVSQEEDSRPSSAQLISDDSYKTLKLLSQHSIEYHDDELSELRGESYRFAEKMLLSEKLDVSHSDTEESVTDHAGPPSSELQGSDKRSREKIATAPKKEILSKIYKDVSENGVGKVSKDEHFDKVTVLHYSGNVSSPKHAMWMRFTEDRLDRGREKLIYEDRVDRTVKEAEEKLTEVSQFFRDKTEKLNDELQSPEKKARPKNGKEYSSQSPTSSSPEKVLLTELLASNDEWVKARQHGPDGQGFPKAEEKAPSLPSSPEKMVLSQQTEDSKSTVEAKGSISQSKAPDGPQSGFQLKQSKLSSIRLKFEQGTHAKSKDMSQEDRKSDGQSRIPVKKIQESKLPVYQVFAREKQQKAIDLPDESVSVQKDFMVLKTKDEHAQSNEIVVNDSGSDNVKKQRTEMSSKAMPDSFSEQQAKDLACHITSDLATRGPWDKKVFRTWESSGATNNKSQKEKLSHVLVHDVRENHIGHPESKSVDQKNEFMSVTERERKLLTNGSLSEIKEMTVKSPSKKVLYREYVVKEGDHPGGLLDQPSRRSESSAVSHIPVRVADERRMLSSNIPDGFCEQSAFPKHELSQKLSQSSMSKETVETQHFNSIEDEKVTYSEISKVSKHQSYVGLCPPLEETETSPTKSPDSLEFSPGKESPSSDVFDHSPIDGLEKLAPLAQTEGGKEIKTLPVYVSFVQVGKQYEKEIQQGGVKKIISQECKTVQETRGTFYTTRQQKQPPSPQGSPEDDTLEQVSFLDSSGKSPLTPETPSSEEVSYEFTSKTPDSLIAYIPGKPSPIPEVSEESEEEEQAKSTSLKQTTVEETAVEREMPNDVSKDSNQRPKNNRVAYIEFPPPPPLDADQIESDKKHHYLPEKEVDMIEVNLQDEHDKYQLAEPVIRVQPPSPVPPGADVSDSSDDESIYQPVPVKKYTFKLKEVDDEQKEKPKASAEKASNQKELESNGSGKDNEFGLGLDSPQNEIAQNGNNDQSITECSIATTAEFSHDTDATEIDSLDGYDLQDEDDGLTESDSKLPIQAMEIKKDIWNTEGILKPADRSFSQSKLEVIEEEGKVGPDEDKPPSKSSSSEKTPDKTDQKSGAQFFTLEGRHPDRSVFPDTYFSYKVDEEFATPFKTVATKGLDFDPWSNNRGDDEVFDSKSREDETKPFGLAVEDRSPATTPDTTPARTPTDESTPTSEPNPFPFHEGKMFEMTRSGAIDMSKRDFVEERLQFFQIGEHTSEGKSGDQGEGDKSMVTATPQPQSGDTTVETNLERNVETPTVEPNPSIPTSGECQEGTSSSGSLEKSAAATNTSKVDPKLRTPIKMGISASTMTMKKEGPGEITDKIEAVMTSCQGLENETITMISNTANSQMGVRPHEKHDFQKDNFNNNNNLDSSTIQTDNIMSNIVLTEHSAPTCTTEKDNPVKVSSGKKTGVLQGHCVRDKQKVLGEQQKTKELIGIRQKSKLPIKATSPKDTFPPNHMSNTKASKMKQVSQSEKTKALTTSSCVDVKSRIPVKNTHRDNIIAVRKACATQKQGQPEKGKAKQLPSKLPVKVRSTCVTTTTTTATTTTTTTTTTTTSCTVKVRKSQLKEVCKHSIEYFKGISGETLKLVDRLSEEEKKMQSELSDEEESTSRNTSLSETSRGGQPSVTTKSARDKKTEAAPLKSKSEKAGSEKRSSRRTGPQSPCERTDIRMAIVADHLGLSWTELARELNFSVDEINQIRVENPNSLISQSFMLLKKWVTRDGKNATTDALTSVLTKINRIDIVTLLEGPIFDYGNISGTRSFADENNVFHDPVDGWQNETSSGNLESCAQARRVTGGLLDRLDDSPDQCRDSITSYLKGEAGKFEANGSHTEITPEAKTKSYFPESQNDVGKQSTKETLKPKIHGSGHVEEPASPLAAYQKSLEETSKLIIEETKPCVPVSMKKMSRTSPADGKPRLSLHEEEGSSGSEQKQGEGFKVKTKKEIRHVEKKSHS

SEQ ID NO: 20544 - protein, 1868 aa, Homo sapiens
MSEEPKEKNAKPAHRKRKGKKSDANASYLRAARAGHLEKALDYIKNGVDINICNQNGLNALHLASKEGHVEVVSELLQREANVDAATKKGNTALHIASLAGQAEVVKVLVTNGANVNAQSQNGFTPLYMAAQENHLEVVKFLLDNGASQSLATEDGFTPLAVALQQGHDQVVSLLLENDTKGKVRLPALHIAARKDDTKAAALLLQNDNNADVESKSGFTPLHIAAHYGNINVATLLLNRAAAVDFTARNDITPLHVASKRGNANMVKLLLDRGAKIDAKTRDGLTPLHCGARSGHEQVVEMLLDRAAPILSKTKNGLSPLHMATQGDHLNCVQLLLQHNVPVDDVTNDYLTALHVAAHCGHYKVAKVLLDKKANPNAKALNGFTPLHIACKKNRIKVMELLLKHGASIQAVTESGLTPIHVAAFMGHVNIVSQLMHHGASPNTTNVRGETALHMAARSGQAEVVRYLVQDGAQVEAKAKDDQTPLHISARLGKADIVQQLLQQGASPNAATTSGYTPLHLSAREGHEDVAAFLLDHGASLSITTKKGFTPLHVAAKYGKLEVANLLLQKSASPDAAGKSGLTPLHVAAHYDNQKVALLLLDQGASPHAAAKNGYTPLHIAAKKNQMDIATTLLEYGADANAVTRQGIASVHLAAQEGHVDMVSLLLGRNANVNLSNKSGLTPLHLAAQEDRVNVAEVLVNQGAHVDAQTKMGYTPLHVGCHYGNIKIVNFLLQHSAKVNAKTKNGYTPLHQAAQQGHTHIINVLLQNNASPNELTVNGNTALGIARRLGYISVVDTLKIVTEETMTTTTVTEKHKMNVPETMNEVLDMSDDEVRKANAPEMLSDGEYISDVEEGNRCTWYKIPKVQEFTVKSEDAMTGDTDKYLGPQDLKELGDDSLPAEGYMGFSLGARSASLRSFSSDRSYTLNRSSYARDSMMIEELLVPSKEQHLTFTREFDSDSLRHYSWAADTLDNVNLVSSPIHSGFLVSFMVDARGGSMRGSRHHGMRIIIPPRKCTAPTRITCRLVKRHKLANPPPMVEGEGLASRLVEMGPAGAQFLGPVIVEIPHFGSMRGKERELIVLRSENGETWKEHQFDSKNEDLTELLNGMDEELDSPEELGKKRICRIITKDFPQYFAVVSRIKQESNQIGPEGGILSSTTVPLVQASFPEGALTKRIRVGLQAQPVPDEIVKKILGNKATFSPIVTVEPRRRKFHKPITMTIPVPPPSGEGVSNGYKGDTTPNLRLLCSITGGTSPAQWEDITGTTPLTFIKDCVSFTTNVSARFWLADCHQVLETVGLATQLYRELICVPYMAKFVVFAKMNDPVESSLRCFCMTDDKVDKTLEQQENFEEVARSKDIEVLEGKPIYVDCYGNLAPLTKGGQQLVFNFYSFKENRLPFSIKIRDTSQEPCGRLSFLKEPKTTKGLPQTAVCNLNITLPAHKKIEKTDRRQSFASLALRKRYSYLTEPGMSPQSPCERTDIRMAIVADHLGLSWTELARELNFSVDEINQIRVENPNSLISQSFMLLKKWVTRDGKNATTDALTSVLTKINRIDIVTLLEGPIFDYGNISGTRSFADENNVFHDPVDGYPSLQVELETPTGLHYTPPTPFQQDDYFSDISSIESPLRTPSRLSDGLVPSQGNIEHSADGPPVVTAEDASLEDSKLEDSVPLTEMPEAVDVDESQLENVCLSWQNETSSGNLESCAQARRVTGGLLDRLDDSPDQCRDSITSYLKGEAGKFEANGSHTEITPEAKTKSYFPESQNDVGKQSTKETLKPKIHGSGHVEEPASPLAAYQKSLEETSKLIIEETKPCVPVSMKKMSRTSPADGKPRLSLHEEEGSSGSEQKQGEGFKVKTKKEIRHVEKKSHS

SEQ ID NO: 20545 - protein, 1861 aa, Homo sapiens
MASSASSSPAGTEDSAPAQGGFGSDYSRSSRKSDANASYLRAARAGHLEKALDYIKNGVDINICNQNGLNALHLASKEGHVEVVSELLQREANVDAATKKGNTALHIASLAGQAEVVKVLVTNGANVNAQSQNGFTPLYMAAQENHLEVVKFLLDNGASQSLATEDGFTPLAVALQQGHDQVVSLLLENDTKGKVRLPALHIAARKDDTKAAALLLQNDNNADVESKSGFTPLHIAAHYGNINVATLLLNRAAAVDFTARNDITPLHVASKRGNANMVKLLLDRGAKIDAKTRDGLTPLHCGARSGHEQVVEMLLDRAAPILSKTKNGLSPLHMATQGDHLNCVQLLLQHNVPVDDVTNDYLTALHVAAHCGHYKVAKVLLDKKANPNAKALNGFTPLHIACKKNRIKVMELLLKHGASIQAVTESGLTPIHVAAFMGHVNIVSQLMHHGASPNTTNVRGETALHMAARSGQAEVVRYLVQDGAQVEAKAKDDQTPLHISARLGKADIVQQLLQQGASPNAATTSGYTPLHLSAREGHEDVAAFLLDHGASLSITTKKGFTPLHVAAKYGKLEVANLLLQKSASPDAAGKSGLTPLHVAAHYDNQKVALLLLDQGASPHAAAKNGYTPLHIAAKKNQMDIATTLLEYGADANAVTRQGIASVHLAAQEGHVDMVSLLLGRNANVNLSNKSGLTPLHLAAQEDRVNVAEVLVNQGAHVDAQTKMGYTPLHVGCHYGNIKIVNFLLQHSAKVNAKTKNGYTPLHQAAQQGHTHIINVLLQNNASPNELTVNGNTALGIARRLGYISVVDTLKIVTEETMTTTTVTEKHKMNVPETMNEVLDMSDDEVRKANAPEMLSDGEYISDVEEGEDAMTGDTDKYLGPQDLKELGDDSLPAEGYMGFSLGARSASLRSFSSDRSYTLNRSSYARDSMMIEELLVPSKEQHLTFTREFDSDSLRHYSWAADTLDNVNLVSSPIHSGFLVSFMVDARGGSMRGSRHHGMRIIIPPRKCTAPTRITCRLVKRHKLANPPPMVEGEGLASRLVEMGPAGAQFLGPVIVEIPHFGSMRGKERELIVLRSENGETWKEHQFDSKNEDLTELLNGMDEELDSPEELGKKRICRIITKDFPQYFAVVSRIKQESNQIGPEGGILSSTTVPLVQASFPEGALTKRIRVGLQAQPVPDEIVKKILGNKATFSPIVTVEPRRRKFHKPITMTIPVPPPSGEGVSNGYKGDTTPNLRLLCSITGGTSPAQWEDITGTTPLTFIKDCVSFTTNVSARFWLADCHQVLETVGLATQLYRELICVPYMAKFVVFAKMNDPVESSLRCFCMTDDKVDKTLEQQENFEEVARSKDIEVLEGKPIYVDCYGNLAPLTKGGQQLVFNFYSFKENRLPFSIKIRDTSQEPCGRLSFLKEPKTTKGLPQTAVCNLNITLPAHKKIEKTDRRQSFASLALRKRYSYLTEPGMSPQSPCERTDIRMAIVADHLGLSWTELARELNFSVDEINQIRVENPNSLISQSFMLLKKWVTRDGKNATTDALTSVLTKINRIDIVTLLEGPIFDYGNISGTRSFADENNVFHDPVDGYPSLQVELETPTGLHYTPPTPFQQDDYFSDISSIESPLRTPSRLSDGLVPSQGNIEHSADGPPVVTAEDASLEDSKLEDSVPLTEMPEAVDVDESQLENVCLSWQNETSSGNLESCAQARRVTGGLLDRLDDSPDQCRDSITSYLKGEAGKFEANGSHTEITPEAKTKSYFPESQNDVGKQSTKETLKPKIHGSGHVEEPASPLAAYQKSLEETSKLIIEETKPCVPVSMKKMSRTSPADGKPRLSLHEEEGSSGSEQKQGEGFKVKTKKEIRHVEKKSHS

SEQ ID NO: 20546 - protein, 1001 aa, Homo sapiens
MALPQSEDAMTGDTDKYLGPQDLKELGDDSLPAEGYMGFSLGARSASLRSFSSDRSYTLNRSSYARDSMMIEELLVPSKEQHLTFTREFDSDSLRHYSWAADTLDNVNLVSSPIHSGFLVSFMVDARGGSMRGSRHHGMRIIIPPRKCTAPTRITCRLVKRHKLANPPPMVEGEGLASRLVEMGPAGAQFLGPVIVEIPHFGSMRGKERELIVLRSENGETWKEHQFDSKNEDLTELLNGMDEELDSPEELGKKRICRIITKDFPQYFAVVSRIKQESNQIGPEGGILSSTTVPLVQASFPEGALTKRIRVGLQAQPVPDEIVKKILGNKATFSPIVTVEPRRRKFHKPITMTIPVPPPSGEGVSNGYKGDTTPNLRLLCSITGGTSPAQWEDITGTTPLTFIKDCVSFTTNVSARFWLADCHQVLETVGLATQLYRELICVPYMAKFVVFAKMNDPVESSLRCFCMTDDKVDKTLEQQENFEEVARSKDIEVLEGKPIYVDCYGNLAPLTKGGQQLVFNFYSFKENRLPFSIKIRDTSQEPCGRLSFLKEPKTTKGLPQTAVCNLNITLPAHKKIEKTDRRQSFASLALRKRYSYLTEPGMSPQSPCERTDIRMAIVADHLGLSWTELARELNFSVDEINQIRVENPNSLISQSFMLLKKWVTRDGKNATTDALTSVLTKINRIDIVTLLEGPIFDYGNISGTRSFADENNVFHDPVDGYPSLQVELETPTGLHYTPPTPFQQDDYFSDISSIESPLRTPSRLSDGLVPSQGNIEHSADGPPVVTAEDASLEDSKLEDSVPLTEMPEAVDVDESQLENVCLSWQNETSSGNLESCAQARRVTGGLLDRLDDSPDQCRDSITSYLKGEAGKFEANGSHTEITPEAKTKSYFPESQNDVGKQSTKETLKPKIHGSGHVEEPASPLAAYQKSLEETSKLIIEETKPCVPVSMKKMSRTSPADGKPRLSLHEEEGSSGSEQKQGEGFKVKTKKEIRHVEKKSHS

SEQ ID NO: 20547 - protein, 1465 aa, Homo sapiens
MNLRCDLLDKKANPNAKALNGFTPLHIACKKNRIKVMELLLKHGASIQAVTESGLTPIHVAAFMGHVNIVSQLMHHGASPNTTNVRGETALHMAARSGQAEVVRYLVQDGAQVEAKAKDDQTPLHISARLGKADIVQQLLQQGASPNAATTSGYTPLHLSAREGHEDVAAFLLDHGASLSITTKKGFTPLHVAAKYGKLEVANLLLQKSASPDAAGKSGLTPLHVAAHYDNQKVALLLLDQGASPHAAAKNGYTPLHIAAKKNQMDIATTLLEYGADANAVTRQGIASVHLAAQEGHVDMVSLLLGRNANVNLSNKSGLTPLHLAAQEDRVNVAEVLVNQGAHVDAQTKMGYTPLHVGCHYGNIKIVNFLLQHSAKVNAKTKNGYTPLHQAAQQGHTHIINVLLQNNASPNELTVNGNTALGIARRLGYISVVDTLKIVTEETMTTTTVTEKHKMNVPETMNEVLDMSDDEGEDAMTGDTDKYLGPQDLKELGDDSLPAEGYMGFSLGARSASDRSYTLNRSSYARDSMMIEELLVPSKEQHLTFTREFDSDSLRHYSWAADTLDNVNLVSSPIHSGFLVSFMVDARGGSMRGSRHHGMRIIIPPRKCTAPTRITCRLVKRHKLANPPPHGERRGISSRLVEMGPAGAQFLGPVIVEIPHFGSMRGKERELIVLRSENGETWKEHQFDSKNEDLTELLNGMDEELDSPEELGKKRICRIITKDFPQYFAVVSRIKQESNQIGPEGGILSSTTVPLVQASFPEGALTKRIRVGLQAQPVPDEIVKKILGNKATFSPIVTVEPRRRKFHKPITMTIPVPPPSGEGVSNGYKGDTTPNLRLLCSITGGTSPAQWEDITGTTPLTFIKDCVSFTTNVSARFWLADCHQVLETVGLATQLYRELICVPYMAKFVVFAKMNDPVESSLRCFCMTDDKVDKTLEQQENFEEVARSKDIEVLEGKPIYVDCYGNLAPLTKGGQQLVFNFYSFKENRLPFSIKIRDTSQEPCGRLSFLKEPKTTKGLPQTAVCNLNITLPAHKKIEKTDRRQSFASLALRKRYSYLTEPGMTSCTVKVRKSQLKEVCKHSIEYFKGISGETLKLVDRLSEEEKKMQSELSDEEESTSRNTSLSETSRGGQPSVTTKSARDKKTEAAPLKSKSEKAGSEKRSSRRTGPQSPCERTDIRMAIVADHLGLSWTELARELNFSVDEINQIRVENPNSLISQSFMLLKKWVTRDGKNATTDALTSVLTKINRIDIVTLLEGPIFDYGNISGTRSFADENNVFHDPVDGWQNETSSGNLESCAQARRVTGGLLDRLDDSPDQCRDSITSYLKGEAGKFEANGSHTEITPEAKTKSYFPESQNDVGKQSTKETLKPKIHGSGHVEEPASPLAAYQKSLEETSKLSKLIIEETKPCVPVSMKKMSRTSPADGKPRLSLHEEEGSSGSEQKQGEGFKVKTKKEIRHVEKKSHS

SEQ ID NO: 20548 - protein, 305 aa, Homo sapiens
MDFISIQQLVSGERVEGKVLGFGHGVPDPGAWPSDWRRGPQEAVAREKLKLEEEKKKKLERFNSTRFNLDNLADLENLVQRRKKRLRHRVPPRKPEPLVKPQSQAQVEPVGLEMFLKAAAENQEYLIDKYLTDGGDPNAHDKLHRTALHWACLKGHSQLVNKLLVAGATVDARDLLDRTPVFWACRGGHLVILKQLLNQGARVNARDKIGSTPLHVAVRTRHPDCLEHLIECGAHLNAQDKEGDTALHEAVRHGSYKAMKLLLLYGAELGVRNAASVTPVQLARDWQRGIREALQAHVAHPRTRC

SEQ ID NO: 20549 - protein, 263 aa, Homo sapiens
MDFISIQQLVSGERVEGKVLGFGHGVPDPGAWPSDWRRGPQEAVAREKLKLEEEKKKKLERFNSTRFNLDNLADLENLVQRRKKRLRHRVPPRKPEPLVKLHRTALHWACLKGHSQLVNKLLVAGATVDARDLLDRTPVFWACRGGHLVILKQLLNQGARVNARDKIGSTPLHVAVRTRHPDCLEHLIECGAHLNAQDKEGDTALHEAVRHGSYKAMKLLLLYGAELGVRNAASVTPVQLARDWQRGIREALQAHVAHPRTRC

SEQ ID NO: 20550 - protein, 379 aa, Homo sapiens
MQSFLTLLKEHEDTCAPPAELVTLAGRLCRDFQDDLAQLQPLVTAILDSQLRLHLLDNADVALACARVLDQQEQQQAACRLLEGCQVPGGSQELVQLWNDIHYRLVMRRLGVAALTPVQKFRCRKRNPPPPSLCPEGLKSRNFPREVREKLHNFAVGVNTNPSKAERENLALETSLTPEQVYNWFANYRRRQRALPQHMKPAQQATAEDPGARERGPDLLQPSGNPRVDSGFVDRPQWSEEREEKGPPQSPQTTQGPWEPLALAPDFPADETVSKPLDVSGHPQSVQLEEGLGTSSGRTELRVGSFLVTQPPLQAPEFILTQSPPELAPAPSAFPGPVSAMELSQALPSSQVQCSDSQASGDAFWGARMLLEFSGSSLG

SEQ ID NO: 20551 - protein, 1458 aa, Homo sapiens
MVNTRKSSLRLLGSKSPGPGPGPGAGAEPGATGGSSHFISSRTRSSKTRAASCPAAKAGGSGGAGVTLDEARKVEVDGSLSDSHVSPPAKRTLKQPDSVCKDKSKSRSTGQREEWNLSTGQARLTSQPGATLPNGHSGLSLRSHPLRGEKKGDGDLSCINGDMEVRKSCRSRKNRFESVNQSLLFDQLVNSTAEAVLQEMDNINIRQNRRSGEVERLRMWTDTEFENMDMYSRVKRRRKSLRRNSYGIQNHHEVSTEGEEEESQEEDGDIEVEEAEGEENDRPYNLRQRKTVDRYQAPPIVPAHQKKRENTLFDIHRSPARRSHIRRKKHAIHSSDTTSSDEERFERRKSKSMARARNRCLPMNFRAEDLASGILRERVKVGASLADVDPMNIDKSVRFDSIGGLSHHIHALKEMVVFPLLYPEIFEKFKIQPPRGCLFYGPPGTGKTLVARALANECSQGDKKVAFFMRKGADCLSKWVGESERQLRLLFDQAYLMRPSIIFFDEIDGLAPVRSSRQDQIHSSIVSTLLALMDGLDNRGEIVVIGATNRLDSIDPALRRPGRFDREFLFNLPDQKARKHILQIHTRDWNPKLSDAFLGELAEKCVGYCGADIKALCTEAALIALRRRYPQIYASSHKLQLDVSSIVLSAQDFYHAMQNIVPASQRAVMSSGHALSPIIRPLLERSFNNILAVLQKVFPHAEISQSDKKEDIETLILEDSEDENALSIFETNCHSGSPKKQSSSAAIHKPYLHFTMSPYHQPTSYRPRLLLSGERGSGQTSHLAPALLHTLERFSVHRLDLPALYSVSAKTPEESCAQIFREARRTVPSIVYMPHIGDWWEAVSETVRATFLTLLQDIPSFSPIFLLSTSETMYSELPEEVKCIFRIQYEEVLYIQRPIEEDRRKFFQELILNQASMAPPRRKHAALCAMEVLPLALPSPPRQLSESEKSRMEDQEENTLRELRLFLRDVTKRLATDKRFNIFSKPVDIEEVSDYLEVIKEPMDLSTVITKIDKHNYLTAKDFLKDIDLICSNALEYNPDKDPGDKIIRHRACTLKDTAHAIIAAELDPEFNKLCEEIKEARIKRGLSVTSEQINPHSTGARKTETRVEEAFRHKQRNPMDVWHNSANKCAFRVRRKSRRRSQWGKGIIKKRKVNNLKKDEEDTKFADYENHTEDRKLLENGEFEVSTDCHEENGEETGDLSMTNDESSCDIMDLDQGQRLNNGAGTKENFASTEEESSNESLLVNSSSSLNPEQTSRKETFLKGNCLNGEASTDSFEGIPVLECQNGKLEVVSFCDSGDKCSSEQKILLEDQSKEKPETSTENHGDDLEKLEALECSNNEKLEPGSDVEVKDAELDKEGASKVKKYRKLILEQAKTTSLELVPEEPSEPVPPLIVDRERLKKLLDLLVDKSNNLAVDQLERLYSLLSQCIYRHRKDYDKSQLVEEMERTVHMFETFL

SEQ ID NO: 20552 - protein, 1453 aa, Homo sapiens
MVNTRKSSLRLLGSKSPGPGPGPGAGAEPGATGGSSHFISSRTRSSKTRAASCPAAKAGGSGGAGVTLDEARKVEVDGSLSDSHVSPPAKRTLKQPDSVCKDKSKSRSTGQREEWNLSTGQARLTSQPGATLPNGHSGLSLRSHPLRGEKKGDGDLSCINGDMEVRKSCRSRKNRFESVNQSLLFDQLVNSTAEAVLQEMDNINIRQNRRSGEVERLRMWTDTEFENMDMYSRVKRRRKSLRRNSYGIQNHHEVSTEGEEEESQEEDGDIEVEEAEGEENDRPYNLRQRKTVDRYQAPPIVPAHQKKRENTLFDIHRSPARRSHIRRKKHAIHSSDTTSSDEERFERRKSKSMARARNRCLPMNFRAEDLASGILRERVKVGASLADVDPMNIDKSVRFDSIGGLSHHIHALKEMVVFPLLYPEIFEKFKIQPPRGCLFYGPPGTGKTLVARALANECSQGDKKVAFFMRKGADCLSKWVGESERQLRLLFDQAYLMRPSIIFFDEIDGLAPVRSSRQDQIHSSIVSTLLALMDGLDNRGEIVVIGATNRLDSIDPALRRPGRFDREFLFNLPDQKARKHILQIHTRDWNPKLSDAFLGELAEKCVGYCGADIKALCTEAALIALRRRYPQIYASSHKLQLDVSSIVLSAQDFYHAMQNIVPASQRAVMSSGHALSPIIRPLLERSFNNILAVLQKVFPHAEISQSDKKEDIETLILEDSEDENALSIFETNCHSGSPKKQSSSAAIHKPYLHFTMSPYHQPTSYRPRLLLSGERGSGQTSHLAPALLHTLERFSVHRLDLPALYSVSAKTPEESCAQIFREARRTVPSIVYMPHIGDWWEAVSETVRATFLTLLQDIPSFSPIFLLSTSETMYSELPEEVKCIFRIQYEEVLYIQRPIEEDRRKFFQELILNQASMAPPRRKHAALCAMEVLPLALPSPPRQLSESEKSRMEDQEENTLRELRLFLRDVTKRLATDKRFNIFSKPVSDYLEVIKEPMDLSTVITKIDKHNYLTAKDFLKDIDLICSNALEYNPDKDPGDKIIRHRACTLKDTAHAIIAAELDPEFNKLCEEIKEARIKRGLSVTSEQINPHSTGARKTETRVEEAFRHKQRNPMDVWHNSANKCAFRVRRKSRRRSQWGKGIIKKRKVNNLKKDEEDTKFADYENHTEDRKLLENGEFEVSTDCHEENGEETGDLSMTNDESSCDIMDLDQGQRLNNGAGTKENFASTEEESSNESLLVNSSSSLNPEQTSRKETFLKGNCLNGEASTDSFEGIPVLECQNGKLEVVSFCDSGDKCSSEQKILLEDQSKEKPETSTENHGDDLEKLEALECSNNEKLEPGSDVEVKDAELDKEGASKVKKYRKLILEQAKTTSLELVPEEPSEPVPPLIVDRERLKKLLDLLVDKSNNLAVDQLERLYSLLSQCIYRHRKDYDKSQLVEEMERTVHMFETFL

SEQ ID NO: 20553 - protein, 634 aa, Homo sapiens
MSWLFGINKGPKGEGAGPPPPLPPAQPGAEGGGDRGLGDRPAPKDKWSNFDPTGLERAAKAARELEHSRYAKDALNLAQMQEQTLQLEQQSKLKMRLEALSLLHTLVWAWSLCRAGAVQTQERLSGSASPEQVPAGECCALQEYEAAVEQLKSEQIRAQAEERRKTLSEETRQHQARAQYQDKLARQRYEDQLKQQQLLNEENLRKQEESVQKQEAMRRATVEREMELRHKNEMLRVEAEARARAKAERENADIIREQIRLKAAEHRQTVLESIRTAGTLFGEGFRAFVTDWDKVTATVAGLTLLAVGVYSAKNATLVAGRFIEARLGKPSLVRETSRITVLEALRHPIQVSRRLLSRPQDALEGVVLSPSLEARVRDIAIATRNTKKNRSLYRNILMYGPPGTGKTLFAKKLALHSGMDYAIMTGGDVAPMGREGVTAMHKLFDWANTSRRGLLLFVDEADAFLRKRATEKISEDLRATLNAFLYRTGQHSNKFMLVLASNQPEQFDWAINDRINEMVHFDLPGQEERERLVRMYFDKYVLKPATEGKQRLKLAQFDYGRKCSEVARLTEGMSGREIAQLAVSWQATAYASEDGVLTEAMMDTRVQDAVQQHQQKMCWLKAEGPGRGDEPSPS

SEQ ID NO: 20554 - protein, 586 aa, Homo sapiens
MSWLFGINKGPKGEGAGPPPPLPPAQPGAEGGGDRGLGDRPAPKDKWSNFDPTGLERAAKAARELEHSRYAKDALNLAQMQEQTLQLEQQSKLKEYEAAVEQLKSEQIRAQAEERRKTLSEETRQHQARAQYQDKLARQRYEDQLKQQQLLNEENLRKQEESVQKQEAMRRATVEREMELRHKNEMLRVEAEARARAKAERENADIIREQIRLKAAEHRQTVLESIRTAGTLFGEGFRAFVTDWDKVTATVAGLTLLAVGVYSAKNATLVAGRFIEARLGKPSLVRETSRITVLEALRHPIQVSRRLLSRPQDALEGVVLSPSLEARVRDIAIATRNTKKNRSLYRNILMYGPPGTGKTLFAKKLALHSGMDYAIMTGGDVAPMGREGVTAMHKLFDWANTSRRGLLLFVDEADAFLRKRATEKISEDLRATLNAFLYRTGQHSNKFMLVLASNQPEQFDWAINDRINEMVHFDLPGQEERERLVRMYFDKYVLKPATEGKQRLKLAQFDYGRKCSEVARLTEGMSGREIAQLAVSWQATAYASEDGVLTEAMMDTRVQDAVQQHQQKMCWLKAEGPGRGDEPSPS

SEQ ID NO: 20555 - protein, 507 aa, Homo sapiens
MQEQTLQLEQQSKLKEYEAAVEQLKSEQIRAQAEERRKTLSEETRQHQARAQYQDKLARQRYEDQLKQQQLLNEENLRKQEESVQKQEAMRRATVEREMELRHKNEMLRVEAEARARAKAERENADIIREQIRLKAAEHRQTVLESIRTAGTLFGEGFRAFVTDWDKVTATVAGLTLLAVGVYSAKNATLVAGRFIEARLGKPSLVRETSRITVLEALRHPIQVSRRLLSRPQDALEGVVLSPSLEARVRDIAIATRNTKKNRSLYRNILMYGPPGTGKTLFAKKLALHSGMDYAIMTGGDVAPMGREGVTAMHKLFDWANTSRRGLLLFVDEADAFLRKRATEKISEDLRATLNAFLYRTGQHSNKFMLVLASNQPEQFDWAINDRINEMVHFDLPGQEERERLVRMYFDKYVLKPATEGKQRLKLAQFDYGRKCSEVARLTEGMSGREIAQLAVSWQATAYASEDGVLTEAMMDTRVQDAVQQHQQKMCWLKAEGPGRGDEPSPS

SEQ ID NO: 20556 - protein, 1042 aa, Homo sapiens
MENAHTKTVEEVLGHFGVNESTGLSLEQVKKLKERWGSNELPAEEGKTLLELVIEQFEDLLVRILLLAACISFVLAWFEEGEETITAFVEPFVILLILVANAIVGVWQERNAENAIEALKEYEPEMGKVYRQDRKSVQRIKAKDIVPGDIVEIAVGDKVPADIRLTSIKSTTLRVDQSILTGESVSVIKHTDPVPDPRAVNQDKKNMLFSGTNIAAGKAMGVVVATGVNTEIGKIRDEMVATEQERTPLQQKLDEFGEQLSKVISLICIAVWIINIGHFNDPVHGGSWIRGAIYYFKIAVALAVAAIPEGLPAVITTCLALGTRRMAKKNAIVRSLPSVETLGCTSVICSDKTGTLTTNQMSVCRMFILDRVEGDTCSLNEFTITGSTYAPIGEVHKDDKPVNCHQYDGLVELATICALCNDSALDYNEAKGVYEKVGEATETALTCLVEKMNVFDTELKGLSKIERANACNSVIKQLMKKEFTLEFSRDRKSMSVYCTPNKPSRTSMSKMFVKGAPEGVIDRCTHIRVGSTKVPMTSGVKQKIMSVIREWGSGSDTLRCLALATHDNPLRREEMHLEDSANFIKYETNLTFVGCVGMLDPPRIEVASSVKLCRQAGIRVIMITGDNKGTAVAICRRIGIFGQDEDVTSKAFTGREFDELNPSAQRDACLNARCFARVEPSHKSKIVEFLQSFDEITAMTGDGVNDAPALKKAEIGIAMGSGTAVAKTASEMVLADDNFSTIVAAVEEGRAIYNNMKQFIRYLISSNVGEVVCIFLTAALGFPEALIPVQLLWVNLVTDGLPATALGFNPPDLDIMNKPPRNPKEPLISGWLFFRYLAIGCYVGAATVGAAAWWFIAADGGPRVSFYQLSHFLQCKEDNPDFEGVDCAIFESPYPMTMALSVLVTIEMCNALNSLSENQSLLRMPPWENIWLVGSICLSMSLHFLILYVEPLPLIFQITPLNVTQWLMVLKISLPVILMDETLKFVARNYLEPGKECVQPATKSCSFSACTDGISWPFVLLIMPLVIWVYSTDTNFSDMFWS

SEQ ID NO: 20557 - protein, 997 aa, Homo sapiens
MENAHTKTVEEVLGHFGVNESTGLSLEQVKKLKERWGSNELPAEEGKTLLELVIEQFEDLLVRILLLAACISFVLAWFEEGEETITAFVEPFVILLILVANAIVGVWQERNAENAIEALKEYEPEMGKVYRQDRKSVQRIKAKDIVPGDIVEIAVGDKVPADIRLTSIKSTTLRVDQSILTGESVSVIKHTDPVPDPRAVNQDKKNMLFSGTNIAAGKAMGVVVATGVNTEIGKIRDEMVATEQERTPLQQKLDEFGEQLSKVISLICIAVWIINIGHFNDPVHGGSWIRGAIYYFKIAVALAVAAIPEGLPAVITTCLALGTRRMAKKNAIVRSLPSVETLGCTSVICSDKTGTLTTNQMSVCRMFILDRVEGDTCSLNEFTITGSTYAPIGEVHKDDKPVNCHQYDGLVELATICALCNDSALDYNEAKGVYEKVGEATETALTCLVEKMNVFDTELKGLSKIERANACNSVIKQLMKKEFTLEFSRDRKSMSVYCTPNKPSRTSMSKMFVKGAPEGVIDRCTHIRVGSTKVPMTSGVKQKIMSVIREWGSGSDTLRCLALATHDNPLRREEMHLEDSANFIKYETNLTFVGCVGMLDPPRIEVASSVKLCRQAGIRVIMITGDNKGTAVAICRRIGIFGQDEDVTSKAFTGREFDELNPSAQRDACLNARCFARVEPSHKSKIVEFLQSFDEITAMTGDGVNDAPALKKAEIGIAMGSGTAVAKTASEMVLADDNFSTIVAAVEEGRAIYNNMKQFIRYLISSNVGEVVCIFLTAALGFPEALIPVQLLWVNLVTDGLPATALGFNPPDLDIMNKPPRNPKEPLISGWLFFRYLAIGCYVGAATVGAAAWWFIAADGGPRVSFYQLSHFLQCKEDNPDFEGVDCAIFESPYPMTMALSVLVTIEMCNALNSLSENQSLLRMPPWENIWLVGSICLSMSLHFLILYVEPLPLIFQITPLNVTQWLMVLKISLPVILMDETLKFVARNYLEPAILE

SEQ ID NO: 20558 - protein, 999 aa, Homo sapiens
MENAHTKTVEEVLGHFGVNESTGLSLEQVKKLKERWGSNELPAEEGKTLLELVIEQFEDLLVRILLLAACISFVLAWFEEGEETITAFVEPFVILLILVANAIVGVWQERNAENAIEALKEYEPEMGKVYRQDRKSVQRIKAKDIVPGDIVEIAVGDKVPADIRLTSIKSTTLRVDQSILTGESVSVIKHTDPVPDPRAVNQDKKNMLFSGTNIAAGKAMGVVVATGVNTEIGKIRDEMVATEQERTPLQQKLDEFGEQLSKVISLICIAVWIINIGHFNDPVHGGSWIRGAIYYFKIAVALAVAAIPEGLPAVITTCLALGTRRMAKKNAIVRSLPSVETLGCTSVICSDKTGTLTTNQMSVCRMFILDRVEGDTCSLNEFTITGSTYAPIGEVHKDDKPVNCHQYDGLVELATICALCNDSALDYNEAKGVYEKVGEATETALTCLVEKMNVFDTELKGLSKIERANACNSVIKQLMKKEFTLEFSRDRKSMSVYCTPNKPSRTSMSKMFVKGAPEGVIDRCTHIRVGSTKVPMTSGVKQKIMSVIREWGSGSDTLRCLALATHDNPLRREEMHLEDSANFIKYETNLTFVGCVGMLDPPRIEVASSVKLCRQAGIRVIMITGDNKGTAVAICRRIGIFGQDEDVTSKAFTGREFDELNPSAQRDACLNARCFARVEPSHKSKIVEFLQSFDEITAMTGDGVNDAPALKKAEIGIAMGSGTAVAKTASEMVLADDNFSTIVAAVEEGRAIYNNMKQFIRYLISSNVGEVVCIFLTAALGFPEALIPVQLLWVNLVTDGLPATALGFNPPDLDIMNKPPRNPKEPLISGWLFFRYLAIGCYVGAATVGAAAWWFIAADGGPRVSFYQLSHFLQCKEDNPDFEGVDCAIFESPYPMTMALSVLVTIEMCNALNSLSENQSLLRMPPWENIWLVGSICLSMSLHFLILYVEPLPLIFQITPLNVTQWLMVLKISLPVILMDETLKFVARNYLEPVLSSEL

SEQ ID NO: 20559 - protein, 1015 aa, Homo sapiens
MENAHTKTVEEVLGHFGVNESTGLSLEQVKKLKERWGSNELPAEEGKTLLELVIEQFEDLLVRILLLAACISFVLAWFEEGEETITAFVEPFVILLILVANAIVGVWQERNAENAIEALKEYEPEMGKVYRQDRKSVQRIKAKDIVPGDIVEIAGESVSVIKHTDPVPDPRAVNQDKKNMLFSGTNIAAGKAMGVVVATGVNTEIGKIRDEMVATEQERTPLQQKLDEFGEQLSKVISLICIAVWIINIGHFNDPVHGGSWIRGAIYYFKIAVALAVAAIPEGLPAVITTCLALGTRRMAKKNAIVRSLPSVETLGCTSVICSDKTGTLTTNQMSVCRMFILDRVEGDTCSLNEFTITGSTYAPIGEVHKDDKPVNCHQYDGLVELATICALCNDSALDYNEAKGVYEKVGEATETALTCLVEKMNVFDTELKGLSKIERANACNSVIKQLMKKEFTLEFSRDRKSMSVYCTPNKPSRTSMSKMFVKGAPEGVIDRCTHIRVGSTKVPMTSGVKQKIMSVIREWGSGSDTLRCLALATHDNPLRREEMHLEDSANFIKYETNLTFVGCVGMLDPPRIEVASSVKLCRQAGIRVIMITGDNKGTAVAICRRIGIFGQDEDVTSKAFTGREFDELNPSAQRDACLNARCFARVEPSHKSKIVEFLQSFDEITAMTGDGVNDAPALKKAEIGIAMGSGTAVAKTASEMVLADDNFSTIVAAVEEGRAIYNNMKQFIRYLISSNVGEVVCIFLTAALGFPEALIPVQLLWVNLVTDGLPATALGFNPPDLDIMNKPPRNPKEPLISGWLFFRYLAIGCYVGAATVGAAAWWFIAADGGPRVSFYQLSHFLQCKEDNPDFEGVDCAIFESPYPMTMALSVLVTIEMCNALNSLSENQSLLRMPPWENIWLVGSICLSMSLHFLILYVEPLPLIFQITPLNVTQWLMVLKISLPVILMDETLKFVARNYLEPGKECVQPATKSCSFSACTDGISWPFVLLIMPLVIWVYSTDTNFSDMFWS

SEQ ID NO: 20560 - protein, 997 aa, Homo sapiens
MENAHTKTVEEVLGHFGVNESTGLSLEQVKKLKERWGSNELPAEEGKTLLELVIEQFEDLLVRILLLAACISFVLAWFEEGEETITAFVEPFVILLILVANAIVGVWQERNAENAIEALKEYEPEMGKVYRQDRKSVQRIKAKDIVPGDIVEIAVGDKVPADIRLTSIKSTTLRVDQSILTGESVSVIKHTDPVPDPRAVNQDKKNMLFSGTNIAAGKAMGVVVATGVNTEIGKIRDEMVATEQERTPLQQKLDEFGEQLSKVISLICIAVWIINIGHFNDPVHGGSWIRGAIYYFKIAVALAVAAIPEGLPAVITTCLALGTRRMAKKNAIVRSLPSVETLGCTSVICSDKTGTLTTNQMSVCRMFILDRVEGDTCSLNEFTITGSTYAPIGEVHKDDKPVNCHQYDGLVELATICALCNDSALDYNEAKGVYEKVGEATETALTCLVEKMNVFDTELKGLSKIERANACNSVIKQLMKKEFTLEFSRDRKSMSVYCTPNKPSRTSMSKMFVKGAPEGVIDRCTHIRVGSTKVPMTSGVKQKIMSVIREWGSGSDTLRCLALATHDNPLRREEMHLEDSANFIKYETNLTFVGCVGMLDPPRIEVASSVKLCRQAGIRVIMITGDNKGTAVAICRRIGIFGQDEDVTSKAFTGREFDELNPSAQRDACLNARCFARVEPSHKSKIVEFLQSFDEITAMTGDGVNDAPALKKAEIGIAMGSGTAVAKTASEMVLADDNFSTIVAAVEEGRAIYNNMKQFIRYLISSNVGEVVCIFLTAALGFPEALIPVQLLWVNLVTDGLPATALGFNPPDLDIMNKPPRNPKEPLISGWLFFRYLAIGCYVGAATVGAAAWWFIAADGGPRVSFYQLSHFLQCKEDNPDFEGVDCAIFESPYPMTMALSVLVTIEMCNALNSLSENQSLLRMPPWENIWLVGSICLSMSLHFLILYVEPLPLIFQITPLNVTQWLMVLKISLPVILMDETLKFVARNYLEPDIIK

SEQ ID NO: 20561 - protein, 278 aa, Homo sapiens
MEPRAADGCFLGDVGFWVERTPVHEAAQRGESLQLQQLIESGACVNQVTVDSITPLHAASLQGQARCVQLLLAAGAQVDARNIDGSTPLCDACASGSIECVKLLLSYGAKVNPPLYTASPLHEACMSGSSECVRLLIDVGANLEAHDCHFGTPLHVACAREHLDCVKVLLNAGANVNAAKLHETALHHAAKVKNVDLIEMLIEFGGNIYARDNRGKKPSDYTWSSSAPAKCFEYYEKTPLTLSQLCRVNLRKATGVRGLEKIAKLNIPPRLIDYLSYN

SEQ ID NO: 20562 - protein, 173 aa, Homo sapiens
MEPRAADGCFLGDVGFWVERTPVHEAAQRGESLQLQQLIESGACVNQVTVDSITPLHAASLQGQARCVQLLLAAGAQVDARNIDGSTPLCDACASGSIECVKLLLSYGAKVNPPLYTASPLHEACMSGSSECVRLLIDVGANLEAHDCHFGTPLHVACAREHLDCVKVLLNAA

SEQ ID NO: 20563 - protein, 670 aa, Homo sapiens
MGEPAGVAGTMESPFSPGLFHRLDEDWDSALFAELGYFTDTDELQLEAANETYENNFDNLDFDLDLMPWESDIWDINNQICTVKDIKAEPQPLSPASSSYSVSSPRSVDSYSSTQHVPEELDLSSSSQMSPLSLYGENSNSLSSAEPLKEDKPVTGPRNKTENGLTPKKKIQVNSKPSIQPKPLLLPAAPKTQTNSSVPAKTIIIQTVPTLMPLAKQQPIISLQPAPTKGQTVLLSQPTVVQLQAPGVLPSAQPVLAVAGGVTQLPNHVVNVVPAPSANSPVNGKLSVTKPVLQSTMRNVGSDIAVLRRQQRMIKNRESACQSRKKKKEYMLGLEARLKAALSENEQLKKENGTLKRQLDEVVSENQRLKVPSPKRRVVCVMIVLAFIILNYGPMSMLEQDSRRMNPSVSPANQRRHLLGFSAKEAQDTSDGIIQKNSYRYDHSVSNDKALMVLTEEPLLYIPPPPCQPLINTTESLRLNHELRGWVHRHEVERTKSRRMTNNQQKTRILQGALEQGSNSQLMAVQYTETTSSISRNSGSELQVYYASPRSYQDFFEAIRRRGDTFYVVSFRRDHLLLPATTHNKTTRPKMSIVLPAININENVINGQDYEVMMQIDCQVMDTRILHIKSSSVPPYLRDQQRNQTNTFFGSPPAATEATHVVSTIPESLQ

SEQ ID NO: 20564 - protein, 725 aa, Homo sapiens
MDDSDTPTYYLQIEPQDGCHPGDSVERSVTCLPSASDENENQLDGDGHEHLTSSDSAMGKPQVSEQDSLNNNESCTLSCEVAAGENLQNTLCEASRDEQAFLGKDKKIPGKRSPRSKKGTAKKIPPGLFSGDIAPLMQEKVLSAVTYAVDDEEAAEVNANEQPEAPKLVLQSLFSLIRGEVEQLDSRALPLCLHQIAESYFQEEDYEKAMKFIQLERLYHEQLLANLSAIQEQWETKWKTVQPHTVTALRNSEKGFNGEDFERLTKICATHQDPLLSKHKIAAVEKSQERKCSTQLLVSEDPKEGGATTKESESKTCLGTESSKESQHTVEPLGSSPCCHQMDVQTDSPSLSVTAGKDHMEELLCSAEATLALHTQSSETAGSPSGPDSSEDACEDDSRLQLAQTEACQDVARIEGIAEDPKVFLSSKSKTEPLISPGCDRIPPALISEGKYSQAQRKELRLPLRDASEALPTDQLENNELNELQQPDLTDSDGKSPQAQADSDGSENVLCGNNQISDLGILLPEVCMAPEEKGDKDDQLNKETEDYLNSLLEGCLKDTEDSLSYEDNQDDDSDLLQDLSPEEASYSLQENLPSDESCLSLDDLAKRIEIAEVVPTEGLVSILKKRNDTVGDHPAQMQHKPSKRRVRFQEIDDSLDQDEVGGGSCILLVLLCIATVFLSVGGTALYCTFGDMESPVCTDFADNMDFYYTKLLQGVAELKHWIYLS

SEQ ID NO: 20565 - protein, 616 aa, Homo sapiens
MDDSDTPTYYLQIEPQDGCHPGDSVERSVTCLPSASDENENQLDGDGHEHLTSSDSAMGKPQVSEQDSLNNNESCTLSCEVAAGENLQNTLCEASRDEQAFLGKDKKIPGKRSPRSKKGTAKKIPPGLFSGDIAPLMQEKVLSAVTYAVDDEEAAEVNANEQPEAPKLVLQSLFSLIRGEVEQLDSRALPLCLHQIAESYFQEEDYEKAMKFIQLERLYHEQLLANLSAIQEQWETKWKTVQPHTVTALRNSEKGFNGEDFERLTKICATHQDPLLSKHKIAAVEKSQERKCSTQLLVSEDPKEGGATTKESESKTCLGTESSKESQHTVEPLGSSPCCHQMDVQTDSPSLSVTAGKDHMEELLCSAEATLALHTQSSETAGSPSGPDSSEDACEDDSRLQLAQTEACQDVARIEGIAEDPKVFLSSKSKTEPLISPGCDRIPPALISEGKYSQAQRKELRLPLRDASEALPTDQLENNELNELQQPDLTDSDGKSPQAQADSDGSENVLCGNNQISDLGILLPEVCMAPEEKGDKDDQLNKETEDYLNSLLEGCLKDTEDSLSYEDNQDDDSDLLQDLSPEEASYSLQENLPSDESCLSLDDLAKRIEIAEVNQR

SEQ ID NO: 20566 - protein, 263 aa, Homo sapiens
MDDSDTPTYYLQIEPQDGCHPGDSVERSVTCLPSASDENENQLDGDGHEHLTSSDSAMGKPQVSEQDSLNNNESCTLSCEVAAGENLQNTLCEASRDEQAFLGKDKKIPGKRSPRSKKGTAKKIPPGLFSGDIAPLMQEKVLSAVTYAVDDEEAAEVNANEQPEAPKLVLQSLFSLIRGEVEQLDSRALPLCLHQIAESYFQEEDYEKAMKFIQLERLYHEQLLANLSAIQEQWGKYRPTWNVELAVIQQVTIYKINIFDLVL

SEQ ID NO: 20567 - protein, 2078 aa, Homo sapiens
MPWPFSESIKKRACRYLLQRYLGHFLQEKLSLEQLSLDLYQGTGSLAQVPLDKWCLNEILESADAPLEVTEGFIQSISLSVPWGSLLQDNCALEVRGLEMVFRPRPRPATGSEPMYWSSFMTSSMQLAKECLSQKLTDEQGEGSQPFEGLEKFAETIETVLRRVKVTFIDTVLRIEHVPENSKTGTALEIRIERTVYCDETADESSGINVHQPTAFAHKLLQLSGVSLFWDEFSASAKSSPVCSTAPVETEPKLSPSWNPKIIYEPHPQLTRNLPEIAPSDPVQIGRLIGRLELSLTLKQNEVLPGAKLDVDGQIDSIHLLLSPRQVHLLLDMLAAIAGPENSSKIGLANKDRKNRPMQQEDEYRIQMELNRYYLRKDSLSVGVSSEQSFYETETARTPSSREEEVFFSMADMDMSHSLSSLPPLGDPPNMDLELSLTSTYTNTPAGSPLSATVLQPTWGEFLDHHKEQPVRGSTFPSNLVHPTPLQKTSLPSRSVSVDESRPELIFRLAVGTFSISVLHIDPLSPPETSQNLNPLTPMAVAFFTCIEKIDPARFSTEDFKSFRAVFAEACSHDHLRFIGTGIKVSYEQRQRSASRYFSTDMSIGQMEFLECLFPTDFHSVPPHYTELLTFHSKEETGSHSPVCLQLHYKHSENRGPQGNQARLSSVPHKAELQIKLNPVCCELDISIVDRLNSLLQPQKLATVEMMASHMYTSYNKHISLHKAFTEVFLDDSHSPANCRISVQVATPALNLSVRFPIPDLRSDQERGPWFKKSLQKEILYLAFTDLEFKTEFIGGSTPEQIKLELTFRELIGSFQEEKGDPSIKFFHVSSGVDGDTTSSDDFDWPRIVLKINPPAMHSILERIAAEEEEENDGHYQEEEEGGAHSLKDVCDLRRPAPSPFSSRRVMFENEQMVMPGDPVEMTEFQDKAISNSHYVLELTLPNIYVTLPNKSFYEKLYNRIFNDLLLWEPTAPSPVETFENISYGIGLSVASQLINTFNKDSFSAFKSAVHYDEESGSEEETLQYFSTVDPNYRSRRKKKLDSQNKNSQSFLSVLLNINHGLIAVFTDVKQDNGDLLENKHGEFWLEFNSGSLFCVTKYEGFDDKHYICLHSSSFSLYHKGIVNGVILPTETRLPSSTRPHWLEPTIYSSEEDGLSKTSSDGVGGDSLNMLSVAVKILSDKSESNTKEFLIAVGLKGATLQHRMLPSGLSWHEQILYFLNIADEPVLGYNPPTSFTTFHVHLWSCALDYRPLYLPIRSLLTVETFSVSSSVALDKSSSTLRIILDEAALHLSDKCNTVTINLSRDYVRVMDMGLLELTITAVKSDSDGEQTEPRFELHCSSDVVHIRTCSDSCAALMNLIQYIASYGDLQTPNKADMKPGAFQRRSKVDSSGRSSSRGPVLPEADQQMLRDLMSDAMEEIDMQQGTSSVKPQANGVLDEKSQIQEPCCSDLFLFPDESGNVSQESGPTYASFSHHFISDAMTGVPTENDDFCILFAPKAAMQEKEEEPVIKIMVDDAIVIRDNYFSLPVNKTDTSKAPLHFPIPVIRYVVKEVSLVWHLYGGKDFGIVPPTSPAKSYISPHSSPSHTPTRHGRNTVCGGKGRNHDFLMEIQLSKVKFQHEVYPPCKPDCDSSLSEHPVSRQVFIVQDLEIRDRLATSQMNKFLYLYCSKEMPRKAHSNMLTVKALHVCPESGRSPQECCLRVSLMPLRLNIDQDALFFLKDFFTSLSAEVELQMTPDPEVKKSPGADVTCSLPRHLSTSKEPNLVISFSGPKQPSQNDSANSVEVVNGMEEKNFSAEEASFRDQPVFFREFRFTSEVPIRLDYHGKHVSMDQGTLAGILIGLAQLNCSELKLKRLSYRHGLLGVDKLFSYAITEWLNDIKKNQLPGILGGVGPMHSLVQLVQGLKDLVWLPIEQYRKDGRIVRGFQRGAASFGTSTAMAALELTNRMVQTIQAAAETAYDMVSPGTLSIEPKKTKRFPHHRLAHQPVDLREGVAKAYSVVKEGITDTAQTIYETAAREHESRGVTGAVGEVLRQIPPAVVKPLIVATEATSNVLGGMRNQIRPDVRQDESQKWRHGDD

SEQ ID NO: 20568 - protein, 1893 aa, Homo sapiens
MMDLVLEEDVTVPGTLSGCSGLVPSVPDDLDGINPNAGLGNGLLPNVSEETVSPTRARNMKDFENQITELKKENFNLKLRIYFLEERMQQEFHGPTEHIYKTNIELKVEVESLKRELQEREQLLIKASKAVESLAEAGGSEIQRVKEDARKKVQQVEDLLTKRILLLEKDVTAAQAELEKAFAGTETEKALRLRLESKLSEMKKMHEGDLAMALVLDEKDRLIEELKLSLKSKEALIQCLKEEKSQMACPDENVSSGELRGLCAAPREEKERETEAAQMEHQKERNSFEERIQALEEDLREKEREIATEKKNSLKRDKAIQGLTMALKSKEKKVEELNSEIEKLSAAFAKAREALQKAQTQEFQGSEDYETALSGKEALSAALRSQNLTKSTENHRLRRSIKKITQELSDLQQERERLEKDLEEAHREKSKGDCTIRDLRNEVEKLRNEVNEREKAMENRYKSLLSESNKKLHNQEQVIKHLTESTNQKDVLLQKFNEKDLEVIQQNCYLMAAEDLELRSEGLITEKCSSQQPPGSKTIFSKEKKQSSDYEELIQVLKKEQDIYTHLVKSLQESDSINNLQAELNKIFALRKQLEQDVLSYQNLRKTLEEQISEIRRREEESFSLYSDQTSYLSICLEENNRFQVEHFSQEELKKKVSDLIQLVKELYTDNQHLKKTIFDLSCMGFQGNGFPDRLASTEQTELLASKEDEDTIKIGEDDEINFLSDQHLQQSNEIMKDLSKGGCKNGYLRHTESKISDCDGAHAPGCLEEGAFINLLAPLFNEKATLLLESRPDLLKVVRELLLGQLFLTEQEVSGEHLDGKTEKTPKQKGELVHFVQTNSFSKPHDELKLSCEAQLVKAGEVPKVGLKDASVQTVATEGDLLRFKHEATREAWEEKPINTALSAEHRPENLHGVPGWQAALLSLPGITNREAKKSRLPILIKPSRSLGNMYRLPATQEVVTQLQSQILELQGELKEFKTCNKQLHQKLILAEAVMEGRPTPDKTLLNAQPPVGAAYQDSPGEQKGIKTTSSVWRDKEMDSDQQRSYEIDSEICPPDDLASLPSCKENPEDVLSPTSVATYLSSKSQPSAKVSVMGTDQSESINTSNETEYLKQKIHDLETELEGYQNFIFQLQKHSQCSEAIITVLCGTEGAQDGLSKPKNGSDGEEMTFSSLHQVRYVKHVKILGPLAPEMIDSRVLENLKQQLEEQEYKLQKEQNLNMQLFSEIHNLQNKFRDLSPPRYDSLVQSQARELSLQRQQIKDGHGICVISRQHMNTMIKAFEELLQASDVDYCVAEGFQEQLNQCAELLEKLEKLFLNGKSVGVEMNTQNELMERIEEDNLTYQHLLPESPEPSASHALSDYETSEKSFFSRDQKQDNETEKTSVMVNSFSQDLLMEHIQEIRTLRKRLEESIKTNEKLRKQLERQGSEFVQGSTSIFASGSELHSSLTSEIHFLRKQNQALNAMLIKGSRDKQKENDKLRESLSRKTVSLEHLQREYASVKEENERLQKEGSEKERHNQQLIQEVRCSGQELSRVQEEVKLRQQLLSQNDKLLQSLRVELKAYEKLDEEHRRLREASGEGWKGQDPFRDLHSLLMEIQALRLQLERSIETSSTLQSRLKEQLARGAEKAQEGALTLAVQAVSIPEVPLQPDKHDGDKYPMESDNSFDLFDSSQAVTPKSVSETPPLSGNDTDSLSCDSGSSATSTPCVSRLVTGHHLWASKNGRHVLGLIEDYEALLKQISQGQRLLAEMDIQTQEAPSSTSQELGTKGPHPAPLSKFVSSVSTAKLTLEEAYRRLKLLWRVSLPEDGQCPLHCEQIGEMKAEVTKLHKKLFEQEKKLQNTMKLLQLSKRQEKVIFDQLVVTHKILRKARGNLELRPGGAHPGTCSPSRPGS

SEQ ID NO: 20569 - protein, 1861 aa, Homo sapiens
MMDLVLEEDVTVPGTLSGCSGLVPSVPDDLDGINPNAGLGNGLLPNVSEETVSPTRARNMKDFENQITELKKENFNLKLRIYFLEERMQQEFHGPTEHIYKTNIELKVEVESLKRELQEREQLLIKASKAVESLAEAGGSEIQRVKEDARKKVQQVEDLLTKRILLLEKDVTAAQAELEKAFAGTETEKALRLRLESKLSEMKKMHEGDLAMALVLDEKDRLIEELKLSLKSKEALIQCLKEEKSQMACPDENVSSGELRGLCAAPREEKERETEAAQMEHQKERNSFEERIQALEEDLREKEREIATEKKNSLKRDKAIQGLTMALKSKEKKVEELNSEIEKLSAAFAKAREALQKAQTQEFQGSEDYETALSGKEALSAALRSQNLTKSTENHRLRRSIKKITQELSDLQQERERLEKDLEEAHREKSKGDCTIRDLRNEVEKLRNEVNEREKAMENRYKSLLSESNKKLHNQEQVIKHLTESTNQKDVLLQKFNEKDLEVIQQNCYLMAAEDLELRSEGLITEKCSSQQPPGSKTIFSKEKKQSSDYEELIQVLKKEQDIYTHLVKSLQESDSINNLQAELNKIFALRKQLEQDVLSYQNLRKTLEEQISEIRRREEESFSLYSDQTSYLSICLEENNRFQVEHFSQEELKKKVSDLIQLVKELYTDNQHLKKTIFDLSCMGFQGNGFPDRLASTEQTEIMKDLSKGGCKNGYLRHTESKISDCDGAHAPGCLEEGAFINLLAPLFNEKATLLLESRPDLLKVVRELLLGQLFLTEQEVSGEHLDGKTEKTPKQKGELVHFVQTNSFSKPHDELKLSCEAQLVKAGEVPKVGLKDASVQTVATEGDLLRFKHEATREAWEEKPINTALSAEHRPENLHGVPGWQAALLSLPGITNREAKKSRLPILIKPSRSLGNMYRLPATQEVVTQLQSQILELQGELKEFKTCNKQLHQKLILAEAVMEGRPTPDKTLLNAQPPVGAAYQDSPGEQKGIKTTSSVWRDKEMDSDQQRSYEIDSEICPPDDLASLPSCKENPEDVLSPTSVATYLSSKSQPSAKVSVMGTDQSESINTSNETEYLKQKIHDLETELEGYQNFIFQLQKHSQCSEAIITVLCGTEGAQDGLSKPKNGSDGEEMTFSSLHQVRYVKHVKILGPLAPEMIDSRVLENLKQQLEEQEYKLQKEQNLNMQLFSEIHNLQNKFRDLSPPRYDSLVQSQARELSLQRQQIKDGHGICVISRQHMNTMIKAFEELLQASDVDYCVAEGFQEQLNQCAELLEKLEKLFLNGKSVGVEMNTQNELMERIEEDNLTYQHLLPESPEPSASHALSDYETSEKSFFSRDQKQDNETEKTSVMVNSFSQDLLMEHIQEIRTLRKRLEESIKTNEKLRKQLERQGSEFVQGSTSIFASGSELHSSLTSEIHFLRKQNQALNAMLIKGSRDKQKENDKLRESLSRKTVSLEHLQREYASVKEENERLQKEGSEKERHNQQLIQEVRCSGQELSRVQEEVKLRQQLLSQNDKLLQSLRVELKAYEKLDEEHRRLREASGEGWKGQDPFRDLHSLLMEIQALRLQLERSIETSSTLQSRLKEQLARGAEKAQEGALTLAVQAVSIPEVPLQPDKHDGDKYPMESDNSFDLFDSSQAVTPKSVSETPPLSGNDTDSLSCDSGSSATSTPCVSRLVTGHHLWASKNGRHVLGLIEDYEALLKQISQGQRLLAEMDIQTQEAPSSTSQELGTKGPHPAPLSKFVSSVSTAKLTLEEAYRRLKLLWRVSLPEDGQCPLHCEQIGEMKAEVTKLHKKLFEQEKKLQNTMKLLQLSKRQEKVIFDQLVVTHKILRKARGNLELRPGGAHPGTCSPSRPGS

SEQ ID NO: 20570 - protein, 1852 aa, Homo sapiens
MMDLVLEEDVTVPGTLSGCSGLVPSVPDDLDGINPNAGLGNGLLPNVSEETVSPTRARNMKDFENQITELKKENFNLKLRIYFLEERMQQEFHGPTEHIYKTNIELKVEVESLKRELQEREQLLIKASKAVESLAEAGGSEIQRVKEDARKKVQQVEDLLTKRILLLEKDVTAAQAELEKAFAGTETEKALRLRLESKLSEMKKMHEGDLAMALVLDEKDRLIEELKLSLKSKEALIQCLKEEKSQMACPDENVSSGELRGLCAAPREEKERETEAAQMEHQKERNSFEERIQALEEDLREKEREIATEKKNSLKRDKAIQGLTMALKSKEKKVEELNSEIEKLSAAFAKAREALQKAQTQEFQGSEDYETALSGKEALSAALRSQNLTKSTENHRLRRSIKKITQELSDLQQERERLEKDLEEAHREKSKGDCTIRDLRNEVEKLRNEVNEREKAMENRYKSLLSESNKKLHNQEQVIKHLTESTNQKDVLLQKFNEKDLEVIQQNCYLMAAEDLELRSEGLITEKCSSQQPPGSKTIFSKEKKQSSDYEELIQVLKKEQDIYTHLVKSLQESDSINNLQAELNKIFALRKQLEQDVLSYQNLRKTLEEQISEIRRREEESFSLYSDQTSYLSICLEENNRFQVEHFSQEELKKKVSDLIQLVKELYTDNQHLKKTIFDLSCMGFQGNGFPDRLASTEQTELLASKEDEDTIKIGEDDEINFLSDQHLQQSNEIMKDLSKGGCKNGYLRHTESKISDCDGAHAPGCLEEGAFINLLAPLFNEKATLLLESRPDLLKVVRELLLGQLFLTEQEVSGEHLDGKTEKTPKQKGELVHFVQTNSFSKPHDELKLSCEAQLVKAGEVPKVGLKDASVQTVATEGDLLRFKHEATREAWEEKPINTALSAEHRPENLHGVPGWQAALLSLPGITNREAKKSRLPILIKPSRSLGNMYRLPATQEVVTQLQSQILELQGELKEFKTCNKQLHQKLILAEAVMEGRPTPDKTLLNDSEICPPDDLASLPSCKENPEDVLSPTSVATYLSSKSQPSAKVSVMGTDQSESINTSNETEYLKQKIHDLETELEGYQNFIFQLQKHSQCSEAIITVLCGTEGAQDGLSKPKNGSDGEEMTFSSLHQVRYVKHVKILGPLAPEMIDSRVLENLKQQLEEQEYKLQKEQNLNMQLFSEIHNLQNKFRDLSPPRYDSLVQSQARELSLQRQQIKDGHGICVISRQHMNTMIKAFEELLQASDVDYCVAEGFQEQLNQCAELLEKLEKLFLNGKSVGVEMNTQNELMERIEEDNLTYQHLLPESPEPSASHALSDYETSEKSFFSRDQKQDNETEKTSVMVNSFSQDLLMEHIQEIRTLRKRLEESIKTNEKLRKQLERQGSEFVQGSTSIFASGSELHSSLTSEIHFLRKQNQALNAMLIKGSRDKQKENDKLRESLSRKTVSLEHLQREYASVKEENERLQKEGSEKERHNQQLIQEVRCSGQELSRVQEEVKLRQQLLSQNDKLLQSLRVELKAYEKLDEEHRRLREASGEGWKGQDPFRDLHSLLMEIQALRLQLERSIETSSTLQSRLKEQLARGAEKAQEGALTLAVQAVSIPEVPLQPDKHDGDKYPMESDNSFDLFDSSQAVTPKSVSETPPLSGNDTDSLSCDSGSSATSTPCVSRLVTGHHLWASKNGRHVLGLIEDYEALLKQISQGQRLLAEMDIQTQEAPSSTSQELGTKGPHPAPLSKFVSSVSTAKLTLEEAYRRLKLLWRVSLPEDGQCPLHCEQIGEMKAEVTKLHKKLFEQEKKLQNTMKLLQLSKRQEKVIFDQLVVTHKILRKARGNLELRPGGAHPGTCSPSRPGS

SEQ ID NO: 20571 - protein, 1814 aa, Homo sapiens
MMDLVLEEDVTVPGTLSGCSGLVPSVPDDLDGINPNAGLGNGLLPNVSEETVSPTRARNMKDFENQITELKKENFNLKLRIYFLEERMQQEFHGPTEHIYKTNIELKVEVESLKRELQEREQLLIKASKAVESLAEAGGSEIQRVKEDARKKVQQVEDLLTKRILLLEKDVTAAQAELEKAFAGTETEKALRLRLESKLSEMKKMHEGDLAMALVLDEKDRLIEELKLSLKSKEALIQCLKEEKSQMACPDENVSSGELRGLCAAPREEKERETEAAQMEHQKERNSFEERIQALEEDLREKEREIATEKKNSLKRDKAIQGLTMALKSKEKKVEELNSEIEKLSAAFAKAREALQKAQTQEFQGSEDYETALSGKEALSAALRSQNLTKSTENHRLRRSIKKITQELSDLQQERERLEKDLEEAHREKSKGDCTIRDLRNEVEKLRNEVNEREKAMENRYKSLLSESNKKLHNQEQVIKHLTESTNQKDVLLQKFNEKDLEVIQQNCYLMAAEDLELRSEGLITEKCSSQQPPGSKTIFSKEKKQSSDYEELIQVLKKEQDIYTHLVKSLQESDSINNLQAELNKIFALRKQLEQDVLSYQNLRKTLEEQISEIRRREEESFSLYSDQTSYLSICLEENNRFQVEHFSQEELKKKVSDLIQLVKELYTDNQHLKKTIFDLSCMGFQGNGFPDRLASTEQTELLASKEDEDTIKIGEDDEINFLSDQHLQQSNEIMKDLSKGGCKNGYLRHTESKISDCDGAHAPGCLEEGAFINLLAPLFNEKATLLLESRPDLLKVVRELLLGQLFLTEQEVSGEHLDGKTEKTPKQKGELVHFVQTNSFSKPHDELKLSCEAQLVKAGEVPKVGLKDASVQTVATEGDLLRFKHEATREAWEEKPINTALSAEHRPENLHGVPGWQAALLSLPGITNREAKKSRLPILIKPSRSLGNMYRLPATQEVVTQLQSQILELQGELKEFKTCNKQLHQKLILAEAVMEGRPTPDKTLLNAQPPVGAAYQDSPGEQKGIKTTSSVWRDKEMDSDQQRSYEIDSEICPPDDLASLPSCKENPEDVLSPTSVATYLSSKSQPSAKVSVMGTDQSESINTSNETEYLKQKIHDLETELEGYQNFIFQLQKHSQCSEAIITVLCGTEGAQDGLSKPKNGSDGEEMTFSSLHQVRYVKHVKILGPLAPEMIDSRVLENLKQQLEEQEYKLQKEQNLNMQLFSEIHNLQNKFRDLSPPRYDSLVQSQARELSLQRQQIKDGHGICVISRQHMNTMIKAFEELLQASDVDYCVAEGFQEQLNQCAELLEKLEKLFLNGKSVGVEMNTQNELMERIEEDNLTYQHLLPESPEPSASHALSDYETSEKSFFSRDQKQDNETEKTSVMVNSFSQDLLMEHIQEIRTLRKRLEESIKTNEKLRKQLERQGSEFVQGSTSIFASGSELHSSLTSEIHFLRKQNQALNAMLIKGSRDKQKENDKLRESLSRKTVSLEHLQREYASVKEENERLQKEGSEKERHNQQLIQEVRCSGQELSRVQEEVKLRQQLLSQNDKLLQSLRVELKAYEKLDEEHRRLRDGDKYPMESDNSFDLFDSSQAVTPKSVSETPPLSGNDTDSLSCDSGSSATSTPCVSRLVTGHHLWASKNGRHVLGLIEDYEALLKQISQGQRLLAEMDIQTQEAPSSTSQELGTKGPHPAPLSKFVSSVSTAKLTLEEAYRRLKLLWRVSLPEDGQCPLHCEQIGEMKAEVTKLHKKLFEQEKKLQNTMKLLQLSKRQEKVIFDQLVVTHKILRKARGNLELRPGGAHPGTCSPSRPGS

SEQ ID NO: 20572 - protein, 1028 aa, Homo sapiens
MMFPWKQLILLSFIGCLGGELLLQGPVFIKEPSNSIFPVGSEDKKITLHCEARGNPSPHYRWQLNGSDIDMSMEHRYKLNGGNLVVINPNRNWDTGTYQCFATNSLGTIVSREAKLQFAYLENFKTKMRSTVSVREGQGVVLLCGPPPHSGELSYAWIFNEYPSFVEEDSRRFVSQETGHLYISKVEPSDVGNYTCVVTSMVTNARVLGSPTPLVLRSDGVMGEYEPKIEVQFPETLPAAKGSTVKLECFALGNPIPQINWRRSDGLPFSSKIKLRKFSGVLEIPNFQQEDAGSYECIAENSRGKNVARGRLTYYAKPHWVQLIKDVEIAVEDSLYWECRASGKPKPSYRWLKNGAALVLEERTQIENGALTISNLSVTDSGMFQCIAENKHGLVYSSAELKVVASAPDFSKNPMKKLVQVQVGSLVSLDCKPRASPRALSSWKKGDVSVQEHERISLLNDGGLKIANVTKADAGTYTCMAENQFGKANGTTHLVVTEPTRITLAPSNMDVSVGESVILPCQVQHDPLLDIIFTWYFNGALADFKKDGSHFEKVGGSSSGDLMIRNIQLKHSGKYVCMVQTGVDSVSSAADLIVRGSPGPPENVKVDEITDTTAQLSWKEGKDNHSPVISYSIQARTPFSVGWQTVTTVPEVIDGKTHTATVVELNPWVEYEFRVVASNKIGGGEPSLPSEKVRTEEAVPEVPPSEVNGGGGSRSELVITWDPVPEELQNGEGFGYVVAFRPLGVTTWIQTVVTSPDTPRYVFRNESIVPYSPYEVKVGVYNNKGEGPFSPVTTVFSAEEEPTVAPSQVSANSLSSSEIEVSWNTIPWKLSNGHLLGYEVRYWNGGGKEESSSKMKVAGNETSARLRGLKSNLAYYTAVRAYNSAGAGPFSATVNVTTKKTPPSQPPGNVVWNATDTKVLLNWEQVKAMENESEVTGYKVFYRTSSQNNVQVLNTNKTSAELVLPIKEDYIIEVKATTDGGDGTSSEQIRIPRITSMDARGSTSAISNVHPMSSYMPIVLFLIVYVLW

SEQ ID NO: 20573 - protein, 628 aa, Homo sapiens
MAAAGAGPGQEAGAGPGPGAVANATGAEEGEMKPVAAGAAAPPGEGISAAPTVEPSSGEAEGGEANLVDVSGGLETESSNGKDTLEGAGDTSEVMDTQAGSVDEENGRQLGEVELQCGICTKWFTADTFGIDTSSCLPFMTNYSFHCNVCHHSGNTYFLRKQANLKEMCLSALANLTWQSRTQDEHPKTMFSKDKDIIPFIDKYWECMTTRQRPGKMTWPNNIVKTMSKERDVFLVKEHPDPGSKDPEEDYPKFGLLDQDLSNIGPAYDNQKQSSAVSTSGNLNGGIAAGSSGKGRGAKRKQQDGGTTGTTKKARSDPLFSAQRLPPHGYPLEHPFNKDGYRYILAEPDPHAPDPEKLELDCWAGKPIPGDLYRACLYERVLLALHDRAPQLKISDDRLTVVGEKGYSMVRASHGVRKGAWYFEITVDEMPPDTAARLGWSQPLGNLQAPLGYDKFSYSWRSKKGTKFHQSIGKHYSSGYGQGDVLGFYINLPEDTETAKSLPDTYKDKALIKFKSYLYFEEKDFVDKAEKSLKQTPHSEIIFYKNGVNQGVAYKDIFEGVYFPAISLYKSCTVSINFGPCFKYPPKDLTYRPMSDMGWGAVVEHTLADVLYHVETEVDGRRSPPWEP

SEQ ID NO: 20574 - protein, 501 aa, Homo sapiens
MDTQAGSVDEENGRQLGEVELQCGICTKWFTADTFGIDTSSCLPFMTNYSFHCNVCHHSGNTYFLRKQANLKEMCLSALANLTWQSRTQDEHPKTMFSKDKDIIPFIDKYWECMTTRQRPGKMTWPNNIVKTMSKERDVFLVKEHPDPGSKDPEEDYPKFGLLDQDLSNIGPAYDNQKQSSAVSTSGNLNGGIAAGSSGKGRGAKRKQQDGGTTGTTKKARSDPLFSAQRLPPHGYPLEHPFNKDGYRYILAEPDPHAPDPEKLELDCWAGKPIPGDLYRACLYERVLLALHDRAPQLKISDDRLTVVGEKGYSMVRASHGVRKGAWYFEITVDEMPPDTAARLGWSQPLGNLQAPLGYDKFSYSWRSKKGTKFHQSIGKHYSSGYGQGDVLGFYINLPEDTETAKSLPDTYKDKALIKFKSYLYFEEKDFVDKAEKSLKQTPHSEVSINFGPCFKYPPKDLTYRPMSDMGWGAVVEHTLADVLYHVETEVDGRRSPPWEP

SEQ ID NO: 20575 - protein, 534 aa, Homo sapiens
MDTQAGSVDEENGRQLGEVELQCGICTKWFTADTFGIDTSSCLPFMTNYSFHCNVCHHSGNTYFLRKQANLKEMCLSALANLTWQSRTQDEHPKTMFSKDKDIIPFIDKYWECMTTRQRPGKMTWPNNIVKTMSKERDVFLVKEHPDPGSKDPEEDYPKFGLLDQDLSNIGPAYDNQKQSSAVSTSGNLNGGIAAGSSGKGRGAKRKQQDGGTTGTTKKARSDPLFSAQRLPPHGYPLEHPFNKDGYRYILAEPDPHAPDPEKLELDCWAGKPIPGDLYRACLYERVLLALHDRAPQLKISDDRLTVVGEKGYSMVRASHGVRKGAWYFEITVDEMPPDTAARLGWSQPLGNLQAPLGYDKFSYSWRSKKGTKFHQSIGKHYSSGYGQGDVLGFYINLPEDTETAKSLPDTYKDKALIKFKSYLYFEEKDFVDKAEKSLKQTPHSEIIFYKNGVNQGVAYKDIFEGVYFPAISLYKSCTVSINFGPCFKYPPKDLTYRPMSDMGWGAVVEHTLADVLYHVETEVDGRRSPPWEP

SEQ ID NO: 20576 - protein, 83 aa, Homo sapiens
MDLSFMAAQLPMMGGAFMDSPNEDFSTEYSLFNSSANVHAAANGQGQPEDPPRSSNDAVLLWIAIIATLGNIVVVGVVYAFTF

SEQ ID NO: 20577 - protein, 683 aa, Homo sapiens
MSTPAVPQDLQLPPSQRAQSAFKEQRRQKLKEHLLRRKTLFAYKQENEMLSSSRDQRVVTSEDQVQEGTKVLKLKTKMADKENMKRPAESKNNTVVGKHCIPLKPSNELTNSTVVIDTHKPKDSNQTPHLLLTEDDPQSQHMTLSQAFHLKNNSKKKQMTTEKQKQDANMPKKPVLGSYRGQIVQSKINSFRKPLQVKDESSAATKKLSATIPKATKPQPVNTSSVTVKSNRSSNMTATTKFVSTTSQNTQLVRPPIRSHHSNTRDTVKQGISRTSANVTIRKGPHEKELLQSKTALSSVKTSSSQGIIRNKTLSRSIASEVIARPASLSNDKLMEKSEPVDQRRHTAGKAIVDSRSAQPKETSEERKARLSEWKAGKGRVLKRPPNSVVTQHEPAGQNEKPVGSFWTTMAEEDEQRLFTEKVNNTFSECLNLINEGCPKEDILVTLNDLIKNIPDAKKLVKYWICLALIEPITSPIENIIAIYEKAILAGAQPIEEMRHTIVDILTMKSQEKANLGENMEKSCASKEEVKEVSIEDTGVDVDPEKLEMESKLHRNLLFQDCEKEQDNKTKDPTHDVKTPNTETRTSCLIKYNVSTTPYLQSVKKKVQFDGTNSAFKELKFLTPVRRSRRLQEKTSKLPDMLKDHYPCVSSLEQLTELGRETDAFVCRPNAALCRVYYEADTT

SEQ ID NO: 20578 - protein, 494 aa, Homo sapiens
MSTPAVPQDLQLPPSQRAQSAFKEQRRQKLKEHLLRRKTLFAYKQENEMLSSRDQRVVTSEDQVQEGTKVLKLKTKMADKENMKRPAESKNNTVVGKHCIPLKPSNELTNSTVVIDTHKPKDSNQTPHLLLTEDDPQSQHMTLSQAFHLKNNSKKKQMTTEKQKQDANMPKKPVLGSYRGQIVQSKINSFRKPLQVKDESSAATKKLSATIPKATKPQPVNTSSVTVKSNRSSNMTATTKFVSTTSQNTQLVRPPIRSHHSNTRDTVKQGISRTSANVTIRKGPHEKELLQSKTALSSVKTSSSQGIIRNKTLSRSIASEVIARPASLSNDKLMEKSEPVDQRRHTAGKAIVDSRSAQPKETSEERKARLSEWKAGKGRVLKRPPNSVVTQHEPAGQNEKPVGSFWTTMAEEDEQRLFTEKVNNTFSECLNLINEGCPKEDILVTLNDLIKNIPDAKKLVKYWICLALIEPITSPIENIIAIYEKAILAGAQVR

SEQ ID NO: 20579 - protein, 634 aa, Homo sapiens
MLSSRDQRVVTSEDQVQEGTKVLKLKTKMADKENMKRPAESKNNTVVGKHCIPLKPSNELTNSTVVIDTHKPKDSNQTPHLLLTEDDPQSQHMTLSQAFHLKNNSKKKQMTTEKQKQDANMPKKPVLGSYRGQIVQSKINSFRKPLQVKDESSAATKKLSATIPKATKPQPVNTSSVTVKSNRSSNMTATTKFVSTTSQNTQLVRPPIRSHHSNTRDTVKQGISRTSANVTIRKGPHEKELLQSKTALSSVKTSSSQGIIRNKTLSRSIASEVIARPASLSNDKLMEKSEPVDQRRHTAGKAIVDSRSAQPKETSEERKARLSEWKAGKGRVLKRPPNSVVTQHEPAGQNEKPVGSFWTTMAEEDEQRLFTEKVNNTFSECLNLINEGCPKEDILVTLNDLIKNIPDAKKLVKYWICLALIEPITSPIENIIAIYEKAILAGAQPIEEMRHTIVDILTMKSQEKANLGENMEKSCASKEEVKEVSIEDTGVDVDPEKLEMESKLHRNLLFQDCEKEQDNKTKDPTHDVKTPNTETRTSCLIKYNVSTTPYLQSVKKKVQFDGTNSAFKELKFLTPVRRSRRLQEKTSKLPDMLKDHYPCVSSLEQLTELGRETDAFVCRPNAALCRVYYEADTT

SEQ ID NO: 20580 - protein, 682 aa, Homo sapiens
MSTPAVPQDLQLPPSQRAQSAFKEQRRQKLKEHLLRRKTLFAYKQENEMLSSRDQRVVTSEDQVQEGTKVLKLKTKMADKENMKRPAESKNNTVVGKHCIPLKPSNELTNSTVVIDTHKPKDSNQTPHLLLTEDDPQSQHMTLSQAFHLKNNSKKKQMTTEKQKQDANMPKKPVLGSYRGQIVQSKINSFRKPLQVKDESSAATKKLSATIPKATKPQPVNTSSVTVKSNRSSNMTATTKFVSTTSQNTQLVRPPIRSHHSNTRDTVKQGISRTSANVTIRKGPHEKELLQSKTALSSVKTSSSQGIIRNKTLSRSIASEVIARPASLSNDKLMEKSEPVDQRRHTAGKAIVDSRSAQPKETSEERKARLSEWKAGKGRVLKRPPNSVVTQHEPAGQNEKPVGSFWTTMAEEDEQRLFTEKVNNTFSECLNLINEGCPKEDILVTLNDLIKNIPDAKKLVKYWICLALIEPITSPIENIIAIYEKAILAGAQPIEEMRHTIVDILTMKSQEKANLGENMEKSCASKEEVKEVSIEDTGVDVDPEKLEMESKLHRNLLFQDCEKEQDNKTKDPTHDVKTPNTETRTSCLIKYNVSTTPYLQSVKKKVQFDGTNSAFKELKFLTPVRRSRRLQEKTSKLPDMLKDHYPCVSSLEQLTELGRETDAFVCRPNAALCRVYYEADTT

SEQ ID NO: 20581 - protein, 125 aa, Homo sapiens
MHRKEPGARLEATRGAARPHKQGTKPMITRPSVSQLGEGKCPSSQHLQSLRHNKQHALTLTKARCCGECSTCFCTEEKSECQRHEETSPGSCNHQIMSASTISAFCATPRFKQLFKGTVEQMSQM

SEQ ID NO: 20582 - protein, 122 aa, Homo sapiens
MGREMKKTGTPRPFRIEDPNQQPTWHDQPEMGSHYFAQAGLELLGSSNPPASASQSAGITGVSHCARPGEHDLNHTVFQVKDSTFLRHLESDRPEFKSCLPPHFTEPSVSLSTSEGCEDAMG

SEQ ID NO: 20583 - protein, 24 aa, Homo sapiens
MGREMKKTGTPRPFRIEDPNQQPT

SEQ ID NO: 20584 - protein, 37 aa, Homo sapiens
MGREMKKTGTPRPFRIEDPNQQPTWHDQPGTESVFWL

SEQ ID NO: 20585 - protein, 717 aa, Homo sapiens
MATPAAVNPPEMASDIPGSVTLPVAPMAATGQVRMAGAMPARGGKRRSGMDFDDEDGEGPSKFSRENHSEIERRRRNKMTQYITELSDMVPTCSALARKPDKLTILRMAVSHMKSMRGTGNKSTDGAYKPSFLTEQELKHLILEAADGFLFVVAAETGRVIYVSDSVTPVLNQPQSEWFGSTLYEQVHPDDVEKLREQLCTSENSMTGRILDLKTGTVKKEGQQSSMRMCMGSRRSFICRMRCGNAPLDHLPLNRITTMRKRFRNGLGPVKEGEAQYAVVHCTGYIKAWPPAGMTIPEEDADVGQGSKYCLVAIGRLQVTSSPVCMDMNGMSVPTEFLSRHNSDGIITFVDPRCISVIGYQPQDLLGKDILEFCHPEDQSHLRESFQQVVKLKGQVLSVMYRFRTKNREWMLIRTSSFTFQNPYSDEIEYIICTNTNVKQLQQQQAELEVHQRDGLSSYDLSQVPVPNLPAGVHEAGKSVEKADAIFSQERDPRFAEMFAGISASEKKMMSSASAAGTQQIYSQGSPFPSGHSGKAFSSSVVHVPGVNDIQSSSSTGQNMSQISRQLNQSQVAWTGSRPPFPGQQIPSQSSKTQSSPFGIGTSHTYPADPSSYSPLSSPATSSPSGNAYSSLANRTPGFAESGQSSGQFQGRPSEVWSQWQSQHHGQQSGEQHSHQQPGQTEVFQDMLPMPGDPTQGTGNYNIEDFADLGMFPPFSE

SEQ ID NO: 20586 - protein, 706 aa, Homo sapiens
MASDIPGSVTLPVAPMAATGQVRMAGAMPARGGKRRSGMDFDDEDGEGPSKFSRENHSEIERRRRNKMTQYITELSDMVPTCSALARKPDKLTILRMAVSHMKSMRGTGNKSTDGAYKPSFLTEQELKHLILEAADGFLFVVAAETGRVIYVSDSVTPVLNQPQSEWFGSTLYEQVHPDDVEKLREQLCTSENSMTGRILDLKTGTVKKEGQQSSMRMCMGSRRSFICRMRCGNAPLDHLPLNRITTMRKRFRNGLGPVKEGEAQYAVVHCTGYIKAWPPAGMTIPEEDADVGQGSKYCLVAIGRLQVTSSPVCMDMNGMSVPTEFLSRHNSDGIITFVDPRCISVIGYQPQDLLGKDILEFCHPEDQSHLRESFQQVVKLKGQVLSVMYRFRTKNREWMLIRTSSFTFQNPYSDEIEYIICTNTNVKQLQQQQAELEVHQRDGLSSYDLSQVPVPNLPAGVHEAGKSVEKADAIFSQERDPRFAEMFAGISASEKKMMSSASAAGTQQIYSQGSPFPSGHSGKAFSSSVVHVPGVNDIQSSSSTGQNMSQISRQLNQSQVAWTGSRPPFPGQQIPSQSSKTQSSPFGIGTSHTYPADPSSYSPLSSPATSSPSGNAYSSLANRTPGFAESGQSSGQFQGRPSEVWSQWQSQHHGQQSGEQHSHQQPGQTEVFQDMLPMPGDPTQGTGNYNIEDFADLGMFPPFSE

SEQ ID NO: 20587 - protein, 245 aa, Homo sapiens
MANEAYPCPCDIGHRLEYGGLGREVQVEHIKAYVTKSPVDAGKAVIVIQDIFGWQLPNTRYIADMISGNGYTTIVPDFFVGQEPWDPSGDWSIFPEWLKTRNAQKIDREISAILKYLKQQCHAQKIGIVGFCWGGTAVHHLMMKYSEFRAGVSVYGIVKDSEDIYNLKNPTLFIFAENDVVIPLKDVSLLTQKLKEHCKVEYQIKTFSGQTHGFVHRKREDCSPADKPYIDEARRNLIEWLNKYM

SEQ ID NO: 20588 - protein, 417 aa, Homo sapiens
MPLYEGLGSGGEKTAVVIDLGEAFTKCGFAGETGPRCIIPSVIKRAGMPKPVRVVQYNINTEELYSYLKEFIHILYFRHLLVNPRDRRVVIIESVLCPSHFRETLTRVLFKYFEVPSVLLAPSHLMALLTLGINSAMVLDCGYRESLVLPIYEGIPVLNCWGALPLGGKALHKELETQLLEQCTVDTSVAKEQSLPSVMGSVPEGVLEDIKARTCFVSDLKRGLKIQAAKFNIDGNNERPSPPPNVDYPLDGEKILHILGSIRDSVVEILFEQDNEEQSVATLILDSLIQCPIDTRKQLAENLVVIGGTSMLPGFLHRLLAEIRYLVEKPKYKKALGTKTFRIHTPPAKANCVAWLGGAIFGALQDILGSRSVSKEYYNQTGRIPDWCSLNNPPLEMMFDVGKTQPPLMKRAFSTEK

SEQ ID NO: 20589 - protein, 812 aa, Homo sapiens
MSEQGDLNQAIAEEGGTEQETATPENGIVKSESLDEEEKLELQRRLEAQNQERRKSKSGAGKGKLTRSLAVCEESSARPGGESLQDQESIHLQLSSFSSLQEEDKSRKDDSEREKEKDKNKDKTSEKPKIRMLSKDCSQEYTDSTGIDLHEFLINTLKNNSRDRMILLKMEQEIIDFIADNNNHYKKFPQMSSYQRMLVHRVAAYFGLDHNVDQTGKSVIINKTSSTRIPEQRFCEHLKDEKGEESQKRFILKRDNSSIDKEDNQQNRMHPFRDDRRSKSIEEREEEYQRVRERIFAHDSVCSQESLFVENSRLLEDSNICNETYKKRQLFRGNRDGSGRTSGSRQSSSENELKWSDHQRAWSSTDSDSSNRNLKPAMTKTASFGGITVLTRGDSTSSTRSTGKLSKAGSESSSSAGSSGSLSRTHPPLQSTPLVSGVAAGSPGCVPYPENGIGGQVAPSSTSYILLPLEAATGIPPGSILLNPHTGQPFVNPDGTPAIYNPPTSQQPLRSAMVGQSQQQPPQQQPSPQPQQQVQPPQPQMAGPLVTQRDDVATQFGQMTLSRQSSGETPEPPSGPVYPSSLMPQPAQQPSYVIASTGQQLPTGGFSGSGPPISQQVLQPPPSPQGFVQQPPPAQMPVYYYPSGQYPTSTTQQYRPMAPVQYNAQRSQQMPQAAQQAGYQPVLSGQQGFQGLIGVQQPPQSQNVINNQQGTPVQSVMVSYPTMSSYQVPMTQGSQGLPQQSYQQPIMLPNQAGQGSLPATGMPVYCNVTPPTPQNNLRLIGPHCPSSTVPVMSASCRTNCASMSNAGWQVKF

SEQ ID NO: 20590 - protein, 89 aa, Homo sapiens
MSEQGDLNQAIAEEGGTEQETATPENGIVKSESLDEEEKLELQRRLEAQNQERRKSKSGAGKGKLTRSLAVCEESSARPGGESLQDQTL

SEQ ID NO: 20591 - protein, 813 aa, Homo sapiens
MSEQGDLNQAIAEEGGTEQETATPENGIVKSESLDEEEKLELQRRLEAQNQERRKSKSGAGKGKLTRSLAVCEESSARPGGESLQDQESIHLQLSSFSSLQEEDKSRKDDSEREKEKDKNKDKTSEKPKIRMLSKDCSQEYTDSTGIDLHEFLINTLKNNSRDRMILLKMEQEIIDFIADNNNHYKKFPQMSSYQRMLVHRVAAYFGLDHNVDQTGKSVIINKTSSTRIPEQRFCEHLKDEKGEESQKRFILKRDNSSIDKEDNQSVCSQESLFVENSRLLEDSNICNETYKKRQLFRGNRDGSGRTSGSRQSSSENELKWSDHQRAWSSTDSDSSNRNLKPAMTKTASFGGITVLTRGDSTSSTRSTGKLSKAGSESSSSAGSSGSLSRTHPPLQSTPLVSGVAAGSPGCVPYPENGIGGQVAPSSTSYILLPLEAATGIPPGSILLNPHTGQPFVNPDGTPAIYNPPTSQQPLRSAMVGQSQQQPPQQQPSPQPQQQVQPPQPQMAGPLVTQSVQGLQASSQSVQYPAVSFPPQHLLPVSPTQHFPMRDDVATQFGQMTLSRQSSGETPEPPSGPVYPSSLMPQPAQQPSYVIASTGQQLPTGGFSGSGPPISQQVLQPPPSPQGFVQQPPPAQMPVYYYPSGQYPTSTTQQYRPMAPVQYNAQRSQQMPQAAQQAGYQPVLSGQQGFQGLIGVQQPPQSQNVINNQQGTPVQSVMVSYPTMSSYQVPMTQGSQGLPQQSYQQPIMLPNQAGQGSLPATGMPVYCNVTPPTPQNNLRLIGPHCPSSTVPVMSASCRTNCASMSNAGWQVKF

SEQ ID NO: 20592 - protein, 793 aa, Homo sapiens
MSEQGDLNQAIAEEGGTEQETATPENGIVKSESLDEEEKLELQRRLEAQNQERRKSKSGAGKGKLTRSLAVCEESSARPGGESLQDQESIHLQLSSFSSLQEEDKSRKDDSEREKEKDKNKDKTSEKPKIRMLSKDCSQEYTDSTGIDLHEFLINTLKNNSRDRMILLKMEQEIIDFIADNNNHYKKFPQMSSYQRMLVHRVAAYFGLDHNVDQTGKSVIINKTSSTRIPEQRFCEHLKDEKGEESQKRFILKRDNSSIDKEDNQSVCSQESLFVENRGNRDGSGRTSGSRQSSSENELKWSDHQRAWSSTDSDSSNRNLKPAMTKTASFGGITVLTRGDSTSSTRSTGKLSKAGSESSSSAGSSGSLSRTHPPLQSTPLVSGVAAGSPGCVPYPENGIGGQVAPSSTSYILLPLEAATGIPPGSILLNPHTGQPFVNPDGTPAIYNPPTSQQPLRSAMVGQSQQQPPQQQPSPQPQQQVQPPQPQMAGPLVTQSVQGLQASSQSVQYPAVSFPPQHLLPVSPTQHFPMRDDVATQFGQMTLSRQSSGETPEPPSGPVYPSSLMPQPAQQPSYVIASTGQQLPTGGFSGSGPPISQQVLQPPPSPQGFVQQPPPAQMPVYYYPSGQYPTSTTQQYRPMAPVQYNAQRSQQMPQAAQQAGYQPVLSGQQGFQGLIGVQQPPQSQNVINNQQGTPVQSVMVSYPTMSSYQVPMTQGSQGLPQQSYQQPIMLPNQAGQGSLPATGMPVYCNVTPPTPQNNLRLIGPHCPSSTVPVMSASCRTNCASMSNAGWQVKF

SEQ ID NO: 20593 - protein, 335 aa, Homo sapiens
MVGQSQQQPPQQQPSPQPQQQVQPPQPQMAGPLVTQSVQGLQASSQSVQYPAVSFPPQHLLPVSPTQHFPMRDDVATQFGQMTLSRQSSGETPEPPSGPVYPSSLMPQPAQQPSYVIASTGQQLPTGGFSGSGPPISQQVLQPPPSPQGFVQQPPPAQMPVYYYPSGQYPTSTTQQYRPMAPVQYNAQRSQQMPQAAQQAGYQPVLSGQQGFQGLIGVQQPPQSQNVINNQQGTPVQSVMVSYPTMSSYQVPMTQGSQGLPQQSYQQPIMLPNQAGQGSLPATGMPVYCNVTPPTPQNNLRLIGPHCPSSTVPVMSASCRTNCASMSNAGWQVKF

SEQ ID NO: 20594 - protein, 108 aa, Homo sapiens
MSEQGDLNQAIAEEGGTEQETATPENGIVKSESLDEEEKLELQRRLEAQNQERRKSKSGAGKGKLTRSLAVCEESSARPGGESLQDQVYPLAIIINCMNGIHLCVHDS

SEQ ID NO: 20595 - protein, 157 aa, Homo sapiens
MEALRRAHEVALRLLLCRPWASRAAARPKPSASEVLTRHLLQRRLPHWTSFCVPYSAVRNDQFGLSHFNWPVQGANYHVLRTGCFPFIKYHCSKAPWQDLARQNRFFTALKVVNLGIPTLLYGLGSWLFARVTETVHTSYGPITVYFLNKEDEGAMY

SEQ ID NO: 20596 - protein, 175 aa, Homo sapiens
METWRKGSFRNASFFKQLSLGRPRRLRRQSSVLSQASTAGGDHEEYSNREVIRELQGRPDGRRLPLWGDEQPRATLLAPPKPPRLYRESSSCPNILEPPPAYTAAYSATLPSALSLSSALHQHSEKGLVDTPCFQRTPTPDLSDPFLSFKVDLGISLLEEVLQMLREQFPSEPSF

SEQ ID NO: 20597 - protein, 818 aa, Homo sapiens
MGDILAHESELLGLVKEYLDFAEFEDTLKTFSKECKIKGKPLCKTVGGSFRDSKSLTIQKDLVAAFDNGDQKVFFDLWEEHISSSIRDGDSFAQKLEFYLHIHFAIYLLKYSVGRPDKEELDEKISYFKTYLETKGAALSQTTEFLPFYALPFVPNPMVHPSFKELFQDSWTPELKLKLIKFLALISKASNTPKLLTIYKENGQSNKEILQQLHQQLVEAERRSVTYLKRYNKIQADYHNLIGVTAELVDSLEATVSGKMITPEYLQSVCVRLFSNQMRQSLAHSVDFTRPGTASTMLRASLAPVKLKDVPLLPSLDYEKLKKDLILGSDRLKAFLLQALRWRLTTSHPGEQRETVLQAYISNDLLDCYSHNQRSVLQLLHSTSDVVRQYMARLINAFASLAEGRLYLAQNTKVLQMLEGRLKEEDKDIITRENVLGALQKFSLRRPLQTAMIQDGLIFWLVDVLKDPDCLSDYTLEYSVALLMNLCLRSTGKNMCAKVAGLVLKVLSDLLGHENHEIQPYVNGALYSILSVPSIREEARAMGMEDILRCFIKEGNAEMIRQIEFIIKQLNSEELPDGVLESDDDEDEDDEEDHDIMEADLDKDELIQPQLGELSGEKLLTTEYLGIMTNTGKTRRKGLANVQWSGDEPLQRPVTPGGHRNGYPVVEDQHTPPQTAQHARNGHPQALPAAHEAVYREGKPSTPESCVSSSSAIIAKPGEWLPRGRQEEPRPAPTGTPRQPREAPQDPGNGVTTRECASAFTCKPRAPCTPEMLDWNPPKAKASVLAPLFSSCGPQQASRPGSTASSTRGLPSSQSHRK

SEQ ID NO: 20598 - protein, 666 aa, Homo sapiens
MGDILAHESELLGLVKEYLDFAEFEDTLKTFSKECKIKGKPLCKTVGGSFRDSKSLTIQKDLVAAFDNGDQKVFFDLWEEHISSSIRDGDSFAQKLEFYLHIHFAIYLLKYSVGRPDKEELDEKISYFKTYLETKGAALSQTTEFLPFYALPFVPNPMVHPSFKELFQDSWTPELKLKLIKFLALISKASNTPKLLTIYKENGQSNKEILQQLHQQLVEAERRSVTYLKRYNKIQADYHNLIGVTAELVDSLEATVSGKMITPEYLQSVCVRLFSNQMRQSLAHSVDFTRPGTASTMLRASLAPVKLKDVPLLPSLDYEKLKKDLILGSDRLKAFLLQALRWRLTTSHPGEQRETVLQAYISNDLLDCYSHNQRSVLQLLHSTSDVVRQYMARLINAFASLAEGRLYLAQNTKVLQMLEGRLKEEDKDIITRENVLGALQKFSLRRPLQTAMIQDGLIFWLVDVLKDPDCLSDYTLEYSVALLMNLCLRSTGKNMCAKVAGLVLKVLSDLLGHENHEIQPYVNGALYSILSVPSIREEARAMGMEDILRCFIKEGNAEMIRQIEFIIKQLNSEELPDGVLESDDDEDEDDEEDHDIMEADLDKDELIQPQLGELSGEKLLTTEYLGIMTNTGKTRRKGLANVQWSGDEPLQRPVTPGGHRNGYPVK

SEQ ID NO: 20599 - protein, 323 aa, Homo sapiens [sequence omitted]

SEQ ID NO: 20600 - protein, 132 aa, Homo sapiens
MESRVADAGTGETARAAGGSPAVGCTTRGPVVSAPLGAARWKLLRQVLKQKHLDDCLRHVSVRRFESFNLFSVTEGKERETEEEVGAWVQYTSIFCPEYSISLRHNSGSLNVEDVLTSFDNTGNVWEATRGK

SEQ ID NO: 20601 - protein, 562 aa, Homo sapiens
MTRNARPNIVLLMADDLGVGDLCCYGNNSVSTPNIDRLASEGVRLTQHLAAASMCTPSRAAFLTGRYPIRSGMVSAYNLNRAFTWLGGSGGLPTNETTFAKLLQHRGYRTGLIGKWHLGLSCASRNDHCYHPLNHGFHYFYGVPFGLLSDCQASKTPELHRWLRIKLWISTVALALVPFLLLIPKFARWFSVPWKVIFVFALLAFLFFTSWYSSYGFTRRWNCILMRNHEIIQQPMKEEKVASLMLKEALAFIERYKREPFLLFFSFLHVHTPLISKKKFVGRSKYGRYGDNVEEMDWMVGKILDALDQERLANHTLVYFTSDNGGHLEPLDGAVQLGGWNGIYKGGKGMGGWEGGIRVPGIFRWPSVLEAGRVINEPTSLMDIYPTLSYIGGGILSQDRVIDGQNLMPLLEGRASHSDHEFLFHYCGVYLHTVRWHQKDCATVWKAHYVTPKFYPEGTGACYGSGICSCSGDVTYHDPPLLFDISRDPSEALPLNPDNEPLFDSVIKKMEAAIREHRRTLTPVPQQFSVFNTIWKPWLQPCCGTFPFCGCDKEDDILPMAP

SEQ ID NO: 20602 - protein, 107 aa, Homo sapiens
MLRLYPGPMVTEAEGKGGPEMASLSSSVVPVSFISTLRESVLDPGVGGEGASDKQRSKLSLSHSMIPAAKIHTELCLPAFFSPAGTQRRFQQPQHHLTLSIIHTAAR

SEQ ID NO: 20603 - protein, 80 aa, Homo sapiens
MQQQQQQQQQQQQQQQQQQQQQQQQQQQQQQQQQQQQQQQQQQQQQQQQQQQQQQQQQQQQQQQQQQQQQQQQQQQQQQQ

SEQ ID NO: 20604 - protein, 227 aa, Homo sapiens
MSVVPPNRSQTGWPRGVTQFGNKYIQQTKPLTLERTINLYPLTNYTFGTKEPLYEKDSSVAARFQRMREEFDKIGMRRTVEGVLIVHEHRLPHVLLLQLGTTFFKLPGGELNPGEDEVEGLKRLMTEILGRQDGVLQDWVIDDCIGNWWRPNFEPPQYPYIPAHITKPKEHKKLFLVQLQEKALFAVPKNYKLVAAPLFELYDNAPGYGPIISSLPQLLSRFNFIYN

SEQ ID NO: 20605 - protein, 148 aa, Homo sapiens
MAASPARPAVLALTGLALLLLLCWGPGGISGNKLKLMLQKREAPVPTKTKVAVDENKAKEFLGSLKRQKRQLWDRTRPEVQQWYQQFLYMGFDEAKFEDDITYWLNRDRNGHEYYGDYYQRHYDEDSAIGPRSPYGFRHGASVNYDDY

SEQ ID NO: 20606 - protein, 456 aa, Homo sapiens
MDKLNKITVPASQKLRQLQKMVHDIKNNEGGIMNKIKKLKVKAPPSVPRRDYASESPADEEEQWSDDFDSDYENPDEHSDSEMYVMPAEENADDSYEPPPVEQETRPVHPALPFARGEYIDNRSSQRHSPPFSKTLPSKPSWPSEKARLTSTLPALTALQKPQVPPKPKGLLEDEADYVVPVEDNDENYIHPTESSSPPPEKAPMVNRSTKPNSSTPASPPGTASGRNSGAWETKSPPPAAPSPLPRAGKKPTTPLKTTPVASQQNASSVCEEKPIPAERHRGSSHRQEAVQSPVFPPAQKQIHQKPIPLPRFTEGGNPTVDGPLPSFSSNSTISEQEAGVLCKPWYAGACDRKSAEEALHRSNKDGSFLIRKSSGHDSKQPYTLVVFFNKRVYNIPVRFIEATKQYALGRKKNGEEYFGSVAEIIRNHQHSPLVLIDSQNNTKDSTRLKYAVKVS

SEQ ID NO: 20607 - protein, 433 aa, Homo sapiens
MDKLNKITVPASQKLRQLQKMVHDIKNNEGGIMNKIKKLKVKAPPSVPRRDYASESPADEEEQWSDDFDSDYENPDEHSDSEMYVMPAEENADDSYEPPPVEQETRPVHPALPFARGEYIDNRSSQRHSPPFSKTLPSKPSWPSEKARLTSTLPALTALQKPQVPPKPKGLLEDEADYVVPVEDNDENYIHPTESSSPPPEKGRNSGAWETKSPPPAAPSPLPRAGKKPTTPLKTTPVASQQNASSVCEEKPIPAERHRGSSHRQEAVQSPVFPPAQKQIHQKPIPLPRFTEGGNPTVDGPLPSFSSNSTISEQEAGVLCKPWYAGACDRKSAEEALHRSNKDGSFLIRKSSGHDSKQPYTLVVFFNKRVYNIPVRFIEATKQYALGRKKNGEEYFGSVAEIIRNHQHSPLVLIDSQNNTKDSTRLKYAVKVS

SEQ ID NO: 20608 - protein, 404 aa, Homo sapiens
MDKLNKITVPASQKLRQLQKMVHDIKNNEGGIMNKIKKLKVKAPPSVPRRDYASESPADEEEQWSDDFDSDYENPDEHSDSEMYVMPAEENADDSYEPPPVEQETRPVHPALPFARGEYIDNRSSQRHSPPFSKTLPSKPSWPSEKARLTSTLPALTALQKPQVPPKPKGLLEDEADYVVPVEDNDENYIHPTESSSPPPEKAPMVNRSTKPNSSTPASPPGTASGRNSGAWETKSPPPAAPSPLPRAGKKPTTPLKTTPVASQQNASSVCEEKPIPAERHRGSSHRQEAVQSPVFPPAQKQIHQKPIPLPRFTEGGNPTVDGPLPSFSSNSTISEQEAGVLCKPWYAGACDRKSAEEALHRSNKYFGSVAEIIRNHQHSPLVLIDSQNNTKDSTRLKYAVKVS

SEQ ID NO: 20609 - protein, 353 aa, Homo sapiens
MASSWPPLELQSSNQSQLFPQNATACDNAPEAWDLLHRVLPTFIISICFFGLLGNLFVLLVFLLPRRQLNVAEIYLANLAASDLVFVLGLPFWAENIWNQFNWPFGALLCRVINGVIKANLFISIFLVVAISQDRYRVLVHPMASRRQQRRRQARVTCVLIWVVGGLLSIPTFLLRSIQAVPDLNITACILLLPHEAWHFARIVELNILGFLLPLAAIVFFNYHILASLRTREEVSRTRCGGRKDSKTTALILTLVVAFLVCWAPYHFFAFLEFLFQVQAVRGCFWEDFIDLGLQLANFFAFTNSSLNPVIYVFVGRLFRTKVWELYKQCTPKSLAPISSSHRKEIFQLFWRN

SEQ ID NO: 20610 - protein, 391 aa, Homo sapiens
MFSPWKISMFLSVREDSVPTTASFSADMLNVTLQGPTLNGTFAQSKCPQVEWLGWLNTIQPPFLWVLFVLATLENIFVLSVFCLHKSSCTVAEIYLGNLAAADLILACGLPFWAITISNNFDWLFGETLCRVVNAIISMNLYSSICFLMLVSIDRYLALVKTMSMGRMRGVRWAKLYSLVIWGCTLLLSSPMLVFRTMKEYSDEGHNVTACVISYPSLIWEVFTNMLLNVVGFLLPLSVITFCTMQIMQVLRNNEMQKFKEIQTERRATVLVLVVLLLFIICWLPFQISTFLDTLHRLGILSSCQDERIIDVITQIASFMAYSNSCLNPLVYVIVGKRFRKKSWEVYQGVCQKGGCRSEPIQMENSMGTLRTSISVERQIHKLQDWAGSRQ

SEQ ID NO: 20611 - protein, 364 aa, Homo sapiens
MLNVTLQGPTLNGTFAQSKCPQVEWLGWLNTIQPPFLWVLFVLATLENIFVLSVFCLHKSSCTVAEIYLGNLAAADLILACGLPFWAITISNNFDWLFGETLCRVVNAIISMNLYSSICFLMLVSIDRYLALVKTMSMGRMRGVRWAKLYSLVIWGCTLLLSSPMLVFRTMKEYSDEGHNVTACVISYPSLIWEVFTNMLLNVVGFLLPLSVITFCTMQIMQVLRNNEMQKFKEIQTERRATVLVLVVLLLFIICWLPFQISTFLDTLHRLGILSSCQDERIIDVITQIASFMAYSNSCLNPLVYVIVGKRFRKKSWEVYQGVCQKGGCRSEPIQMENSMGTLRTSISVERQIHKLQDWAGSRQ

SEQ ID NO: 20612 - protein, 251 aa, Homo sapiens
MGARASGGPLARAGLLLLLLLLLLLGLLAPGAQGARGRGGAEKNSYRRTVNTFSQSVSSLFGEDNVRAAQKFLARLTERFVLGVDMFVETLWKVWTELLDVLGLDVSNLSQYFSPASVSSSPARALLLVGVVLLAYWFLSLTLGFTFSVLHVVFGRFFWIVRVVLFSMSCVYILHKYEGEPENAVLPLCFVVAVYFMTGPMGFYWRSSPSGPSNPSNPSVEEKLEHLEKQVRLLNIRLNRVLESLDRSKDK

SEQ ID NO: 20613 - protein, 281 aa, Homo sapiens
MASRGRRPEHGGPPELFYDETEARKYVRNSRMIDIQTRMAGRALELLYLPENKPCYLLDIGCGTGLSGSYLSDEGHYWVGLDISPAMLDEAVDREIEGDLLLGDMGQGIPFKPGTFDGCISISAVQWLCNANKKSENPAKRLYCFFASLFSVLVRGSRAVLQLYPENSEQLELITTQATKAGFSGGMVVDYPNSAKAKKFYLCLFSGPSTFIPEGLSENQDEVEPRESVFTNERFPLRMSRRGMVRKSRAWVLEKKERHRRQGREVRPDTQYTGRKRKPRF

SEQ ID NO: 20614 - protein, 220 aa, Homo sapiens
MASRGRRPEHGGPPELFYDETEARKYVRNSRMIDIQTRMAGRALELLYLPENKPCYLLDIGCGTGLSGSYLSDEGHYWVGLDISPAMLDEAVDREIEGDLLLGDMGQGIPFKPGTFDGCISISAVQWLCNANKKSENPAKRLYCFFASLFSVLVRGSRAVLQLYPENSEQVSPSATGCAGELGDSTGKLSWGSDKESYADWREKEETCTLVWPLMAHLMT

SEQ ID NO: 20615 - protein, 298 aa, Homo sapiens
MASRGRRPEHGGPPELFYDETEARKYVRNSRMIDIQTRMAGRALELLYLPENKPCYLLDIGCGTGLSGSYLSDEGHYWVGLDISPAMLDEAVDREIEGDLLLGDMGQGIPFKPGTFDGCISISAVQWLCNANKKSENPAKRLYCFFASLFSVLVRGSRAVLQLYPENSEQLELITTQATKAGFSGGMVVDYPNSAKAKKFYLCLFSGPSTFIPEGLSENQDEVEPRESVFTNEREGGAFERRGIRGHQTRRFPLRMSRRGMVRKSRAWVLEKKERHRRQGREVRPDTQYTGRKRKPRF

SEQ ID NO: 20616 - protein, 685 aa, Homo sapiens
MLWFSGVGALAERYCRRSPGITCCVLLLLNCSGVPMSLASSFLTGSVAKCENEGEVLQIPFITDNPCIMCVCLNKEVTCKREKCPVLSRDCALAIKQRGACCEQCKGCTYEGNTYNSSFKWQSPAEPCVLRQCQEGVVTESGVRCVVHCKNPLEHLGMCCPTCPGCVFEGVQYQEGEEFQPEGSKCTKCSCTGGRTQCVREVCPILSCPQHLSHIPPGQCCPKCLGQRKVFDLPFGSCLFRSDVYDNGSSFLYDNCTACTCRDSTVVCKRKCSHPGGCDQGQEGCCEECLLRVPPEDIKVCKFGNKIFQDGEMWSSINCTICACVKGRTECRNKQCIPISSCPQGKILNRKGCCPICTEKPGVCTVFGDPHYNTFDGRTFNFQGTCQYVLTKDCSSPASPFQVLVKNDARRTRSFSWTKSVELVLGESRVSLQQHLTVRWNGSRIALPCRAPHFHIDLDGYLLKVTTKAGLEISWDGDSFVEVMAAPHLKGKLCGLCGNYNGHKRDDLIGGDGNFKFDVDDFAESWRVESNEFCNRPQRKPVPELCQGTVKVKLRAHRECQKLKSWEFQTCHSTVDYATFYRSCVTDMCECPVHKNCYCESFLAYTRACQREGIKVHWEPQQNCAATQCKHGAVYDTCGPGCIKTCDNWNEIGPCNKPCVAGCHCPANLVLHKGRCIKPVLCPQR

SEQ ID NO: 20617 - protein, 118 aa, Homo sapiens
MRRAGLGEGVPPGNYGNYGYANSGYSACEEENERLTESLRSKVTAIKSLSIEIGHEVKTQNKLLAEMDSQFDSTTGFLGKTMGKLKILSRGSQTKLLCYMMLFSLFVFFIIYWIIKLR

SEQ ID NO: 20618 - protein, 83 aa, Homo sapiens
MRRAGLGEGVPPGNYGNYGYANSGYSACEEENERLTESLRSKVTAIKSLSIEIGHEVKTQNKLLAEMDSQFDSTTGFLGLCPM

SEQ ID NO: 20619 - protein, 1282 aa, Homo sapiens
MEAKDQKKHRKKNSGPKAAKKKKRLLQDLQLGDEEDARKRNPKAFAVQSAVRMARSFHRTQDLKTKKHHIPVVDRTPLEPPPIVVVVMGPPKVGKSTLIQCLIRNFTRQKLTEIRGPVTIVSGKKRRLTIIECGCDINMMIDLAKVADLVLMLIDASFGFEMETFEFLNICQVHGFPKIMGVLTHLDSFKHNKQLKKTKKRLKHRFWTEVYPGAKLFYLSGMVHGEYQNQEIHNLGRFITVMKFRPLTWQTSHPYILADRMEDLTNPEDIRTNIKCDRKVSLYGYLRGAHLKNKSQIHMPGVGDFAVSDISFLPDPCALPEQQKKRCLNEKEKLVYAPLSGVGGVLYDKDAVYVDLGGSHVFQDEVGPTHELVQSLISTHSTIDAKMASSRVTLFSDSKPLGSEDIDNQGLMMPKEEKQMDLNTGRMRRKAIFGDEDESGDSDDEEDDEMSEDDGLENGSSDEEAEEEENAEMTDQYMAVKGIKRRKLELEEDSEMDLPAFADSDDDLERSSAEEGEAEEADESSEEEDCTAGEKGISGSKAAGEGSKAGLSPANCQSDRVNLEKSLLMKKAALPTFDSGHCTAEEVFASEDESEESSSLSAEEEDSENEEAIRKKLSKPSQVSSGQKLGPQNFIDETSDIENLLKEEEDYKEENNDSKETSGALKWKEDLSRKAAEAFLRQQQAAPNLRKLIYGTVTEDNEEEDDDTLEELGGLFRVNQPDRECKHKADSLDCSRFLVEAPHDWDLEEVMNSIRDCFVTGKWEDDKDAAKVLAEDEELYGDFEDLETGDVHKGKSGPNTQNEDIEKEVKEEIDPDEEESAKKKHLDKKRKLKEMFDAEYDEGESTYFDDLKGEMQKQAQLNRAEFEDQDDEARVQYEGFRPGMYVRIEIENVPCEFVQNFDPHYPIILGGLGNSEGNVGYVQMRLKKHRWYKKILKSRDPIIFSVGWRRFQTIPLYYIEDHNGRQRLLKYTPQHMHCGAAFWGPITPQGTGFLAIQSVSGIMPDFRIAATGVVLDLDKSIKIVKKLKLTGFPYKIFKNTSFIKGMFNSALEVAKFEGAVIRTVSGIRGQIKKALRAPEGAFRASFEDKLLMSDIVFMRTWYPVSIPAFYNPVTSLLKPVGEKDTWSGMRTTGQLRLAHGVRLKANKDSLYKPILRQKKHFNSLHIPKALQKALPFKNKPKTQAKAGKVPKDRRRPAVIREPHERKILALLDALSTVHSQKMKKAKEQRHLHNKEHFRAKQKEEEEKLKRQKDLRKKLFRIQGQKERRNQKSSLKGAEGQLQ

SEQ ID NO: 20620 - protein, 559 aa, Homo sapiens
MGDVKESKMQITPETPGRIPVLNPFESPSDYSNLHEQTLASPSVFKSTKLPTPGKFRWSIDQLAVINPVEIDPEDIHRQALYLSHSRIDKDVEDKRQKAIEEFFTKDVIVPSPWTDHEGKQLSQCHSSKCTNINSDSPVGKKLTIHSEKSDAACQTLLSLPVDFNLENILGDYFRADEFADQSPGNLSSSSLRRKLFLDGNGSISDSLPSASPGSPHSGVQTSLEMFYSIDLSPVKCRSPLQTPSSGQFSSSPIQASAKKYSLGSITSPSPISSPTFSPIEFQIGETPLSEQRKFTVHSPDASSGTNSNGITNPCIRSPYIDGCSPIKNWSPMRLQMYSGGTQYRTSVIQIPFTLETQGEDEEDKENIPSTDVSSPAMDAAGIHLRQFSNEASTHGTHLVVTAMSVTQNQSSASEKELALLQDVEREKDNNTVDMVDPIEIADETTWIKEPVDNGSLPMTDFVSGIAFSIENSHMCMSPLAESSVIPCESSNIQMDSGYNTQNCGSNIMDTVGAESYCKESDAQTCEVESKSQAFNMKQDHTTQRCWMKTASPFQCSSP

SEQ ID NO: 20621 - protein, 489 aa, Homo sapiens
MNKLSPVLLFLNQQNYQIDKDVEDKRQKAIEEFFTKDVIVPSPWTDHEGKQLSQCHSSKCTNINSDSPVGKKLTIHSEKSDAACQTLLSLPVDFNLENILGDYFRADEFADQSPGNLSSSSLRRKLFLDGNGSISDSLPSASPGSPHSGVQTSLEMFYSIDLSPVKCRSPLQTPSSGQFSSSPIQASAKKYSLGSITSPSPISSPTFSPIEFQIGETPLSEQRKFTVHSPDASSGTNSNGITNPCIRSPYIDGCSPIKNWSPMRLQMYSGGTQYRTSVIQIPFTLETQGEDEEDKENIPSTDVSSPAMDAAGIHLRQFSNEASTHGTHLVVTAMSVTQNQSSASEKELALLQDVEREKDNNTVDMVDPIEIADETTWIKEPVDNGSLPMTDFVSGIAFSIENSHMCMSPLAESSVIPCESSNIQMDSGYNTQNCGSNIMDTVGAESYCKESDAQTCEVESKSQAFNMKQDHTTQRCWMKTASPFQCSSP

SEQ ID NO: 20622 - protein, 677 aa, Homo sapiens
MPGFLVRILPLLLVLLLLGPTRGLRNATQRMFEIDYSRDSFLKDGQPFRYISGSIHYSRVPRFYWKDRLLKMKMAGLNAIQTYVPWNFHEPWPGQYQFSEDHDVEYFLRLAHELGLLVILRPGPYICAEWEMGGLPAWLLEKESILLRSSDPDYLAAVDKWLGVLLPKMKPLLYQNGGPVITVQVENEYGSYFACDFDYLRFLQKRFRHHLGDDVVLFTTDGAHKTFLKCGALQGLYTTVDFGTGSNITDAFLSQRKCEPKGPLINSEFYTGWLDHWGQPHSTIKTEAVASSLYDILARGASVNLYMFIGGTNFAYWNGANSPYAAQPTSYDYDAPLSEAGDLTEKYFALRNIIQKFEKVPEGPIPPSTPKFAYGKVTLEKLKTVGAALDILCPSGPIKSLYPLTFIQVKQHYGFVLYRTTLPQDCSNPAPLSSPLNGVHDRAYVAVDGIPQGVLERNNVITLNITGKAGATLDLLVENMGRVNYGAYINDFKGLVSNLTLSSNILTDWTIFPLDTEDAVRSHLGGWGHRDSGHHDEAWAHNSSNYTLPAFYMGNFSIPSGIPDLPQDTFIQFPGWTKGQVWINGFNLGRYWPARGPQLTLFVPQHILMTSAPNTITVLELEWAPCSSDDPELCAVTFVDRPVIGSSVTYDHPSKPVEKRLMPPPPQKNKDSWLDHV

SEQ ID NO: 20623 - protein, 546 aa, Homo sapiens
MPGFLVRILPLLLVLLLLGPTRGLRNATQRMFEIDYSRDSFLKDGQPFRYISGSIHYSRVPRFYWKDRLLKMKMAGLNAIQTLPGSCGQVVGSPSAQDEASPLSEWRASYNSAGSNITDAFLSQRKCEPKGPLINSEFYTGWLDHWGQPHSTIKTEAVASSLYDILARGASVNLYMFIGGTNFAYWNGANSPYAAQPTSYDYDAPLSEAGDLTEKYFALRNIIQKFEKVPEGPIPPSTPKFAYGKVTLEKLKTVGAALDILCPSGPIKSLYPLTFIQVKQHYGFVLYRTTLPQDCSNPAPLSSPLNGVHDRAYVAVDGIPQGVLERNNVITLNITGKAGATLDLLVENMGRVNYGAYINDFKGLVSNLTLSSNILTDWTIFPLDTEDAVRSHLGGWGHRDSGHHDEAWAHNSSNYTLPAFYMGNFSIPSGIPDLPQDTFIQFPGWTKGQVWINGFNLGRYWPARGPQLTLFVPQHILMTSAPNTITVLELEWAPCSSDDPELCAVTFVDRPVIGSSVTYDHPSKPVEKRLMPPPPQKNKDSWLDHV

SEQ ID NO: 20624 - protein, 647 aa, Homo sapiens
MFEIDYSRDSFLKDGQPFRYISGSIHYSRVPRFYWKDRLLKMKMAGLNAIQTYVPWNFHEPWPGQYQFSEDHDVEYFLRLAHELGLLVILRPGPYICAEWEMGGLPAWLLEKESILLRSSDPDYLAAVDKWLGVLLPKMKPLLYQNGGPVITVQVENEYGSYFACDFDYLRFLQKRFRHHLGDDVVLFTTDGAHKTFLKCGALQGLYTTVDFGTGSNITDAFLSQRKCEPKGPLINSEFYTGWLDHWGQPHSTIKTEAVASSLYDILARGASVNLYMFIGGTNFAYWNGANSPYAAQPTSYDYDAPLSEAGDLTEKYFALRNIIQKFEKVPEGPIPPSTPKFAYGKVTLEKLKTVGAALDILCPSGPIKSLYPLTFIQVKQHYGFVLYRTTLPQDCSNPAPLSSPLNGVHDRAYVAVDGIPQGVLERNNVITLNITGKAGATLDLLVENMGRVNYGAYINDFKGLVSNLTLSSNILTDWTIFPLDTEDAVRSHLGGWGHRDSGHHDEAWAHNSSNYTLPAFYMGNFSIPSGIPDLPQDTFIQFPGWTKGQVWINGFNLGRYWPARGPQLTLFVPQHILMTSAPNTITVLELEWAPCSSDDPELCAVTFVDRPVIGSSVTYDHPSKPVEKRLMPPPPQKNKDSWLDHV

SEQ ID NO: 20625 - protein, 210 aa, Homo sapiens
MSGRSVRAETRSRAKDDIKRVMAAIEKVRKWEKKWVTVGDTSLRIYKWVPVTEPKVDDKNKNKKKGKDEKCGSEVTTPENSSSPGMMDMHDDNSNQSSIADASPIKQENSSNSSPAPEPNSAVPSDGTEAKVDEAQADGKEHPGAEDASDEQNSQSSMEHSMNSSEKVDRQPSGDSGLAAETSAISQDLEGVPPSKKMKLEASQQNSEEM

SEQ ID NO: 20626 - protein, 231 aa, Homo sapiens
MSGRSVRAETRSRAKDDIKRVMAAIEKVRKWEKKWVTVGDTSLRIYKWVPVTEPKVDDKNKNKKKGKDEKCGSEVTTPENSSSPGMMDMHDDNSNQSSIADASPIKQENSSNSSPAPEPNSAVPSDGTEAKVDEAQADGKEHPGAEDASDEQNSQSSMEHSMNSSEKVDRQPSGDSGLAAETSAISQVPRSRSQRGSQIGREPIGLSGDLEGVPPSKKMKLEASQQNSEEM

SEQ ID NO: 20627 - protein, 100 aa, Homo sapiens
MSCCLSSRVHITRPVLEQFLSFAKYLDGLSHGVPLLKQLCDHILFINPAIWIHTPAKVQLSLYTYLSAEFIGTATIYTTICRIGTVIKDNAHLKILLLGY

SEQ ID NO: 20628 - protein, 119 aa, Homo sapiens
MEEPEMQLKGKKVTDKFTESVYVLANEPSVALYRLQEHVRRSLPELAQHKADMQRWEEQSQGAIYTVEYACSAVKNLVDSSVYFRSVEGLLKQAISIRDHMNASAQGHSPEEPPPPSSA

SEQ ID NO: 20629 - protein, 109 aa, Homo sapiens
MEEPEMQLKGKKVTDKFTESVYVLANEPSVALYRLQEHVRRSLPELAQHKADMQRWEEQSQGAIYTVEYACSAVKNLVDSSVYFRSVEGLLKQAISIRDHMNASAQGHR

SEQ ID NO: 20630 - protein, 683 aa, Homo sapiens
MALFVRLLALALALALGPAATLAGPAKSPYQLVLQHSRLRGRQHGPNVCAVQKVIGTNRKYFTNCKQWYQRKICGKSTVISYECCPGYEKVPGEKGCPAALPLSNLYETLGVVGSTTTQLYTDRTEKLRPEMEGPGSFTIFAPSNEAWASLPAEVLDSLVSNVNIELLNALRYHMVGRRVLTDELKHGMTLTSMYQNSNIQIHHYPNGIVTVNCARLLKADHHATNGVVHLIDKVISTITNNIQQIIEIEDTFETLRAAVAASGLNTMLEGNGQYTLLAPTNEAFEKIPSETLNRILGDPEALRDLLNNHILKSAMCAEAIVAGLSVETLEGTTLEVGCSGDMLTINGKAIISNKDILATNGVIHYIDELLIPDSAKTLFELAAESDVSTAIDLFRQAGLGNHLSGSERLTLLAPLNSVFKDGTPPIDAHTRNLLRNHIIKDQLASKYLYHGQTLETLGGKKLRVFVYRNSLCIENSCIAAHDKRGRYGTLFTMDRVLTPPMGTVMDVLKGDNRFSMLVAAIQSAGLTETLNREGVYTVFAPTNEAFRALPPRERSRLLGDAKELANILKYHIGDEILVSGGIGALVRLKSLQGDKLEVSLKNNVVSVNKEPVAEPDIMATNGVVHVITNVLQPPANRPQERGDELADSALEIFKQASAFSRASQRSVRLAPVYQKLLERMKH

SEQ ID NO: 20631 - protein, 235 aa, Homo sapiens
MLRGAPGLGLTARKGAEDSAEDLGGPCPEPGGDSGVLGANGASCSRGEAEEPAGRRRARPVRSKARRMAANVRERKRILDYNEAFNALRRALRHDLGGKRLSKIATLRRAIHRIAALSLVLRASPAPRGPCGHLECHGPAARGDTGDTGASPPPPAGPSLARPDAARPSVPSAPRCASCPPHAPLARPSAVAEGPGLAQASGGSWRRCPGASSAGPPPWPRGYLRSAPGMGHPRS

SEQ ID NO: 20632 - protein, 3051 aa, Homo sapiens
MATNPQPQPPPPAPPPPPPQPQPQPPPPPPGPGAGPGAGGAGGAGAGAGDPQLVAMIVNHLKSQGLFDQFRRDCLADVDTKPAYQNLRQRVDNFVANHLATHTWSPHLNKNQLRNNIRQQVLKSGMLESGIDRIISQVVDPKINHTFRPQVEKAVHEFLATLNHKEEGSGNTAPDDEKPDTSLITQGVPTPGPSANVANDAMSILETITSLNQEASAARASTETSNAKTSERASKKLPSQPTTDTSTDKERTSEDMADKEKSTADSGGEGLETAPKSEEFSDLPCPVEEIKNYTKEHNNLILLNKDVQQESSEQKNKSTDKGEKKPDSNEKGERKKEKKEKTEKKFDHSKKSEDTQKVKDEKQAKEKEVESLKLPSEKNSNKAKTVEGTKEDFSLIDSDVDGLTDITVSSVHTSDLSSFEEDTEEEVVTSDSMEEGEITSDDEEKNKQNKTKTQTSDSSEGKTKSVRHAYVHKPYLYSKYYSDSDDELTVEQRRQSIAKEKEERLLRRQINREKLEEKRKQKAEKTKSSKTKGQGRSSVDLEESSTKSLEPKAARIKEVLKERKVLEKKVALSKKRKKDSRNVEENSKKKQQYEEDSKETLKTSEHCEKEKISSSKELKHVHAKSEPSKPARRLSESLHVVDENKNESKLEREHKRRTSTPVIMEGVQEETDTRDVKRQVERSEICTEEPQKQKSTLKNEKHLKKDDSETPHLKSLLKKEVKSSKEKPEREKTPSEDKLSVKHKYKGDCMHKTGDETELHSSEKGLKVEENIQKQSQQTKLSSDDKTERKSKHRNERKLSVLGKDGKPVSEYIIKTDENVRKENNKKERRLSAEKTKAEHKSRRSSDSKIQKDSLGSKQHGITLQRRSESYSEDKCDMDSTNMDSNLKPEEVVHKEKRRTKSLLEEKLVLKSKSKTQGKQVKVVETELQEGATKQATTPKPDKEKNTEENDSEKQRKSKVEDKPFEETGVEPVLETASSSAHSTQKDSSHRAKLPLAKEKYKSDKDSTSTRLERKLSDGHKSRSLKHSSKDIKKKDENKSDDKDGKEVDSSHEKARGNSSLMEKKLSRRLCENRRGSLSQEMAKGEEKLAANTLSTPSGSSLQRPKKSGDMTLIPEQEPMEIDSEPGVENVFEVSKTQDNRNNNSQQDIDSENMKQKTSATVQKDELRTCTADSKATAPAYKPGRGTGVNSNSEKHADHRSTLTKKMHIQSAVSKMNPGEKEPIHRGTTEVNIDSETVHRMLLSAPSENDRVQKNLKNTAAEEHVAQGDATLEHSTNLDSSPSLSSVTVVPLRESYDPDVIPLFDKRTVLEGSTASTSPADHSALPNQSLTVRESEVLKTSDSKEGGEGFTVDTPAKASITSKRHIPEAHQATLLDGKQGKVIMPLGSKLTGVIVENENITKEGGLVDMAKKENDLNAEPNLKQTIKATVENGKKDGIAVDHVVGLNTEKYAETVKLKHKRSPGKVKDISIDVERRNENSEVDTSAGSGSAPSVLHQRNGQTEDVATGPRRAEKTSVATSTEGKDKDVTLSPVKAGPATTTSSETRQSEVALPCTSIEADEGLIIGTHSRNNPLHVGAEASECTVFAAAEEGGAVVTEGFAESETFLTSTKEGESGECAVAESEDRAADLLAVHAVKIEANVNSVVTEEKDDAVTSAGSEEKCDGSLSRDSEIVEGTITFISEVESDGAVTSAGTEIRAGSISSEEVDGSQGNMMRMGPKKETEGTVTCTGAEGRSDNFVICSVTGAGPREERMVTGAGVVLGDNDAPPGTSASQEGDGSVNDGTEGESAVTSTGITEDGEGPASCTGSEDSSEGFAISSESEENGESAMDSTVAKEGTNVPLVAAGPCDDEGIVTSTGAKEEDEEGEDVVTSTGRGNEIGHASTCTGLGEESEGVLICESAEGDSQIGTVVEHVEAEAGAAIMNANENNVDSMSGTEKGSKDTDICSSAKGIVESSVTSAVSGKDEVTPVPGGCEGPMTSAASDQSDSQLEKVEDTTISTGLVGGSYDVLVSGEVPECEVAHTSPSEKEDEDIITSVENEECDGLMATTASGDITNQNSLAGGKNQGKVLIISTSTTNDYTPQVSAITDVEGGLSDALRTEENMEGTRVTTEEFEAPMPSAVSGDDSQLTASRSEEKDECAMISTSIGEEFELPISSATTIKCAESLQPVAAAVEERATGPVLISTADFEGPMPSAPPEAESPLASTSKEEKDECALISTSIAEECEASVSGVVVESENERAGTVMEEKDGSGIISTSSVEDCEGPVSSAVPQEEGDPSVTPAEEMGDTAMISTSTSEGCEAVMIGAVLQDEDRLTITRVEDLSDAAIISTSTAECMPISASIDRHEENQLTADNPEGNGDLSATEVSKHKVPMPSLIAENNCRCPGPVRGGKEPGPVLAVSTEEGHNGPSVHKPSAGQGHPSAVCAEKEEKHGKECPEIGPFAGRGQKESTLHLINAEEKNVLLNSLQKEDKSPETGTAGGSSTASYSAGRGLEGNANSPAHLRGPEQTSGQTAKDPSVSIRYLAAVNTGAIKADDMPPVQGTVAEHSFLPAEQQGSEDNLKTSTTKCITGQESKIAPSHTMIPPATYSVALLAPKCEQDLTIKNDYSGKWTDQASAEKTGDDNSTRKSFPEEGDIMVTVSSEENVCDIGNEESPLNVLGGLKLKANLKMEAYVPSEEEKNGEILAPPESLCGGKPSGIAELQREPLLVNESLNVENSGFRTNEEIHSESYNKGEISSGRKDNAEAISGHSVEADPKEVEEEERHMPKRKRKQHYLSSEDEPDDNPDVLDSRIETAQRQCPETEPHDTKEENSRDLEELPKTSSETNSTTSRVMEEKDEYSSSETTGEKPEQNDDDTIKSQEEDQPIIIKRKRGRPRKYPVETTLKMKDDSKTDTGIVTVEQSPSSSKLKVMQTDESNKETANLQERSISNDDGEEKIVTSVRRRGRKPKRSLTVSDDAESSEPERKRQKSVSDPVEDKKEQESDEEEEEEEEDEPSGATTRSTTRSEAQRSKTQLSPSIKRKREVSPPGARTRGQQRVEEAPVKKAKR

SEQ ID NO: 20633 - protein, 470 aa, Homo sapiens
MEFAAENEGKSGGGLHSVAEGVRLSPEPGREGVRDLAGAEEFGGGEEGTGLTGIKEIGDGEEGSGQRPEEIPMDLTVVKQEIIDWPGTEGRLAGQWVEQEVEDRPEVKDENAGVLEVKQETDSSLVVKEAKVGEPEVKEEKVKEEVMDWSEVKEEKDNLEIKQEEKFVGQCIKEELMHGECVKEEKDFLKKEIVDDTKVKEEPPINHPVGCKRKLAMSRCETCGTEEAKYRCPRCMRYSCSLPCVKKHKAELTCNGVRDKTAYISIQQFTEMNLLSDYRFLEDVARTADHISRDAFLKRPISNKYMYFMKNRARRQGINLKLLPNGFTKRKENSTFFDKKKQQFCWHVKLQFPQSQAEYIEKRVPDDKTINEILKPYIDPEKSDPVIRQRLKAYIRSQTGVQILMKIEYMQQNLVRYYELDPYKSLLDNLRNKVIIEYPTLHVVLKGSNNDMKVLHQVKSESTKNVGNEN

SEQ ID NO: 20634 - protein, 431 aa, Homo sapiens
MEFAAENEGKSGGGLHSVAEGVRLSPEPGREGVRDLAGAEEFGGGEEGTGLTGIKEIGDGEEGSGQRPEEIPMDLTVVKQETDSSLVVKEAKVGEPEVKEEKVKEEVMDWSEVKEEKDNLEIKQEEKFVGQCIKEELMHGECVKEEKDFLKKEIVDDTKVKEEPPINHPVGCKRKLAMSRCETCGTEEAKYRCPRCMRYSCSLPCVKKHKAELTCNGVRDKTAYISIQQFTEMNLLSDYRFLEDVARTADHISRDAFLKRPISNKYMYFMKNRARRQGINLKLLPNGFTKRKENSTFFDKKKQQFCWHVKLQFPQSQAEYIEKRVPDDKTINEILKPYIDPEKSDPVIRQRLKAYIRSQTGVQILMKIEYMQQNLVRYYELDPYKSLLDNLRNKVIIEYPTLHVVLKGSNNDMKVLHQVKSESTKNVGNEN

SEQ ID NO: 20635 - protein, 339 aa, Homo sapiens
MWQLWASLCCLLVLANARSRPSFHPLSDELVNYVNKRNTTWQAGHNFYNVDMSYLKRLCGTFLGGPKPPQRVMFTEDLKLPASFDAREQWPQCPTIKEIRDQGSCGSCWAFGAVEAISDRICIHTNAHVSVEVSAEDLLTCCGSMCGDGCNGGYPAEAWNFWTRKGLVSGGLYESHVGCRPYSIPPCEHHVNGSRPPCTGEGDTPKCSKICEPGYSPTYKQDKHYGYNSYSVSNSEKDIMAEIYKNGPVEGAFSVYSDFLLYKSGVYQHVTGEMMGGHAIRILGWGVENGTPYWLVANSWNTDWGDNGFFKILRGQDHCGIESEVVAGIPRTDQYWEKI

SEQ ID NO: 20636 - protein, 579 aa, Homo sapiens
MFFRVFLHFIRSHSATAVDFLPVMVHRLPVFKRYMGNTPQKKAVFGQCRGLPCVAPLLTTVEEAPRGISARVWGHFPKWLNGSLLRIGPGKFEFGKDKYNHWFDGMALLHQFRMAKGTVTYRSKFLQSDTYKANSAKNRIVISEFGTLALPDPCKNVFERFMSRFELPGKAAAMTDNTNVNYVRYKGDYYLCTETNFMNKVDIETLEKTEKVDWSKFIAVNGATAHPHYDLDGTAYNMGNSFGPYGFSYKVIRVPPEKVDLGETIHGVQVICSIASTEKGKPSYYHSFGMTRNYIIFIEQPLKMNLWKIATSKIRGKAFSDGISWEPQCNTRFHVVEKRTGQLLPGRYYSKPFVTFHQINAFEDQGCVIIDLCCQDNGRTLEVYQLQNLRKAGEGLDQVHNSAAKSFPRRFVLPLNVSLNAPEGDNLSPLSYTSASAVKQADGTIWCSHENLHQEDLEKEGGIEFPQIYYDRFSGKKYHFFYGCGFRHLVGDSLIKVDVVNKTLKVWREDGFYPSEPVFVPAPGTNEEDGGVILSVVITPNQNESNFILVLDAKNFEELGRAEVPVQMPYGFHGTFIPI

SEQ ID NO: 20637 - protein, 545 aa, Homo sapiens
MGNTPQKKAVFGQCRGLPCVAPLLTTVEEAPRGISARVWGHFPKWLNGSLLRIGPGKFEFGKDKYNHWFDGMALLHQFRMAKGTVTYRSKFLQSDTYKANSAKNRIVISEFGTLALPDPCKNVFERFMSRFELPGKAAAMTDNTNVNYVRYKGDYYLCTETNFMNKVDIETLEKTEKVDWSKFIAVNGATAHPHYDLDGTAYNMGNSFGPYGFSYKVIRVPPEKVDLGETIHGVQVICSIASTEKGKPSYYHSFGMTRNYIIFIEQPLKMNLWKIATSKIRGKAFSDGISWEPQCNTRFHVVEKRTGQLLPGRYYSKPFVTFHQINAFEDQGCVIIDLCCQDNGRTLEVYQLQNLRKAGEGLDQVHNSAAKSFPRRFVLPLNVSLNAPEGDNLSPLSYTSASAVKQADGTIWCSHENLHQEDLEKEGGIEFPQIYYDRFSGKKYHFFYGCGFRHLVGDSLIKVDVVNKTLKVWREDGFYPSEPVFVPAPGTNEEDGGVILSVVITPNQNESNFILVLDAKNFEELGRAEVPVQMPYGFHGTFIPI

SEQ ID NO: 20638 - protein, 539 aa, Homo sapiens
MGNTPQKKAVFGQCRGLPCVAPLLTTVEEAPRGISARVWGHFPKWLNGSLLRIGPGKFEFGKDKYNHWFDGMALLHQFRMAKGTVTYRSKFLQSDTYKANSAKNRIVISEFGTLALPDPCKNVFERFMSRFELPGKAAAMTDNTNVNYVRYKGDYYLCTETNFMNKVDIETLEKTEKVDWSKFIAVNGATAHPHYDLDGTAYNMGNSFGPYGFSYKVIRVPPEKVDLGETIHGVQVICSIASTEKGKPSYYHSFGMTRNYIIFIEQPLKMNLWKIATSKIRGKAFSDGISWEPQCNTRFHVVEKRTGQLLPGRYYSKPFVTFHQINAFEDQGCVIIDLCCQDNGRTLEVYQLQNLRKAGEGLDQVHNSAAKSFPRRFVLPLNVSLNAPEGDNLSPLSYTSASAVKQADGTIWCSHENLHQEDLEKEGGIEFPQIYYDRFSGKKYHFFYGCGFRHLVGDSLIKVDVVWREDGFYPSEPVFVPAPGTNEEDGGVILSVVITPNQNESNFILVLDAKNFEELGRAEVPVQMPYGFHGTFIPI

SEQ ID NO: 20639 - protein, 506 aa, Homo sapiens
MFFRVFLHFIRSHSATAVDFLPVMVHRLPVFKRYMGNTPQKKAVFGQCRGLPCVAPLLTTVEEAPRGISARVWGHFPKWLNGSLLRIGPGKFEFGKDKYNHWFDGMALLHQFRMAKGTVTYRSKFLQSDTYKANSAKNRIVISEFGTLALPDPCKNVFERFMSRFELPGKAAGFSYKVIRVPPEKVDLGETIHGVQVICSIASTEKGKPSYYHSFGMTRNYIIFIEQPLKMNLWKIATSKIRGKAFSDGISWEPQCNTRFHVVEKRTGQLLPGRYYSKPFVTFHQINAFEDQGCVIIDLCCQDNGRTLEVYQLQNLRKAGEGLDQVHNSAAKSFPRRFVLPLNVSLNAPEGDNLSPLSYTSASAVKQADGTIWCSHENLHQEDLEKEGGIEFPQIYYDRFSGKKYHFFYGCGFRHLVGDSLIKVDVVNKTLKVWREDGFYPSEPVFVPAPGTNEEDGGVILSVVITPNQNESNFILVLDAKNFEELGRAEVPVQMPYGFHGTFIPI

SEQ ID NO: 20640 - protein, 474 aa, Homo sapiens
MALLHQFRMAKGTVTYRSKFLQSDTYKANSAKNRIVISEFGTLALPDPCKNVFERFMSRFELPGKAAAMTDNTNVNYVRYKGDYYLCTETNFMNKVDIETLEKTEKVDWSKFIAVNGATAHPHYDLDGTAYNMGNSFGPYGFSYKVIRVPPEKVDLGETIHGVQVICSIASTEKGKPSYYHSFGMTRNYIIFIEQPLKMNLWKIATSKIRGKAFSDGISWEPQCNTRFHVVEKRTGQLLPGRYYSKPFVTFHQINAFEDQGCVIIDLCCQDNGRTLEVYQLQNLRKAGEGLDQVHNSAAKSFPRRFVLPLNVSLNAPEGDNLSPLSYTSASAVKQADGTIWCSHENLHQEDLEKEGGIEFPQIYYDRFSGKKYHFFYGCGFRHLVGDSLIKVDVVNKTLKVWREDGFYPSEPVFVPAPGTNEEDGGVILSVVITPNQNESNFILVLDAKNFEELGRAEVPVQMPYGFHGTFIPI

SEQ ID NO: 20641 - protein, 127 aa, Homo sapiens
MGFRKFSPFLALSILVLYQAGSLQAAPFRSALESSPDPATLSKEDARLLLAALVQDYVQMKASELKQEQETQGSSSAAQKRACNTATCVTHRLAGLLSRSGGMVKSNFVPTNVGSKAFGRRRRDLQA

SEQ ID NO: 20642 - protein, 261 aa, Homo sapiens
MAESHLQSSLITASQFFEIWLHFDADGSGYLEGKELQNLIQELQQARKKAGLELSPEMKTFVDQYGQRDDGKIGIVELAHVLPTEENFLLLFRCQQLKSCEEFMKTWRKYDTDHSGFIETEELKNFLKDLLEKANKTVDDTKLAEYTDLMLKLFDSNNDGKLELTEMARLLPVQENFLLKFQGIKMCGKEFNKAFELYDQDGNGYIDENELDALLKDLCEKNKQDLDINNITTYKKNIMALSDGGKLYRTDLALILCAGDN

SEQ ID NO: 20643 - protein, 204 aa, Homo sapiens
MKTFVDQYGQRDDGKIGIVELAHVLPTEENFLLLFRCQQLKSCEEFMKTWRKYDTDHSGFIETEELKNFLKDLLEKANKTVDDTKLAEYTDLMLKLFDSNNDGKLELTEMARLLPVQENFLLKFQGIKMCGKEFNKAFELYDQDGNGYIDENELDALLKDLCEKNKQDLDINNITTYKKNIMALSDGGKLYRTDLALILCAGDN

SEQ ID NO: 20644 - protein, 123 aa, Homo sapiens
MLGPNAQVTVVVAQPGPDHLDHLLLDTQHCQHSSCGSAACTQLTWVPCLGGSHKASIKMSAQAVVSTEAPWERPCFQAHLGCLQNSVLCSCRMEGFSLFLAMLWGGVGELPSDPRGHLQFLAT

SEQ ID NO: 20645 - protein, 149 aa, Homo sapiens [sequence omitted]

SEQ ID NO: 20646 - protein, 145 aa, Homo sapiens
MAARQIWARTGAALCRQPSAAPPPAPLWVRAGFRQQLSLTLCPANEGNCGGSAPSTPGRPERAARPSVSEELTAAERQIAELHAAACAAGQLNYVDPATGYVVLTQIAHLQRGECCGSACRHCPYGQVNVKDPSKKKQFNSYFYV

SEQ ID NO: 20647 - protein, 328 aa, Homo sapiens
MEIVWEVLFLLQANFIVCISAQQNSPKIHEGWWAYKEVVQGSFVPVPSFWGLVNSAWNLCSVGKRQSPVNIETSHMIFDPFLTPLRINTGGRKVSGTMYNTGRHVSLRLDKEHLVNISGGPMTYSHRLEEIRLHFGSEDSQGSEHLLNGQAFSGEVQLIHYNHELYTNVTEAAKSPNGLVVVSIFIKVSDSSNPFLNRMLNRDTITRITYKNDAYLLQGLNIEELYPETSSFITYDGSMTIPPCYETASWIIMNKPVYITRMQMHSLRLLSQNQPSQIFLSMSDNFRPVQPLNNRCIRTNINFSLQGKDCPNNRAQKLQYRVNEWLLK

SEQ ID NO: 20648 - protein, 253 aa, Homo sapiens
MIFDPFLTPLRINTGGRKVSGTMYNTGRHVSLRLDKEHLVNISGGPMTYSHRLEEIRLHFGSEDSQGSEHLLNGQAFSGEVQLIHYNHELYTNVTEAAKSPNGLVVVSIFIKVSDSSNPFLNRMLNRDTITRITYKNDAYLLQGLNIEELYPETSSFITYDGSMTIPPCYETASWIIMNKPVYITRMQMHSLRLLSQNQPSQIFLSMSDNFRPVQPLNNRCIRTNINFSLQGKDCPNNRAQKLQYRVNEWLLK

SEQ ID NO: 20649 - protein, 331 aa, Homo sapiens
MKRLVCVLLVCSSAVAQLHKDPTLDHHWHLWKKTYGKQYKEKNEEAVRRLIWEKNLKFVMLHNLEHSMGMHSYDLGMNHLGDMTSEEVMSLMSSLRVPSQWQRNITYKSNPNRILPDSVDWREKGCVTEVKYQGSCGACWAFSAVGALEAQLKLKTGKLVSLSAQNLVDCSTEKYGNKGCNGGFMTTAFQYIIDNKGIDSDASYPYKAMDQKCQYDSKYRAATCSKYTELPYGREDVLKEAVANKGPVSVGVDARHPSFFLYRSGVYYEPSCTQNVNHGVLVVGYGDLNGKEYWLVKNSWGHNFGEEGYIRMARNKGNHCGIASFPSYPEI

SEQ ID NO: 20650 - protein, 281 aa, Homo sapiens
MKRLVCVLLVCSSAVAQLHKDPTLDHHWHLWKKTYGKQYKEKNEEAVRRLIWEKNLKFVMLHNLEHSMGMHSYDLGMNHLGDMGSCGACWAFSAVGALEAQLKLKTGKLVSLSAQNLVDCSTEKYGNKGCNGGFMTTAFQYIIDNKGIDSDASYPYKAMDQKCQYDSKYRAATCSKYTELPYGREDVLKEAVANKGPVSVGVDARHPSFFLYRSGVYYEPSCTQNVNHGVLVVGYGDLNGKEYWLVKNSWGHNFGEEGYIRMARNKGNHCGIASFPSYPEI

SEQ ID NO: 20651 - protein, 131 aa, Homo sapiens
MVRMSRPLFLDWAWRPLCSPSQSLPLTYGPEGWILQWKGTCRQQTALHCPFDFPQAPLRGRHTLSQVPNKGHEKASAVQLPEKQGTDQSRRGPTSAVTKARTSYPESETFIVYLCSYFWNSSKGVYMSGST

SEQ ID NO: 20652 - protein, 315 aa, Homo sapiens
MRMCDRGIQMLITTVGAFAAFSLMTIAVGTDYWLYSRGVCRTKSTSDNETSRKNEEVMTHSGLWRTCCLEGAFRGVCKKIDHFPEDADYEQDTAEYLLRAVRASSVFPILSVTLLFFGGLCVAASEFHRSRHNVILSAGIFFVSAGLSNIIGIIVYISANAGDPGQRDSKKSYSYGWSFYFGAFSFIIAEIVGVVAVHIYIEKHQQLRAKSHSEFLKKSTFARLPPYRYRFRRRSSSRSTEPRSRDLSPISKGFHTIPSTDISMFTLSRDPSKITMGTLLNSDRDHAFLQFHNSTPKEFKESLHNNPANRRTTPV

SEQ ID NO: 20653 - protein, 425 aa, Homo sapiens
MESLKRWNEERGLWCEKGVQVLLTTVGAFAAFGLMTIAISTDYWLYTRALICNTTNLTAGGDDGTPHRGGGGASEKKDPGGLTHSGLWRICCLEGLKRGVCVKINHFPEDTDYDHDSAEYLLRVVRASSIFPILSAILLLLGGVCVAASRVYKSKRNIILGAGILFVAAGLSNIIGVIVYISANAGEPGPKRDEEKKNHYSYGWSFYFGGLSFILAEVIGVLAVNIYIERSREAHCQSRSDLLKAGGGAGGSGGSGPSAILRLPSYRFRYRRRSRSSSRSSEPSPSRDASPGGPGGPGFASTDISMYTLSRDPSKGSVAAGLAGAGGGGGGAVGAFGGAAGGAGGGGGGGGGAGAERDRGGASGFLTLHNAFPKEAGGGVTVTVTGPPAPPAPAPPAPSAPAPGTLAKEAAASNTNTLNRKTTPV

SEQ ID NO: 20654 - protein, 197 aa, Homo sapiens
MADKVLKEKRKLFIHSMGEGTINGLLDELLQTRVLNQEEMEKVKRENATVMDKTRALIDSVIPKGAQACQICITYICEEDSYLAETLGLSAALQAVQDNPAMPTCSSPEGRIKLCFLEDAQRIWKQKLQRCHVQNTIIKWSERYTSGSFEMQWLFLRTNFIERFWRNILLLPLHKGSLYPRIPGLGKELQTGTHKLS

SEQ ID NO: 20655 - protein, 97 aa, Homo sapiens
MADKVLKEKRKLFIHSMGEGTINGLLDELLQTRVLNQEEMEKVKRENATVMDKTRALIDSVIPKGAQACQICITYICEEDSYLAETLGLSAGPIPGN

SEQ ID NO: 20656 - protein, 1230 aa, Homo sapiens
MASASYHISNLLEKMTSSDKDFRFMATNDLMTELQKDSIKLDDDSERKVVKMILKLLEDKNGEVQNLAVKCLGPLVSKVKEYQVETIVDTLCTNMLSDKEQLRDISSIGLKTVIGELPPASSGSALAANVCKKITGRLTSAIAKQEDVSVQLEALDIMADMLSRQGGLLVNFHPSILTCLLPQLTSPRLAVRKRTIIALGHLVMSCGNIVFVDLIEHLLSELSKNDSMSTTRTYIQCIAAISRQAGHRIGEYLEKIIPLVVKFCNVDDDELREYCIQAFESFVRRCPKEVYPHVSTIINICLKYLTYDPNYNYDDEDEDENAMDADGGDDDDQGSDDEYSDDDDMSWKVRRAAAKCLDAVVSTRHEMLPEFYKTVSPALISRFKEREENVKADVFHAYLSLLKQTRPVQSWLCDPDAMEQGETPLTMLQSQVPNIVKALHKQMKEKSVKTRQCCFNMLTELVNVLPGALTQHIPVLVPGIIFSLNDKSSSSNLKIDALSCLYVILCNHSPQVFHPHVQALVPPVVACVGDPFYKITSEALLVTQQLVKVIRPLDQPSSFDATPYIKDLFTCTIKRLKAADIDQEVKERAISCMGQIICNLGDNLGSDLPNTLQIFLERLKNEITRLTTVKALTLIAGSPLKIDLRPVLGEGVPILASFLRKNQRALKLGTLSALDILIKNYSDSLTAAMIDAVLDELPPLISESDMHVSQMAISFLTTLAKVYPSSLSKISGSILNELIGLVRSPLLQGGALSAMLDFFQALVVTGTNNLGYMDLLRMLTGPVYSQSTALTHKQSYYSIAKCVAALTRACPKEGPAVVGQFIQDVKNSRSTDSIRLLALLSLGEVGHHIDLSGQLELKSVILEAFSSPSEEVKSAASYALGSISVGNLPEYLPFVLQEITSQPKRQYLLLHSLKEIISSASVVGLKPYVENIWALLLKHCECAEEGTRNVVAECLGKLTLIDPETLLPRLKGYLISGSSYARSSVVTAVKFTISDHPQPIDPLLKNCIGDFLKTLEDPDLNVRRVALVTFNSAAHNKPSLIRDLLDTVLPHLYNETKVRKELIREVEMGPFKHTVDDGLDIRKAAFECMYTLLDSCLDRLDIFEFLNHVEDGLKDHYDIKMLTFLMLVRLSTLCPSAVLQRLDRLVEPLRATCTTKVKANSVKQEFEKQDELKRSAMRAVAALLTIPEAEKSPLMSEFQSQISSNPELAAIFESIQKDSSSTNLESMDTS

SEQ ID NO: 20657 - protein, 1062 aa, Homo sapiens
MASASYHISNLLEKMTSSDKDFRFMATNDLMTELQKDSIKLDDDSERKVVKMILKLLEDKNGEVQNLAVKCLGPLVSKVKEYQVETIVDTLCTNMLSDKEQLRDISSIGLKTVIGELPPASSGSALAANVCKKITGRLTSAIAKQEDVSVQLEALDIMADMLSRQGGLLVNFHPSILTCLLPQLTSPRLAVRKRTIIALGHLVMSCGNIVFVDLIEHLLSELSKNDSMSTTRTYIQCIAAISRQAGHRIGEYLEKIIPLVVKFCNVDDDELREYCIQAFESFVRRCPKEVYPHVSTIINICLKYLTYDPNYNYDDEDEDENAMDADGGDDDDQGSDDEYSDDDDMSWKVRRAAAKCLDAVVSTRHEMLPEFYKTVSPALISRFKEREENVKADVFHAYLSLLKQTRPVQSWLCDPDAMEQGETPLTMLQSQVPNIVKALHKQMKEKSVKTRQCCFNMLTTVKALTLIAGSPLKIDLRPVLGEGVPILASFLRKNQRALKLGTLSALDILIKNYSDSLTAAMIDAVLDELPPLISESDMHVSQMAISFLTTLAKVYPSSLSKISGSILNELIGLVRSPLLQGGALSAMLDFFQALVVTGTNNLGYMDLLRMLTGPVYSQSTALTHKQSYYSIAKCVAALTRACPKEGPAVVGQFIQDVKNSRSTDSIRLLALLSLGEVGHHIDLSGQLELKSVILEAFSSPSEEVKSAASYALGSISVGNLPEYLPFVLQEITSQPKRQYLLLHSLKEIISSASVVGLKPYVENIWALLLKHCECAEEGTRNVVAECLGKLTLIDPETLLPRLKGYLISGSSYARSSVVTAVKFTISDHPQPIDPLLKNCIGDFLKTLEDPDLNVRRVALVTFNSAAHNKPSLIRDLLDTVLPHLYNETKVRKELIREVEMGPFKHTVDDGLDIRKAAFECMYTLLDSCLDRLDIFEFLNHVEDGLKDHYDIKMLTFLMLVRLSTLCPSAVLQRLDRLVEPLRATCTTKVKANSVKQEFEKQDELKRSAMRAVAALLTIPEAEKSPLMSEFQSQISSNPELAAIFESIQKDSSSTNLESMDTS

SEQ ID NO: 20658 - protein, 403 aa, Homo sapiens
MADMLSRQGGLLVNFHPSILTCLLPQLTSPRLAVRKRTIIALGHLVMSCGNIVFVDLIEHLLSELSKNDSMSTTRTYIQCIAAISRQAGHRIGEYLEKIIPLVVKFCNVDDDELREYCIQAFESFVRRCPKEVYPHVSTIINICLKYLTYDPNYNYDDEDEDENAMDADGGDDDDQGSDDEYSDDDDMSWKVRRAAAKCLDAVVSTRHEMLPEFYKTVSPALISRFKEREENVKADVFHAYLSLLKQTRPVQSWLCDPDAMEQGETPLTMLQSQVPNIVKALHKQMKEKSVKTRQCCFNMLTELVNVLPGALTQHIPVLVPGIIFSLNDKSSSSNLKIDALSCLYVILCNHSPQVFHPHVQALVPPVVACVGDPFYKITSEALLVTQQLVKAHHMPEAQWLRL

SEQ ID NO: 20659 - protein, 90 aa, Homo sapiens
MADQLLRKKRRIFIHSVGAGTINALLDCLLEDEVISQEDMNKVRDENDTVMDKARVLIDLVTGKGPKSCCKFIKHLCEEDPQLASKMGLH

SEQ ID NO: 20660 - protein, 459 aa, Homo sapiens
MAPLCPSPWLPLLIPAPAPGLTVQLLLSLLLLVPVHPQRLPRMQEDSPLGGGSSGEDDPLGEEDLPSEEDSPREEDPPGEEDLPGEEDLPGEEDLPEVKPKSEEEGSLKLEDLPTVEAPGDPQEPQNNAHRDKEGDDQSHWRYGGDPPWPRVSPACAGRFQSPVDIRPQLAAFCPALRPLELLGFQLPPLPELRLRNNGHSVQLTLPPGLEMALGPGREYRALQLHLHWGAAGRPGSEHTVEGHRFPAEIHVVHLSTAFARVDEALGRPGGLAVLAAFLEEGPEENSAYEQLLSRLEEIAEEGSETQVPGLDISALLPSDFSRYFQYEGSLTTPPCAQGVIWTVFNQTVMLSAKQLHTLSDTLWGPGDSRLQLNFRATQPLNGRVIEASFPAGVDSSPRAAEPVQLNSCLAAGDILALVFGLLFAVTSVAFLVQMRRQHRRGTKGGVSYRPAEVAETGA

SEQ ID NO: 20661 - protein, 185 aa, Homo sapiens
MKMFESADSTATRSGQDLWAEICSCLPNPEQEDGANNAFSDSFVDSCPEGEGQREVADFAVQPAVKPWAPLQDSEVYLASLEKKLRRIKGLNQEVTSKDMLRTLAQAKKECWDRFLQEKLASEFFVDGLDSDESTLEHFKRWLQPDKVAVSTEEVQYLIPPESQVEKPVAEDEPAAGDKPAAAEQ

SEQ ID NO: 20662 - protein, 194 aa, Homo sapiens
MRGSGLRFQMKMFESADSTATRSGQDLWAEICSCLPNPEQEDGANNAFSDSFVDSCPEGEGQREVADFAVQPAVKPWAPLQDSEVYLASLEKKLRRIKGLNQEVTSKDMLRTLAQAKKECWDRFLQEKLASEFFVDGLDSDESTLEHFKRWLQPDKVAVSTEEVQYLIPPESQVEKPVAEDEPAAGDKPAAAEQ

SEQ ID NO: 20663 - protein, 134 aa, Homo sapiens
MKMFESADSTATRSGQDLWAEICSCLPNPEQEDGANNAFSDSFVDSCPEGEGQREVADFAVQPAVKPWAPLQDSEVYLASLEKKLRRIKGLNQEVTSKDMLRTLAQAKKECWDRFLQEKLASEFFVDGLDSDER

SEQ ID NO: 20664 - protein, 306 aa, Homo sapiens
MAEVSIDQSKLPGVKEVCRDFAVLEDHTLAHSLQEQEIEHHLASNVQRNRLVQHDLQVAKQLQEEDLKAQAQLQKRYKDLEQQDCEIAQEIQEKLAIEAERRRIQEKKDEDIARLLQEKELQEEKKRKKHFPEFPATRAYADSYYYEDGGMKPRVMKEAVSTPSRMAHRDQEWYDAEIARKLQEEELLATQVDMRAAQVAQDEEIARLLMAEEKKAYKKAKEREKSSLDKRKQDPEWKPKTAKAANSKSKESDEPHHSKNERPARPPPPIMTDGEDADYTHFTNQQSSTRHFSKSESSHKGFHYKH

SEQ ID NO: 20665 - protein, 482 aa, Homo sapiens
MAEVSIDQSKLPGVKEVCRDFAVLEDHTLAHSLQEQEIEHHLASNVQRNRLVQHDLQVAKQLQEEDLKAQAQLQKRYKDLEQQDCEIAQEIQEKLAIEAERRRIQEKKDEDIARLLQEKELQEEKKRKKHFPEFPATRAYADSYYYEDGDQPGSRRARELGSGFSRPCRLQRDGKTVKHKKEKPEHPLENLEEPEQHCSSKRSLSSSSSGKGRDNPHINNEQHERKRSTQERPRRPLLPTISGEVFLSTECDDWETKINHQTRNWEKQSRHQDRLSPKSSQKAGLHCKEVVYGRDHGQGEHRKRRHRPRTPPFSESEEQLHLHDAGMKPRVMKEAVSTPSRMAHRDQEWYDAEIARKLQEEELLATQVDMRAAQVAQDEEIARLLMAEEKKAYKKAKEREKSSLDKRKQDPEWKPKTAKAANSKSKESDEPHHSKNERPARPPPPIMTDGEDADYTHFTNQQSSTRHFSKSESSHKGFHYKH

SEQ ID NO: 20666 - protein, 512 aa, Homo sapiens
MDQPAGLQVDYVFRGVEHAVRVMVSGQVLELEVEDRMTADQWRGEFDAGFIEDLTHKTGNFKQFNIFCHMLESALTQSSESVTLDLLTYTDLESLRNRKMGGRPGSLAPRSAQLNSKRYLILIYSVEFDRIHYPLPLPYQGKPDPVVLQGIIRSLKEELGRLQGLDGQNTRDTRENEIWHLREQVSRLASEKRELEAQLGRSREEALAGRAARQEAEALRGLVRGLELELRQERGLGHRVAGRRGQDCRRLAKELEEAKASERSLRARLKTLTSELALYKRGRRTPPVQPPPTREDRASSSRERSASRGRGAARSSSRESGRGSRGRGRPARPSPSPTGGRALRFDPTAFVKAKERKQREIQMKQQQRNRLGSGGSGDGPSVSWSRQTQPPAALTGRGDAPNRSRNRSSSVDSFRSRCSSASSCSDLEDFSESLSRGGHRRRGKPPSPTPWSGSNMKSPPVERSHHQKSLANSGGWVPIKEYSSEHQAADMAEIDARLKALQEYMNRLDMRS

SEQ ID NO: 20667 - protein, 332 aa, Homo sapiens
MDQPAGLQVDYVFRGVEHAVRVMVSGQVLELEVEDRMTADQWRGEFDAGFIEDLTHKTGNFKQFNIFCHMLESALTQSSESVTLDLLTYTDLESLRNRKMGGRPGSLAPRSAQLNSKRYLILIYSVEFDRIHYPLPLPYQGKPDPVVLQGIIRSLKEELGRLQGLDGQNTRDTRENEIWHLREQQQQRNRLGSGGSGDGPSVSWSRQTQPPAALTGRGDAPNRSRNRSSSVDSFRSRCSSASSCSDLEDFSESLSRGGHRRRGKPPSPTPWSGSNMKSPPVERSHHQKSLANSGGWVPIKEYSSEHQAADMAEIDARLKALQEYMNRLDMRS

SEQ ID NO: 20668 - protein, 696 aa, Homo sapiens
MAMARLGSWLGEAQWLALVSLFVAALATVGLYLAQWALARARPQPQRRAVEPGEGPRPGSDALLSWILTLGSWRSQWQAAWVTALNEEAERKGGPPFLSFEEDPRQQALELVVQEVSSVLRSAEEKVVVCHVVGQAIQFLVSETPALGAGCRLYDMRLSPFHLQLEFHMKEKREDLQISWSFISVPEMAVNIQPKALGEDQVAETSAMSDVLKDILKHLAGSASPSVVLITKPTTVKEAQNLQCAASTAQESCPPKPPRAHELKLLVRNIHVLLLSEPGASGHINAVCVVQLNDPVQRFSSTLTKNTPDLMWEEEFTFELNAKSKELHLQISEAGRSSEGLLATATVPLDLFKKQPSGPQSFTLTSGSACGSSVLGSVTAEFSYMEPGELKSWPIPPPVPAAKIEKDRTVMPCGTVVTTVTAVKTKPRVDVGRASPLSSDSPVKTPIKVKVIEKDISVQAIACRSAPVSKTLSSSDTELLVLNGSDPVAEVAIRQLSESSKLKLKSPRKKSTIIISGISKTSLSQDHDAALMQGYTASVDSTHQEDAPSHPERAAASAPPEEAESAQASLAPKPQEDELDSWDLEKEPQAAAWSSQVLLDPDGDELSESSMSVLEPGTAKKHKGGILRKGAKLFFRRRHQQKDPGMSQSHNDLVFLEQPEGSRRKGITLTRILNKKLLSRHRNKNTMNGAPVEPCT

SEQ ID NO: 20669 - protein, 541 aa, Homo sapiens
MRLSPFHLQLEFHMKEKREDLQISWSFISVPEMAVNIQPKALGEDQVAETSAMSDVLKDILKHLAGSASPSVVLITKPTTVKEAQNLQCAASTAQESCPPKPPRAHELKLLVRNIHVLLLSEPGASGHINAVCVVQLNDPVQRFSSTLTKNTPDLMWEEEFTFELNAKSKELHLQISEAGRSSEGLLATATVPLDLFKKQPSGPQSFTLTSGSACGSSVLGSVTAEFSYMEPGELKSWPIPPPVPAAKIEKDRTVMPCGTVVTTVTAVKTKPRVDVGRASPLSSDSPVKTPIKVKVIEKDISVQAIACRSAPVSKTLSSSDTELLVLNGSDPVAEVAIRQLSESSKLKLKSPRKKSTIIISGISKTSLSQDHDAALMQGYTASVDSTHQEDAPSHPERAAASAPPEEAESAQASLAPKPQEDELDSWDLEKEPQAAAWSSQVLLDPDGDELSESSMSVLEPGTAKKHKGGILRKGAKLFFRRRHQQKDPGMSQSHNDLVFLEQPEGSRRKGITLTRILNKKLLSRHRNKNTMNGAPVEPCT

SEQ ID NO: 20670 - protein, 691 aa, Homo sapiens
MAMARLGSWLGEAQWLALVSLFVAALATVGLYLAQWALARARPQPQRRAVEPGEGPRPGSDALLSWILTLGSWRSQWQAAWVTALNEEAERKGGPPFLSFEEDPRQQALELVVQEVSSVLRSAEEKVVVCHVVGQAIQFLVSETPALGAGCRLYDMRLSPFHLQLEFHMKEKREDLQISWSFISVPEMAVNIQPKALGEDQVAETSAMSDVLKDILKHLAGSASPSVVLITKPTTVKEAQNLQCAASTAQESCPPKPPRAHELKLLVRNIHVLLLSEPGASGHINAVCVVQLNDPVQRFSSTLTKNTPDLMWEEEFTFELNAKSKELHLQISEAGRSSEGLLATATVPLDLFKKQPSGPQSFTLTSGSACGSSVLGSVTAEFSYMEPGELKSWPIPPPVPAAKIEKDRTVMPCGTVVTTVTAVKTKPRVDVGRASPLSSDSPVKTPIKVKVIEKDISVQAIACRSAPVSKTLSSSDTELLVLNGSDPVAEVAIRQLSESSKLKLKSPRKKSTIIISGISKDHDAALMQGYTASVDSTHQEDAPSHPERAAASAPPEEAESAQASLAPKPQEDELDSWDLEKEPQAAAWSSQVLLDPDGDELSESSMSVLEPGTAKKHKGGILRKGAKLFFRRRHQQKDPGMSQSHNDLVFLEQPEGSRRKGITLTRILNKKLLSRHRNKNTMNGAPVEPCT

SEQ ID NO: 20671 - protein, 187 aa, Homo sapiens
MWCASPVAVVAFCAGLLVSHPVLTQGQEAGGRPGADCEVCKEFLNRFYKSLIDRGVNFSLDTIEKELISFCLDTKGKENRLCYYLGATKDAATKILSEVTRPMSVHMPAMKICEKLKKLDSQICELKYEKTLDLASVDLRKMRVAELKQILHSWGEECRACAEKTDYVNLIQELAPKYAATHPKTEL

SEQ ID NO: 20672 - protein, 85 aa, Homo sapiens
MSVHMPAMKICEKLKKLDSQICELKYEKTLDLASVDLRKMRVAELKQILHSWGEECRACAEKTDYVNLIQELAPKYAATHPKTEL

SEQ ID NO: 20673 - protein, 287 aa, Homo sapiens
MWLPALVLATLAASAAWAGHLSSPPLVDTLHGKVLGKFVSLEGFAQPVAVFLGIPFAKPPLGPLRFTLPQPAEPWNFVKNATSYPPMFTQDPKAGQLISELFTNRKENIPLKLSEDCLYLNIYTPADLTKKNRLPVMVWIHGGGLMVGAASTYDGLALAAHENVVVVTIQYRLGIWGFFSTGDEHSPGNWGHLDQLAALHWVQDNIASFGGNPGSVTIFGGSVGGESVSVLVLSPLAKNLFHRAISESGVALTSVLVKKGDVKPLAEVGLRLVRLRLDTPTSLALCS

SEQ ID NO: 20674 - protein, 151 aa, Homo sapiens
MVWIHGGGLMVGAASTYDGLALAAHENVVVVTIQYRLGIWGFFSTGDEHSPGNWGHLDQLAALHWVQDNIASFGGNPGSVTIFGGSVGGESVSVLVLSPLAKNLFHRAISESGVALTSVLVKKGDVKPLAEVGLRLVRLRLDTPTSLALCS

SEQ ID NO: 20675 - protein, 1710 aa, Homo sapiens
MSLDFGSVALPVQNEDEEYDEEDYEREKELQQLLTDLPHDMLDDDLSSPELQYSDCSEDGTDGQPHHPEQLEMSWNEQMLPKSQSVNGYNEIQSLYAGEKCGNVWEENRSKTEDRHPVYHPEEGGDEGGSGYSPPSKCEQTDLYHLPENFRPYTNGQKQEFNNQATNVIKFSDPQWNHFQGPSCQGLEPYNKVTYKPYQSSAQNNGSPAQEITGSDTFEGLQQQFLGANENSAENMQIIQLQVLNKAKERQLENLIEKLNESERQIRYLNHQLVIIKDEKDGLTLSLRESQKLFQNGKEREIQLEAQIKALETQIQALKVNEEQMIKKSRTTEMALESLKQQLVDLHHSESLQRAREQHESIVMGLTKKYEEQVLSLQKNLDATVTALKEQEDICSRLKDHVKQLERNQEAIKLEKTEIINKLTRSLEESQKQCAHLLQSGSVQEVAQLQFQLQQAQKAHAMSANMNKALQEELTELKDEISLYESAAKLGIHPSDSEGELNIELTESYVDLGIKKVNWKKSKVTSIVQEEDPNEELSKDEFILKLKAEVQRLLGSNSMKRHLVSQLQNDLKDCHKKIEDLHQVKKDEKSIEVETKTDTSEKPKNQLWPESSTSDVVRDDILLLKNEIQVLQQQNQELKETEGKLRNTNQDLCNQMRQMVQDFDHDKQEAVDRCERTYQQHHEAMKTQIRESLLAKHALEKQQLFEAYERTHLQLRSELDKLNKEVTAVQECYLEVCREKDNLELTLRKTTEKEQQTQEKIKEKLIQQLEKEWQSKLDQTIKAMKKKTLDCGSQTDQVTTSDVISKKEMAIMIEEQKCTIQQNLEQEKDIAIKGAMKKLEIELELKHCENITKQVEIAVQNAHQRWLGELPELAEYQALVKAEQKKWEEQHEVSVNKRISFAVSEAKEKWKSELENMRKNILPGKELEEKIHSLQKELELKNEEVPVVIRAELAKARSEWNKEKQEEIHRIQEQNEQDYRQFLDDHRNKINEVLAAAKEDFMKQKTELLLQKETELQTCLDQSRREWTMQEAKRIQLEIYQYEEDILTVLGVLLSDTQKEHISDSEDKQLLEIMSTCSSKWMSVQYFEKLKGCIQKAFQDTLPLLVENADPEWKKRNMAELSKDSASQGTGQGDPGPAAGHHAQPLALQATEAEADKKKVLEIKDLCCGHCFQELEKAKQECQDLKGKLEKCCRHLQHLERKHKAVVEKIGEENNKVVEELIEENNDMKNKLEELQTLCKTPPRSLSAGAIENACLPCSGGALEELRGQYIKAVKKIKCDMLRYIQESKERAAEMVKAEVLRERQETARKMRKYYLICLQQILQDDGKEGAEKKIMNAASKLATMAKLLETPISSKSQSKTTQSALPLTSEMLIAVKKSKRNDVNQKIPCCIESKSNSVNTITRTLCEQAPKRRAACNLQRLLENSEHQSIKHVGSKETHLEFQFGDGSCKHLNSLPRNVSPEFVPCEGEGGFGLHKKKDLLSDNGSESLPHSAAYPFLGTLGNKPSPRCTPGPSESGCMHITFRDSNERLGLKVYKCNPLMESENAASEKSQGLDVQEPPVKDGGDLSDCLGWPSSSATLSFDSREASFVHGRPQGTLEIPSESVKSKQFSPSGYLSDTEESNMICQTMKCQRYQTPYLSEETTYLEPGKISVNCGHPSRHKADRLKSDFKKLSSTLPSSVCQQPSRKLIVPLSSQQDSGFDSPFVNLD

SEQ ID NO: 20676 - protein, 1275 aa, Homo sapiens
MSLDFGSVALPVQNEDEEYDEEDYEREKELQQLLTDLPHDMLDDDLSSPELQYSDCSEDGTDGQPHHPEQLEMSWNEQMLPKSQSVNGPSCQGLEPYNKVTYKPYQSSAQNNGSPAQEITGSDTFEGLQQQFLGANENSAENMQIIQLQVLNKAKERQLENLIEKLNESERQIRYLNHQLVIIKDEKDGLTLSLRESQKLFQNGKEREIQLEAQIKALETQIQALKVNEEQMIKKSRTTEMALESLKQQLVDLHHSESLQRAREQHESIVMGLTKKYEEQVLSLQKNLDATVTALKEQEDICSRLKDHVKQLERNQEAIKLEKTEIINKLTRSLEESQKQCAHLLQSGSVQEVAQLQFQLQQAQKAHAMSANMNKALQEELTELKDEISLYESAAKLGIHPSDSEGELNIELTESYVDLGIKKVNWKKSKVTSIVQEEDPNEELSKDEFILKLKAEVQRLLGSNSMKRHLVSQLQNDLKDCHKKIEDLHQVKKDEKSIEVETKTDTSEKPKNQLWPESSTSDVVRDDILLLKNEIQVLQQQNQELKETEGKLRNTNQDLCNQMRQMVQDFDHDKQEAVDRCERTYQQHHEAMKTQIRESLLAKHALEKQQLFEAYERTHLQLRSELDKLNKEVTAVQECYLEVCREKDNLELTLRKTTEKEQQTQEKIKEKLIQQLEKEWQSKLDQTIKAMKKKTLDCGSQTDQVTTSDVISKKEMAIMIEEQKCTIQQNLEQEKDIAIKGAMKKLEIELELKHCENITKQVEIAVQNAHQRWLGELPELAEYQALVKAEQKKWEEQHEVSVNKRISFAVSEAKEKWKSELENMRKNILPGKELEEKIHSLQKELELKNEEVPVVIRAELAKARSEWNKEKQEEIHRIQEQNEQDYRQFLDDHRNKINEVLAAAKEDFMKQKTELLLQKETELQTCLDQSRREWTMQEAKRIQLEIYQYEEDILTVLGVLLSDTQKEHISDSEDKQLLEIMSTCSSKWMSVQYFEKLKGCIQKAFQDTLPLLVENADPEWKKRNMAELSKDSASQGTGQGDPGPAAGHHAQPLALQATEAEADKKKVLEIKDLCCGHCFQELEKAKQECQDLKGKLEKCCRHLQHLERKHKAVVEKIGEENNKVVEELIEENNDMKNKLEELQTLCKTPPRSLSAGAIENACLPCSGGALEELRGQYIKAVKKIKCDMLRYIQESKERAAEMVKAEVLRERQETARKMRKYYLICLQQILQDDGKEGAEKKIMNAASKLATMAKLLETPISSKSQSKTTQSGMSK

SEQ ID NO: 20677 - protein, 1368 aa, Homo sapiens
MSLDFGSVALPVQNEDEEYDEEDYEREKELQQLLTDLPHDMLDDDLSSPELQYSDCSEDGTDGQPHHPEQLEMSWNEQMLPKSQSVNGYNEIQSLYAGEKCGNVWEENRSKTEDRHPVYHPEEGGDEGGSGYSPPSKCEQTDLYHLPENFRPYTNGQKQEFNNQATNVIKFSDPQWNHFQGPSCQGLEPYNKVTYKPYQSSAQNNGSPAQEITGSDTFEGLQQQFLGANENSAENMQIIQLQVLNKAKERQLENLIEKLNESERQIRYLNHQLVIIKDEKDGLTLSLRESQKLFQNGKEREIQLEAQIKALETQIQALKVNEEQMIKKSRTTEMALESLKQQLVDLHHSESLQRAREQHESIVMGLTKKYEEQVLSLQKNLDATVTALKEQEDICSRLKDHVKQLERNQEAIKLEKTEIINKLTRSLEESQKQCAHLLQSGSVQEVAQLQFQLQQAQKAHAMSANMNKALQEELTELKDEISLYESAAKLGIHPSDSEGELNIELTESYVDLGIKKVNWKKSKVTSIVQEEDPNEELSKDEFILKLKAEVQRLLGSNSMKRHLVSQLQNDLKDCHKKIEDLHQVKKDEKSIEVETKTDTSEKPKNQLWPESSTSDVVRDDILLLKNEIQVLQQQNQELKETEGKLRNTNQDLCNQMRQMVQDFDHDKQEAVDRCERTYQQHHEAMKTQIRESLLAKHALEKQQLFEAYERTHLQLRSELDKLNKEVTAVQECYLEVCREKDNLELTLRKTTEKEQQTQEKIKEKLIQQLEKEWQSKLDQTIKAMKKKTLDCGSQTDQVTTSDVISKKEMAIMIEEQKCTIQQNLEQEKDIAIKGAMKKLEIELELKHCENITKQVEIAVQNAHQRWLGELPELAEYQALVKAEQKKWEEQHEVSVNKRISFAVSEAKEKWKSELENMRKNILPGKELEEKIHSLQKELELKNEEVPVVIRAELAKARSEWNKEKQEEIHRIQEQNEQDYRQFLDDHRNKINEVLAAAKEDFMKQKTELLLQKETELQTCLDQSRREWTMQEAKRIQLEIYQYEEDILTVLGVLLSDTQKEHISDSEDKQLLEIMSTCSSKWMSVQYFEKLKGCIQKAFQDTLPLLVENADPEWKKRNMAELSKDSASQGTGQGDPGPAAGHHAQPLALQATEAEADKKKVLEIKDLCCGHCFQELEKAKQECQDLKGKLEKCCRHLQHLERKHKAVVEKIGEENNKVVEELIEENNDMKNKLEELQTLCKTPPRSLSAGAIENACLPCSGGALEELRGQYIKAVKKIKCDMLRYIQESKERAAEMVKAEVLRERQETARKMRKYYLICLQQILQDDGKEGAEKKIMNAASKLATMAKLLETPISSKSQSKTTQSGMSK

SEQ ID NO: 20678 - protein, 1654 aa, Homo sapiens
MSLDFGSVALPVQNEDEEYDEEDYEREKELQQLLTDLPHDMLDDDLSSPELQYSDCSEDGTDGQPHHPEQLEMSWNEQMLPKSQSVNGYNEIQSLYAGEKCGNVWEENRSKTEDRHPVYHPEEGGDEGGSGYSPPSKCEQTDLYHLPENFRPYTNGQKQEFNNQATNVIKFSDPQWNHFQGPSCQGLEPYNKVTYKPYQSSAQNNGSPAQEITGSDTFEGLQQQFLGANENSAENMQIIQLQVLNKAKERQLENLIEKLNESERQIRYLNHQLVIIKDEKDGLTLSLRESQKLFQNGKEREIQLEAQIKALETQIQALKVNEEQMIKKSRTTEMALESLKQQLVDLHHSESLQRAREQHESIVMGLTKKYEEQVLSLQKNLDATVTALKEQEDICSRLKDHVKQLERNQEAIKLEKTEIINKLTRSLEESQKQCAHLLQSGSVQEVAQLQFQLQQAQKAHAMSANMNKALQEELTELKDEISLYESAAKLGIHPSDSEGELNIELTESYVDLGIKKVNWKKSKVTSIVQEEDPNEELSKDEFILKLKAEVQRLLGSNSMKRHLVSQLQNDLKDCHKKIEDLHQVKKDEKSIEVETKTDTSEKPKNQLWPESSTSDVVRDDILLLKNEIQVLQQQNQELKETEGKLRNTNQDLCNQMRQMVQDFDHDKQEAVDRCERTYQQHHEAMKTQIRESLLAKHALEKQQLFEAYERTHLQLRSELDKLNKEVTAVQECYLEVCREKDNLELTLRKTTEKEQQTQEKIKEKLIQQLEKEWQSKLDQTIKAMKKKTLDCGSQTDQVTTSDVISKKEMAIMIEEQKCTIQQNLEQEKDIAIKGAMKKLEIELELKHCENITKQVEIAVQNAHQRWLGELPELAEYQALVKAEQKKWEEQHEVSVNKRISFAVSEAKEKWKSELENMRKNILPGKELEEKIHSLQKELELKNEEVPVVIRAELAKARSEWNKEKQEEIHRIQEQNEQDYRQFLDDHRNKINEVLAAAKEDFMKQKTELLLQKETELQTCLDQSRREWTMQEAKRIQLEIYQYEEDILTVLGVLLSDTQKEHISDSEDKQLLEIMSTCSSKWMSVQYFEKLKGCIQKAFQDTLPLLVENADPEWKKRNMAELSKDSASQGTGQGDPGPAAGHHAQPLALQATEAEAEENNKVVEELIEENNDMKNKLEELQTLCKTPPRSLSAGAIENACLPCSGGALEELRGQYIKAVKKIKCDMLRYIQESKERAAEMVKAEVLRERQETARKMRKYYLICLQQILQDDGKEGAEKKIMNAASKLATMAKLLETPISSKSQSKTTQSALPLTSEMLIAVKKSKRNDVNQKIPCCIESKSNSVNTITRTLCEQAPKRRAACNLQRLLENSEHQSIKHVGSKETHLEFQFGDGSCKHLNSLPRNVSPEFVPCEGEGGFGLHKKKDLLSDNGSESLPHSAAYPFLGTLGNKPSPRCTPGPSESGCMHITFRDSNERLGLKVYKCNPLMESENAASEKSQGLDVQEPPVKDGGDLSDCLGWPSSSATLSFDSREASFVHGRPQGTLEIPSESVKSKQFSPSGYLSDTEESNMICQTMKCQRYQTPYLSEETTYLEPGKISVNCGHPSRHKADRLKSDFKKLSSTLPSSVCQQPSRKLIVPLSSQQDSGFDSPFVNLD

SEQ ID NO: 20679 - protein, 163 aa, Homo sapiens
MSKGLLLLLLLSMGGTWASKEPLRPRCRPINATLAVEKEGCPVCITVNTTICAGYCPTMTRVLQGVLPALPQVVCNYRDVRFESIRLPGCPRGVNPVVSYAVALSCQCALCRRSTTDCGGPKDHPLTCDDPRFQASSSSKAPPPSLPSPSRLPGPSDTPILPQ

SEQ ID NO: 20680 - protein, 541 aa, Homo sapiens
MASQEFEVEAIVDKRQDKNGNTQYLVRWKGYDKQDDTWEPEQHLMNCEKCVHDFNRRQTEKQKKLTWTTTSRIFSNNARRRTSRSTKANYSKNSPKTPVTDKHHRSKNCKLFAASKNVRRKAASTLSDTKNMEIINSTIETLAPDSPFDHKKTVSGFQKLEKLDPIAADQQDTVVFKVTEGKLLRDPLSHPGAEQTGIQNKTQMHPLMSQMSGSVTASMATGSATRKGIVVLIDPLAANGTTDMHTSVPRVKGGQRNITDDSRGQPFIKKMHFTIRLTESAITYRDIVVKKEDGFTQIVLSTRSTEKNALNTEVIKEMVNALNSAAADDSKLVLFSAAGSVFCCGLDFGYFVRHLRNDRNTASLEMVDTIKNFVNTFIQFKKPIVVSVNGPAIGLGASILPLCDLVWANEKAWFQTPYTTFGQSPDGCSSITFPKMMGKASANEMLIAGRKLTAREACAKGLVSQVFLTGTFTQEVMIQIKELASYNAIVLEECKALVRCNIKLELEQANERECEVLRKIWSSAQGIESMLKYVENKIDEF

SEQ ID NO: 20681 - protein, 186 aa, Homo sapiens
MELSAAAGRRRQAPWREFTGRHRTERSQERGSTPRKERSMGSRQPRKREREPRDCTPTCTNAASVSRSGARRAPGCAGRCITMKNCARAWRELSERACCFQAVPPSNMKQSWLIFLDTTLCSAWLLASSCPRLYAPLISFHCMCFNTVLLFPRLFGPTLSAKIQFNTDLSLRAIAWKCTKDTTTYC

SEQ ID NO: 20682 - protein, 222 aa, Homo sapiens
MKQESAAPNTPPTSQSPTPSAQFPRNDGDPQALWIFGYGSLVWRPDFAYSDSRVGFVRGYSRRFWQGDTFHRGSDKMPGRVVTLLEDHEGCTWGVAYQVQGEQVSKALKYLNVREAVLGGYDTKEVTFYPQDAPDQPLKALAYVATPQNPGYLGPAPEEAIATQILACRGFSGHNLEYLLRLADFMQLCGPQAQDEHLAAIVDAVGTMLPCFCPTEQALALV

SEQ ID NO: 20683 - protein, 177 aa, Homo sapiens
MKQESAAPNTPPTSQSPTPSAQFPRNDGDPQALWIFGYGSLVWRPDFAYSDSRVGFVRGYSRRFWQGDTFHRGSDKMPGRVVTLLEDHEGCTWGVAYQVQGEQNPGYLGPAPEEAIATQILACRGFSGHNLEYLLRLADFMQLCGPQAQDEHLAAIVDAVGTMLPCFCPTEQALALV

SEQ ID NO: 20684 - protein, 284 aa, Homo sapiens
MYGSCLLEKEAGMYPGTLMSPGGDGTAGTGGTGGGGSPMPASNFAAAPAFSHYMGYPHMPSMDPHWPSLGVWGSPYSPPREDWSVYPGPSSTMGTVPVNDVTSSPAAFCSTDYSNLGPVGGGTSGSSLPGQAGGSLVPTDAGAAKASSPSRSRHSPYAWMRKTVQVTGKTRTKEKYRVVYTDHQRLELEKEFHCNRYITIQRKSELAVNLGLSERQVKIWFQNRRAKERKMIKKKISQFENSGGSVQSDSDSISPGELPNTFFTTPSAVRGFQPIEIQQVIVSE

SEQ ID NO: 20685 - protein, 101 aa, Homo sapiens
MERPRSPQCSAPASASASVTLAQLLQLVQQGQELPGLEKRHIAAIHGEPTASRLPRRPKPWEAAALAESLPPPTLRIGTAPAEPGLVEAATAPSSWHTVGP

SEQ ID NO: 20686 - protein, 1149 aa, Homo sapiens
MSDAAEAPREATGENGETEMKEEEEPNPNYKEVEDPQQESKDDTIAWRESQEEERKTGEEEGEEEGKEDKKIVMEETEEKAGEVQEKEASGIQEETTVEPQEVTASMIRLETQITDSQSITSGIFPKTQRGSKSKLSLQLEDAETDELLRDLSTQIEFLDLDQISPEEQQISSPERQPSGELEEKTDRMPQDELGQERRDLEPENREEGQERRVSDIQSKAGISRESLVSSTTEDILFQKDKSTPVYPLTMTWSFGWNSSLPVYYIREERQRVLLYVCAHTAIIYNVFRNNQYHLQGHANIISCLCVSEDRRWIATADKGPDCLVIIWDSFTGIPVHTIFDSCPEGNGIMAMAMTHDAKYLATISDAEVQKVCIWKWTLAVETPACTLELPTEYGVQNYVTFNPTNNKELVSNSKTRAIYYAWYEERDTLAHSAPLLTEKTFNKLVGKFSQSIFHLNLTQILSATMEGKLVVWDIHRPPSSASTFLGFPYIKPCKLVHLQKEGITVLTTIDSYIVTGDIKGNIKFYDHTLSIVNWYSHLKLGAIRTLSFSKTPATPPTEKSNYPPDCTLKGDLFVLRNFIIGTSDAAVYHLTTDGTKLEKLFVEPKDAICAISCHPYQPLIAIGSICGMIKVWNYENKQYLFSRVFEKGLGVQSLTYNPEGALLGAGFTEGTVYILDAMSLENESPEPFKYSRTSVTHISFSHDSQYMATADRSFTVAVYMLVVRNGQRVWEYLARLRSHRKSIRSLLFGVYLDSNEPRLLSLGTDRLLIEYDLLRSYKDHLEVLDIHHTDQGCYPTCMVWYPPLTRELFLLICNSGYKVKLFNATTKMCRKTLLGPAYGSPIEQTQVLPVRSMAELQKRYLVFINRDKVGLQILPVDGNPHKTSAIVCHPNGVAGMAVSYDGCYAFTAGGHDRSVVQWKITLSVLEAAVSLGGEDLTPFYGLLSGGREGKFYRELEDYFYYSQLRSQGIDTMETRKVSEHICLSELPFVMRAIGFYPSEEKIDDIFNEIKFGEYVDTGKLIDKINLPDFLKVYLNHKPPFGNTMSGIHKSFEVLGYTNSKGKKAIRREDFLRLLVTKGEHMTEEEMLDCFASLFGLNPEGWKSEPATCSVKGSEICLEEELPDEITAEIFATEILGLTISEDSGQDGQ

SEQ ID NO: 20687 - protein, 941 aa, Homo sapiens
MSDAAEAPREATGENGETEMKEEEEPNPNYKEVEDPQQESKDDTIAWRESQEEERKTGEEEGEEEGKEDKKIVMEETEEKAGEVQEKEASGIQEETTVEPQEVTASMIRLETQITDSQSITSGIFPKTQRGSKSKLSLQLEDAETDELLRDLSTQIEFLDLDQISPEEQQISSPERQPSGELEEKTDRMPQDELGQERRDLEPENREEGQERRVSDIQSKAGISRESLVSSTTEDILFQKDKSTPVYPLTMTWSFGWNSSLPVYYIREERQRVLLYVCAHTAIIYNVFRNNQYHLQGHANIISCLCVSEDRRWIATADKGPDCLVIIWDSFTGIPVHTIFDSCPEGNGIMAMAMTHDAKYLATISDAEVQKVCIWKWTLAVETPACTLELPTEYGVQNYVTFNPTNNKELVSNSKTRAIYYAWYEERDTLAHSAPLLTEKTFNKLVGKFSQSIFHLNLTQILSATMEGKLVVWDIHRPPSSASTFLGFPYIKPCKLVHLQKEGITVLTTIDSYIVTGDIKGNIKFYDHTLSIVNWYSHLKLGAIRTLSFSKTPATPPTEKSNYPPDCTLKGDLFVLRNFIIGTSDAAVYHLTTDGTKLEKLFVEPKDAICAISCHPYQPLIAIGSICGMIKVWNYENKQYLFSRVFEKGLGVQSLTYNPEGALLGAGFTEGTVYILDAMSLENESPEPFKYSRTSVTHISFSHDSQYMATADRSFTVAVYMLVVRNGQRVWEYLARLRSHRKSIRSLLFGVYLDSNEPRLLSLGTDRLLIEYDLLRSYKDHLEVLDIHHTDQGCYPTCMVWYPPLTRELFLLICNSGYKVKLFNATTKMCRKTLLGPAYGSPIEQTQVLPVRSMAELQKRYLVFINRDKVGLQILPVDGNPHKTSAIVCHPNGVAGMAVSYDGCYAFTAGGHDRSVVQWKITLSHPGSQAPILSPSDTSRS

SEQ ID NO: 20688 - protein, 370 aa, Homo sapiens
MSDAAEAPREATGENGETEMKEEEEPNPNYKEVEDPQQESKDDTIAWRESQEEERKTGEEEGEEEGKEDKKIVMEETEEKAGEVQEKEASGIQEETTVEPQEVTASMIRLETQITDSQSITSGIFPKTQRGSKSKLSLQLEDAETDELLRDLSTQIEFLDLDQISPEEQQISSPERQPSGELEEKTDRMPQDELGQERRDLEPENREEGQERRVSDIQSKAGISRESLVSSTTEDILFQKDKSTPVYPLTMTWSFGWNSSLPVYYIREERQRVLLYVCAHTAIIYNVFRNNQYHLQVCRDFLPTGGGVVFNVRVVFCFVSQGLTSFYHCRIFPLSLELKASLSLETHGIVYCLSVSNQNQLTKQQLILIL

SEQ ID NO: 20689 - protein, 293 aa, Homo sapiens
MGPPSACPHRECIPWQGLLLTASLLTFWNAPTTAWLFIASAPFEVAEGENVHLSVVYLPENLYSYGWYKGKTVEPNQLIAAYVIDTHVRTPGPAYSGRETISPSGDLHFQNVTLEDTGYYTLQVTYRNSQIEQASHHLRVYESVAQPSIQASSTTVTEKGSVVLTCHTNNTGTSFQWIFNNQRLQVTKRMKLSWFNHMLTIDPIRQEDAGEYQCEVSNPVSSNRSDPLKLTVKSDDNTLGILIGVLVGSLLVAALVCFLLLRKTGRASDQSDFREQQPPASTPGHGPSDSSIS

SEQ ID NO: 20690 - protein, 292 aa, Homo sapiens
MGPPSACPHRECIPWQGLLLTASLLTFWNAPTTAWLFIASAPFEVAEGENVHLSVVYLPENLYSYGWYKGKTVEPNQLIAAYVIDTHVRTPGPAYSGRETISPSGDLHFQNVTLEDTGYYTLQVTYRNSQIEQASHHLRVYESVAQPSIQASSTTVTEKGSVVLTCHTNNTGTSFQWIFNNQRLQVTKRMKLSWFNHMLTIDPIRQEDAGEYQCEVSNPVSSNRSDPLKLTVKYDNTLGILIGVLVGSLLVAALVCFLLLRKTGRASDQSDFREQQPPASTPGHGPSDSSIS

SEQ ID NO: 20691 - protein, 191 aa, Homo sapiens [sequence omitted]

SEQ ID NO: 20692 - protein, 2537 aa, Homo sapiens
MEDFRGIAEESFPSFLTNSLFGNSGILENVTLSSNLGLPVAVSTLARDRSSTDNRYPDIQASYLVEGRFSVPSGSSPGSQSDAEPRERLQLSFQDDDSISRKKSYVESQRLSNALSKQSALQMETAGPEEEPAGATESLQGQDLFNRASPLEQAQDSPIDFHLQSWMNNKEPKIVVLDAGKHFEDKTLKSDLSHTSLLENEKLILPTSLEDSSDDDIDDEMFYDDHLEAYFEQLAIPGMIYEDLEGPEPPEKGFKLPTNGLRQANENGSLNCKFQSENNSSLISLDSHSSETTHKESEESQVICLPGTSNSIGTGDSRRYTDGMLPFSSGTWGTEKEIENLKGIVPDLNSECASKDVLVKTLRAIDVKLNSDNFHDANANRGGFDLTDPVKQGAECPHQNKTVLHMDGCLDTETPTVSIQENVDVASLKPISDSGINFTDAIWSPTCERRTCECHESIEKNKDKTDLPQSVVYQNEEGRWVTDLAYYTSFNSKQNLNVSLSDEMNEDFRSGSEAFDLIAQDEEEFNKEHQFIQEENIDAHNTSVALGDTSWGATINYSLLRKSRSTSDLDKDDASYLRLSLGEFFAQRSEALGCLGGGNNVKRPSFGYFIRSPEKREPIALIRKSDVSRGNLEKEMAHLNHDLYSGDLNEQSQAQLSEGSITLQVEAVESTSQVDENDVTLTADKGKTEDTFFMSNKPQRYKDKLPDSGDSMLRISTIASAIAEASVNTDPSQLAAMIKALSNKTRDKTFQEDEKQKDYSHVRHFLPNDLEKSNGSNALDMEKYLKKTEVSRYESALENFSRASMSDTWDLSLPKEQTTQDIHPVDLSATSVSVRAPEENTAAIVYVENGESENQESFRTINSSNSVTNRENNSAVVDVKTCSIDNKLQDVGNDEKATSISTPSDSYSSVRNPRITSLCLLKDCEEIRDNRENQRQNECVSEISNSEKHVTFENHRIVSPKNSDLKNTSPEHGGRGSEDEQESFRPSTSPLSHSSPSEISGTSSSGCALESFGSAAQQQQPPCEQELSPLVCSPAGVSRLTYVSEPESSYPTTATDDALEDRKSDITSELSTTIIQGSPAALEERAMEKLREKVPFQNRGKGTLSSIIQNNSDTRKATETTSLSSKPEYVKPDFRWSKDPSSKSGNLLETSEVGWTSNPEELDPIRLALLGKSGLSCQVGSATSHPVSCQEPIDEDQRISPKDKSTAGREFSGQVSHQTTSENQCTPIPSSTVHSSVADMQNMPAAVHALLTQPSLSAAPFAQRYLGTLPSTGSTTLPQCHAGNATVCGFSGGLPYPAVAGEPVQNSVAVGICLGSNIGSGWMGTSSLCNPYSNTLNQNLLSTTKPFPVPSVGTNCGIEPWDSGVTSGLGSVRVPEELKLPHACCVGIASQTLLSVLNPTDRWLQVSIGVLSISVNGEKVDLSTYRCLVFKNKAIIRPHATEEIKVLFIPSSPGVFRCTFSVASWPCSTDAETIVQAEALASTVTLTAIAESPVIEVETEKKDVLDFGDLTYGGWKALPLKLINRTHATVPIRLIINANAVAWRCFTFSKESVRAPVEVAPCADVVTRLAGPSVVNHMMPASYDGQDPEFLMIWVLFHSPKKQISSSDILDSAEEFSAKVDIEVDSPNPTPVLRSVSLRARAGIARIHAPRDLQTMHFLAKVASSRKQHLPLKNAGNIEVYLDIKVPEQGSHFSVDPKNLLLKPGEEHEVIVSFTPKDPEACEERILKIFVQPFGPQYEVVLKGEVISSGSKPLSPGPCLDIPSILSNKQFLAWGGVPLGRTQLQKLALRNNSASTTQHLRLLIRGQDQDCFQLQNTFGSEQRLTSNCEIRIHPKEDIFISVLFAPTRLSCMLARLEIKQLGNRSQPGIKFTIPLSGYGGTSNLILEGVKKLSDSYMVTVNGLVPGKESKIVFSVRNTGSRAAFVKAVGFKDSQKKVLLDPKVLRIFPDKFVLKERTQENVTLIYNPSDRGINNKTATELSTVYLFGGDEISRQQYRRALLHKPEMIKQILPEHSVLQNINFVEAFQDELLVTEVYDLPQRPNDVQLFYGSMCKIILSVIGEFRDCISSREFLQPSSKASLESTSDLGASGKHGGNVSLDVLPVKGPQGSPLLSRAARPPLDQLASEEPWTVLPEHLILVAPSPCDMAKTGRFQIVNNSVRLLRFELCWPAHCLTVTPQHGCVAPESKLQILVSPNSSLSTKQSMFPWSGLIYIHCDDGQKKIVKVQIREDLTQVELLTRLTSKPFGILSPVSEPSVSHLVKPMTKPPSTKVEIRNKSITFPTTEPGETSESCLELENHGTTDVKWHLSSLAPPYVKGVDESGDVFRATYAAFRCSPISGLLESHGIQKVSITFLPRGRGDYAQFWDVECHPLKEPHMKHTLRFQLSGQSIEAENEPENACLSTDSLIKIDHLVKPRRQAVSEASARIPEQLDVTARGVYAPEDVYRFRPTSVGESRTLKVNLRNNSFITHSLKFLSPREPFYVKHSKYSLRAQHYINMPVQFKPKSAGKFEALLVIQTDEGKSIAIRLIGEALGKN

SEQ ID NO: 20693 - protein, 1941 aa, Homo sapiens
MKTSDLVPSFGYFIRSPEKREPIALIRKSDVSRGNLEKEMAHLNHDLYSGDLNEQSQAQLSEGSITLQVEAVESTSQVDENDVTLTADKGKTEDTFFMSNKPQRYKDKLPDSGDSMLRISTIASAIAEASVNTDPSQLAAMIKALSNKTRDKTFQEDEKQKDYSHVRHFLPNDLEKSNGSNALDMEKYLKKTEVSRYESALENFSRASMSDTWDLSLPKEQTTQDIHPVDLSATSVSVRAPEENTAAIVYVENGESENQESFRTINSSNSVTNRENNSAVVDVKTCSIDNKLQDVGNDEKATSISTPSDSYSSVRNPRITSLCLLKDCEEIRDNRENQRQNECVSEISNSEKHVTFENHRIVSPKNSDLKNTSPEHGGRGSEDEQESFRPSTSPLSHSSPSEISGTSSSGCALESFGSAAQQQQPPCEQELSPLVCSPAGVSRLTYVSEPESSYPTTATDDALEDRKSDITSELSTTIIQGSPAALEERAMEKLREKVPFQNRGKGTLSSIIQNNSDTRKATETTSLSSKPEYVKPDFRWSKDPSSKSGNLLETSEVGWTSNPEELDPIRLALLGKSGLSCQVGSATSHPVSCQEPIDEDQRISPKDKSTAGREFSGQVSHQTTSENQCTPIPSSTVHSSVADMQNMPAAVHALLTQPSLSAAPFAQRYLGTLPSTGSTTLPQCHAGNATVCGFSGGLPYPAVAGEPVQNSVAVGICLGSNIGSGWMGTSSLCNPYSNTLNQNLLSTTKPFPVPSVGTNCGIEPWDSGVTSGLGSVRVPEELKLPHACCVGIASQTLLSVLNPTDRWLQVSIGVLSISVNGEKVDLSTYRCLVFKNKAIIRPHATEEIKVLFIPSSPGVFRCTFSVASWPCSTDAETIVQAEALASTVTLTAIAESPVIEVETEKKDVLDFGDLTYGGWKALPLKLINRTHATVPIRLIINANAVAWRCFTFSKESVRAPVEVAPCADVVTRLAGPSVVNHMMPASYDGQDPEFLMIWVLFHSPKKQISSSDILDSAEEFSAKVDIEVDSPNPTPVLRSVSLRARAGIARIHAPRDLQTMHFLAKVASSRKQHLPLKNAGNIEVYLDIKVPEQGSHFSVDPKNLLLKPGEEHEVIVSFTPKDPEACEERILKIFVQPFGPQYEVVLKGEVISSGSKPLSPGPCLDIPSILSNKQFLAWGGVPLGRTQLQKLALRNNSASTTQHLRLLIRGQDQDCFQLQNTFGSEQRLTSNCEIRIHPKEDIFISVLFAPTRLSCMLARLEIKQLGNRSQPGIKFTIPLSGYGGTSNLILEGVKKLSDSYMVTVNGLVPGKESKIVFSVRNTGSRAAFVKAVGFKDSQKKVLLDPKVLRIFPDKFVLKERTQENVTLIYNPSDRGINNKTATELSTVYLFGGDEISRQQYRRALLHKPEMIKQILPEHSVLQNINFVEAFQDELLVTEVYDLPQRPNDVQLFYGSMCKIILSVIGEFRDCISSREFLQPSSKASLESTSDLGASGKHGGNVSLDVLPVKGPQGSPLLSRAARPPLDQLASEEPWTVLPEHLILVAPSPCDMAKTGRFQIVNNSVRLLRFELCWPAHCLTVTPQHGCVAPESKLQILVSPNSSLSTKQSMFPWSGLIYIHCDDGQKKIVKVQIREDLTQVELLTRLTSKPFGILSPVSEPSVSHLVKPMTKPPSTKVEIRNKSITFPTTEPGETSESCLELENHGTTDVKWHLSSLAPPYVKGVDESGDVFRATYAAFRCSPISGLLESHGIQKVSITFLPRGRGDYAQFWDVECHPLKEPHMKHTLRFQLSGQSIEAENEPENACLSTDSLIKIDHLVKPRRQAVSEASARIPEQLDVTARGVYAPEDVYRFRPTSVGESRTLKVNLRNNSFITHSLKFLSPREPFYVKHSKYSLRAQHYINMPVQFKPKSAGKFEALLVIQTDEGKSIAIRLIGEALGKN

SEQ ID NO: 20694 - protein, 1407 aa, Homo sapiens
MKTSDLVPSFGYFIRSPEKREPIALIRKSDVSRGNLEKEMAHLNHDLYSGDLNEQSQAQLSEGSITLQVEAVESTSQVDENDVTLTADKGKTEDTFFMSNKPQRYKDKLPDSGDSMLRISTIASAIAEASVNTDPSQLAAMIKALSNKTRDKTFQEDEKQKDYSHVRHFLPNDLEKSNGSNALDMEKYLKKTEVSRYESALENFSRASMSDTWDLSLPKEQTTQDIHPVDLSATSVSVRAPEENTAAIVYVENGESENQESFRTINSSNSVTNRENNSAVVDVKTCSIDNKLQDVGNDEKATSISTPSDSYSSVRNPRITSLCLLKDCEEIRDNRENQRQNECVSEISNSEKHVTFENHRIVSPKNSDLKNTSPEHGGRGSEDEQESFRPSTSPLSHSSPSEISGTSSSGCALESFGSAAQQQQPPCEQELSPLVCSPAGVSRLTYVSEPESSYPTTATDDALEDRKSDITSELSTTIIQGSPAALEERAMEKLREKVPFQNRGKGTLSSIIQNNSDTRKATETTSLSSKPEYVKPDFRWSKDPSSKSGNLLETSEVGWTSNPEELDPIRLALLGKSGLSCQVGSATSHPVSCQEPIDEDQRISPKDKSTAGREFSGQVSHQTTSENQCTPIPSSTVHSSVADMQNMPAAVHALLTQPSLSAAPFAQRYLGTLPSTGSTTLPQCHAGNATVCGFSGGLPYPAVAGEPVQNSVAVGICLGSNIGSGWMGTSSLCNPYSNTLNQNLLSTTKPFPVPSVGTNCGIEPWDSGVTSGLGSVRVPEELKLPHACCVGIASQTLLSVLNPTDRWLQVSIGVLSISVNGEKVDLSTYRCLVFKNKAIIRPHATEEIKVLFIPSSPGVFRCTFSVASWPCSTDAETIVQAEALASTVTLTAIAESPVIEVETEKKDVLDFGDLTYGGWKALPLKLINRTHATVPIRLIINANAVAWRCFTFSKESVRAPVEVAPCADVVTRLAGPSVVNHMMPASYDGQDPEFLMIWVLFHSPKKQISSSDILDSAEEFSAKVDIEVDSPNPTPVLRSVSLRARAGIARIHAPRDLQTMHFLAKVASSRKQHLPLKNAGNIEVYLDIKVPEQGSHFSVDPKNLLLKPGEEHEVIVSFTPKDPEACEERILKIFVQPFGPQYEVVLKGEVISSGSKPLSPGPCLDIPSILSNKQFLAWGGVPLGRTQLQKLALRNNSASTTQHLRLLIRGQDQDCFQLQNTFGSEQRLTSNCEIRIHPKEDIFISVLFAPTRLSCMLARLEIKQLGNRSQPGIKFTIPLSGYGGTSNLILEGVKKLSDSYMVTVNGLVPGKESKIVFSVRNTGSRAAFVKAVGFKDSQKKVLLDPKVLRIFPDKFVLKERTQENVTLIYNPSDRGINNKTATELSTVYLFGGDEISRQQYRRQGPAT

SEQ ID NO: 20695 - protein, 359 aa, Homo sapiens
MGNTLTCCVSPNASPKLGRRAGSAELYCASDIYEAVSGDAVAVAPAVVEPAELDFGEGEGHHLQHISDREMPEDLALESNPSDHPRASTIFLSKSQTDVREKRKSNHLNHVSPGQLTKKYSSCSTIFLDDSTVSQPNLRTTVKCVTLAIYYHIKNRDANRSLDIFDERSHPLTREKVPEEYFKHDPEHKFIYRFVRTLFSAAQLTAECAIVTLVYLERLLTYAEIDICPTNWKRIVLGAILLASKVWDDQAVWNVDYCQILKDITVEDMNEMERHFLELLQFNINVPASVYAKYYFDLRSLADDNNLNFLFAPLSKERAQNLEAISRLCEDKDLCRAAMRRSFSADNFIGIQRSKAILS

SEQ ID NO: 20696 - protein, 308 aa, Homo sapiens
MGNTLTCCVSPNASPKLGRRAGSAELYCASDIYEAVSGDAVAVAPAVVEPAELDFGEGEGHHLQHISDREMPEDLALESNPSDHPRASTIFLSKSQTDVREKRKSNHLNHCDLSNILPHKEQREKVPEEYFKHDPEHKFIYRFVRTLFSAAQLTAECAIVTLVYLERLLTYAEIDICPTNWKRIVLGAILLASKVWDDQAVWNVDYCQILKDITVEDMNEMERHFLELLQFNINVPASVYAKYYFDLRSLADDNNLNFLFAPLSKERAQNLEAISRLCEDKDLCRAAMRRSFSADNFIGIQRSKAILS

SEQ ID NO: 20697 - protein, 289 aa, Homo sapiens
MPEDLALESNPSDHPRASTIFLSKSQTDVREKRKSNHLNHVSPGQLTKKYSSCSTIFLDDSTVSQPNLRTTVKCVTLAIYYHIKNRDANRSLDIFDERSHPLTREKVPEEYFKHDPEHKFIYRFVRTLFSAAQLTAECAIVTLVYLERLLTYAEIDICPTNWKRIVLGAILLASKVWDDQAVWNVDYCQILKDITVEDMNEMERHFLELLQFNINVPASVYAKYYFDLRSLADDNNLNFLFAPLSKERAQNLEAISRLCEDKDLCRAAMRRSFSADNFIGIQRSKAILS

SEQ ID NO: 20698 - protein, 526 aa, Homo sapiens
MGHLSAPLHRVRVPWQGLLLTASLLTFWNPPTTAQLTTESMPFNVAEGKEVLLLVHNLPQQLFGYSWYKGERVDGNRQIVGYAIGTQQATPGPANSGRETIYPNASLLIQNVTQNDTGFYTLQVIKSDLVNEEATGQFHVYPELPKPSISSNNSNPVEDKDAVAFTCEPETQDTTYLWWINNQSLPVSPRLQLSNGNRTLTLLSVTRNDTGPYECEIQNPVSANRSDPVTLNVTYGPDTPTISPSDTYYRPGANLSLSCYAASNPPAQYSWLINGTFQQSTQELFIPNITVNNSGSYTCHANNSVTGCNRTTVKTIIVTELSPVVAKPQIKASKTTVTGDKDSVNLTCSTNDTGISIRWFFKNQSLPSSERMKLSQGNTTLSINPVKREDAGTYWCEVFNPISKNQSDPIMLNVNYNALPQENGLSPGAIAGIVIGVVALVALIAVALACFLHFGKTGRASDQRDLTEHKPSVSNHTQDHSNDPPNKMNEVTYSTLNFEAQQPTQPTSASPSLTATEIIYSEVKKQ

SEQ ID NO: 20699 - protein, 417 aa, Homo sapiens
MGHLSAPLHRVRVPWQGLLLTASLLTFWNPPTTAQLTTESMPFNVAEGKEVLLLVHNLPQQLFGYSWYKGERVDGNRQIVGYAIGTQQATPGPANSGRETIYPNASLLIQNVTQNDTGFYTLQVIKSDLVNEEATGQFHVYPELPKPSISSNNSNPVEDKDAVAFTCEPETQDTTYLWWINNQSLPVSPRLQLSNGNRTLTLLSVTRNDTGPYECEIQNPVSANRSDPVTLNVTYGPDTPTISPSDTYYRPGANLSLSCYAASNPPAQYSWLINGTFQQSTQELFIPNITVNNSGSYTCHANNSVTGCNRTTVKTIIVTELSPVVAKPQIKASKTTVTGDKDSVNLTCSTNDTGISIRWFFKNQSLPSSERMKLSQGNTTLSINPVKREDAGTYWCEVFNPISKNQSDPIMLNVNCK

SEQ ID NO: 20700 - protein, 321 aa, Homo sapiens
MGHLSAPLHRVRVPWQGLLLTASLLTFWNPPTTAQLTTESMPFNVAEGKEVLLLVHNLPQQLFGYSWYKGERVDGNRQIVGYAIGTQQATPGPANSGRETIYPNASLLIQNVTQNDTGFYTLQVIKSDLVNEEATGQFHVYPELPKPSISSNNSNPVEDKDAVAFTCEPETQDTTYLWWINNQSLPVSPRLQLSNGNRTLTLLSVTRNDTGPYECEIQNPVSANRSDPVTLNVTYGPDTPTISPSDTYYRPGANLSLSCYAASNPPAQYSWLINGTFQQSTQELFIPNITVNNSGSYTCHANNSVTGCNRTTVKTIIVTGK

SEQ ID NO: 20701 - protein, 351 aa, Homo sapiens
MGHLSAPLHRVRVPWQGLLLTASLLTFWNPPTTAQLTTESMPFNVAEGKEVLLLVHNLPQQLFGYSWYKGERVDGNRQIVGYAIGTQQATPGPANSGRETIYPNASLLIQNVTQNDTGFYTLQVIKSDLVNEEATGQFHVYPELPKPSISSNNSNPVEDKDAVAFTCEPETQDTTYLWWINNQSLPVSPRLQLSNGNRTLTLLSVTRNDTGPYECEIQNPVSANRSDPVTLNVTYGPDTPTISPSDTYYRPGANLSLSCYAASNPPAQYSWLINGTFQQSTQELFIPNITVNNSGSYTCHANNSVTGCNRTTVKTIIVTESPVLGEDEAVPGQHHPQHKPCQEGGCWDVLV

SEQ ID NO: 20702 - protein, 461 aa, Homo sapiens
MGHLSAPLHRVRVPWQGLLLTASLLTFWNPPTTAQLTTESMPFNVAEGKEVLLLVHNLPQQLFGYSWYKGERVDGNRQIVGYAIGTQQATPGPANSGRETIYPNASLLIQNVTQNDTGFYTLQVIKSDLVNEEATGQFHVYPELPKPSISSNNSNPVEDKDAVAFTCEPETQDTTYLWWINNQSLPVSPRLQLSNGNRTLTLLSVTRNDTGPYECEIQNPVSANRSDPVTLNVTYGPDTPTISPSDTYYRPGANLSLSCYAASNPPAQYSWLINGTFQQSTQELFIPNITVNNSGSYTCHANNSVTGCNRTTVKTIIVTERQNLTMLPRLDSNSWAQAILPSVSQSAEITDNALPQENGLSPGAIAGIVIGVVALVALIAVALACFLHFGKTGRASDQRDLTEHKPSVSNHTQDHSNDPPNKMNEVTYSTLNFEAQQPTQPTSASPSLTATEIIYSEVKKQ

SEQ ID NO: 20703 - protein, 430 aa, Homo sapiens
MGHLSAPLHRVRVPWQGLLLTASLLTFWNPPTTAQLTTESMPFNVAEGKEVLLLVHNLPQQLFGYSWYKGERVDGNRQIVGYAIGTQQATPGPANSGRETIYPNASLLIQNVTQNDTGFYTLQVIKSDLVNEEATGQFHVYPELPKPSISSNNSNPVEDKDAVAFTCEPETQDTTYLWWINNQSLPVSPRLQLSNGNRTLTLLSVTRNDTGPYECEIQNPVSANRSDPVTLNVTYGPDTPTISPSDTYYRPGANLSLSCYAASNPPAQYSWLINGTFQQSTQELFIPNITVNNSGSYTCHANNSVTGCNRTTVKTIIVTDNALPQENGLSPGAIAGIVIGVVALVALIAVALACFLHFGKTGRASDQRDLTEHKPSVSNHTQDHSNDPPNKMNEVTYSTLNFEAQQPTQPTSASPSLTATEIIYSEVKKQ

SEQ ID NO: 20704 - protein, 252 aa, Homo sapiens
MGHLSAPLHRVRVPWQGLLLTASLLTFWNPPTTAQLTTESMPFNVAEGKEVLLLVHNLPQQLFGYSWYKGERVDGNRQIVGYAIGTQQATPGPANSGRETIYPNASLLIQNVTQNDTGFYTLQVIKSDLVNEEATGQFHVYPNALPQENGLSPGAIAGIVIGVVALVALIAVALACFLHFGKTGRASDQRDLTEHKPSVSNHTQDHSNDPPNKMNEVTYSTLNFEAQQPTQPTSASPSLTATEIIYSEVKKQ

SEQ ID NO: 20705 - protein, 464 aa, Homo sapiens
MGHLSAPLHRVRVPWQGLLLTASLLTFWNPPTTAQLTTESMPFNVAEGKEVLLLVHNLPQQLFGYSWYKGERVDGNRQIVGYAIGTQQATPGPANSGRETIYPNASLLIQNVTQNDTGFYTLQVIKSDLVNEEATGQFHVYPELPKPSISSNNSNPVEDKDAVAFTCEPETQDTTYLWWINNQSLPVSPRLQLSNGNRTLTLLSVTRNDTGPYECEIQNPVSANRSDPVTLNVTYGPDTPTISPSDTYYRPGANLSLSCYAASNPPAQYSWLINGTFQQSTQELFIPNITVNNSGSYTCHANNSVTGCNRTTVKTIIVTELSPVVAKPQIKASKTTVTGDKDSVNLTCSTNDTGISIRWFFKNQSLPSSERMKLSQGNTTLSINPVKREDAGTYWCEVFNPISKNQSDPIMLNVNYNALPQENGLSPGAIAGIVIGVVALVALIAVALACFLHFGKTGSSGPLQ

SEQ ID NO: 20706 - protein, 399 aa, Homo sapiens
MGHLSAPLHRVRVPWQGLLLTASLLTFWNPPTTAQLTTESMPFNVAEGKEVLLLVHNLPQQLFGYSWYKGERVDGNRQIVGYAIGTQQATPGPANSGRETIYPNASLLIQNVTQNDTGFYTLQVIKSDLVNEEATGQFHVYPELPKPSISSNNSNPVEDKDAVAFTCEPETQDTTYLWWINNQSLPVSPRLQLSNGNRTLTLLSVTRNDTGPYECEIQNPVSANRSDPVTLNVTYGPDTPTISPSDTYYRPGANLSLSCYAASNPPAQYSWLINGTFQQSTQELFIPNITVNNSGSYTCHANNSVTGCNRTTVKTIIVTEMAFHHVAKAGLKLLSSSNPPASTSQSAKITDNALPQENGLSPGAIAGIVIGVVALVALIAVALACFLHFGKTGSSGPLQ

SEQ ID NO: 20707 - protein, 468 aa, Homo sapiens
MGHLSAPLHRVRVPWQGLLLTASLLTFWNPPTTAQLTTESMPFNVAEGKEVLLLVHNLPQQLFGYSWYKGERVDGNRQIVGYAIGTQQATPGPANSGRETIYPNASLLIQNVTQNDTGFYTLQVIKSDLVNEEATGQFHVYPELPKPSISSNNSNPVEDKDAVAFTCEPETQDTTYLWWINNQSLPVSPRLQLSNGNRTLTLLSVTRNDTGPYECEIQNPVSANRSDPVTLNVTYGPDTPTISPSDTYYRPGANLSLSCYAASNPPAQYSWLINGTFQQSTQELFIPNITVNNSGSYTCHANNSVTGCNRTTVKTIIVTELSPVVAKPQIKASKTTVTGDKDSVNLTCSTNDTGISIRWFFKNQSLPSSERMKLSQGNTTLSINPVKREDAGTYWCEVFNPISKNQSDPIMLNVNYNALPQENGLSPGAIAGIVIGVVALVALIAVALACFLHFGKTGRTTPMTHLTR

SEQ ID NO: 20708 - protein, 368 aa, Homo sapiens
MGHLSAPLHRVRVPWQGLLLTASLLTFWNPPTTAQLTTESMPFNVAEGKEVLLLVHNLPQQLFGYSWYKGERVDGNRQIVGYAIGTQQATPGPANSGRETIYPNASLLIQNVTQNDTGFYTLQVIKSDLVNEEATGQFHVYPELPKPSISSNNSNPVEDKDAVAFTCEPETQDTTYLWWINNQSLPVSPRLQLSNGNRTLTLLSVTRNDTGPYECEIQNPVSANRSDPVTLNVTYGPDTPTISPSDTYYRPGANLSLSCYAASNPPAQYSWLINGTFQQSTQELFIPNITVNNSGSYTCHANNSVTGCNRTTVKTIIVTDNALPQENGLSPGAIAGIVIGVVALVALIAVALACFLHFGKTGSSGPLQ

SEQ ID NO: 20709 - protein, 161 aa, Homo sapiens
MSVLSPEIKCETSKFTRSSFGSCLIFESSWKKAVLETQKIKKEYTTAFGLEELKECIKMPYLPGLQSCQKSVSSTPLEVPKRLPRADAEVSAVRLKKTKETCSVAPLWEKSKGSGFSDPLTGAPSQYLERLSKIAILEYDTIRQETTTKSKKSKKRDLRDR

SEQ ID NO: 20710 - protein, 620 aa, Homo sapiens
MDNKISPEAQVAELELDAVIGFNGHVPTGLKCHPDQEHMIYPLGCTVLIQAINTKEQNFLQGHGNNVSCLAISRSGEYIASGQVTFMGFKADIILWDYKNRELLARLSLHKGKIEALAFSPNDLYLVSLGGPDDGSVVVWSIAKRDAICGSPAAGLNVGNATNVIFSRCRDEMFMTAGNGTIRVWELDLPNRKIWPTECQTGQLKRIVMSIGVDDDDSFFYLGTTTGDILKMNPRTKLLTDVGPAKDKFSLGVSAIRCLKMGGLLVGSGAGLLVFCKSPGYKPIKKIQLQGGITSITLRGEGHQFLVGTEESHIYRVSFTDFKETLIATCHFDAVEDIVFPFGTAELFATCAKKDIRVWHTSSNRELLRITVPNMTCHGIDFMRDGKSIISAWNDGKIRAFAPETGRLMYVINNAHRIGVTAIATTSDCKRVISGGGEGEVRVWQIGCQTQKLEEALKEHKSSVSCIRVKRNNEECVTASTDGTCIIWDLVRLRRNQMILANTLFQCVCYHPEEFQIITSGTDRKIAYWEVFDGTVIRELEGSLSGSINGMDITQEGVHFVTGGNDHLVKVWDYNEGEVTHVGVGHSGNITRIRISPGNQYIVSVSADGAILRWKYPYTS

SEQ ID NO: 20711 - protein, 630 aa, Homo sapiens
MEAVVLPWQIFGVRELPVERGVTMKGPRLFRAPGHVPTGLKCHPDQEHMIYPLGCTVLIQAINTKEQNFLQGHGNNVSCLAISRSGEYIASGQVTFMGFKADIILWDYKNRELLARLSLHKGKIEALAFSPNDLYLVSLGGPDDGSVVVWSIAKRDAICGSPAAGLNVGNATNVIFSRCRDEMFMTAGNGTIRVWELDLPNRKIWPTECQTGQLKRIVMSIGVDDDDSFFYLGTTTGDILKMNPRTKLLTDVGPAKDKFSLGVSAIRCLKMGGLLVGSGAGLLVFCKSPGYKPIKKIQLQGGITSITLRGEGHQFLVGTEESHIYRVSFTDFKETLIATCHFDAVEDIVFPFGTAELFATCAKKDIRVWHTSSNRELLRITVPNMTCHGIDFMRDGKSIISAWNDGKIRAFAPETGRLMYVINNAHRIGVTAIATTSDCKRVISGGGEGEVRVWQIGCQTQKLEEALKEHKSSVSCIRVKRNNEECVTASTDGTCIIWDLVRLRRNQMILANTLFQCVCYHPEEFQIITSGTDRKIAYWEVFDGTVIRELEGSLSGSINGMDITQEGVHFVTGGNDHLVKVWDYNEGEVTHVGVGHSGNITRIRISPGNQYIVSVSADGAILRWKYPYTS

SEQ ID NO: 20712 - protein, 552 aa, Homo sapiens
MDNKISPEAQVAELELDAVIGFNDIILWDYKNRELLARLSLHKGKIEALAFSPNDLYLVSLGGPDDGSVVVWSIAKRDAICGSPAAGLNVGNATNVIFSRCRDEMFMTAGNGTIRVWELDLPNRKIWPTECQTGQLKRIVMSIGVDDDDSFFYLGTTTGDILKMNPRTKLLTDVGPAKDKFSLGVSAIRCLKMGGLLVGSGAGLLVFCKSPGYKPIKKIQLQGGITSITLRGEGHQFLVGTEESHIYRVSFTDFKETLIATCHFDAVEDIVFPFGTAELFATCAKKDIRVWHTSSNRELLRITVPNMTCHGIDFMRDGKSIISAWNDGKIRAFAPETGRLMYVINNAHRIGVTAIATTSDCKRVISGGGEGEVRVWQIGCQTQKLEEALKEHKSSVSCIRVKRNNEECVTASTDGTCIIWDLVRLRRNQMILANTLFQCVCYHPEEFQIITSGTDRKIAYWEVFDGTVIRELEGSLSGSINGMDITQEGVHFVTGGNDHLVKVWDYNEGEVTHVGVGHSGNITRIRISPGNQYIVSVSADGAILRWKYPYTS

SEQ ID NO: 20713 - protein, 222 aa, Homo sapiens
MDLLFGRRKTPEELLRQNQRALNRAMRELDRERQKLETQEKKIIADIKKMAKQGQMDAVRIMAKDLVRTRRYVRKFVLMRANIQAVSLKIQTLKSNNSMAQAMKGVTKAMGTMNRQLKLPQIQKIMMEFERQAEIMDMKEEMMNDAIDDAMGDEEDEEESDAVVSQVLDELGLSLTDELSNLPSTGGSLSVAAGGKKAEAAASALADADADLEERLKNLRRD

SEQ ID NO: 20714 - protein, 2581 aa, Homo sapiens
MADPIMDLFDDPNLFGLDSLTDDSFNQVTQDPIEEALGLPSSLDSLDQMNQDGGGGDVGNSSASELVPPPEETAPTELSKESTAPAPESITLHDYTTQPASQEQPAQPVLQTSTPTSGLLQVSKSQEILSQGNPFMGVSATAVSSSSAGGQPPQSAPKIVILKAPPSSSVTGAHVAQIQAQGITSTAQPLVAGTANGGKVTFTKVLTGTPLRPGVSIVSGNTVLAAKVPGNQAAVQRIVQPSRPVKQLVLQPVKGSAPAGNPGATGPPLKPAVTLTSTPTQGESKRITLVLQQPQSGGPQGHRHVVLGSLPGKIVLQGNQLAALTQAKNAQGQPAKVVTIQLQVQQPQQKIQIVPQPPSSQPQPQQPPSTQPVTLSSVQQAQIMGPGQSPGQRLSVPVKVVLQPQAGSSQGASSGLSVVKVLSASEVAALSSPASSAPHSGGKTGMEENRRLEHQKKQEKANRIVAEAIARARARGEQNIPRVLNEDELPSVRPEEEGEKKRRKKSAGERLKEEKPKKSKTSGASKTKGKSKLNTITPVVGKKRKRNTSSDNSDVEVMPAQSPREDEESSIQKRRSNRQVKRKKYTEDLDIKITDDEEEEEVDVTGPIKPEPILPEPVQEPDGETLPSMQFFVENPSEEDAAIVDKVLSMRIVKKELPSGQYTEAEEFFVKYKNYSYLHCEWATISQLEKDKRIHQKLKRFKTKMAQMRHFFHEDEEPFNPDYVEVDRILDESHSIDKDNGEPVIYYLVKWCSLPYEDSTWELKEDVDEGKIREFKRIQSRHPELKRVNRPQASAWKKLELSHEYKNRNQLREYQLEGVNWLLFNWYNRQNCILADEMGLGKTIQSIAFLQEVYNVGIHGPFLVIAPLSTITNWEREFNTWTEMNTIVYHGSLASRQMIQQYEMYCKDSRGRLIPGAYKFDALITTFEMILSDCPELREIEWRCVIIDEAHRLKNRNCKLLDSLKHMDLEHKVLLTGTPLQNTVEELFSLLHFLEPSQFPSESEFLKDFGDLKTEEQVQKLQAILKPMMLRRLKEDVEKNLAPKQETIIEVELTNIQKKYYRAILEKNFSFLSKGAGHTNMPNLLNTMMELRKCCNHPYLINGAEEKILTEFREACHIIPHDFHLQAMVRSAGKLVLIDKLLPKLKAGGHKVLIFSQMVRCLDILEDYLIQRRYLYERIDGRVRGNLRQAAIDRFSKPDSDRFVFLLCTRAGGLGINLTAADTCIIFDSDWNPQNDLQAQARCHRIGQSKAVKVYRLITRNSYEREMFDKASLKLGLDKAVLQSMSGRDGNITGIQQFSKKEIEDLLRKGAYAAIMEEDDEGSKFCEEDIDQILLRRTTTITIESEGKGSTFAKASFVASENRTDISLDDPNFWQKWAKKADLDMDLLNSKNNLVIDTPRVRKQTRHFSTLKDDDLVEFSDLESEDDERPRSRRHDRHHAYGRTDCFRVEKHLLVYGWGRWRDILSHGRFKRRMTERDVETICRAILVYCLLHYRGDENIKGFIWDLISPAENGKTKELQNHSGLSIPVPRGRKGKKVKSQSTFDIHKADWIRKYNPDTLFQDESYKKHLKHQCNKVLLRVRMLYYLRQEVIGDQAEKVLGGAIASEIDIWFPVVDQLEVPTTWWDSEADKSLLIGVFKHGYEKYNTMRADPALCFLEKAGRPDDKAIAAEHRVLDNFSDIVEGVDFDKDCEDPEYKPLQGPPKDQDDEGDPLMMMDEEISVIDGDEAQVTQQPGHLFWPPGSALTARLRRLVTAYQRSYKREQMKIEAAERGDRRRRRCEAAFKLKEIARREKQQRWTRREQTDFYRVVSTFGVEYDPDTMQFHWDRFRTFARLDKKTDESLTKYFHGFVAMCRQVCRLPPAAGDEPPDPNLFIEPITEERASRTLYRIELLRRLREQVLCHPLLEDRLALCQPPGPELPKWWEPVRHDGELLRGAARHGVSQTDCNIMQDPDFSFLAARMNYMQNHQAGAPAPSLSRCSTPLLHQQYTSRTASPLPLRPDAPVEKSPEETATQVPSLESLTLKLEHEVVARSRPTPQDYEMRVSPSDTTPLVSRSVPPVKLEDEDDSDSELDLSKLSPSSSSSSSSSSSSSSTDESEDEKEEKLTDQSRSKLYDEESLLSLTMSQDGFPNEDGEQMTPELLLLQERQRASEWPKDRVLINRIDLVCQAVLSGKWPSSRRSQEMVTGGILGPGNHLLDSPSLTPGEYGDSPVPTPRSSSAASMAEEEASAVSTAAAQFTKLRRGMDEKEFTVQIKDEEGLKLTFQKHKLMANGVMGDGHPLFHKKKGNRKKLVELEVECMEEPNHLDVDLETRIPVINKVDGTLLVGEDAPRRAELEMWLQGHPEFAVDPRFLAYMEDRRKQKWQRCKKNNKAELNCLGMEPVQTANSRNGKKGHHTETVFNRVLPGPIAPESSKKRARRMRPDLSKMMALMQGGSTGSLSLHNTFQHSSSGLQSVSSLGHSSATSASLPFMPFVMGGAPSSPHVDSSTMLHHHHHHPHPHHHHHHHPGLRAPGYPSSPVTTASGTTLRLPPLQPEEDDDEDEEDDDDLSQGYDSSERDFSLIDDPMMPANSDSSEDADD

SEQ ID NO: 20715 - protein, 2302 aa, Homo sapiens
MKGESKRITLVLQQPQSGGPQGHRHVVLGSLPGKIVLQGNQLAALTQAKNAQGQPAKVVTIQLQVQQPQQKIQIVPQPPSSQPQPQQPPSTQPVTLSSVQQAQIMGPGQSPGQRLSVPVKVVLQPQAGSSQGASSGLSVVKVLSASEVAALSSPASSAPHSGGKTGMEENRRLEHQKKQEKANRIVAEAIARARARGEQNIPRVLNEDELPSVRPEEEGEKKRRKKSAGERLKEEKPKKSKTSGASKTKGKSKLNTITPVVGKKRKRNTSSDNSDVEVMPAQSPREDEESSIQKRRSNRQVKRKKYTEDLDIKITDDEEEEEVDVTGPIKPEPILPEPVQEPDGETLPSMQFFVENPSEEDAAIVDKVLSMRIVKKELPSGQYTEAEEFFVKYKNYSYLHCEWATISQLEKDKRIHQKLKRFKTKMAQMRHFFHEDEEPFNPDYVEVDRILDESHSIDKDNGEPVIYYLVKWCSLPYEDSTWELKEDVDEGKIREFKRIQSRHPELKRVNRPQASAWKKLELSHEYKNRNQLREYQLEGVNWLLFNWYNRQNCILADEMGLGKTIQSIAFLQEVYNVGIHGPFLVIAPLSTITNWEREFNTWTEMNTIVYHGSLASRQMIQQYEMYCKDSRGRLIPGAYKFDALITTFEMILSDCPELREIEWRCVIIDEAHRLKNRNCKLLDSLKHMDLEHKVLLTGTPLQNTVEELFSLLHFLEPSQFPSESEFLKDFGDLKTEEQVQKLQAILKPMMLRRLKEDVEKNLAPKQETIIEVELTNIQKKYYRAILEKNFSFLSKGAGHTNMPNLLNTMMELRKCCNHPYLINGAEEKILTEFREACHIIPHDFHLQAMVRSAGKLVLIDKLLPKLKAGGHKVLIFSQMVRCLDILEDYLIQRRYLYERIDGRVRGNLRQAAIDRFSKPDSDRFVFLLCTRAGGLGINLTAADTCIIFDSDWNPQNDLQAQARCHRIGQSKAVKVYRLITRNSYEREMFDKASLKLGLDKAVLQSMSGRDGNITGIQQFSKKEIEDLLRKGAYAAIMEEDDEGSKFCEEDIDQILLRRTTTITIESEGKGSTFAKASFVASENRTDISLDDPNFWQKWAKKADLDMDLLNSKNNLVIDTPRVRKQTRHFSTLKDDDLVEFSDLESEDDERPRSRRHDRHHAYGRTDCFRVEKHLLVYGWGRWRDILSHGRFKRRMTERDVETICRAILVYCLLHYRGDENIKGFIWDLISPAENGKTKELQNHSGLSIPVPRGRKGKKVKSQSTFDIHKADWIRKYNPDTLFQDESYKKHLKHQCNKVLLRVRMLYYLRQEVIGDQAEKVLGGAIASEIDIWFPVVDQLEVPTTWWDSEADKSLLIGVFKHGYEKYNTMRADPALCFLEKAGRPDDKAIAAEHRVLDNFSDIVEGVDFDKDCEDPEYKPLQGPPKDQDDEGDPLMMMDEEISVIDGDEAQVTQQPGHLFWPPGSALTARLRRLVTAYQRSYKREQMKIEAAERGDRRRRRCEAAFKLKEIARREKQQRWTRREQTDFYRVVSTFGVEYDPDTMQFHWDRFRTFARLDKKTDESLTKYFHGFVAMCRQVCRLPPAAGDEPPDPNLFIEPITEERASRTLYRIELLRRLREQVLCHPLLEDRLALCQPPGPELPKWWEPVRHDGELLRGAARHGVSQTDCNIMQDPDFSFLAARMNYMQNHQAGAPAPSLSRCSTPLLHQQYTSRTASPLPLRPDAPVEKSPEETATQVPSLESLTLKLEHEVVARSRPTPQDYEMRVSPSDTTPLVSRSVPPVKLEDEDDSDSELDLSKLSPSSSSSSSSSSSSSSTDESEDEKEEKLTDQSRSKLYDEESLLSLTMSQDGFPNEDGEQMTPELLLLQERQRASEWPKDRVLINRIDLVCQAVLSGKWPSSRRSQEMVTGGILGPGNHLLDSPSLTPGEYGDSPVPTPRSSSAASMAEEEASAVSTAAAQFTKLRRGMDEKEFTVQIKDEEGLKLTFQKHKLMANGVMGDGHPLFHKKKGNRKKLVELEVECMEEPNHLDVDLETRIPVINKVDGTLLVGEDAPRRAELEMWLQGHPEFAVDPRFLAYMEDRRKQKWQRCKKNNKAELNCLGMEPVQTANSRNGKKGHHTETVFNRVLPGPIAPESSKKRARRMRPDLSKMMALMQGGSTGSLSLHNTFQHSSSGLQSVSSLGHSSATSASLPFMPFVMGGAPSSPHVDSSTMLHHHHHHPHPHHHHHHHPGLRAPGYPSSPVTTASGTTLRLPPLQPEEDDDEDEEDDDDLSQGYDSSERDFSLIDDPMMPANSDSSEDADD

SEQ ID NO: 20716 - protein, 332 aa, Homo sapiens
MALLCYNRGCGQRFDPETNSDDACTYHPGVPVFHDALKGWSCCKRRTTDFSDFLSIVGCTKGRHNSEKPPEPVKPEVKTTEKKELCELKPKFQEHIIQAPKPVEAIKRPSPDEPMTNLELKISASLKQALDKLKLSSGNEENKKEEDNDEIKIGTSCKNGGCSKTYQGLESLEEVCVYHSGVPIFHEGMKYWSCCRRKTSDFNTFLAQEGCTKGKHMWTKKDAGKKVVPCRHDWHQTGGEVTISVYAKNSLPELSRVEANSTLLNVHIVFEGEKEFDQNVKLWGVIDVKRSYVTMTATKIEITMRKAEPMQWASLELPAAKKQEKQKDATTD

SEQ ID NO: 20717 - protein, 313 aa, Homo sapiens
MALLCYNRGCGQRFDPETNSDDACTYHPGVPVFHDALKGCTKGRHNSEKPPEPVKPEVKTTEKKELCELKPKFQEHIIQAPKPVEAIKRPSPDEPMTNLELKISASLKQALDKLKLSSGNEENKKEEDNDEIKIGTSCKNGGCSKTYQGLESLEEVCVYHSGVPIFHEGMKYWSCCRRKTSDFNTFLAQEGCTKGKHMWTKKDAGKKVVPCRHDWHQTGGEVTISVYAKNSLPELSRVEANSTLLNVHIVFEGEKEFDQNVKLWGVIDVKRSYVTMTATKIEITMRKAEPMQWASLELPAAKKQEKQKDATTD

SEQ ID NO: 20718 - protein, 180 aa, Homo sapiens
MSVLRPLDKLPGLNTATILLVGTEDALLQQLADSMLKEDCASELKVHLAKSLPLPSSVNRPRIDLIVFVVNLHSKYSLQNTEESLRHVDASFFLGKVCFLATGAGRESHCSIHRHTVVKLAHTYQSPLLYCDLEVEGFRATMAQRLVRVLQICAGHVPGVSALNLLSLLRSSEGPSLEDL

SEQ ID NO: 20719 - protein, 132 aa, Homo sapiens
MSVLRPLDKLPGLNTATILLVGTEDALLQQLADSMLKEDCASELKVHLAKSLPLPSSVNRPRIDLIVFVVNLHSKYSLQNTEESLRHVDASFFLGKVCFLATGGKYVPRLLLPTPSQGKAGAAVGFLLRHPG

SEQ ID NO: 20720 - protein, 58 aa, Homo sapiens
MGRVWDLPGVLKVEGFRATMAQRLVRVLQICAGHVPGVSALNLLSLLRSSEGPSLEDL

SEQ ID NO: 20721 - protein, 107 aa, Homo sapiens
MSVLRPLDKLPGLNTATILLVGTEDALLQQLADSMLKEDCASELKVHLAKSLPLPSSVNRPRIDLIVFVVNLHSKYSLQNTEESLRHVDASFFLGKVCFLATGGGRL

SEQ ID NO: 20722 - protein, 85 aa, Homo sapiens
MLRRKPTRLELKLDDIEEFENIRKDLETRKKQKEDVEVVGGSDGEGAIGLSSDPKSREQMINDRIGYKPQPKPNNRSSQFGSLEF

SEQ ID NO: 20723 - protein, 228 aa, Homo sapiens
MPVKGGTKCIKYLLFGFNFIFWLAGIAVLAIGLWLRFDSQTKSIFEQETNNNNSSFYTGVYILIGAGALMMLVGFLGCCGAVQESQCMLGLFFGFLLVIFAIEIAAAIWGYSHKDEVIKEVQEFYKDTYNKLKTKDEPQRETLKAIHYALNCCGLAGGVEQFISDICPKKDVLETFTVKSCPDAIKEVFDNKFHIIGAVGIGIAVVMIFGMIFSMILCCAIRRNREMV

SEQ ID NO: 20724 - protein, 362 aa, Homo sapiens
MGTEATEQVSWGHYSGDEEDAYSAEPLPELCYKADVQAFSRAFQPSVSLTVAALGLAGNGLVLATHLAARRAARSPTSAHLLQLALADLLLALTLPFAAAGALQGWSLGSATCRTISGLYSASFHAGFLFLACISADRYVAIARALPAGPRPSTPGRAHLVSVIVWLLSLLLALPALLFSQDGQREGQRRCRLIFPEGLTQTVKGASAVAQVALGFALPLGVMVACYALLGRTLLAARGPERRRALRVVVALVAAFVVLQLPYSLALLLDTADLLAARERSCPASKRKDVALLVTSGLALARCGLNPVLYAFLGLRFRQDLRRLLRGGSCPSGPQPRRGCPRRPRLSSCSAPTETHSLSWDN

SEQ ID NO: 20725 - protein, 757 aa, Homo sapiens
MSENSSDSDSSCGWTVISHEGSDIEMLNSVTPTDSCEPAPECSSLEQEELQALQIEQGESSQNGTVLMEETAYPALEETSSTIEAEEQKIPEDSIYIGTASDDSDIVTLEPPKLEEIGNQEVVIVEEAQSSEDFNMGSSSSSQYTFCQPETVFSSQPSDDESSSDETSNQPSPAFRRRRARKKTVSASESEDRLVAEQETEPSKELSKRQFSSGLNKCVILALVIAISMGFGHFYGTIQIQKRQQLVRKIHEDELNDMKDYLSQCQQEQESFIDYKSLKENLARCWTLTEAEKMSFETQKTNLATENQYLRVSLEKEEKALSSLQEELNKLREQIRILEDKGTSTELVKENQKLKQHLEEEKQKKHSFLSQRETLLTEAKMLKRELERERLVTTALRGELQQLSGSQLHGKSDSPNVYTEKKEIAILRERLTELERKLTFEQQRSDLWERLYVEAKDQNGKQGTDGKKKGGRGSHRAKNKSKETFLGSVKETFDAMKNSTKEFVRHHKEKIKQAKEAVKENLKKFSDSVKSTFRHFKDTTKNIFDEKGNKRFGATKEAAEKPRTVFSDYLHPQYKAPTENHHNRGPTMQNDGRKEKPVHFKEFRKNTNSKKCSPGHDCRENSHSFRKACSGVFDCAQQESMSLFNTVVNPIRMDEFRQIIQRYMLKELDTFCHWNELDQFINKFFLNGVFIHDQKLFTDFVNDVKDYLRNMKEYEVDNDGVFEKLDEYIYRHFFGHTFSPPYGPRSVYIKPCHYSSL

SEQ ID NO: 20726 - protein, 613 aa, Homo sapiens
MSTFFLIVFSSQPSDDESSSDETSNQPSPAFRRRRARKKTVSASESEDRLVAEQETEPSKELSKRQFSSGLNKCVILALVIAISMGFGHFYGTIQIQKRQQLVRKIHEDELNDMKDYLSQCQQEQESFIDYKSLKENLARCWTLTEAEKMSFETQKTNLATENQYLRVSLEKEEKALSSLQEELNKLREQIRILEDKGTSTELVKENQKLKQHLEEEKQKKHSFLSQRETLLTEAKMLKRELERERLVTTALRGELQQLSGSQLHGKSDSPNVYTEKKEIAILRERLTELERKLTFEQQRSDLWERLYVEAKDQNGKQGTDGKKKGGRGSHRAKNKSKETFLGSVKETFDAMKNSTKEFVRHHKEKIKQAKEAVKENLKKFSDSVKSTFRHFKDTTKNIFDEKGNKRFGATKEAAEKPRTVFSDYLHPQYKAPTENHHNRGPTMQNDGRKEKPVHFKEFRKNTNSKKCSPGHDCRENSHSFRKACSGVFDCAQQESMSLFNTVVNPIRMDEFRQIIQRYMLKELDTFCHWNELDQFINKFFLNGVFIHDQKLFTDFVNDVKDYLRNMKEYEVDNDGVFEKLDEYIYRHFFGHTFSPPYGPRSVYIKPCHYSSL

SEQ ID NO: 20727 - protein, 424 aa, Homo sapiens
MSENSSDSDSSCGWTVISHEGSDIEMLNSVTPTDSCEPAPECSSLEQEELQALQIEQGESSQNGTVLMEETAYPALEETSSTIEAEEQKIPEDSIYIGTASDDSDIVTLEPPKLEEIGNQEVVIVEEAQSSEDFNMGSSSSSQYTFCQPETVFSSQPSDDESSSDETSNQPSPAFRRRRARKKTVSASESEDRLVAEQETEPSKELSKRQFSSGLNKCVILALVIAISMGFGHFYGTIQIQKRQQLVRKIHEDELNDMKDYLSQCQQEQESFIDYKSLKENLARCWTLTEAEKMSFETQKTNLATENQYLRKLFTDFVNDVKDYLRNMKEYEVDNDGVFEKLDEYIYRHFFGHTFSPPYGPSRPDKKQRMVNIENSRHRKQEQKHLQPQPYKREGKWHKYGRTNGRQMANLEIELGQLPFDPQY

SEQ ID NO: 20728 - protein, 598 aa, Homo sapiens
MSENSSDSDSSCGWTVISHEGSDIEMLNSVTPTDSCEPAPECSSLEQEELQALQIEQGESSQNGTVLMEETAYPALEETSSTIEAEEQKIPEDSIYIGTASDDSDIVTLEPPKLEEIGNQEVVIVEEAQSSEDFNMGSSSSSQYTFCQPETVFSSQPSDDESSSDETSNQPSPAFRRRRARKKTVSASESEDRLVAEQETEPSKELSKRQFSSGLNKCVILALVIAISMGFGHFYGTIQIQKRQQLVRKIHEDELNDMKDYLSQCQQEQESFIDYKSLKENLARCWTLTEAEKMSFETQKTNLATENQYLRVSLEKEEKALSSLQEELNKLREQIRILEDKGTSTELVKENQKLKQHLEEEKQKKHSFLSQRETLLTEAKMLKRELERERLVTTALRGELQQLSGSQLHGKSDSPNVYTEKKEIAILRERLTELERKLTFEQQRSDLWERLYVEAKDQNGKQGTDGKKKGGRGSHRAKNKSKETFLGSVKETFDAMKNSTKEFVRHHKEKIKQAKEAVKENLKKFSDSVKSTFRHFKDTTKNIFDEKGNKRFGATKEAAEKPRTVFSDYLHPQYKAPTENHSRPYYAKRWKERKASSL

SEQ ID NO: 20729 - protein, 807 aa, Homo sapiens
MSENSSDSDSSCGWTVISHEGSDIEMLNSVTPTDSCEPAPECSSLEQEELQALQIEQGESSQNGTVLMEETAYPALEETSSTIEAEEQKIPEDSIYIGTASDDSDIVTLEPPKLEEIGNQEVVIVEEAQSSEDFNMGSSSSSQYTFCQPETVFSSQPSDDESSSDETSNQPSPAFRRRRARKKTVSASESEDRLVAEQETEPSKELSKRQFSSGLNKCVILALVIAISMGFGHFYGTIQIQKRQQLVRKIHEDELNDMKDYLSQCQQEQESFIDYKSLKENLARCWTLTEAEKMSFETQKTNLATENQYLRVSLEKEEKALSSLQEELNKLREQIRILEDKGTSTELVKENQKLKQHLEEEKQKKHSFLSQRETLLTEAKMLKRELERERLVTTALRGELQQLSGSQLHGKSDSPNVYTEKKEIAILRERLTELERKLTFEQQRSDLWERLYVEAKDQNGKQGTDGKKKGGRGSHRAKNKSKETFLGSVKETFDAMKNSTKEFVRHHKEKIKQAKEAVKENLKKFSDSVKSTFRHFKDTTKNIFDEKGNKRFGATKEAAEKPRTVFSDYLHPQYKAPTENHHNRGPTMQNDGRKEKPVHFKEFRKNTNSKKCSPGHDCRENSHSFRKACSGVFDCAQQESMSLFNTVVNPIRMDEFRQIIQRYMLKELDTFCHWNELDQFINKFFLNGVFIHDQKLFTDFVNDVKDYLRNMKEYEVDNDGVFEKLDEYIYRHFFGHTFSPPYGPSRPDKKQRMVNIENSRHRKQEQKHLQPQPYKREGKWHKYGRTNGRQMANLEIELGQLPFDPQY

SEQ ID NO: 20730 - protein, 360 aa, Homo sapiens
MNPTDIADTTLDESIYSNYYLYESIPKPCTKEGIKAFGELFLPPLYSLVFVFGLLGNSVVVLVLFKYKRLRSMTDVYLLNLAISDLLFVFSLPFWGYYAADQWVFGLGLCKMISWMYLVGFYSGIFFVMLMSIDRYLAIVHAVFSLRARTLTYGVITSLATWSVAVFASLPGFLFSTCYTERNHTYCKTKYSLNSTTWKVLSSLEINILGLVIPLGIMLFCYSMIIRTLQHCKNEKKNKAVKMIFAVVVLFLGFWTPYNIVLFLETLVELEVLQDCTFERYLDYAIQATETLAFVHCCLNPIIYFFLGEKFRKYILQLFKTCRGLFVLCQYCGLLQIYSADTPSSSYTQSTMDHDLHDAL

SEQ ID NO: 20731 - protein, 294 aa, Homo sapiens
MVPGEEPARELMAVLLTPRFRRLVSQNELPGPGLNGPSSRNRRDGFCRKRRTGCSGPFQATQLWDGIIHSLQAQVEIKRRRHHLQTYKDCFTGSDAVDVVLSHLMQNTCLSSNDISCLKGVHLCQVLMNHKVFEPVGMKKLFKKEKELEFEDSNISLYRFLGNKSSYDCCKRQKDAENEFNETLRPGYEMISNPLAQEIGEERIEELIHTINGNPALCPNITVQKPFLRLSKEDVWKEQTLLCLLQLIHLPFLDNILEPPVKTQNLQLNKEEDLVITNTCLDRELIPSLCLPEK

SEQ ID NO: 20732 - protein, 57 aa, Homo sapiens
MVPGEEPARELMAVLLTPRFRRLVSQNELPGPGLNGPSSRNRRDGFCRKRRTDQDMK

SEQ ID NO: 20733 - protein, 341 aa, Homo sapiens
MGNTTSCCVSSSPKLRRNAHSRLESYRPDTDLSREDTGCNLQHISDRENIDDLNMEFNPSDHPRASTIFLSKSQTDVREKRKSLFINHHPPGQIARKYSSCSTIFLDDSTVSQPNLKYTIKCVALAIYYHIKNRDPDGRMLLDIFDENLHPLSKSEVPPDYDKHNPEQKQIYRFVRTLFSAAQLTAECAIVTLVYLERLLTYAEIDICPANWKRIVLGAILLASKVWDDQAVWNVDYCQILKDITVEDMNELERQFLELLQFNINVPSSVYAKYYFDLRSLAEANNLSFPLEPLSRERAHKLEAISRLCEDKYKDLRRSARKRSASADNLTLPRWSPAIIS

SEQ ID NO: 20734 - protein, 316 aa, Homo sapiens
MGNTTSCCVSSSPKLRRNAHSRLESYRPDTDLSREDTGCNLQHISDRENIDVREKRKSLFINHHPPGQIARKYSSCSTIFLDDSTVSQPNLKYTIKCVALAIYYHIKNRDPDGRMLLDIFDENLHPLSKSEVPPDYDKHNPEQKQIYRFVRTLFSAAQLTAECAIVTLVYLERLLTYAEIDICPANWKRIVLGAILLASKVWDDQAVWNVDYCQILKDITVEDMNELERQFLELLQFNINVPSSVYAKYYFDLRSLAEANNLSFPLEPLSRERAHKLEAISRLCEDKYKDLRRSARKRSASADNLTLPRWSPAIIS

SEQ ID NO: 20735 - protein, 287 aa, Homo sapiens
MEFNPSDHPRASTIFLSKSQTDVREKRKSLFINHHPPGQIARKYSSCSTIFLDDSTVSQPNLKYTIKCVALAIYYHIKNRDPDGRMLLDIFDENLHPLSKSEVPPDYDKHNPEQKQIYRFVRTLFSAAQLTAECAIVTLVYLERLLTYAEIDICPANWKRIVLGAILLASKVWDDQAVWNVDYCQILKDITVEDMNELERQFLELLQFNINVPSSVYAKYYFDLRSLAEANNLSFPLEPLSRERAHKLEAISRLCEDKYKDLRRSARKRSASADNLTLPRWSPAIIS

SEQ ID NO: 20736 - protein, 481 aa, Homo sapiens
MAAAPGGSAQPAGPGPRLGFSTADSGVGMSGLNPGPAVPMKDHDAIKLFVGQIPRGLDEQDLKPLFEEFGRIYELTVLKDRLTGLHKGCAFLTYCARDSALKAQSALHEQKTLPGMNRPIQVKPAASEGRGEDRKLFVGMLGKQQGEEDVRRLFQPFGHIEECTVLRSPDGTSKGCAFVKFGSQGEAQAAIRGLHGSRTMAGASSSLVVKLADTDRERALRRMQQMAGHLGAFHPAPLPLGACGAYTTAILQHQAALLAAAQGPGLGPVAAVAAQMQHVAAFSLVAAPLLPAAAANSPPGSGPGTLPGLPAPIGVNGFGPLTPQTNGQPGSDTLYNNGLSPYPAQSPGVADPLQQAYAGMHHYAAAYPSAYAPVSTAFPQQPSALPQQQREGPEGCNLFIYHLPQEFGDAELIQTFLPFGAVVSAKVFVDRATNQSKCFGFVSFDNPTSAQTAIQAMNGFQIGMKRLKVQLKRPKDANRPY

SEQ ID NO: 20737 - protein, 368 aa, Homo sapiens
MISDPPSNNSWNSVLYLLEDRKLFVGMLGKQQGEEDVRRLFQPFGHIEECTVLRSPDGTSKGCAFVKFGSQGEAQAAIRGLHGSRTMAGASSSLVVKLADTDRERALRRMQQMAGHLGAFHPAPLPLGACGAYTTAILQHQAALLAAAQGPGLGPVAAVAAQMQHVAAFSLVAAPLLPAAAANSPPGSGPGTLPGLPAPIGVNGFGPLTPQTNGQPGSDTLYNNGLSPYPAQSPGVADPLQQAYAGMHHYAAAYPSAYAPVSTAFPQQPSALPQQQREGPEGCNLFIYHLPQEFGDAELIQTFLPFGAVVSAKVFVDRATNQSKCFGFVSFDNPTSAQTAIQAMNGFQIGMKRLKVQLKRPKDANRPY

SEQ ID NO: 20738 - protein, 454 aa, Homo sapiens
MAAAPGGSAQPAGPGPRLGFSTADSGVGMSGLNPGPAVPMKDHDAIKLFVGQIPRGLDEQDLKPLFEEFGRIYELTVLKDRLTGLHKGCAFLTYCARDSALKAQSALHEQKTLPGMNRPIQVKPAASEGRGEDRKLFVGMLGKQQGEEDVRRLFQPFGHIEECTVLRSPDGTSKGCAFVKFGSQGEAQAAIRGLHGSRTMAGASSSLVVKLADTDRERALRRMQQMAGHLGAFHPAPLPLGACGAYTTAILQHQAALLAAAQGPGLGPVAAVAAQMQHVAAFSLVAAPLLPAAAANSPPGSGPGTLPGLPAPIGVNGFGPLTPQTNGQPGSDTLYNNGLSPYPAQSPGVADPLQQAYAGMHHYAGPEGCNLFIYHLPQEFGDAELIQTFLPFGAVVSAKVFVDRATNQSKCFGFVSFDNPTSAQTAIQAMNGFQIGMKRLKVQLKRPKDANRPY

SEQ ID NO: 20739 - protein, 344 aa, Homo sapiens
MNRPIQVKPAASEGRGEDRKLFVGMLGKQQGEEDVRRLFQPFGHIEECTVLRSPDGTSKGCAFVKFGSQGEAQAAIRGLHGSRTMAGASSSLVVKLADTDRERALRRMQQMAGHLGAFHPAPLPLGACGAYTTAILQHQAALLAAAQGPGLGPVAAVAAQMQHVAAFSLVAAPLLPAAANSPPGSGPGTLPGLPAPIGVNGFGPLTPQTNGQPGSDTLYNNGLSPYPAAYPSAYAPVSTAFPQQPSALPQQQREGPEGCNLFIYHLPQEFGDAELIQTFLPFGAVVSAKVFVDRATNQSKCFGFVSFDNPTSAQTAIQAMNGFQIGMKRLKVQLKRPKDANRPY

SEQ ID NO: 20740 - protein, 226 aa, Homo sapiens
MPTTKKTLMFLSSFFTSLGSFIVICSILGTQAWITSTIAVRDSASNGSIFITYGLFRGESSEELSHGLAEPKKKFAVLEILNNSSQKTLHSVTILFLVLSLITSLLSSGFTFYNSISNPYQTFLGPTGVYTWNGLGASFVFVTMILFVANTQSNQLSEELFQMLYPATTSKGTTHSYGYSFWLILLVILLNIVTVTIIIFYQKARYQRKQEQRKPMEYAPRDGILF

SEQ ID NO: 20741 - protein, 158 aa, Homo sapiens
MHSQNIVLVLEILNNSSQKTLHSVTILFLVLSLITSLLSSGFTFYNSISNPYQTFLGPTGVYTWNGLGASFVFVTMILFVANTQSNQLSEELFQMLYPATTSKGTTHSYGYSFWLILLVILLNIVTVTIIIFYQKARYQRKQEQRKPMEYAPRDGILF

SEQ ID NO: 20742 - protein, 128 aa, Homo sapiens
MAWRVPGVRPASTFFPQVLRASSELPNRLPEGSTVGPKPDSSWEAGSQGNWGLTSSGAGQDSSAQKLGILSVQISLKIWTWEKPSGWGHLHAAVTGASCCSPLSQGGAICLVTAPQDKPDCSPCTSGH

SEQ ID NO: 20743 - protein, 422 aa, Homo sapiens
MPAGRRGPAAQSARRPPPLLPLLLLLCVLGAPRAGSGAHTAVISPQDPTLLIGSSLLATCSVHGDPPGATAEGLYWTLNGRRLPPELSRVLNASTLALALANLNGSRQRSGDNLVCHARDGSILAGSCLYVGLPPEKPVNISCWSKNMKDLTCRWTPGAHGETFLHTNYSLKYKLRWYGQDNTCEEYHTVGPHSCHIPKDLALFTPYEIWVEATNRLGSARSDVLTLDILDVVTTDPPPDVHVSRVGGLEDQLSVRWVSPPALKDFLFQAKYQIRYRVEDSVDWKVVDDVSNQTSCRLAGLKPGTVYFVQVRCNPFGIYGSKKAGIWSEWSHPTAASTPRSERPGPGGGACEPRGGEPSSGPVRRELKQFLGWLKKHAYCSNLSFRLYDQWRAWMQKSHKTRNQDEGILPSGRRGTARGPAR

SEQ ID NO: 20744 - protein, 525 aa, Homo sapiens
MAGLWLGLVWQKLLLWGAASALSLAGASLVLSLLQRVASYARKWQQMRPIPTVARAYPLVGHALLMKPDGREFFQQIIEYTEEYRHMPLLKLWVGPVPMVALYNAENVEVILTSSKQIDKSSMYKFLEPWLGLGLLTSTGNKWRSRRKMLTPTFHFTILEDFLDIMNEQANILVKKLEKHINQEAFNCFFYITLCALDIICETAMGKNIGAQSNDDSEYVRAVYRMSEMIFRRIKMPWLWLDLWYLMFKEGWEHKKSLQILHTFTNSVIAERANEMNANEDCRGDGRGSAPSKNKRRAFLDLLLSVTDDEGNRLSHEDIREEVDTFMFEGHDTTAAAINWSLYLLGSNPEVQKKVDHELDDVFGKSDRPATVEDLKKLRYLECVIKETLRLFPSVPLFARSVSEDCEVAGYRVLKGTEAVIIPYALHRDPRYFPNPEEFQPERFFPENAQGRHPYAYVPFSAGPRNCIGQKFAVMEEKTILSCILRHFWIESNQKREELGLEGQLILRPSNGIWIKLKRRNADER

SEQ ID NO: 20745 - protein, 503 aa, Homo sapiens
MAGLWLGLVWQKLLLWGAASALSLAGASLVLSLLQRVASYALLMKPDGREFFQQIIEYTEEYRHMPLLKLWVGPVPMVALYNAENVEVILTSSKQIDKSSMYKFLEPWLGLGLLTSTGNKWRSRRKMLTPTFHFTILEDFLDIMNEQANILVKKLEKHINQEAFNCFFYITLCALDIICETAMGKNIGAQSNDDSEYVRAVYRMSEMIFRRIKMPWLWLDLWYLMFKEGWEHKKSLQILHTFTNSVIAERANEMNANEDCRGDGRGSAPSKNKRRAFLDLLLSVTDDEGNRLSHEDIREEVDTFMFEGHDTTAAAINWSLYLLGSNPEVQKKVDHELDDVFGKSDRPATVEDLKKLRYLECVIKETLRLFPSVPLFARSVSEDCEVAGYRVLKGTEAVIIPYALHRDPRYFPNPEEFQPERFFPENAQGRHPYAYVPFSAGPRNCIGQKFAVMEEKTILSCILRHFWIESNQKREELGLEGQLILRPSNGIWIKLKRRNADER

SEQ ID NO: 20746 - protein, 134 aa, Homo sapiens
MDFVMKQALGGATKDMGKMLGGEEEKDPDAQKKEEERQEALRQQEEERKAKHARMEAEREKVRQQIRDKYGLKKKEEKEAEEKAALEQPCEGSLTRPKKAIPAGCGDEEEEEEESILDTVLKYLPGPLQDMFKK

SEQ ID NO: 20747 - protein, 509 aa, Homo sapiens
MEFSWLETRWARPFYLAFVFCLALGLLQAIKLYLRRQRLLRDLRPFPAPPTHWFLGHQKFIQDDNMEKLEEIIEKYPRAFPFWIGPFQAFFCIYDPDYAKTLLSRTDPKSQYLQKFSPPLLGKGLAALDGPKWFQHRRLLTPGFHFNILKAYIEVMAHSVKMMLDKWEKICSTQDTSVEVYEHINSMSLDIIMKCAFSKETNCQTNSTHDPYAKAIFELSKIIFHRLYSLLYHSDIIFKLSPQGYRFQKLSRVLNQYTDTIIQERKKSLQAGVKQDNTPKRKYQDFLDIVLSAKDESGSSFSDIDVHSEVSTFLLAGHDTLAASISWILYCLALNPEHQERCREEVRGILGDGSSITWDQLGEMSYTTMCIKETCRLIPAVPSISRDLSKPLTFPDGCTLPAGITVVLSIWGLHHNPAVWKNPKVFDPLRFSQENSDQRHPYAYLPFSAGSRNCIGQEFAMIELKVTIALILLHFRVTPDPTRPLTFPNHFILKPKNGMYLHLKKLSEC

SEQ ID NO: 20748 - protein, 508 aa, Homo sapiens
MMWGGGLDLCPMPGQLKFPPCLSRCLLWEPPSLYLTQPTSSLAEPQALICMTSSSSGLFIQDDNMEKLEEIIEKYPRAFPFWIGPFQAFFCIYDPDYAKTLLSRTDPKSQYLQKFSPPLLGKGLAALDGPKWFQHRRLLTPGFHFNILKAYIEVMAHSVKMMLDKWEKICSTQDTSVEVYEHINSMSLDIIMKCAFSKETNCQTNSTHDPYAKAIFELSKIIFHRLYSLLYHSDIIFKLSPQGYRFQKLSRVLNQYTDTIIQERKKSLQAGVKQDNTPKRKYQDFLDIVLSAKDESGSSFSDIDVHSEVSTFLLAGHDTLAASISWILYCLALNPEHQERCREEVRGILGDGSSITWDQLGEMSYTTMCIKETCRLIPAVPSISRDLSKPLTFPDGCTLPAGITVVLSIWGLHHNPAVWKNPKVFDPLRFSQENSDQRHPYAYLPFSAGSRNCIGQEFAMIELKVTIALILLHFRVTPDPTRPLTFPNHFILKPKNGMYLHLKKLSEC

SEQ ID NO: 20749 - protein, 444 aa, Homo sapiens
MEKLEEIIEKYPRAFPFWIGPFQAFFCIYDPDYAKTLLSRTDPKSQYLQKFSPPLLGKGLAALDGPKWFQHRRLLTPGFHFNILKAYIEVMAHSVKMMLDKWEKICSTQDTSVEVYEHINSMSLDIIMKCAFSKETNCQTNSTHDPYAKAIFELSKIIFHRLYSLLYHSDIIFKLSPQGYRFQKLSRVLNQYTDTIIQERKKSLQAGVKQDNTPKRKYQDFLDIVLSAKDESGSSFSDIDVHSEVSTFLLAGHDTLAASISWILYCLALNPEHQERCREEVRGILGDGSSITWDQLGEMSYTTMCIKETCRLIPAVPSISRDLSKPLTFPDGCTLPAGITVVLSIWGLHHNPAVWKNPKVFDPLRFSQENSDQRHPYAYLPFSAGSRNCIGQEFAMIELKVTIALILLHFRVTPDPTRPLTFPNHFILKPKNGMYLHLKKLSEC

SEQ ID NO: 20750 - protein, 179 aa, Homo sapiens
MQEVIAGLERFTFAFEKDVEMQKGTGLLPFQGMDKSASAVCNFFTKGLCEKGKLCPFRHDRGEKMVVCKHWLRGLCKKGDHCKFLHQYDLTRMPECYFYSKFGDCSNKECSFLHVKPAFKSQDCPWYDQGFCKDGPLCKYRHVPRIMCLNYLVGFCPEGPKCQFAQKIREFKLLPGSKI

SEQ ID NO: 20751 - protein, 505 aa, Homo sapiens
MEPSWLQELMAHPFLLLILLCMSLLLFQVIRLYQRRRWMIRALHLFPAPPAHWFYGHKEFYPVKEFEVYHKLMEKYPCAVPLWVGPFTMFFSVHDPDYAKILLKRQDPKSAVSHKILESWVGRGLVTLDGSKWKKHRQIVKPGFNISILKIFITMMSESVRMMLNKWEEHIAQNSRLELFQHVSLMTLDSIMKCAFSHQGSIQLDSTLDSYLKAVFNLSKISNQRMNNFLHHNDLVFKFSSQGQIFSKFNQELHQFTEKVIQDRKESLKDKLKQDTTQKRRWDFLDILLSAKSENTKDFSEADLQAEVKTFMFAGHDTTSSAISWILYCLAKYPEHQQRCRDEIRELLGDGSSITWEHLSQMPYTTMCIKECLRLYAPVVNISRLLDKPITFPDGRSLPAGITVFINIWALHHNPYFWEDPQVFNPLRFSRENSEKIHPYAFIPFSAGLRNCIGQHFAIIECKVAVALTLLRFKLAPDHSRPPQPVRQVVLKSKNGIHVFAKKVC

SEQ ID NO: 20752 - protein, 281 aa, Homo sapiens
MAFSDLTSRTVHLYDNWIKDADPRVEDWLLMSSPLPQTILLGFYVYFVTSLGPKLMENRKPFELKKAMITYNFFIVLFSVYMCYEFVMSGWGIGYSFRCDIVDYSRSPTALRMARTCWLYYFSKFIELLDTIFFVLRKKNSQVTFLHVFHHTIMPWTWWFGVKFAAGGLGTFHALLNTAVHVVMYSYYGLSALGPAYQKYLWWKKYLTSLQLVQFVIVAIHISQFFFMEDCKYQFPVFACIIMSYSFMFLLLFLHFWYRAYTKGQRLPKTVKNGTCKNKDN

SEQ ID NO: 20753 - protein, 1083 aa, Homo sapiens
MKGTRAIGSVPERSPAGVDLSLTGLPPPVSRRPGSAATTKPIVRSVSVVTGSEQKRKVLEATGPGGSQAINNLRRSNSTTQVSQPRSGSPRPTEPTDFLMLFEGSPSGKKRPASLSTAPSEKGATWNVLDDQPRGFTLPSNARSSSALDSPAGPRRKECTVALAPNFTANNRSNKGAVGNCVTTMVHNRYTPSERAPPLKSSNQTAPSLNNIIKAATCEGSESSGFGKLPKNVSSATHSARNNTGGSTGLPRRKEVTEEEAERFIHQVNQATVTIQRWYRHQVQRRGAGAARLEHLLQAKREEQRQRSGEGTLLDLHQQKEAARRKAREEKARQARRAAIQELQQKRALRAQKASTAERGPPENPRETRVPGMRQPAQELSPTPGGTAHQALKANNTGGGLPAAGPGDRCLPTSDSSPEPQQPPEDRTQDVLAQDAAGDNLEMMAPSRGSAKSRGPLEELLHTLQLLEKEPDVLPRPRTHHRGRYAWASEVTTEDDASSLTADNLEKFGKLSAFPEPPEDGTLLSEAKLQSIMSFLDEMEKSGQDQLDSQQEGWVPEAGPGPLELGSEVSTSVMRLKLEVEEKKQAMLLLQRALAQQRDLTARRVKETEKALSRQLQRQREHYEATIQRHLAFIDQLIEDKKVLSEKCEAVVAELKQEDQRCTERVAQAQAQHELEIKKLKELMSATEKARREKWISEKTKKIKEVTVRGLEPEIQKLIARHKQEVRRLKSLHEAELLQSDERASQRCLRQAEELREQLEREKEALGQQERERARQRFQQHLEQEQWALQQQRQRLYSEVAEERERLGQQAARQRAELEELRQQLEESSSALTRALRAEFEKGREEQERRHQMELNTLKQQLELERQAWEAGRTRKEEAWLLNREQELREEIRKGRDKEIELVIHRLEADMALAKEESEKAAESRIKRLRDKYEAELSELEQSERKLQERCSELKGQLGEAEGENLRLQGLVRQKERALEDAQAVNEQLSSERSNLAQVIRQEFEDRLAASEEETRQAKAELATLQARQQLELEEVHRRVKTALARKEEAVSSLRTQHEAAVKRADHLEELLEQHRRPTPSTK

SEQ ID NO: 20754 - protein, 1080 aa, Homo sapiens
MKGTRAIGSVPERSPAGVDLSLTGLPPPVSRRPGSAATTKPIVRSVSVVTGSEQKRKVLEATGPGGSQAINNLRRSNSTTQVSQPRSGSPRPTEPTDFLMLFEGSPSGKKRPASLSTAPSEKGATWNVLDDQPRGFTLPSNARSSSALDSPAGPRRKECTVALAPNFTANNRSNKGAVGNCVTTMVHNRYTPSERAPPLKSSNQTAPSLNNIIKAATCEGSESSGFGKLPKNVSSATHSARNNTGGSTGLPRRKEVTEEEAERFIHQVNQATVTIQRWYRHQVQRRGAGAARLEHLLQAKREEQRQRSGEGTLLDLHQQKEAARRKAREEKARQARRAAIQELQQKRALRAQKASTAERGPPENPRETRVPGMRQPAQELSPTPGGTAHQALKANNTGGGLPAAGPGDRCLPTSDSSPEPQQPPEDRTQDVLAQDAAGDNLEMMAPSRGSAKSRGPLEELLHTLQLLEKEPDVLPRPRTHHRGRYAWASEEDDASSLTADNLEKFGKLSAFPEPPEDGTLLSEAKLQSIMSFLDEMEKSGQDQLDSQQEGWVPEAGPGPLELGSEVSTSVMRLKLEVEEKKQAMLLLQRALAQQRDLTARRVKETEKALSRQLQRQREHYEATIQRHLAFIDQLIEDKKVLSEKCEAVVAELKQEDQRCTERVAQAQAQHELEIKKLKELMSATEKARREKWISEKTKKIKEVTVRGLEPEIQKLIARHKQEVRRLKSLHEAELLQSDERASQRCLRQAEELREQLEREKEALGQQERERARQRFQQHLEQEQWALQQQRQRLYSEVAEERERLGQQAARQRAELEELRQQLEESSSALTRALRAEFEKGREEQERRHQMELNTLKQQLELERQAWEAGRTRKEEAWLLNREQELREEIRKGRDKEIELVIHRLEADMALAKEESEKAAESRIKRLRDKYEAELSELEQSERKLQERCSELKGQLGEAEGENLRLQGLVRQKERALEDAQAVNEQLSSERSNLAQVIRQEFEDRLAASEEETRQAKAELATLQARQQLELEEVHRRVKTALARKEEAVSSLRTQHEAAVKRADHLEELLEQHRRPTPSTK

SEQ ID NO: 20755 - protein, 1044 aa, Homo sapiens
MKGTRAIGSVPERSPAGVDLSLTGLPPPVSRRPGSAATTKPIVRSVSVVTGSEQKRKVLEATGPGGSQAINNLRRSNSTTQVSQPRSGSPRPTEPTDFLMLFEGSPSGKKRPASLSTAPSEKGATWNVLDDQPRGFTLPSNARSSSALDSPAGPRRKECTVALAPNFTANNRSNKGAVGNCVTTMVHNRYTPSERAPPLKSSNQTAPSLNNIIKAATCEGSESSGFGKLPKNVSSATHSARNNTGGSTGLPRRKEVTEEEAERFIHQVNQATVTIQRWYRHQVQRRGAGAARLEHLLQAKREEQRQRSGEGTLLDLHQQKEAARRKAREEKARQARRAAIQELQQKRALRAQKASTAERGPPENPRETRVPGMRQPAQELSPTPGGTAHQALKANNTGGGLPAAGPGDRCLPTSDSSPEPQQPPEDRTQDVLAQDAAGDNLEMMAPSRGSAKSRGPLEELLHTLQLLEKEPDVLPRPRTHHRGRYAWASEEDDASSLTADNLEKFGKLSAFPEPPEDGTLLSEAKLQSIMSFLDEMEKSGQDQLDSQQEGWVPEAGPGPLELGSEVSTSVMRLKLEVEEKKQAMLLLQRALAQQRDLTARRVKETEKALSRQLQRQREHYEATIQRHLAFIDQLIEDKKVLSEKCEAVVAELKQEDQRCTERVAQAQAQHELEIKKLKELMSATEKARREKWISEKTKKIKEVTVRGLEPEIQKLIARHKQEVRRLKSLHEAELLQSDERASQRCLRQAEELREQLEREKEALGQQERERARQRQRAELEELRQQLEESSSALTRALRAEFEKGREEQERRHQMELNTLKQQLELERQAWEAGRTRKEEAWLLNREQELREEIRKGRDKEIELVIHRLEADMALAKEESEKAAESRIKRLRDKYEAELSELEQSERKLQERCSELKGQLGEAEGENLRLQGLVRQKERALEDAQAVNEQLSSERSNLAQVIRQEFEDRLAASEEETRQAKAELATLQARQQLELEEVHRRVKTALARKEEAVSSLRTQHEAAVKRADHLEELLEQHRRPTPSTK

SEQ ID NO: 20756 - protein, 210 aa, Homo sapiens
MQRPEAWPRPHPGEGAAAAQAGGPAPPARAGEPSGLRLQEPSLYTIKAVFILDNDGRRLLAKYYDDTFPSMKEQMVFEKNVFNKTSRTESEIAFFGGMTIVYKNSIDLFLYVVGSSYENELMLMSVLTCLFESLNHMLRKNVEKRWLLENMDGAFLVLDEIVDGGVILESDPQQVIQKVNFRADDGGLTEQSVAQVLQSAKEQIKWSLLK

SEQ ID NO: 20757 - protein, 117 aa, Homo sapiens
MTVLEAVLEIQAITGSRLLSMVPGPARPPGSCWDPTQCTRTWLLSHTPRRRWISGLPRASCRLGEEPPPLPYCDQAYGEELSIRHRETWAWLSRTDTAWPGAPGVKQARILGELLLV

SEQ ID NO: 20758 - protein, 143 aa, Homo sapiens
MAMHFIFSDTAVLLFDFWSVHSPAGMALSVLVLLLLAVLYEGIKVGKAKLLNQVLVNLPTSISQQTIAETDGDSAGSDSFPVGRTHHRWYLCHFGQSLIHVIQVVIGYFIMLAVMSYNTWIFLGVVLGSAVGYYLAYPLLSTA

SEQ ID NO: 20759 - protein, 406 aa, Homo sapiens
MAAAVRQDLAQLMNSSGSHKDLAGKYRQILEKAIQLSGAEQLEALKAFVEAMVNENVSLVISRQLLTDFCTHLPNLPDSTAKEIYHFTLEKIQPRVISFEEQVASIRQHLASIYEKEEDWRNAAQVLVGIPLETGQKQYNVDYKLETYLKIARLYLEDDDPVQAEAYINRASLLQNESTNEQLQIHYKVCYARVLDYRRKFIEAAQRYNELSYKTIVHESERLEALKHALHCTILASAGQQRSRMLATLFKDERCQQLAAYGILEKMYLDRIIRGNQLQEFAAMLMPHQKATTADGSSILDRAVIEHNLLSASKLYNNITFEELGALLEIPAAKAEKIASQMITEGRMNGFIDQIDGIVHFETREALPTWDKQIQSLCFQVNNLLEKISQTAPEWTAQAMEAQMAQ

SEQ ID NO: 20760 - protein, 352 aa, Homo sapiens
MAAAVRQDLAQLMNSSGSHKDLAGKYRQILEKAIQLSGAEQLEALKAFVEAMVNENVSLVISRQLLTDFCTHLPNLPDSTAKEIYHFTLEKIQPRVISFEEQVASIRQHLASIYEKEEDWRNAAQVLVGIPLETGQKQYNVDYKLETYLKIARLYLEDDDPVQAEAYINRASLLQNESTNEQLQIHYKVCYARVLDYRRKFIEAAQRYNELSYKTIVHESERLEALKHALHCTILASAGQQRSRMLATLFKDERCQQLAAYGILEKMYLDRIIRGNQLQEFAAMLMPHQKATTADGSSILDRAVIEHNLLSASKLYNNITFEELGALLEIPAAKHEKPCQRGISRSNHFVSK

SEQ ID NO: 20761 - protein, 351 aa, Homo sapiens
MTSPCSPPLKPPISPPKTPVPQASSIPSPPLPPSPLDFSALPSPPWSQQTPVPPPLPLPPPPAATGPAPRHVFGLEKSQLLKEAFDKAGPVPKGREDVKRLLKLHKDRFRGDLRWILFCADLPSLIQEGPQCGLVALWMAGTLLSPPSGVPLERLIRVATERGYTAQGEMFSVADMGRLAQEVLGCQAKLLSGGLGGPNRDLVLQHLVTGHPLLIPYDEDFNHEPCQRKGHKAHWAVSAGVLLGVRAVPSLGYTEDPELPGLFHPVLGTPCQPPSLPEEGSPGAVYLLSKQGKSWHYQLWDYDQVRESNLQLTDFSPSRATDGRVYVVPVGGVRAGLCGQALLLTPQDCSH

SEQ ID NO: 20762 - protein, 139 aa, Homo sapiens
MRAGGLVDGRYSPVAPQWRPPGETHTGGHGKRLHGPGRDVLSTSYDEDFNHEPCQRKGHKAHWAVSAGVLLGVRAVPSLGYTEDPELPGLFHPVLGTPCQPPSLPEEGSPGAVYLLSKQGKSWHYQLWDYDQGPPLSSH

SEQ ID NO: 20763 - protein, 179 aa, Homo sapiens
MRAGGLVDGRYSPVAPQWRPPGETHTGGHGKRLHGPGRDVLSTSYDEDFNHEPCQRKGHKAHWAVSAGVLLGVRAVPSLGYTEDPELPGLFHPVLGTPCQPPSLPEEGSPGAVYLLSKQGKSWHYQLWDYDQVRESNLQLTDFSPSRATDGRVYVVPVGGVRAGLCGQALLLTPQDCSH

SEQ ID NO: 20764 - protein, 693 aa, Homo sapiens
MATSGANGPGSATASASNPRKFSEKIALQKQRQAEETAAFEEVMMDIGSTRLQAQKLRLAYTRSSHYGGSLPNVNQIGSGLAEFQSPLHSPLDSSRSTRHHGLVERVQRDPRRMVSPLRRYTRHIDSSPYSPAYLSPPPESSWRRTMAWGNFPAEKGQLFRLPSALNRTSSDSALHTSVMNPSPQDTYPGPTPPSILPSRRGGILDGEMDPKVPAIEENLLDDKHLLKPWDAKKLSSSSSRPRSCEVPGINIFPSPDQPANVPVLPPAMNTGGSLPDLTNLHFPPPLPTPLDPEETAYPSLSGGNSTSNLTHTMTHLGISRGMGLGPGYDAPGLHSPLSHPSLQSSLSNPNLQASLSSPQPQLQGSHSHPSLPASSLARHVLPTTSLGHPSLSAPALSSSSSSSSTSSPVLGAPSYPASTPGASPHHRRVPLSPLSLLAGPADARRSQQQLPKQFSPTMSPTLSSITQGVPLDTSKLSTDQRLPPYPYSSPSLVLPTQPHTPKSLQQPGLPSQSCSVQSSGGQPPGRQSHYGTPYPPGPSGHGQQSYHRPMSDFNLGNLEQFSMESPSASLVLDPPGFSEGPGFLGGEGPMGGPQDPHTFNHQNLTHCSRHGSGPNIILTGDSSPGFSKEIAAALAGVPGFEVSAAGLELGLGLEDELRMEPLGLEGLNMLSDPCALLPDPAVEESFRSDRLQ

SEQ ID NO: 20765 - protein, 540 aa, Homo sapiens
MGPGERAGGGGDAGKGNAAGGGGGGRSATTAGSRAVSALCLLLSVGSAAACLLLGVQAAALQGRVAALEEERELLRRAGPPGALDAWAEPHLERLLREKLDGLAKIRTAREAPSECVCPPGPPGRRGKPGRRGDPGPPGQSGRDGYPGPLGLDGKPGLPGPKGEKGAPGDFGPRGDQGQDGAAGPPGPPGPPGARGPPGDTGKDGPRGAQGPAGPKGEPGQDGEMGPKGPPGPKGEPGVPGKKGDDGTPSQPGPPGPKGEPGSMGPRGENGVDGAPGPKGEPGHRGTDGAAGPRGAPGLKGEQGDTVVIDYDGRILDALKGPPGPQGPPGPPGIPGAKGELGLPGAPGIDGEKGPKGQKGDPGEPGPAGLKGEAGEMGLSGLPGADGLKGEKGESASDSLQESLAQLIVEPGPPGPPGPPGPMGLQGIQGPKGLDGAKGEKGASGERGPSGLPGPVGPPGLIGLPGTKGEKGRPGEPGLDGFPGPRGEKGDRSERGEKGERGVPGRKGVKGQKGEPGPPGLDQPCPVGPDGLPVPGCWHK

SEQ ID NO: 20766 - protein, 309 aa, Homo sapiens
MESRSGIQAGVRCRDLGSLQPPPLALKQFSSLSLPSSWDYRRLPPRCGFLFEVSETTNPPAGTNSRHTLTVKLDGLAKIRTAREAPSECVCPPGPPGRRGKPGRRGDPGPPGPLGLDGKPGLPGPKGEKGAPGDFGPRGDQGQDGAAGPPGPPGPPGARGPPGDTGKDGPRGAQGPAGPKGEPGQDGEMGPKGPPGPKGEPGVPGKKGDDGTPSQPGPPGPKGEPGSMGPRGENGVDGAPGPKGEPGHRGTDGAAGPRGDVRDPGLGSVSSCSQRLASSSKKNGSEPPPGCAGCPRPQGRAGRHSGDRL

SEQ ID NO: 20767 - protein, 169 aa, Homo sapiens
MLATRVFSLVGKRAISTSVCVRAHESVVKSEDFSLPAYMDRRDHPLPEVAHVKHLSASQKALKEKEKASWSSLSMDEKVELYRIKFKESFAEMNRGSNEWKTVVGGAMFFIGFTALVIMWQKHYVYGPLPQSFDKEWVAKQTKRMLDMKVNPIQGLASKWDYEKNEWKK

SEQ ID NO: 20768 - protein, 217 aa, Homo sapiens
MSCAGAAAAPRLWRLRPGARRSLSAYGRRTSVRFRSSGMTLDNISRAAVDRIIRVDHAGEYGANRIYAGQMAVLGRTSVGPVIQKMWDQEKDHLKKFNELMVTFRVRPTVLMPLWNVLGFALGAGTALLGKEGAMACTVAVEESIAHHYNNQIRTLMEEDPEKYEELLQLIKKFRDEELEHHDIGLDHDAELAPAYAVLKSIIQAGCRVAIYLSERL

SEQ ID NO: 20769 - protein, 179 aa, Homo sapiens
MTLDNISRAAVDRIIRVDHAGEYGANRIYAGQMAVLGRTSVGPVIQKMWDQEKDHLKKFNELMVTFRVRPTVLMPLWNVLGFALGAGTALLGKEGAMACTVAVEESIAHHYNNQIRTLMEEDPEKYEELLQLIKKFRDEELEHHDIGLDHDAELAPAYAVLKSIIQAGCRVAIYLSERL

SEQ ID NO: 20770 - protein, 174 aa, Homo sapiens
MGKITFYEDRDFQGRCYNCISDCPNLRVYFSRCNSIRVDSGCWMLYERPNYQGHQYFLRRGKYPDYQHWMGLSDSVQSCRIIPHTSSHKLRLYERDDYRGLMSELTDDCACVPELFRLPEIYSLHVLEGCWVLYEMPNYRGRQYLLRPGDYRRYHDWGGADAKVGSLRRVTDLY

SEQ ID NO: 20771 - protein, 402 aa, Homo sapiens
MASLGLLLLLLLTALPPLWSSSLPGLDTAESKATIADLILSALERATVFLEQRLPEINLDGMVGVRVLEEQLKSVREKWAQEPLLQPLSLRVGMLGEKLEAAIQRSLHYLKLSDPKYLREFQLTLQPGFWKLPHAWIHTDASLVYPTFGPQDSFSEERSDVCLVQLLGTGTDSSEPCGLSDLCRSLMTKPGCSGYCLSHQLLFFLWARMRGCTQGPLQQSQDYINLFCANMMDLNRRAEAIGYAYPTRDIFMENIMFCGMGGFSDFYKLRWLEAILSWQKQQEGCFGEPDAEDEELSKAIQYQQHFSRRVKRREKQFPDSRSVAQAGVQWRNLGSLQPLPPGFKQFSCLILPSSWDYRSVPPYLANFYIFLVETGFHHVAHAGLELLISRDPPTSGSQSVGL

SEQ ID NO: 20772 - protein, 361 aa, Homo sapiens
MASLGLLLLLLLTALPPLWSSSLPGLDTAESKATIADLILSALERATVFLEQRLPEINLDGMVGVRVLEEQLKSVREKWAQEPLLQPLSLRVGMLGEKLEAAIQRSLHYLKLSDPKYLREFQLTLQPGFWKLPHAWIHTDASLVYPTFGPQDSFSEERSDVCLVQLLGTGTDSSEPCGLSDLCRSLMTKPGCSGYCLSHQLLFFLWARMRGCTQGPLQQSQDYINLFCANMMDLNRRAEAIGYAYPTRDIFMENIMFCGMGGFSDFYKLRWLEAILSWQKQQEGCFGEPDAEDEELSKAIQYQQHFSRRVKRREKQFPDGCSSHNTATAVAALGGFLYILAEYPPANREPHPSTPPPPSSR

SEQ ID NO: 20773 - protein, 450 aa, Homo sapiens
MSAIQAAWPSGTECIAKYNFHGTAEQDLPFCKGDVLTIVAVTKDPNWYKAKNKVGREGIIPANYVQKREGVKAGTKLSLMPWFHGKITREQAERLLYPPETGLFLVRESTNYPGDYTLCVSCDGKVEHYRIMYHASKLSIDEEVYFENLMQLVEHYTSDADGLCTRLIKPKVMEGTVAAQDEFYRSGWALNMKELKLLQTIGKGEFGDVMLGDYRGNKVAVKCIKNDATAQAFLAEASVMTQLRHSNLVQLLGVIVEEKGGLYIVTEYMAKGSLVDYLRSRGRSVLGGDCLLKFSLDVCEAMEYLEGNNFVHRDLAARNVLVSEDNVAKVSDFGLTKEASSTQDTGKLPVKWTAPEALREKKFSTKSDVWSFGILLWEIYSFGRVPYPRIPLKDVVPRVEKGYKMDAPDGCPPAVYEVMKNCWHLDAAMRPSFLQLREQLEHIKTHELHL

SEQ ID NO: 20774 - protein, 182 aa, Homo sapiens
MEALVCAFSELHIREDAVSQAQGRPGHPDAPPNIYEGGLGSPQPQCPSAQGSKPKNFRLRHLRGLGLYLESHPPPTGQCESHWLGRLMAGGCLPQPEGTAWALDLPQGTLGPRNSLCSALLEARLPRDSLGSSASSSSMDPDKGALPQPSPSRLRPKRSWGTWEEAMCPLCKRTRSGALERP

SEQ ID NO: 20775 - protein, 544 aa, Homo sapiens
MWLKVGGLLRGTGGQLGQTVGWPCGALGPGPHRWGPCGGSWAQKFYQDGPGRGLGEEDIRRAREARPRKTPRPQLSDRSRERKVPASRISRLANFGGLAVGLGLGVLAEMAKKSMPGGRLQSEGGSGLDSSPFLSEANAERIVQTLCTVRGAALKVGQMLSIQDNSFISPQLQHIFERVRQSADFMPRWQMLRVLEEELGRDWQAKVASLEEVPFAAASIGQVHQGLLRDGTEVAVKIQYPGIAQSIQSDVQNLLAVLKMSAALPAGLFAEQSLQALQQELAWECDYRREAACAQNFRQLLANDPFFRVPAVVKELCTTRVLGMELAGGVPLDQCQGLSQDLRNQICFQLLTLCLRELFEFRFMQTDPNWANFLYDASSHQVTLLDFGASREFGTEFTDHYIEVVKAAADGDRDCVLQKSRDLKFLTGFETKAFSDAHVEAVMILGEPFATQGPYDFGSGETARRIQDLIPVLLRHRLCPPPEETYALHRKLAGAFLACAHLRAHIACRDLFQDTYHRYWASRQPDAATAGSLPTKGDSWVDPS

SEQ ID NO: 20776 - protein, 503 aa, Homo sapiens
MWLKVGGLLRGTGGQLGQTVGWPCGALGPGPHRWGPCGGSWAQKFYQDGPGRGLGEEDIRRAREARPRKTPRPQLSDRSRERKVPASRISRLANFGGLAVGLGLGVLAEMAKKSMPGGRLQSDNSFISPQLQHIFERVRQSADFMPRWQMLRVLEEELGRDWQAKVASLEEVPFAAASIGQVHQGLLRDGTEVAVKIQYPGIAQSIQSDVQNLLAVLKMSAALPAGLFAEQSLQALQQELAWECDYRREAACAQNFRQLLANDPFFRVPAVVKELCTTRVLGMELAGGVPLDQCQGLSQDLRNQICFQLLTLCLRELFEFRFMQTDPNWANFLYDASSHQVTLLDFGASREFGTEFTDHYIEVVKAAADGDRDCVLQKSRDLKFLTGFETKAFSDAHVEAVMILGEPFATQGPYDFGSGETARRIQDLIPVLLRHRLCPPPEETYALHRKLAGAFLACAHLRAHIACRDLFQDTYHRYWASRQPDAATAGSLPTKGDSWVDPS

SEQ ID NO: 20777 - protein, 925 aa, Homo sapiens
MERDGCAGGGSRGGEGGRAPREGPAGNGRDRGRSHAAEAPGDPQAAASLLAPMDVGEEPLEKAARARTAKDPNTYKVLSLVLSVCVLTTILGCIFGLKPSCAKEVKSCKGRCFERTFGNCRCDAACVELGNCCLDYQETCIEPEHIWTCNKFRCGEKRLTRSLCACSDDCKDKGDCCINYSSVCQGEKSWVEEPCESINEPQCPAGFETPPTLLFSLDGFRAEYLHTWGGLLPVISKLKKCGTYTKNMRPVYPTKTFPNHYSIVTGLYPESHGIIDNKMYDPKMNASFSLKSKEKFNPEWYKGEPIWVTAKYQGLKSGTFFWPGSDVEINGIFPDIYKMYNGSVPFEERILAVLQWLQLPKDERPHFYTLYLEEPDSSGHSYGPVSSEVIKALQRVDGMVGMLMDGLKELNLHRCLNLILISDHGMEQGSCKKYIYLNKYLGDVKNIKVIYGPAARLRPSDVPDKYYSFNYEGIARNLSCREPNQHFKPYLKHFLPKRLHFAKSDRIEPLTFYLDPQWQLALNPSERKYCGSGFHGSDNVFSNMQALFVGYGPGFKHGIEADTFENIEVYNLMCDLLNLTPAPNNGTHGSLNHLLKNPVYTPKHPKEVHPLVQCPFTRNPRDNLGCSCNPSILPIEDFQTQFNLTVAEEKIIKHETLPYGRPRVLQKENTICLLSQHQFMSGYSQDILMPLWTSYTVDRNDSFSTEDFSNCLYQDFRIPLSPVHKCSFYKNNTKVSYGFLSPPQLNKNSSGIYSEALLTTNIVPMYQSFQVIWRYFHDTLLRKYAEERNGVNVVSGPVFDFDYDGRCDSLENLRQKRRVIRNQEILIPTHFFIVLTSCKDTSQTPLHCENLDTLAFILPHRTDNSESCVHGKHDSSWVEELLMLHRARITDVEHITGLSFYQQRKEPVSDILKLKTHLPTFSQED

SEQ ID NO: 20778 - protein, 926 aa, Homo sapiens
MADDDVLFEDVYELCEVIGKGPFSVVRRCINRETGQQFAVKIVDVAKFTSSPGLSTEDLKREASICHMLKHPHIVELLETYSSDGMLYMVFEFMDGADLCFEIVKRADAGFVYSEAVASHYMRQILEALRYCHDNNIIHRDVKPHCVLLASKENSAPVKLGGFGVAIQLGESGLVAGGRVGTPHFMAPEVVKREPYGKPVDVWGCGVILFILLSGCLPFYGTKERLFEGIIKGKYKMNPRQWSHISESAKDLVRRMLMLDPAERITVYEALNHPWLKERDRYAYKIHLPETVEQLRKFNARRKLKGAVLAAVSSHKFNSFYGDPPEELPDFSEDPTSSGLLAAERAVSQVLDSLEEIHALTDCSEKDLDFLHSVFQDQHLHTLLDLYDKINTKSSPQIRNPPSDAVQRAKEVLEEISCYPENNDAKELKRILTQPHFMALLQTHDVVAHEVYSDEALRVTPPPTSPYLNGDSPESANGDMDMENVTRVRLVQFQKNTDEPMGITLKMNELNHCIVARIMHGGMIHRQGTLHVGDEIREINGISVANQTVEQLQKMLREMRGSITFKIVPSYRTQSSSCERDSPSTSRQSPANGHSSTNNSVSDLPSTTQPKGRQIYVRAQFEYDPAKDDLIPCKEAGIRFRVGDIIQIISKDDHNWWQGKLENSKNGTAGLIPSPELQEWRVACIAMEKTKQEQQASCTWFGKKKKQYKDKYLAKHNAVFDQLDLVTYEEVVKLPAFKRKTLVLLGAHGVGRRHIKNTLITKHPDRFAYPIPHTTRPPKKDEENGKNYYFVSHDQMMQDISNNEYLEYGSHEDAMYGTKLETIRKIHEQGLIAILDVEPQALKVLRTAEFAPFVVFIAAPTITPGLNEDESLQRLQKESDILQRTYAHYFDLTIINNEIDETIRHLEEAVELVCTAPQWVPVSWVY

SEQ ID NO: 20779 - protein, 921 aa, Homo sapiens
MADDDVLFEDVYELCEVIGKGPFSVVRRCINRETGQQFAVKIVDVAKFTSSPGLSTEDLKREASICHMLKHPHIVELLETYSSDGMLYMVFEFMDGADLCFEIVKRADAGFVYSEAVASHYMRQILEALRYCHDNNIIHRDVKPHCVLLASKENSAPVKLGGFGVAIQLGESGLVAGGRVGTPHFMAPEVVKREPYGKPVDVWGCGVILFILLSGCLPFYGTKERLFEGIIKGKYKMNPRQWSHISESAKDLVRRMLMLDPAERITVYEALNHPWLKERDRYAYKIHLPETVEQLRKFNARRKLKGAVLAAVSSHKFNSFYGDPPEELPDFSEDPTSSGLLAAERAVSQVLDSLEEIHALTDCSEKDLDFLHSVFQDQHLHTLLDLYDKINTKSSPQIRNPPSDAVQRAKEVLEEISCYPENNDAKELKRILTQPHFMALLQTHDVVAHEVYSDEALRVTPPPTSPYLNGDSPESANGDMDMENVTRVRLVQFQKNTDEPMGITLKMNELNHCIVARIMHGGMIHRQGTLHVGDEIREINGISVANQTVEQLQKMLREMRGSITFKIVPSYRTQSSSCERDSPSTSRQSPANGHSSTNNSVSDLPSTTQPKGRQIYVRAQFEYDPAKDDLIPCKEAGIRFRVGDIIQIISKDDHNWWQGKLENSKNGTAGLIPSPELQEWRVACIAMEKTKQEQQASCTWFGKKKKQYKDKYLAKHNADLVTYEEVVKLPAFKRKTLVLLGAHGVGRRHIKNTLITKHPDRFAYPIPHTTRPPKKDEENGKNYYFVSHDQMMQDISNNEYLEYGSHEDAMYGTKLETIRKIHEQGLIAILDVEPQALKVLRTAEFAPFVVFIAAPTITPGLNEDESLQRLQKESDILQRTYAHYFDLTIINNEIDETIRHLEEAVELVCTAPQWVPVSWVY

SEQ ID NO: 20780 - protein, 897 aa, Homo sapiens
MADDDVLFEDVYELCEVIGKGPFSVVRRCINRETGQQFAVKIVDVAKFTSSPGLSTEDLKREASICHMLKHPHIVELLETYSSDGMLYMVFEFMDGADLCFEIVKRADAGFVYSEAVASHYMRQILEALRYCHDNNIIHRDVKPHCVLLASKENSAPVKLGGFGVAIQLGESGLVAGGRVGTPHFMAPEVVKREPYGKPVDVWGCGVILFILLSGCLPFYGTKERLFEGIIKGKYKMNPRQWSHISESAKDLVRRMLMLDPAERITVYEALNHPWLKERDRYAYKIHLPETVEQLRKFNARRKLKGAVLAAVSSHKFNSFYGDPPEELPDFSEDPTSSGAVSQVLDSLEEIHALTDCSEKDLDFLHSVFQDQHLHTLLDLYDKINTKSSPQIRNPPSDAVQRAKEVLEEISCYPENNDAKELKRILTQPHFMALLQTHDVVAHEVYSDEALRVTPPPTSPYLNGDSPESANGDMDMENVTRVRLVQFQKNTDEPMGITLKMNELNHCIVARIMHGGMIHRQGTLHVGDEIREINGISVANQTVEQLQKMLREMRGSITFKIVPSYRTQSSSCEDLPSTTQPKGRQIYVRAQFEYDPAKDDLIPCKEAGIRFRVGDIIQIISKDDHNWWQGKLENSKNGTAGLIPSPELQEWRVACIAMEKTKQEQQASCTWFGKKKKQYKDKYLAKHNAVFDQLDLVTYEEVVKLPAFKRKTLVLLGAHGVGRRHIKNTLITKHPDRFAYPIPHTTRPPKKDEENGKNYYFVSHDQMMQDISNNEYLEYGSHEDAMYGTKLETIRKIHEQGLIAILDVEPQALKVLRTAEFAPFVVFIAAPTITPGLNEDESLQRLQKESDILQRTYAHYFDLTIINNEIDETIRHLEEAVELVCTAPQWVPVSWVY

SEQ ID NO: 20781 - protein, 898 aa, Homo sapiens
MADDDVLFEDVYELCEVIGKGPFSVVRRCINRETGQQFAVKIVDVAKFTSSPGLSTEDLKREASICHMLKHPHIVELLETYSSDGMLYMVFEFMDGADLCFEIVKRADAGFVYSEAVASHYMRQILEALRYCHDNNIIHRDVKPHCVLLASKENSAPVKLGGFGVAIQLGESGLVAGGRVGTPHFMAPEVVKREPYGKPVDVWGCGVILFILLSGCLPFYGTKERLFEGIIKGKYKMNPRQWSHISESAKDLVRRMLMLDPAERITVYEALNHPWLKERDRYAYKIHLPETVEQLRKFNARRKLKGAVLAAVSSHKFNSFYGDPPEELPDFSEDPTSSGLLAAERAVSQVLDSLEEIHALTDCSEKDLDFLHSVFQDQHLHTLLDLYDKINTKSSPQIRNPPSDAVQRAKEVLEEISCYPENNDAKELKRILTQPHFMALLQTHDVVAHEVYSDEALRVTPPPTSPYLNGDSPESANGDMDMENVTRVRLVQFQKNTDEPMGITLKMNELNHCIVARIMHGGMIHRQGTLHVGDEIREINGISVANQTVEQLQKMLREMRGSITFKIVPSYRTQSSSCEDLPSTTQPKGRQIYVRAQFEYDPAKDDLIPCKEAGIRFRVGDIIQIISKDDHNWWQGKLENSKNGTAGLIPSPELQEWRVACIAMEKTKQEQQASCTWFGKKKKQYKDKYLAKHNADLVTYEEVVKLPAFKRKTLVLLGAHGVGRRHIKNTLITKHPDRFAYPIPHTTRPPKKDEENGKNYYFVSHDQMMQDISNNEYLEYGSHEDAMYGTKLETIRKIHEQGLIAILDVEPQALKVLRTAEFAPFVVFIAAPTITPGLNEDESLQRLQKESDILQRTYAHYFDLTIINNEIDETIRHLEEAVELVCTAPQWVPVSWVY

SEQ ID NO: 20782 - protein, 518 aa, Homo sapiens
MYDKINTKSSPQIRNPPSDAVQRAKEVLEEISCYPENNDAKELKRILTQPHFMALLQTHDVVAHEVYSDEALRVTPPPTSPYLNGDSPESANGDMDMENVTRVRLVQFQKNTDEPMGITLKMNELNHCIVARIMHGGMIHRQGTLHVGDEIREINGISVANQTVEQLQKMLREMRGSITFKIVPSYRTQSSSCEDLPSTTQPKGRQIYVRAQFEYDPAKDDLIPCKEAGIRFRVGDIIQIISKDDHNWWQGKLENSKNGTAGLIPSPELQEWRVACIAMEKTKQEQQASCTWFGKKKKQYKDKYLAKHNAVFDQLDLVTYEEVVKLPAFKRKTLVLLGAHGVGRRHIKNTLITKHPDRFAYPIPHTTRPPKKDEENGKNYYFVSHDQMMQDISNNEYLEYGSHEDAMYGTKLETIRKIHEQGLIAILDVEPQALKVLRTAEFAPFVVFIAAPTITPGLNEDESLQRLQKESDILQRTYAHYFDLTIINNEIDETIRHLEEAVELVCTAPQWVPVSWVY

SEQ ID NO: 20783 - protein, 909 aa, Homo sapiens
MADDDVLFEDVYELCEVIGKGPFSVVRRCINRETGQQFAVKIVDVAKFTSSPGLSTEDLKREASICHMLKHPHIVELLETYSSDGMLYMVFEFMDGADLCFEIVKRADAGFVYSEAVASHYMRQILEALRYCHDNNIIHRDVKPHCVLLASKENSAPVKLGGFGVAIQLGESGLVAGGRVGTPHFMAPEVVKREPYGKPVDVWGCGVILFILLSGCLPFYGTKERLFEGIIKGKYKMNPRQWSHISESAKDLVRRMLMLDPAERITVYEALNHPWLKERDRYAYKIHLPETVEQLRKFNARRKLKGAVLAAVSSHKFNSFYGDPPEELPDFSEDPTSSGLLAAERAVSQVLDSLEEIHALTDCSEKDLDFLHSVFQDQHLHTLLDLYDKINTKSSPQIRNPPSDAVQRAKEVLEEISCYPENNDAKELKRILTQPHFMALLQTHDVVAHEVYSDEALRVTPPPTSPYLNGDSPESANGDMDMENVTRVRLVQFQKNTDEPMGITLKMNELNHCIVARIMHGGMIHRQGTLHVGDEIREINGISVANQTVEQLQKMLREMRGSITFKIVPSYRTQSSSCERDSPSTSRQSPANGHSSTNNSVSIYVRAQFEYDPAKDDLIPCKEAGIRFRVGDIIQIISKDDHNWWQGKLENSKNGTAGLIPSPELQEWRVACIAMEKTKQEQQASCTWFGKKKKQYKDKYLAKHNADLVTYEEVVKLPAFKRKTLVLLGAHGVGRRHIKNTLITKHPDRFAYPIPHTTRPPKKDEENGKNYYFVSHDQMMQDISNNEYLEYGSHEDAMYGTKLETIRKIHEQGLIAILDVEPQALKVLRTAEFAPFVVFIAAPTITPGLNEDESLQRLQKESDILQRTYAHYFDLTIINNEIDETIRHLEEAVELVCTAPQWVPVSWVY

SEQ ID NO: 20784 - protein, 99 aa, Homo sapiens
MSSQQSAVSAKGFSKGSSQGPAPCPAPAPTPAPASSSSCCGSGRGCCGDSGCCGSSSTSCCCFPRRRRRQRSSGCCCCGGGSQRSQRSNNRSSGCCSGC

SEQ ID NO: 20785 - protein, 508 aa, Homo sapiens
MIYEESKMNLEQERPFVCSAPGCSQRFPTEDHLMIHRHKHEMTLKFPSIKTDNMLSDQTPTPTRFLKNCEEVGLFSELDCSLEHEFRKAQEEESSKRNISMHNAVGGAMTGPGTHQLSSARLPNHDTNVVIQQAMPSPQSSSVITQAPSTNRQIGPVPGSLSSLLHLHNRQRQPMPASMPGTLPNPTMPGSSAVLMPMERQMSVNSSIMGMQGPNLSNPCASPQVQPMHSEAKMRLKAALTHHPAAMSNGNMNTMGHMMEMMGSRQDQTPHHHMHSHPHQHQTLPPHHPYPHQHQHPAHHPHPQPHHQQNHPHHHSHSHLHAHPAHHQTSPHPPLHTGNQAQVSPATQQMQPTQTIQPPQPTGGRRRRVVDEDPDERRRKFLERNRAAATRCRQKRKVWVMSLEKKAEELTQTNMQLQNEVSMLKNEVAQLKQLLLTHKDCPITAMQKESQGYLSPESSPPASPVPACSQQQVIQHNTITTSSSVSEVVGSSTLSQLTTHRTDLNPIL

SEQ ID NO: 20786 - protein, 501 aa, Homo sapiens
MNLEQERPFVCSAPGCSQRFPTEDHLMIHRHKHEMTLKFPSIKTDNMLSDQTPTPTRFLKNCEEVGLFSELDCSLEHEFRKAQEEESSKRNISMHNAVGGAMTGPGTHQLSSARLPNHDTNVVIQQAMPSPQSSSVITQAPSTNRQIGPVPGSLSSLLHLHNRQRQPMPASMPGTLPNPTMPGSSAVLMPMERQMSVNSSIMGMQGPNLSNPCASPQVQPMHSEAKMRLKAALTHHPAAMSNGNMNTMGHMMEMMGSRQDQTPHHHMHSHPHQHQTLPPHHPYPHQHQHPAHHPHPQPHHQQNHPHHHSHSHLHAHPAHHQTSPHPPLHTGNQAQVSPATQQMQPTQTIQPPQPTGGRRRRVVDEDPDERRRKFLERNRAAATRCRQKRKVWVMSLEKKAEELTQTNMQLQNEVSMLKNEVAQLKQLLLTHKDCPITAMQKESQGYLSPESSPPASPVPACSQQQVIQHNTITTSSSVSEVVGSSTLSQLTTHRTDLNPIL

SEQ ID NO: 20787 - protein, 475 aa, Homo sapiens
MIHRHKHEMTLKFPSIKTDNMLSDQTPTPTRFLKNCEEVGLFSELDCSLEHEFRKAQEEESSKRNISMHNAVGGAMTGPGTHQLSSARLPNHDTNVVIQQAMPSPQSSSVITQAPSTNRQIGPVPGSLSSLLHLHNRQRQPMPASMPGTLPNPTMPGSSAVLMPMERQMSVNSSIMGMQGPNLSNPCASPQVQPMHSEAKMRLKAALTHHPAAMSNGNMNTMGHMMEMMGSRQDQTPHHHMHSHPHQHQTLPPHHPYPHQHQHPAHHPHPQPHHQQNHPHHHSHSHLHAHPAHHQTSPHPPLHTGNQAQVSPATQQMQPTQTIQPPQPTGGRRRRVVDEDPDERRRKFLERNRAAATRCRQKRKVWVMSLEKKAEELTQTNMQLQNEVSMLKNEVAQLKQLLLTHKDCPITAMQKESQGYLSPESSPPASPVPACSQQQVIQHNTITTSSSVSEVVGSSTLSQLTTHRTDLNPIL

SEQ ID NO: 20788 - protein, 369 aa, Homo sapiens
MFCTSGGNSASVMSMRPVPGSLSSLLHLHNRQRQPMPASMPGTLPNPTMPGSSAVLMPMERQMSVNSSIMGMQGPNLSNPCASPQVQPMHSEAKMRLKAALTHHPAAMSNGNMNTMGHMMEMMGSRQDQTPHHHMHSHPHQHQTLPPHHPYPHQHQHPAHHPHPQPHHQQNHPHHHSHSHLHAHPAHHQTSPHPPLHTGNQAQVSPATQQMQPTQTIQPPQPTGGRRRRVVDEDPDERRRKFLERNRAAATRCRQKRKVWVMSLEKKAEELTQTNMQLQNEVSMLKNEVAQLKQLLLTHKDCPITAMQKESQGYLSPESSPPASPVPACSQQQVIQHNTITTSSSVSEVVGSSTLSQLTTHRTDLNPIL

SEQ ID NO: 20789 - protein, 304 aa, Homo sapiens
MAGNFDSEERSSWYWGRLSRQEAVALLQGQRHGVFLVRDSSTSPGDYVLSVSENSRVSHYIINSSGPRPPVPPSPAQPPPGVSPSRLRIGDQEFDSLPALLEFYKIHYLDTTTLIEPVSRSRQGSGVILRQEEAEYVRALFDFNGNDEEDLPFKKGDILRIRDKPEEQWWNAEDSEGKRGMIPVPYVEKYRPASASVSALIGGNQEGSHPQPLGGPEPGPYAQPSVNTPLPNLQNGPIYARVIQKRVPNAYDKTALALEVGELVKVTKINVSGQWEGECNGKRGHFPFTHVRLLDQQNPDEDFS

SEQ ID NO: 20790 - protein, 204 aa, Homo sapiens
MAGNFDSEERSSWYWGRLSRQEAVALLQGQRHGVFLVRDSSTSPGDYVLSVSENSRVSHYIINSSGPRPPVPPSPAQPPPGVSPSRLRIGDQEFDSLPALLEFYKIHYLDTTTLIEPVSRSRQGSGVILRQEEAEYVRALFDFNGNDEEDLPFKKGDILRIRDKPEEQWWNAEDSEGKRGMIPVPYVEKYRPASASVSALIGGR

SEQ ID NO: 20791 - protein, 201 aa, Homo sapiens
MSRREGSLEDPQTDSSVSLLPHLEAKIRQTHSLAHLLTKYAEQLLQEYVQLQGDPFGLPSFSPPRLPVAGLSAPAPSHAGLPVHERLRLDAAALAALPPLLDAVCRRQAELNPRAPRLLRRLEDAARQARALGAAVEALLAALGAANRGPRAEPPAATASAASATGVFPAKVLGLRVCGLYREWLSRTEGDLGQLLPGGSA

SEQ ID NO: 20792 - protein, 200 aa, Homo sapiens
MSRREGSLDPQTDSSVSLLPHLEAKIRQTHSLAHLLTKYAEQLLQEYVQLQGDPFGLPSFSPPRLPVAGLSAPAPSHAGLPVHERLRLDAAALAALPPLLDAVCRRQAELNPRAPRLLRRLEDAARQARALGAAVEALLAALGAANRGPRAEPPAATASAASATGVFPAKVLGLRVCGLYREWLSRTEGDLGQLLPGGSA

SEQ ID NO: 20793 - protein, 777 aa, Homo sapiens
MEEPGATPQPYLGLVLEELGRVVAALPESMRPDENPYGFPSELVVCAAVIGFFVVLLFLWRSFRSVRSRLYVGREQKLGATLSGLIEEKCKLLEKFSLIQKEYEGYEVESSLEDASFEKAAAEEARSLEATCEKLSRSNSELEDEILCLEKDLKEEKSKHSQQDELMADISKSIQSLEDESKSLKSQIAEAKIICKTFKMSEERRAIAIKDALNENSQLQTSHKQLFQQEAEVWKGQVSELNKQKITFEDSKVHAEQVLNDKENHIKTLTGHLPMMKDQAAVLEEDTTDDDNLELKVNSQWENGANLDDPPKGALKKLIHAAKLNVSLKSLEGERNHIIIQLSEVDKTKEELTEHIKNLQTQQASLQSENIYFESENQKLQQKLKIMTEFYQENEMKLYRKLTVEENYRIEEEEKLSRVEEKISHATEELETYRKLAKDLEEELERTVHFYQKQVISYEKRGHDNWLAARTAERNLSDLRKENAHNKQKLTERELKFELLEKDPNALDVSNTAFGREHSPCSPSPLGRPSSETRAFPSPQTLLEDPLRLSPVLPGGGGRGPSSPGNPLDHQITNERGEPSYDRLIDPHRAPSDTGSLSSPVEQDRRMMFPPPGQSYPDSTLPPQREDRFYSNSERLSGPAEPRSFKMTSLDKMDRSMPSEMESSRNDAKDDLGNLNVPDSSLPAENEATGPGLIPPPLAPISGPLFPVDTRGPFMRRGPPFPPPPPGTMFGASRGYFPPRDFPGPPHAPFAMRNIYPPRGLPPYLHPRPGFYPNPTF

SEQ ID NO: 20794 - protein, 105 aa, Homo sapiens
MGDVEKGKKIFIMKCSQCHTVEKGGKHKTGPNLHGLFGRKTGQAPGYSYTAANKNKGIIWGEDTLMEYLENPKKYIPGTKMIFVGIKKKEERADLIAYLKKATNE

SEQ ID NO: 20795 - protein, 280 aa, Homo sapiens
MLLSWGGGESRRPVQEASSATDTDTNSQEDPADTASVRSLSLSAGHTKHIAFLFDSTLTAFLMMGNLSPVQSTGEREAQRYFEHALTLRNTTLFLRHNKDLVVQTAQPDQPNYGFPLDLLRCESLLGLDPATGSRVLNKNYTLLVSMAPLTNEIRPVSSCTPQHIGPAIPEVSSVWFKQYIYVYHITGQGPPSLLLSKGTRPRKLPDIFQSYDRLLITSWGHDPGVVPTSNVLTMLNDALTHSAVLIQEHGLHGIGETVHVPFPFDETELQEDSCQYGCS

SEQ ID NO: 20796 - protein, 425 aa, Homo sapiens
MGGGDLNLKKSWHPQTLRNVEKVWKAEQKHEAERKKIEELQRELREERAREEMQRYAEDVGAVKKKEEKLDWMYQGPGGMVNRDEYLLGRPIDKYVFEKMEEKEAGCSSETGLLPGSIFAPSGANSLLDMASKIREDPLFIIRKKEEEKKREVLNNPVKMKKIKELLQMSLEKKEKKKKKEKKKKHKKHKHRSSSSDRSSSEDEHSAGRSQKKMANSSPVLSKVPGYGLQVRNSDRNQGLQGPLTAEQKRGHGMKNHSRSRSSSHSPPRHASKKSTREAGSRDRRSRSLGRRSRSPRPSKLHNSKVNRRETGQTRSPSPKKEVYQRRHAPGYTRKLSAEELERKRQEMMENAKWREEERLNILKRHAKDEEREQRLEKLDSRDGKFIHRMKLESASTSSLEDRVKRNIYSLQRTSVALEKNFMKR

SEQ ID NO: 20797 - protein, 78 aa, Homo sapiens
MMENAKWREEERLNILKRHAKDEEREQRLEKLDSRDGKFIHRMKLESASTSSLEDRVKRNIYSLQRTSVALEKNFMKR

SEQ ID NO: 20798 - protein, 953 aa, Homo sapiens
MTSATSPIILKWDPKSLEIRTLTVERLLEPLVTQVTTLVNTSNKGPSGKKKGRSKKAHVLAASVEQATQNFLEKGEQIAKESQDLKEELVAAVEDVRKQGETMRIASSEFADDPCSSVKRGTMVRAARALLSAVTRLLILADMADVMRLLSHLKIVEEALEAVKNATNEQDLANRFKEFGKEMVKLNYVAARRQQELKDPHCRDEMAAARGALKKNATMLYTASQAFLRHPDVAATRANRDYVFKQVQEAIAGISNAAQATSPTDEAKGHTGIGELAAALNEFDNKIILDPMTFSEARFRPSLEERLESIISGAALMADSSCTRDDRRERIVAECNAVRQALQDLLSEYMNNTGRKEKGDPLNIAIDKMTKKTRDLRRQLRKAVMDHISDSFLETNVPLLVLIEAAKSGNEKEVKEYAQVFREHANKLVEVANLACSISNNEEGVKLVRMAATQIDSLCPQVINAALTLAARPQSKVAQDNMDVFKDQWEKQVRVLTEAVDDITSVDDFLSVSENHILEDVNKCVIALQEGDVDTLDRTAGAIRGRAARVIHIINAEMENYEAGVYTEKVLEATKLLSETVMPRFAEQVEVAIEALSANVPQPFEENEFIDASRLVYDGVRDIRKAVLMIRTPEELEDDSDFEQEDYDVRSRTSVQTEDDQLIAGQSARAIMAQLPQEEKAKIAEQVEIFHQEKSKLDAEVAKWDDSGNDIIVLAKQMCMIMMEMTDFTRGKGPLKNTSDVINAAKKIAEAGSRMDKLARAVADQCPDSACKQDLLAYLQRIALYCHQLNICSKVKAEVQNLGGELIVSGTGVQSTFTTFYEVDCDVIDGGRASQLSTHLPTCAEGAPIGSGSSDSSMLDSATSLIQAAKNLMNAVVLTVKASYVASTKYQKVYGTAAVNSPVVSWKMKAPEKKPLVKREKPEEFQTRVRRGSQKKHISPVQALSEFKAMDSF

SEQ ID NO: 20799 - protein, 905 aa, Homo sapiens
MTSATSPIILKWDPKSLEIRTLTVERLLEPLVTQVTTLVNTSNKGPSGKKKGRSKKAHVLAASVEQATQNFLEKGEQIAKESQDLKEELVAAVEDVRKQGETMRIASSEFADDPCSSVKRGTMVRAARALLSAVTRLLILADMADVMRLLSHLKIVEEALEAVKNATNEQDLANRFKEFGKEMVKLNYVAARRQQELKDPHCRDEMAAARGALKKNATMLYTASQAFLRHPDVAATRANRDYVFKQVQEAIAGISNAAQATSPTDEAKGHTGIGELAAALNEFDNKIILDPMTFSEARFRPSLEERLESIISGAALMADSSCTRDDRRERIVAECNAVRQALQDLLSEYMNNTGRKEKGDPLNIAIDKMTKKTRDLRRQLRKAVMDHISDSFLETNVPLLVLIEAAKSGNEKEVKEYAQVFREHANKLVEVANLACSISNNEEGVKLVRMAATQIDSLCPQVINAALTLAARPQSKVAQDNMDVFKDQWEKQVRVLTEAVDDITSVDDFLSVSENHILEDVNKCVIALQEGDVDTLDRTAGAIRGRAARVIHIINAEMENYEAGVYTEKVLEATKLLSETVMPRFAEQVEVAIEALSANVPQPFEENEFIDASRLVYDGVRDIRKAVLMIRTPEELEDDSDFEQEDYDVRSRTSVQTEDDQLIAGQSARAIMAQLPQEEKAKIAEQVEIFHQEKSKLDAEVAKWDDSGNDIIVLAKQMCMIMMEMTDFTRGKGPLKNTSDVINAAKKIAEAGSRMDKLARAVADQCPDSACKQDLLAYLQRIALYCHQLNICSKVKAEVQNLGGELIVSGLDSATSLIQAAKNLMNAVVLTVKASYVASTKYQKVYGTAAVNSPVVSWKMKAPEKKPLVKREKPEEFQTRVRRGSQKKHISPVQALSEFKAMDSF

SEQ ID NO: 20800 - protein, 860 aa, Homo sapiens
MTSATSPIILKWDPKSLEIRTLTVERLLEPLVTQVTTLVNTSNKGPSGKKKGRSKKAHVLAASVEQATQNFLEKGEQIAKESQDLKEELVAAVEDVRKQGETMRIASSEFADDPCSSVKRGTMVRAARALLSAVTRLLILADMADVMRLLSHLKIVEEALEAVKNATNEQDLANRFKEFGKEMVKLNYVAARRQQELKDPHCRDEMAAARGALKKNATMLYTASQAFLRHPDVAATRANRDYVFKQVQEAIAGISNAAQATSPTDEAKGHTGIGELAAALNEFDNKIILDPMTFSEARFRPSLEERLESIISGAALMADSSCTRDDRRERIVAECNAVRQALQDLLSEYMNNTGRKEKGDPLNIAIDKMTKKTRDLRRQLRKAVMDHISDSFLETNVPLLVLIEAAKSGNEKEVKEYAQVFREHANKLVEVANLACSISNNEEGVKLVRMAATQIDSLCPQVINAALTLAARPQSKVAQDNMDVFKDQWEKQVRVLTEAVDDITSVDDFLSVSENHILEDVNKCVIALQEGDVDTLDRTAGAIRGRAARVIHIINAEMENYEAGVYTEKVLEATKLLSETVMPRFAEQVEVAIEALSANVPQPFEENEFIDASRLVYDGVRDIRKAVLMIRTPEELEDDSDFEQEDYDVRSRTSVQTEDDQLIAGQSARAIMAQLPQEEKAKIAEQVEIFHQEKSKLDAEVAKWDDSGNDIIVLAKQMCMIMMEMTDFTRGKGPLKNTSDVINAAKKIAEAGSRMDKLARAVADQLDSATSLIQAAKNLMNAVVLTVKASYVASTKYQKVYGTAAVNSPVVSWKMKAPEKKPLVKREKPEEFQTRVRRGSQKKHISPVQALSEFKAMDSF

SEQ ID NO: 20801 - protein, 537 aa, Homo sapiens
MTKKTRDLRRQLRKAVMDHISDSFLETNVPLLVLIEAAKSGNEKEVKEYAQVFREHANKLVEVANLACSISNNEEGVKLVRMAATQIDSLCPQVINAALTLAARPQSKVAQDNMDVFKDQWEKQVRVLTEAVDDITSVDDFLSVSENHILEDVNKCVIALQEGDVDTLDRTAGAIRGRAARVIHIINAEMENYEAGVYTEKVLEATKLLSETVMPRFAEQVEVAIEALSANVPQPFEENEFIDASRLVYDGVRDIRKAVLMIRTPEELEDDSDFEQEDYDVRSRTSVQTEDDQLIAGQSARAIMAQLPQEEKAKIAEQVEIFHQEKSKLDAEVAKWDDSGNDIIVLAKQMCMIMMEMTDFTRGKGPLKNTSDVINAAKKIAEAGSRMDKLARAVADQCPDSACKQDLLAYLQRIALYCHQLNICSKVKAEVQNLGGELIVSGLDSATSLIQAAKNLMNAVVLTVKASYVASTKYQKVYGTAAVNSPVVSWKMKAPEKKPLVKREKPEEFQTRVRRGSQKKHISPVQALSEFKAMDSF

SEQ ID NO: 20802 - protein, 939 aa, Homo sapiens
MSGLICLQYGLWHGQKIDFGGPRRLLQRNRGEGSMTSATSPIILKWDPKSLEIRTLTVERLLEPLVTQVTTLVNTSNKGPSGKKKGRSKKAHVLAASVEQATQNFLEKGEQIAKESQDLKEELVAAVEDVRKQGETMRIASSEFADDPCSSVKRGTMVRAARALLSAVTRLLILADMADVMRLLSHLKIVEEALEAVKNATNEQDLANRFKEFGKEMVKLNYVAARRQQELKDPHCRDEMAAARGALKKNATMLYTASQAFLRHPDVAATRANRDYVFKQVQEAIAGISNAAQATSPTDEAKGHTGIGELAAALNEFDNKIILDPMTFSEARFRPSLEERLESIISGAALMADSSCTRDDRRERIVAECNAVRQALQDLLSEYMNNTGRKEKGDPLNIAIDKMTKKTRDLRRQLRKAVMDHISDSFLETNVPLLVLIEAAKSGNEKEVKEYAQVFREHANKLVEVANLACSISNNEEGVKLVRMAATQIDSLCPQVINAALTLAARPQSKVAQDNMDVFKDQWEKQVRVLTEAVDDITSVDDFLSVSENHILEDVNKCVIALQEGDVDTLDRTAGAIRGRAARVIHIINAEMENYEAGVYTEKVLEATKLLSETVMPRFAEQVEVAIEALSANVPQPFEENEFIDASRLVYDGVRDIRKAVLMIRTPEELEDDSDFEQEDYDVRSRTSVQTEDDQLIAGQSARAIMAQLPQEEKAKIAEQVEIFHQEKSKLDAEVAKWDDSGNDIIVLAKQMCMIMMEMTDFTRGKGPLKNTSDVINAAKKIAEAGSRMDKLARAVADQCPDSACKQDLLAYLQRIALYCHQLNICSKVKAEVQNLGGELIVSGLDSATSLIQAAKNLMNAVVLTVKASYVASTKYQKVYGTAAVNSPVVSWKMKAPEKKPLVKREKPEEFQTRVRRGSQKKHISPVQALSEFKAMDSF

SEQ ID NO: 20803 - protein, 584 aa, Homo sapiens
MDGWRRPLQSVGKVCEKNMKTSEMHTMSGAQTGRKEKGDPLNIAIDKMTKKTRDLRRQLRKAVMDHISDSFLETNVPLLVLIEAAKSGNEKEVKEYAQVFREHANKLVEVANLACSISNNEEGVKLVRMAATQIDSLCPQVINAALTLAARPQSKVAQDNMDVFKDQWEKQVRVLTEAVDDITSVDDFLSVSENHILEDVNKCVIALQEGDVDTLDRTAGAIRGRAARVIHIINAEMENYEAGVYTEKVLEATKLLSETVMPRFAEQVEVAIEALSANVPQPFEENEFIDASRLVYDGVRDIRKAVLMIRTPEELEDDSDFEQEDYDVRSRTSVQTEDDQLIAGQSARAIMAQLPQEEKAKIAEQVEIFHQEKSKLDAEVAKWDDSGNDIIVLAKQMCMIMMEMTDFTRGKGPLKNTSDVINAAKKIAEAGSRMDKLARAVADQCPDSACKQDLLAYLQRIALYCHQLNICSKVKAEVQNLGGELIVSGLDSATSLIQAAKNLMNAVVLTVKASYVASTKYQKVYGTAAVNSPVVSWKMKAPEKKPLVKREKPEEFQTRVRRGSQKKHISPVQALSEFKAMDSF

SEQ ID NO: 20804 - protein, 1265 aa, Homo sapiens
MKVRLLRQLSAAAKVKAPSGLQGPPQAHQFISLLLEEYGALCQAARSISTFLGTLENEHLKKFQVTWELHNKHLFENLVFSEPLLQSNLPALVSQIRLGTTTHDTCSEDTYSTLLQRYQRSEEELRRVAEEWLECQKRIDAYVDEQMTMKTKQRMLTEDWELFKQRRFIEEQLTNKKAVTGENNFTDTMRHMLSSRLSMPDCPNCNYRRRCACDDCSLSHILTCGIMDPPVTDDIHIHQLPLQVDPAPDYLAERSPPSVSSASSGSGSSSPITIQQHPRLILTDSGSAPTFCSDDEDVAPLSAKFADIYPLSNYDDTEVVANMNGIHSELNGGGENMALKDESPQISSTSSSSSEADDEEADGESSGEPPGAPKEDGVLGSRSPRTEESKADSPPPSYPTQQAEQAPNTCECHVCKQEASGLTPSAMTAGALPPGHQFLSPEKPTHPALHLYPHIHGHVPLHTVPHLPRPLIHPTLYATPPFTHSKALPPAPVQNHTNKHQVFNASLQDHIYPSCFGNTPEWNSSKFISLWGSEVMNDKNWNPGTFLPDTISGSEILGPTLSETRPEALPPPSSNETPAVSDSKEKKNAAKKKCLYNFQDAFMEANKVVMATSSATSSVSCTATTVQSSNSQFRVSSKRPPSVGDVFHGISKEDHRHSAPAAPRNSPTGLAPLPALSPAALSPAALSPASTPHLANLAAPSFPKTATTTPGFVDTRKSFCPAPLPPATDGSISAPPSVCSDPDCEGHRCENGVYDPQQDDGDESADEDSCSEHSSSTSTSTNQKEGKYCDCCYCEFFGHGGPPAAPTSRNYAEMREKLRLRLTKRKEEQPKKMDQISERESVVDHRRVEDLLQFINSSETKPVSSTRAAKRARHKQRKLEEKARLEAEARAREHLHLQEEQRRREEEEDEEEEEDRFKEEFQRLQELQKLRAVKKKKKERPSKDCPKLDMLTRNFQAATESVPNSGNIHNGSLEQTEEPETSSHSPSRHMNHSEPRPGLGADGDAADPVDTRDSKFLLPKEVNGKQHEPLSFFFDIMQHHKEGNGKQKLRQTSKASSEPARRPTEPPKATEGQSKPRAQTESKAKVVDLMSITEQKREERKVNSNNNNKKQLNHIKDEKSNPTPMEPTSPGEHQQNSKLVLAESPQPKGKNKKNKKKKGDRVNNSIDGVSLLLPSLGYNGAILAHCNLRLPGSSDCAASASQVVGITDDVFLPKDIDLDSVDMDETEREVEYFKRFCLDSARQTRQRLSINWSNFSLKKATFAAH

SEQ ID NO: 20805 - protein, 1224 aa, Homo sapiens
MKVRLLRQLSAAAKVKAPSGLQGPPQAHQFISLLLEEYGALCQAARSISTFLGTLENEHLKKFQVTWELHNKHLFENLVFSEPLLQSNLPALVSQIRLGTTTHDTCSEDTYSTLLQRYQRSEEELRRVAEEWLECQKRIDAYVDEQMTMKTKQRMLTEDWELFKQRRFIEEQLTNKKAVTGENNFTDTMRHMLSSRLSMPDCPNCNYRRRCACDDCSLSHILTCGIMDPPVTDDIHIHQLPLQVDPAPDYLAERSPPSVSSASSGSGSSSPITIQQHPRLILTDSGSAPTFCSDDEDVAPLSAKFADIYPLSNYDDTEVVANMNGIHSELNGGGENMALKDESPQISSTSSSSSEADDEEADGESSGEPPGAPKEDGVLGSRSPRTEESKADSPPPSYPTQQAEQAPNTCECHVCKQEASGLTPSAMTAGALPPGHQFLSPEKPTHPALHLYPHIHGHVPLHTVPHLPRPLIHPTLYATPPFTHSKALPPAPVQNHTNKHQVFNASLQDHIYPSCFGNTPEWNSSKFISLWGSEVMNDKNWNPGTFLPDTISGSEILGPTLSETRPEALPPPSSNETPAVSDSKEKKNAAKKKCLYNFQDAFMEANKVVMATSSATSSVSCTATTVQSSNSQFRVSSKRPPSVGDVFHGISKEDHRHSAPAAPRNSPTGLAPLPALSPAALSPAALSPASTPHLANLAAPSFPKTATTTPGFVDTRKSFCPAPLPPATDGSISAPPSVCSDPDCEGHRCENGVYDPQQDDGDESADEDSCSEHSSSTSTSTNQKEGKYCDCCYCEFFGHGGPPAAPTSRNYAEMREKLRLRLTKRKEEQPKKMDQISERESVVDHRRVEDLLQFINSSETKPVSSTRAAKRARHKQRKLEEKARLEAEARAREHLHLQEEQRRREEEEDEEEEEDRFKEEFQRLQELQKLRAVKKKKKERPSKDCPKLDMLTRNFQAATESVPNSGNIHNGSLEQTEEPETSSHSPSRHMNHSEPRPGLGADGDAADPVDTRDSKFLLPKEVNGKQHEPLSFFFDIMQHHKEGNGKQKLRQTSKASSEPARRPTEPPKATEGQSKPRAQTESKAKVVDLMSITEQKREERKVNSNNNNKKQLNHIKDEKSNPTPMEPTSPGEHQQNSKLVLAESPQPKGKNKKNKKKKGDRVNNSIDDVFLPKDIDLDSVDMDETEREVEYFKRFCLDSARQTRQRLSINWSNFSLKKATFAAH

SEQ ID NO: 20806 - protein, 792 aa, Homo sapiens
MKVRLLRQLSAAAKVKAPSGLQGPPQAHQFISLLLEEYGALCQAARSISTFLGTLENEHLKKFQVTWELHNKHLFENLVFSEPLLQSNLPALVSQIRLGTTTHDTCSEDTYSTLLQRYQRSEEELRRVAEEWLECQKRIDAYVDEQMTMKTKQRMLTEDWELFKQRRFIEEQLTNKKAVTGENNFTDTMRHMLSSRLSMPDCPNCNYRRRCACDDCSLSHILTCGIMDPPVTDDIHIHQLPLQVDPAPDYLAERSPPSVSSASSGSGSSSPITIQQHPRLILTDSGSAPTFCSDDEDVAPLSAKFADIYPLSNYDDTEVVANMNGIHSELNGGGENMALKDESPQISSTSSSSSEADDEEADGESSGEPPGAPKEDGVLGSRSPRTEESKADSPPPSYPTQQAEQAPNTCECHVCKQEASGLTPSAMTAGALPPGHQFLSPEKPTHPALHLYPHIHGHVPLHTVPHLPRPLIHPTLYATPPFTHSKALPPAPVQNHTNKHQVFNASLQDHIYPSCFGNTPEWNSSKFISLWGSEVMNDKNWNPGTFLPDTISGSEILGPTLSETRPEALPPPSSNETPAVSDSKEKKNAAKKKCLYNFQDAFMEANKVVMATSSATSSVSCTATTVQSSNSQFRVSSKRPPSVGDVFHGISKEDHRHSAPAAPRNSPTGLAPLPALSPAALSPAALSPASTPHLANLAAPSFPKTATTTPGFVDTRKSFCPAPLPPATDGSISAPPSVCSDPDCEGHRCENGVYDPQQDDGDESADEDSCSEHSSSTSTSTNQKEASSCTNK

SEQ ID NO: 20807 - protein, 1119 aa, Homo sapiens
MTMKTKQRMLTEDWELFKQRRFIEEQLTNKKAVTGENNFTDTMRHMLSSRLSMPDCPNCNYRRRCACDDCSLSHILTCGIMDPPVTDDIHIHQLPLQVDPAPDYLAERSPPSVSSASSGSGSSSPITIQQHPRLILTDSGSAPTFCSDDEDVAPLSAKFADIYPLSNYDDTEVVANMNGIHSELNGGGENMALKDESPQISSTSSSSSEADDEEADGESSGEPPGAPKEDGVLGSRSPRTEESKADSPPPSYPTQQAEQAPNTCECHVCKQEASGLTPSAMTAGALPPGHQFLSPEKPTHPALHLYPHIHGHVPLHTVPHLPRPLIHPTLYATPPFTHSKALPPAPVQNHTNKHQVFNASLQDHIYPSCFGNTPEWNSSKFISLWGSEVMNDKNWNPGTFLPDTISGSEILGPTLSETRPEALPPPSSNETPAVSDSKEKKNAAKKKCLYNFQDAFMEANKVVMATSSATSSVSCTATTVQSSNSQFRVSSKRPPSVGDVFHGISKEDHRHSAPAAPRNSPTGLAPLPALSPAALSPAALSPASTPHLANLAAPSFPKTATTTPGFVDTRKSFCPAPLPPATDGSISAPPSVCSDPDCEGHRCENGVYDPQQDDGDESADEDSCSEHSSSTSTSTNQKEGKYCDCCYCEFFGHGGPPAAPTSRNYAEMREKLRLRLTKRKEEQPKKMDQISERESVVDHRRVEDLLQFINSSETKPVSSTRAAKRARHKQRKLEEKARLEAEARAREHLHLQEEQRRREEEEDEEEEEDRFKEEFQRLQELQKLRAVKKKKKERPSKDCPKLDMLTRNFQAATESVPNSGNIHNGSLEQTEEPETSSHSPSRHMNHSEPRPGLGADGDAADPVDTRDSKFLLPKEVNGKQHEPLSFFFDIMQHHKEGNGKQKLRQTSKASSEPARRPTEPPKATEGQSKPRAQTESKAKVVDLMSITEQKREERKVNSNNNNKKQLNHIKDEKSNPTPMEPTSPGEHQQNSKLVLAESPQPKGKNKKNKKKKGDRVNNSIDGVSLLLPSLGYNGAILAHCNLRLPGSSDCAASASQVVGITDDVFLPKDIDLDSVDMDETEREVEYFKRFCLDSARQTRQRLSINWSNFSLKKATFAAH

SEQ ID NO: 20808 - protein, 1246 aa, Homo sapiens
MKVRLLRQLSAAAKVKAPSGLQGPPQAHQFISLLLEEYGALCQAARSISTFLGTLENEHLKKFQVTWELHNKHLFENLVFSEPLLQSNLPALVSQIRLGTTTHDTCSEDTYSTLLQRYQRSEEELRRVAEEWLECQKRIDAYVDEQDLQTSVNKSIDTGTLVQSWLRGAAMTMKTKQRMLTEDWELFKQRRFIEEQLTNKKAVTGENNFTDTMRHMLSSRLSMPDCPNCNYRRRCACDDCSLSHILTCGIMDPPVTDDIHIHQLPLQVDPAPDYLAERSPPSVSSASSGSGSSSPITIQQHPRLILTDSGSAPTFDDEDVAPLSAKFADIYPLSNYDDTEVVANMNGIHSELNGGGENMALKDESPQISSTSSSSSEADDEEADGESSGEPPGAPKEDGVLGSRSPRTEESKADSPPPSYPTQQAEQAPNTCECHVCKQEASGLTPSAMTAGALPPGHQFLSPEKPTHPALHLYPHIHGHVPLHTVPHLPRPLIHPTLYATPPFTHSKALPPAPVQNHTNKHQVFNASLQDHIYPSCFGNTPEWNSSKFISLWGSEVMNDKNWNPGTFLPDTISGSEILGPTLSETRPEALPPPSSNETPAVSDSKEKKNAAKKKCLYNFQDAFMEANKVVMATSSATSSVSCTATTVQSSNSQFRVSSKRPPSVGDVFHGISKEDHRHSAPAAPRNSPTGLAPLPALSPAALSPAALSPASTPHLANLAAPSFPKTATTTPGFVDTRKSFCPAPLPPATDGSISAPPSVCSDPDCEGHRCENGVYDPQQDDGDESADEDSCSEHSSSTSTSTNQKEGKYCDCCYCEFFGHGGPPAAPTSRNYAEMREKLRLRLTKRKEEQPKKMDQISERESVVDHRRVEDLLQFINSSETKPVSSTRAAKRARHKQRKLEEKARLEAEARAREHLHLQEEQRRREEEEDEEEEEDRFKEEFQRLQELQKLRAVKKKKKERPSKDCPKLDMLTRNFQAATESVPNSGNIHNGSLEQTEEPETSSHSPSRHMNHSEPRPGLGADGDAADPVDTRDSKFLLPKEVNGKQHEPLSFFFDIMQHHKEGNGKQKLRQTSKASSEPARRPTEPPKATEGQSKPRAQTESKAKVVDLMSITEQKREERKVNSNNNNKKQLNHIKDEKSNPTPMEPTSPGEHQQNSKLVLAESPQPKGKNKKNKKKKGDRVNNSIDDVFLPKDIDLDSVDMDETEREVEYFKRFCLDSARQTRQRLSINWSNFSLKKATFAAH

SEQ ID NO: 20809 - protein, 1211 aa, Homo sapiens
MKVRLLRQLSAAAKVKAPSGLQGPPQAHQFISLLLEEYGALCQAARSISTFLGTLENEHLKKFQVTWELHNKHLFENLVFSEPLLQSNLPALVSQIRLGTTTHDTCSEDTYSTLLQRYQRSEEELRRVAEEWLECQKRIDAYVDEQMTMKTKQRMLTEDWELFKQRRFIEEQLTNKKAVTGENNFTDTMRHMLSSRLSMPDCPNCNYRRRCACDDCSLSHILTCGIMDPPVTDDIHIHQLPLQVDPAPDYLAERSPPSVSSASSGSGSSSPITIQQHPRLILTDSGSAPTFCSDDEDVAPLSAKFADIYPLSNYDDTEVVANMNGIHSELNGGGENMALKDESPQISSTSSSSSEADDEEADGESSGEPPGAPKEDGVLGSRSPRTEESKADSPPPSYPTQQAEQAPNTCECHVCKQEASGLTPSAMTAGALPPGHQFLSPEKPTHPALHLYPHIHGHVPLHTVPHLPRPLIHPTLYATPPFTHSKALPPAPVQNHTNKHQVFNASLQDHIYPSCFGNTPEWNSSKFISLWGSEVMNDKNWNPGTFLPDTISGSEILGPTLSETRPEALPPPSSNETPAVSDSKEKKNAAKKKCLYNFQDAFMEANKVVMATSSATSSVSCTATTVQSSNSQFRVSSKRPPSVGDVFHGISKEDHRHSAPAAPRNSPTGLAPLPALSPAALSPAALSPASTPHLANLAAPSFPKTATTTPGFVDTRKSFCPAPLPPATDGSISAPPSVCSDPDCEGHRCENGVYDPQQDDGDESADEDSCSEHSSSTSTSTNQKEGKYCDCCYCEFFGHGGPPAAPTSRNYAEMREKLRLRLTKRKEEQPKKMDQISERESVVDHRRVEDLLQFINSSETKPVSSTRAAKRARHKQRKLEEKARLEAEARAREHLHLQEEQRRREEEEDEEEEEDRFKEEFQRLQELQKLRAVKKKKKERPSKDCPKLDMLTRNFQAATESVPNSGNIHNGSLEQTEEPETSSHSPSRHMNHSEPRPGLGADGDAADPVDTRDSKFLLPKEVNGKQHEPLSFFFDIMQHHKEGNGKQKLRQTSKASSEPARRPTEPPKATEGQSKPRAQTESKAKVVDLMSITEQKREERKVNSNNNNKKQLNHIKDEKSNPTPMEPTSPGEHQQNSKLVLAESPQPKGKNKKNKKKKGDRVNNSIDDVFLPKDIDLDSVDMDETEREVEYFKRDGVSPHCPGWSRTPGLK

SEQ ID NO: 20810 - protein, 895 aa, Homo sapiens
MSAETPITLNIDPQDLQVQTFTVEKLLEPLIIQVTTLVNCPQNPSSRKKGRSKRASVLLASVEEATWNLLDKGEKIAQEATVLKDELTASLEEVRKESEALKVSAERFTDDPCFLPKREAVVQAARALLAAVTRLLILADMIDVMCLLQHVSAFQRTFESLKNVANKSDLQKTYQKLGKELENLDYLAFKRQQDLKSPNQRDEIAGARASLKENSPLLHSICSACLEHSDVASLKASKDTVCEEIQNALNVISNASQGIQNMTTPPEPQAATLGSALDELENLIVLNPLTVTEEEIRPSLEKRLEAIISGAALLADSSCTRDLHRERIIAECNAIRQALQDLLSEYMNNAGKKERSNTLNIALDNMCKKTRDLRRQLRKAIIDHVSDSFLDTTVPLLVLIEAAKNGREKEIKEYAAIFHEHTSRLVEVANLACSMSTNEDGIKIVKIAANHLETLCPQIINAALALAARPKSQAVKNTMEMYKRTWENHIHVLTEAVDDITSIDDFLAVSESHILEDVNKCIIALRDQDADNLDRAAGAIRGRAARVAHIVTGEMDSYEPGAYTEGVMRNVNFLTSTVIPEFVTQVNVALEALSKSSLNVLDDNQFVDISKKIYDTIHDIRCSVMMIRTPEELEDVSDLEEEHEVRSHTSIQTEGKTDRAKMTQLPEAEKEKIAEQVADFKKVKSKLDAEIEIWDDTSNDIIVLAKNMCMIMMEMTDFTRGKGPLKHTTDVIYAAKMISESGSRMDVLARQIANQCPDPSCKQDLLAYLEQIKFYSHQLKICSQVKAEIQNLGGELIMSALDSVTSLIQAAKNLMNAVVQTVKMSYIASTKIIRIQSPAGPRHPVVMWRMKAPAKKPLIKREKPEETCAAVRRGSAKKKIHPLQVMSEFRGRQIY

SEQ ID NO: 20811 - protein, 516 aa, Homo sapiens
MSAETPITLNIDPQDLQVQTFTVEKLLEPLIIQVTTLVNCPQNPSSRKKGRSKRASVLLASVEEATWNLLDKGEKIAQEATVLKDELTASLEEVRKESEALKVSAERFTDDPCFLPKREAVVQAARALLAAVTRLLILADMIDVMCLLQHVSAFQRTFESLKNVANKSDLQKTYQKLGKELENLDYLAFKRQQDLKSPNQRDEIAGARASLKENSPLLHSICSACLEHSDVASLKASKDTVCEEIQNALNVISNASQGIQNMTTPPEPQAATLGSALDELENLIVLNPLTVTEEEIRPSLEKRLEAIISGAALLADSSCTRDLHRERIIAECNAIRQALQDLLSEYMNNAGKKERSNTLNIALDNMCKKTRDLRRQLRKAIIDHVSDSFLDTTVPLLVLIEAAKNGREKEIKEYAAIFHEHTSRLVEVANLACSMSTNEDGIKIVKIAANHLETLCPQIINAALALAARPKSQAVKNTMEMYKRTWENHIHVLTEAVDDITSIDDFLAVSGMFLFF

SEQ ID NO: 20812 - protein, 384 aa, Homo sapiens
MAFLMKKKKFKFQTTFTLEELTAVPFVNGVLFCKVRLLDGGDFVSLSSREEVQENCVRWRKRFTFVCKMSANPATGLLDPCVFRVSVRKELKGGKAYSKLGFADLNLAEFAGSGSTVRCCLLEGYDTKNTRQDNSILKVTIGMFLLSGDPCFKTPPSTAKSISIPGQDSSLQLTCKGGGTSSGGSSTNSLTGSRPPKARPTILSSGLPEEPDQNLSSPEEVFHSGHSRNSSYASQQSKISGYSTEHSRSSSLSDLTHRRNTSTSSSASGGLGMTVEGPEGSEREHRPPEKPPRPPRPLHLSDRSFRRKKDSVESHPTWVDDTRIDADAIVEKIVQSQDFTDGSNTEDSNLRLFVSRDGSATLSGIQLATRVSSGVYEPVVIESH

SEQ ID NO: 20813 - protein, 370 aa, Homo sapiens
MAFLMKKKKFKFQTTFTLEELTAVPFVNGVLFCKVRLLDGGDFVSLSSREEVQENCVRWRKRFTFVCKMSANPATGLLDPCVFRVSVRKELKGGKAYSKLGFADLNLAEFAGSGSTVRCCLLEGYDTKNTRQDNSILKVTIGMFLLSGDPCFKTPPSTAKSISIPGQDSSLQLTCKGGGTSSGGSSTNSLTGSRPPKARPTILSSGLPEEPDQNLSSPEEVFHSGHSRNSSYASQQSKISGYSTEHSRSSSLSDLTHRRNTSTSSSASGGLGMTVEGPEGSEREHRPPEKPPRPPRPLHLSDRSFRRKKDSVESHPTWVDDTRIDADAIVEKIVQSQDFTDGSNTEDSNLRLFVSRDGSATLSGIQLATR

SEQ ID NO: 20814 - protein, 242 aa, Homo sapiens
MFLLSGDPCFKTPPSTAKSISIPGQDSSLQLTCKGGGTSSGGSSTNSLTGSRPPKARPTILSSGLPEEPDQNLSSPEEVFHSGHSRNSSYASQQSKISGYSTEHSRSSSLSDLTHRRNTSTSSSASGGLGMTVEGPEGSEREHRPPEKPPRPPRPLHLSDRSFRRKKDSVESHPTWVDDTRIDADAIVEKIVQSQDFTDGSNTEDSNLRLFVSRDGSATLSGIQLATRVSSGVYEPVVIESH

SEQ ID NO: 20815 - protein, 131 aa, Homo sapiens
MAEPDYIEDDNPELIRPQKLINPVKTSRNHQDLHRELLMNQKRGLAPQNKPELQKVMEKRKRDQVIKQKEEEAQKKKSDLEIELLKRQQKLEQLELEKQKLQEEQENAPEFVKVKGNLRRTGQEVAQAQES

SEQ ID NO: 20816 - protein, 306 aa, Homo sapiens
MSTWKARLTKRLKSPSRSMHPFPCSALLACFGNTRESASFNQSGVADTHSTVRVQPVAKAGRQPRHPSAEGAPEKRQDSSTHAERNGSANRNSSHRTAAQPAETPEDVPGSLDDGADCEAVVFHASIPRPSIIDTPKEEEFREEPKCLELEQKMTSDSPPEDIDHKDSYLITRSIMAEPDYIEDDNPELIRPQKLINPVKTSRNHQDLHRELLMNQKRGLAPQNKPELQKVMEKRKRDQVIKQKEEEAQKKKSDLEIELLKRQQKLEQLELEKQKLQEEQENAPEFVKVKGNLRRTGQEVAQAQES

SEQ ID NO: 20817 - protein, 734 aa, Homo sapiens
MAASPGPAGVGGAGAVYGSGSSGFALDSGLEIKTRSVEQTLLPLVSQITTLINHKDNTKKSDKTLQAIQRVGQAVNLAVGRFVKVGEAIANENWDLKEEINIACIEAKQAGETIAALTDITNLNHLESDGQITIFTDKTGVIKAARLLLSSVTKVLLLADRVVIKQIITSRNKVLATMERLEKVNSFQEFVQIFSQFGNEMVEFAHLSGDRQNDLKDEKKKAKMAAARAVLEKCTMMLLTASKTCLRHPNCESAHKNKEGVFDRMKVALDKVIEIVTDCKPNGETDISSISIFTGIKEFKMNIEALRENLYFQSKENLSVTLEVILERMEDFTDSAYTSHEHRERILELSTQARMELQQLISVWIQAQSKKTKSIAEELELSILKISHSLNELKKELHSTATQLAADLLKYHADHVVLKALKLTGVEGNLEALAEYACKLSEQKEQLVETCRLLRHISGTEPLEITCIHAEETFQVTGQQIISAAETLTLHPSSKIAKENLDVFCEAWESQISDMSTLLREINDVFEGRRGEKYGYLSLPKPMKNNANLKSLKPDKPDSEEQAKIAKLGLKLGLLTSDADCEIEKWEDQENEIVQYGRNMSSMAYSLYLFTRGEGPLKTSQDLIHQLEVFAAEGLKLTSSVQAFSKQLKDDDKLMLLLEINKLIPLCHQLQTVTKTSLQNKVFLKVDKCITKTRSMMALLVQLLSLCYKLLKKLQMENNGWVSVTNKDTMDSKT

SEQ ID NO: 20818 - protein, 718 aa, Homo sapiens
MAASPGPAGVGGAGAVYGSGSSGFALDSGLEIKTRSVEQTLLPLVSQITTLINHKDNTKKSDKTLQAIQRVGQAVNLAVGRFVKVGEAIANENWDLKEEINIACIEAKQAGETIAALTDITNLNHLESDGQITIFTDKTGVIKAARLLLSSVTKVLLLADRVVIKQIITSRNKVLATMERLEKVNSFQEFVQIFSQFGNEMVEFAHLSGDRQNDLKDEKKKAKMAAARAVLEKCTMMLLTASKTCLRHPNCESAHKNKEGVFDRMKVALDKVIEIVTDCKPNGETDISSISIFTGIKEFKMNIEALRENLYFQSKENLSVTLEVILERMEDFTDSAYTSHEHRERILELSTQARMELQQLISVWIQAQSKKTKSIAEELELSILKISHSLNELKKELHSTATQLAADLLKYHADHVVLKALKLTGVEGNLEALAEYACKLSEQKEQLVETCRLLRHISGTEPLEITCIHAEETFQVTGQQIISAAETLTLHPSSKIAKENLDVFCEAWESQISDMSTLLREINDVFEGRRGEKYGYLSLPKPMKNNANLKSLKPDKPDSEEQAKIAKLGLKLGLLTSDADCEIEKWEDQENEIVQYGRNMSSMAYSLYLFTRGEGPLKTSQDLIHQLEVFAAEGLKLTSSVQAFSKQLKDDDKLMLLLEINKLIPLCHQLQTVTKTSLQNKVFLKVDKCITKTRSMMALLVQLLSLCYKLLKKSETRY

SEQ ID NO: 20819 - protein, 650 aa, Homo sapiens
MAASPGPAGVGGAGAVYGSGSSGFALDSGLEIKTRSVEQTLLPLVSQITTLINHKDNTKKSDKTLQAIQRVGQAVNLAVGRFVKVGEAIANENWDLKEEINIACIEAKQAGETIAALTDITNLNHLESDGQITIFTDKTGVIKAARLLLSSVTKVLLLADRVVIKQIITSRNKVLATMERLEKVNSFQEFVQIFSQFGNEMVEFAHLSGDRQNDLKDEKKKAKMAAARAVLEKCTMMLLTASKTCLRHPNCESAHKNKEGVFDRMKVALDKVIEIVTDCKPNGETDISSISIFTGIKEFKMNIEALRENLYFQSKENLSVTLEVILERMEDFTDSAYTSHEHRERILELSTQARMELQQLISVWIQAQSKKTKSIAEELELSILKISHSLNELKKEIISAAETLTLHPSSKIAKENLDVFCEAWESQISDMSTLLREINDVFEGRRGEKYGYLSLPKPMKNNANLKSLKPDKPDSEEQAKIAKLGLKLGLLTSDADCEIEKWEDQENEIVQYGRNMSSMAYSLYLFTRGEGPLKTSQDLIHQLEVFAAEGLKLTSSVQAFSKQLKDDDKLMLLLEINKLIPLCHQLQTVTKTSLQNKVFLKVDKCITKTRSMMALLVQLLSLCYKLLKKLQMENNGWVSVTNKDTMDSKT

SEQ ID NO: 20820 - protein, 81 aa, Homo sapiens
MMFPLARNALSSLKIQSILQSMARHSHVKHSPDFHDKYGNAVLASGTAFCVATWVFTATQIGIEWNLSPVGRVTPKEWKHQ

SEQ ID NO: 20821 - protein, 136 aa, Homo sapiens
MMHTTSYRRLSPPHLTDQPSAYSHTHRTFSHFSCGSQPAAQRLHVELWNADLQSEFLCPCLGLTLYLTCNPQLGKRKFCSHSSEDMSKMVSRRNVKDSHEVSGSLQATLQVISFSFPFLLHTCSHPLSHPTSGQRR

SEQ ID NO: 20822 - protein, 515 aa, Homo sapiens
MGDWNLLGDTLEEVHIHSTMIGKIWLTILFIFRMLVLGVAAEDVWNDEQSGFICNTEQPGCRNVCYDQAFPISLIRYWVLQVIFVSSPSLVYMGHALYRLRVLEEERQRMKAQLRVELEEVEFEMPRDRRRLEQELCQLEKRKLNKAPLRGTLLCTYVIHIFTRSVVEVGFMIGQYLLYGFHLEPLFKCHGHPCPNIIDCFVSRPTEKTIFLLFMQSIATISLFLNILEIFHLGFKKIKRGLWGKYKLKKEHNEFHANKAKQNVAKYQSTSANSLKRLPSAPDYNLLVEKQTHTAVYPSLNSSSVFQPNPDNHSVNDEKCILDEQETVLSNEISTLSTSCSHFQHISSNNNKDTHKIFGKELNGNQLMEKRETEGKDSKRNYYSRGHRSIPGVAIDGENNMRQSPQTVFSLPANCDWKPRWLRATWGSSTEHENRGSPPKGNLKGQFRKGTVRTLPPSQGDSQSLDIPNTADSLGGLSFEPGLVRTCNNPVCPPNHVVSLTNNLIGRRVPTDLQI

SEQ ID NO: 20823 - protein, 514 aa, Homo sapiens
MGDWNLLGDTLEEVHIHSTMIGKIWLTILFIFRMLVLGVAAEDVWNDEQSGFICNTEQPGCRNVCYDQAFPISLIRYWVLQVIFVSSPSLVYMGHALYRLRVLEEERQRMKAQLRVELEEVEFEMPRDRRRLEQELCQLEKRKLNKAPLRGTLLCTYVIHIFTRSVVEVGFMIGQYLLYGFHLEPLFKCHGHPCPNIIDCFVSRPTEKTIFLLFMQSIATISLFLNILEIFHLGFKKIKRGLWGKYKLKKEHNEFHANKAKQNVAKYQSTSANSLKRLPSAPDYNLLVEKQTHTAVYPSLNSSSVFQPNPDNHSVNDEKCILDEQETVLSNEISTLSTSCSHFQHISSNNNKDTHKIFGKELNGNQLMEKRETEGKDSKRNYYSRGHRSIPGVAIDGENNMRQSPQTVFSLPANCDWKPRWLRATWGSSTEHENRGSPPKVPGSKATASSLLLILQRPTSSQPRLKETPKIKAEAKIYDSKHPPQLLQSTVSTFSGREPRSPAPMGHHSFRGPR

SEQ ID NO: 20824 - protein, 365 aa, Homo sapiens
MALLLCFVLLCGVVDFARSLSITTPEEMIEKAKGETAYLPCKFTLSPEDQGPLDIEWLISPADNQKVDQVIILYSGDKIYDDYYPDLKGRVHFTSNDLKSGDASINVTNLQLSDIGTYQCKVKKAPGVANKKIHLVVLVKPSGARCYVDGSEEIGSDFKIKCEPKEGSLPLQYEWQKLSDSQKMPTSWLAEMTSSVISVKNASSEYSGTYSCTVRNRVGSDQCLLRLNVVPPSNKAGLIAGAIIGTLLALALIGLIIFCCRKKRREEKYEKEVHHDIREDVPPPKSRTSTARSYIGSNHSSLGSMSPSNMEGYSKTQYNQVPSEDFERTPQSPTLPPAKVAAPNLSRMGAIPVMIPAQSKDGSIV

SEQ ID NO: 20825 - protein, 344 aa, Homo sapiens
MALLLCFVLLCGVVDFARSLSITTPEEMIEKAKGETAYLPCKFTLSPEDQGPLDIEWLISPADNQKVDQVIILYSGDKIYDDYYPDLKGRVHFTSNDLKSGDASINVTNLQLSDIGTYQCKVKKAPGVANKKIHLVVLVKPSGARCYVDGSEEIGSDFKIKCEPKEGSLPLQYEWQKLSDSQKMPTSWLAEMTSSVISVKNASSEYSGTYSCTVRNRVGSDQCLLRLNVVPPSNKAGLIAGAIIGTLLALALIGLIIFCCRKKRREEKYEKEVHHDIREDVPPPKSRTSTARSYIGSNHSSLGSMSPSNMEGYSKTQYNQVPSEDFERTPQSPTLPPAKFKYPY

SEQ ID NO: 20826 - protein, 89 aa, Homo sapiens
MALLLCFVLLCGVVDFARSLSITTPEEMIEKAKGETAYLPCKFTLSPEDQGPLDIEWLISPADNQKVDQVGRCATSKEPYVHCQKLHRQ

SEQ ID NO: 20827 - protein, 200 aa, Homo sapiens
MALLLCFVLLCGVVDFARSLSITTPEEMIEKAKGETAYLPCKFTLSPEDQGPLDIEWLISPADNQKVDQVIILYSGDKIYDDYYPDLKGRVHFTSNDLKSGDASINVTNLQLSDIGTYQCKVKKAPGVANKKIHLVVLGKMCHLQRAVRPLPEATSAVIIHPWGPCLLPTWKDIPRLSITKYQVKTLNALLRVRLSHLLR

SEQ ID NO: 20828 - protein, 252 aa, Homo sapiens
MALLLCFVLLCGVVDFARSLSITTPEEMIEKAKGETAYLPCKFTLSPEDQGPLDIEWLISPADNQKVDQVIILYSGDKIYDDYYPDLKGRVHFTSNDLKSGDASINVTNLQLSDIGTYQCKVKKAPGVANKKIHLVVLVKPSGARCYVDGSEEIGSDFKIKCEPKEGSLPLQYEWQKLSDSQKMPTSWLAGKMCHLQRAVRPLPEATSAVIIHPWGPCLLPTWKDIPRLSITKYQVKTLNALLRVRLSHLLR

SEQ ID NO: 20829 - protein, 352 aa, Homo sapiens
MALLLCFVLLCGVVDFARSLSITTPEEMIEKAKGETAYLPCKFTLSPEDQGPLDIEWLISPADNQKVDQVIILYSGDKIYDDYYPDLKGRVHFTSNDLKSGDASINVTNLQLSDIGTYQCKVKKAPGVANKKIHLVVLVKPSGARCYVDGSEEIGSDFKIKCEPKEGSLPLQYEWQKLSDSQKMPTSWLAEMTSSVISVKNASSEYSGTYSCTVRNRVGSDQCLLRLNVVPPSNKAGLIAGAIIGTLLALALIGLIIFCCRKKRREEKYEKEVHHDIREDVPPPKSRTSTARSYIGSNHSSLGSMSPSNMEGYSKTQYNQVPSEDFERTPQSPTLPPAKFKYPYKTDGITVV

SEQ ID NO: 20830 - protein, 324 aa, Homo sapiens
MALLLCFVLLCGVVDFARSLSITTPEEMIEKAKGETAYLPCKFTLSPEDQGPLDIEWLISPADNQKVDQVIILYSGDKIYDDYYPDLKGRVHFTSNDLKSGDASINVTNLQLSDIGTYQCKVKKAPGVANKKIHLVVLVKPSGARCYVDGSEEIGSDFKIKCEPKEGSLPLQYEWQKLSDSQKMPTSWLAASNKAGLIAGAIIGTLLALALIGLIIFCCRKKRREEKYEKEVHHDIREDVPPPKSRTSTARSYIGSNHSSLGSMSPSNMEGYSKTQYNQVPSEDFERTPQSPTLPPAKVAAPNLSRMGAIPVMIPAQSKDGSIV

SEQ ID NO: 20831 - protein, 77 aa, Homo sapiens
MTTLSKSKQPSAAGNLDEQTPGECFCRSCFVTSSEVWKRWKHLDPACAADPWEAPTPRIEKPDGKECLGRTSCPRLA

SEQ ID NO: 20832 - protein, 768 aa, Homo sapiens
MSNLSKGTGSRKDTKMRIRAFPMTMDEKYVNSIWDLLKNAIQEIQRKNNSGLSFEELYRNAYTMVLHKHGEKLYTGLREVVTEHLINKVREDVLNSLNNNFLQTLNQAWNDHQTAMVMIRDILMYMDRVYVQQNNVENVYNLGLIIFRDQVVRYGCIRDHLRQTLLDMIARERKGEVVDRGAIRNACQMLMILGLEGRSVYEEDFEAPFLEMSAEFFQMESQKFLAENSASVYIKKVEARINEEIERVMHCLDKSTEEPIVKVVERELISKHMKTIVEMENSGLVHMLKNGKTEDLGCMYKLFSRVPNGLKTMCECMSSYLREQGKALVSEEGEGKNPVDYIQGLLDLKSRFDRFLLESFNNDRLFKQTIAGDFEYFLNLNSRSPEYLSLFIDDKLKKGVKGLTEQEVETILDKAMVLFRFMQEKDVFERYYKQHLARRLLTNKSVSDDSEKNMISKLKTECGCQFTSKLEGMFRDMSISNTTMDEFRQHLQATGVSLGGVDLTVRVLTTGYWPTQSATPKCNIPPAPRHAFEIFRRFYLAKHSGRQLTLQHHMGSADLNATFYGPVKKEDGSEVGVGGAQVTGSNTRKHILQVSTFQMTILMLFNNREKYTFEEIQQETDIPERELVRALQSLACGKPTQRVLTKEPKSKEIENGHIFTVNDQFTSKLHRVKIQTVAAKQGESDPERKETRQKVDDDRKHEIEAAIVRIMKSRKKMQHNVLVAEVTQQLKARFLPSPVVIKKRIEGLIEREYLARTPEDRKVYTYVA

SEQ ID NO: 20833 - protein, 744 aa, Homo sapiens
MDEKYVNSIWDLLKNAIQEIQRKNNSGLSFEELYRNAYTMVLHKHGEKLYTGLREVVTEHLINKVREDVLNSLNNNFLQTLNQAWNDHQTAMVMIRDILMYMDRVYVQQNNVENVYNLGLIIFRDQVVRYGCIRDHLRQTLLDMIARERKGEVVDRGAIRNACQMLMILGLEGRSVYEEDFEAPFLEMSAEFFQMESQKFLAENSASVYIKKVEARINEEIERVMHCLDKSTEEPIVKVVERELISKHMKTIVEMENSGLVHMLKNGKTEDLGCMYKLFSRVPNGLKTMCECMSSYLREQGKALVSEEGEGKNPVDYIQGLLDLKSRFDRFLLESFNNDRLFKQTIAGDFEYFLNLNSRSPEYLSLFIDDKLKKGVKGLTEQEVETILDKAMVLFRFMQEKDVFERYYKQHLARRLLTNKSVSDDSEKNMISKLKTECGCQFTSKLEGMFRDMSISNTTMDEFRQHLQATGVSLGGVDLTVRVLTTGYWPTQSATPKCNIPPAPRHAFEIFRRFYLAKHSGRQLTLQHHMGSADLNATFYGPVKKEDGSEVGVGGAQVTGSNTRKHILQVSTFQMTILMLFNNREKYTFEEIQQETDIPERELVRALQSLACGKPTQRVLTKEPKSKEIENGHIFTVNDQFTSKLHRVKIQTVAAKQGESDPERKETRQKVDDDRKHEIEAAIVRIMKSRKKMQHNVLVAEVTQQLKARFLPSPVVIKKRIEGLIEREYLARTPEDRKVYTYVA

SEQ ID NO: 20834 - protein, 702 aa, Homo sapiens
MSNLSKGTGSRKDTKMRIRAFPVREDVLNSLNNNFLQTLNQAWNDHQTAMVMIRDILMYMDRVYVQQNNVENVYNLGLIIFRDQVVRYGCIRDHLRQTLLDMIARERKGEVVDRGAIRNACQMLMILGLEGRSVYEEDFEAPFLEMSAEFFQMESQKFLAENSASVYIKKVEARINEEIERVMHCLDKSTEEPIVKVVERELISKHMKTIVEMENSGLVHMLKNGKTEDLGCMYKLFSRVPNGLKTMCECMSSYLREQGKALVSEEGEGKNPVDYIQGLLDLKSRFDRFLLESFNNDRLFKQTIAGDFEYFLNLNSRSPEYLSLFIDDKLKKGVKGLTEQEVETILDKAMVLFRFMQEKDVFERYYKQHLARRLLTNKSVSDDSEKNMISKLKTECGCQFTSKLEGMFRDMSISNTTMDEFRQHLQATGVSLGGVDLTVRVLTTGYWPTQSATPKCNIPPAPRHAFEIFRRFYLAKHSGRQLTLQHHMGSADLNATFYGPVKKEDGSEVGVGGAQVTGSNTRKHILQVSTFQMTILMLFNNREKYTFEEIQQETDIPERELVRALQSLACGKPTQRVLTKEPKSKEIENGHIFTVNDQFTSKLHRVKIQTVAAKQGESDPERKETRQKVDDDRKHEIEAAIVRIMKSRKKMQHNVLVAEVTQQLKARFLPSPVVIKKRIEGLIEREYLARTPEDRKVYTYVA

SEQ ID NO: 20835 - protein, 219 aa, Homo sapiens
MAPPSRHCLLLISTLGVFALNCFTKGQKNSTLIFTRENTIRNCSCSADIRDCDYSLANLMCNCKTVLPLAVERTSYNGHLTIWFTDTSALGHLLNFTLVQDLKLSLCSTNTLPTEYLAICGLKRLRINMEAKHPFPEQSLLIHSGGDSDSREKPMWLHKGWQPCMYISFLDMALFNRDSAFKSYSIENVTSIANNFPDFSYFRTFPMPSNKSYVVTFIY

SEQ ID NO: 20836 - protein, 254 aa, Homo sapiens
MDNYADLSDTELTTLLRRYNIPHGPVVGSTRRLYEKKIFEYETQRRRLSPPSSSAASSYSFSDLNSTRGDADMYDLPKKEDALLYQSKGYNDDYYEESYFTTRTYGEPESAGPSRAVRQSVTSFPDADAFHHQVHDDDLLSSSEEECKDRERPMYGRDSAYQSITHYRPVSASRSSLDLSYYPTSSSTSFMSSSSSSSSWLTRRAIRPENRAPGAGLGQDRQVPLWGQLLLFLVFVIVLFFIYHFMQAEEGNPF

SEQ ID NO: 20837 - protein, 305 aa, Homo sapiens
MSRELAPLLLLLLSIHSALAMRICSFNVRSFGESKQEDKNAMDVIVKVIKRCDIILVMEIKDSNNRICPILMEKLNRNSRRGITYNYVISSRLGRNTYKEQYAFLYKEKLVSVKRSYHYHDYQDGDADVFSREPFVVWFQSPHTAVKDFVIIPLHTTPETSVKEIDELVEVYTDVKHRWKAENFIFMGDFNAGCSYVPKKAWKNIRLRTDPRFVWLIGDQEDTTVKKSTNCAYDRIVLRGQEIVSSVVPKSNSVFDFQKAYKLTEEEALDVSDHFPVEFKLQSSRAFTNSKKSVTLRKKTKSKRS

SEQ ID NO: 20838 - protein, 275 aa, Homo sapiens
MSRELAPLLLLLLSIHSALAMRICSFNVRSFGESKQEDKNAMDVIVKVIKRCDIILVMEIKDSNNRICPILMEKLNREKLVSVKRSYHYHDYQDGDADVFSREPFVVWFQSPHTAVKDFVIIPLHTTPETSVKEIDELVEVYTDVKHRWKAENFIFMGDFNAGCSYVPKKAWKNIRLRTDPRFVWLIGDQEDTTVKKSTNCAYDRIVLRGQEIVSSVVPKSNSVFDFQKAYKLTEEEALDVSDHFPVEFKLQSSRAFTNSKKSVTLRKKTKSKRS

SEQ ID NO: 20839 - protein, 746 aa, Homo sapiens
MQAKKRYFILLSAGSCLALLFYFGGLQFRASRSHSRREEHSGRNGLHHPSPDHFWPRFPDALRPFVPWDQLENEDSSVHISPRQKRDANSSIYKGKKCRMESCFDFTLCKKNGFKVYVYPQQKGEKIAESYQNILAAIEGSRFYTSDPSQACLFVLSLDTLDRDQLSPQYVHNLRSKVQSLHLWNNGRNHLIFNLYSGTWPDYTEDVGFDIGQAMLAKASISTENFRPNFDVSIPLFSKDHPRTGGERGFLKFNTIPPLRKYMLVFKGKRYLTGIGSDTRNALYHVHNGEDVVLLTTCKHGKDWQKHKDSRCDRDNTEYEKYDYREMLHNATFCLVPRGRRLGSFRFLEALQAACVPVMLSNGWELPFSEVINWNQAAVIGDERLLLQIPSTIRSIHQDKILALRQQTQFLWEAYFSSVEKIVLTTLEIIQDRIFKHISRNSLIWNKHPGGLFVLPQYSSYLGDFPYYYANLGLKPPSKFTAVIHAVTPLVSQSQPVLKLLVAAAKSQYCAQIIVLWNCDKPLPAKHRWPATAVPVVVIEGESKVMSSRFLPYDNIITDAVLSLDEDTVLSTTEVDFAFTVWQSFPERIVGYPARSHFWDNSKERWGYTSKWTNDYSMVLTGAAIYHKYYHYLYSHYLPASLKNMVDQLANCEDILMNFLVSAVTKLPPIKVTQKKQYKETMMGQTSRASRWADPDHFAQRQSCMNTFASWFGYMPLIHSQMRLDPVLFKDQVSILRKKYRDIERL

SEQ ID NO: 20840 - protein, 915 aa, Homo sapiens
MRKSSSPSLSNCNSVLANKIFGIPLDELQQGGHPDNEVPFIVRHVVDYIEEHGGLEQQGLFQVNGNAETVEWLRQRYDSGEEVDLVKEADVPSAISLLRFFLQELPEPVIPGSLHIHLMQLSQDYNNEDEFGRKLRFLLQQLPPVNYSLLKFLCRFLANVASHHEEIWSANSLAAVFGPDVFHIYTDVEDMKEQEIVSRIMAGLLENYYEFFENEEEDFSSNDLSSITEQVNELSEEEEEDEKLEHIEELPEEGAEKSNDMPEVVQLRMTENILESNSVTATSTHISPISILPASTDILERTIRAAVEQHLFDLQSSIDHDLKNLQQQSVVCNNEAESIHCDGEGSNNQIDIADDIINASESNRDCSKPVASTNLDNEAMQQDCVFENEENTQSVGILLEPCSDRGDSEDGCLEREEYLLFDSDKLSHLILDSSSKICDLNANTESEVPGGQSVGVQGEAACVSIPHLDLKNVSDGDKWEEPFPAFKSWQEDSESGEAQLSPQAGRMNHHPLEEDCPPVLSHRSLDFGQSQRFLHDPEKLDSSSKALSFTRIRRSSFSSKDEKREDRTPYQLVKKLQKKIRQFEEQFERERNSKPSYSDIAANPKVLKWMTELTKLRKQIKDAKHKNSDGEFVPQTRPRSNTLPKSFGSSLDHEDEENEDEPKVIQKEKKPSKEATLELILKRLKEKRIERCLPEDIKKMTKDHLVEEKASLQKSLLYYESQHGRPVTKEERHIVKPLYDRYRLVKQMLTRASITPVLGSPSTKRRGQMLQPIIEGETAHFFEEIKEEEEDGVNLSSELGDMLKTAVQVQSSLENSESDVEENQEKLALDLRLSSSRAASMPELLEQLWKARAEKKKLRKTLREFEEAFYQQNGRNAQKEDRVPVLEEYREYKKIKAKLRLLEVLISKQDSSKSI

SEQ ID NO: 20841 - protein, 887 aa, Homo sapiens
MRKSSSPSLSNCNSVLANKIFGIPLDELQQGGHPDNEVPFIVRHVVDYIEEHGGLEQQGLFQVNGNAETVEWLRQRYDSGEEVDLVKEADVPSAISLLRFFLQELPEPVIPGSLHIHLMQLSQDYNNEDEFGRKLRFLLQQLPPVNYSLLKFLCRFLANVASHHEEIWSANSLAAVFGPDVFHIYTDVEDMKEQEIVSRIMAGLLENYYEFFENEEEDFSSNDLSSITEQVNELSEEEEEDEKLEHIEELPEEGAEKSNDMPEVVQLRMTENILESNSVTATSTHISPISILPASTDILERTIRAAVEQHLFDLQSSIDHDLKNLQQQSVVCNNEAESIHCDGEGSNNQIDIADDIINASESNRDCSKPVASTNLDNEAMQQDCVFENEENTQSVGILLEPCSDRGDSEDGCLEREEYLLFDSDKLSHLILDSSSKICDLNANTESEVPGGQSVGVQGEAACVSIPHLDLKNVSDGDKWEEPFPAFKSWQEDSESGEAQLSPQAGRMNHHPLEEDCPPVLSHRSLDFGQSQRFLHDPEKLDSSSKALSFTRIRRSSFSSKDEKREDRTPYQLVKKLQKKIRQFEEQFERERNSKPSYSDIAANPKVLKWMTELTKLRKQIKDAKHKNSDGEFVPQTRPRSNTLPKSFGSSLDHEDEENEDEPKVIQKEKKPSKEATLELILKRLKEKRIERCLPEDIKVTKEERHIVKPLYDRYRLVKQMLTRASITPVLGSPSTKRRGQMLQPIIEGETAHFFEEIKEEEEDGVNLSSELGDMLKTAVQVQSSLENSESDVEENQEKLALDLRLSSSRAASMPELLEQLWKARAEKKKLRKTLREFEEAFYQQNGRNAQKEDRVPVLEEYREYKKIKAKLRLLEVLISKQDSSKSI

SEQ ID NO: 20842 - protein, 791 aa, Homo sapiens
MQLSQDYNNEDEFGRKLRFLLQQLPPVNYSLLKFLCRFLANVASHHEEIWSANSLAAVFGPDVFHIYTDVEDMKEQEIVSRIMAGLLENYYEFFENEEEDFSSNDLSSITEQVNELSEEEEEDEKLEHIEELPEEGAEKSNDMPEVVQLRMTENILESNSVTATSTHISPISILPASTDILERTIRAAVEQHLFDLQSSIDHDLKNLQQQSVVCNNEAESIHCDGEGSNNQIDIADDIINASESNRDCSKPVASTNLDNEAMQQDCVFENEENTQSVGILLEPCSDRGDSEDGCLEREEYLLFDSDKLSHLILDSSSKICDLNANTESEVPGGQSVGVQGEAACVSIPHLDLKNVSDGDKWEASCPITFPLIDFKTMHLQRDGEEPFPAFKSWQEDSESGEAQLSPQAGRMNHHPLEEDCPPVLSHRSLDFGQSQRFLHDPEKLDSSSKALSFTRIRRSSFSSKDEKREDRTPYQLVKKLQKKIRQFEEQFERERNSKPSYSDIAANPKVLKWMTELTKLRKQIKDAKHKNSDGEFVPQTRPRSNTLPKSFGSSLDHEDEENEDEPKVIQKEKKPSKEATLELILKRLKEKRIERCLPEDIKVTKEERHIVKPLYDRYRLVKQMLTRASITPVLGSPSTKRRGQMLQPIIEGETAHFFEEIKEEEEDGVNLSSELGDMLKTAVQVQSSLENSESDVEENQEKLALDLRLSSSRAASMPELLEQLWKARAEKKKLRKTLREFEEAFYQQNGRNAQKEDRVPVLEEYREYKKIKAKLRLLEVLISKQDSSKSI

SEQ ID NO: 20843 - protein, 413 aa, Homo sapiens
MHLALTTVLLWAWGLQAFEIVEKENIFQRTPCPAFLMFENAAYLADMSFELPCHCKPEEVPAVVWFYQKHLGSSHTKVLTDFDGRVLTEAAQVRVGSDMLTRFSIRMFSLLVFRAQSEDSGLYFCGTRKGDYFYAYDVDIQNSEGMVATFQDKGQEPFADEYYGHLHVFTTFWEWTPCDRCGVRGEQWRIGLCYLQSPDLSPRYLKAVPDVVSCGSRAVPRKLRTKARDHTPEVLVRSCLVPCEKTKTIREGVLAIINYVSKVGSRPWVPQVPIQFHQQRLGHGLIISCPGARPEHAVAWDKDRQHLYRTQYLKGVNRSMRVFIDHGNQLHIRFTQLDDRGIYYCWRQGVLVAGFRLGVTSHGHYPASFSDPETRSAVELTLIGYLLITAVFVTIHFCRCCCYLFHCCPSFSP

SEQ ID NO: 20844 - protein, 926 aa, Homo sapiens
MSRRRKHDDSPSPKKTPHKTVAAEECGSVVEPGRRRLRSARGSWPCGAREGPPGPVRQREQPPTAALCSKSNPEERYETPKRALKMDSLSSSFSSPNDPDGQNDIFWDQNSPLTKQLGKGRKKQIYTTDSDEISHIVNRIAPQDEKPTTNSMLDMWIGETAIPCTPSVAKGKSRAKISCTKLKTQSQEEELMKLAKQFDKNMEELDVIQEQNKRNYDFTQMISETEILSNYKDNIQMWSLHNIVPEIDNATKKPIKGNTKISVANNQNSSQKPFDQIAEAAFNAIFDGSTQKCSGQLSQELPEAFWSTSNTTFVKTNALKEEKIITNETLVIEKLSNKTPRSLSSQVDTPIMTKSCVTSCTKEPETSNKYIDAFTTSDFEDDWENLLGSEPFAMQNIDMPELFPSKTAHVTDQKEICTFNSKTVKNTSRANTSPDARLGDSKVLQDLSSKTYDRELIDAEYRFSPNSNKSNKLSTGNKMKFENSSNKIVIQDEIQNCIVTSNLTKIKEDILTNSTEASERKSALNTRYSNEQKNKCILNQSIKAPVNTDLFGSANLGSKTSVSNPNQTSASKVGSFFDDWNDPSFANEIIKACHQLDNTWEADDVDDDLLYQACDDIERLTQQQDIRKDSKTSESICEINNNSEHGAKLTQQQDIRKDSKTSESICEINNNSEHGAKNMFAISKQGSNLVQSKHLNPGSISVQTSLTNSSQIDKPMKMEKGEMYGNSPRFLGATNLTMYSKISNCQINNLHVSYTNTDVPIQVNSSKLVLPGSSSLNVTSDHMNTEITTYKKKLSTNQPCHKTVTDEAQSNLNTTVGFSKFTFTRMKNSQILSQFNQNCITGSMSDTKITQGVEKKKGVNPLLEEAVGQQSLVKLSESLKQSSKEEEEKNRKCSPEEIQRKRQEALVRRMAKARASSVNAAPTSFL

SEQ ID NO: 20845 - protein, 1406 aa, Homo sapiens
MSEIQGTVEFSVELHKFYNVDLFQRGYYQIRVTLKVSSRIPHRLSASIAGQTESSSLHSACVHDSTVHSRVFQILYRNEEVPINDAVVFRVHLLLGGERMEDALSEVDFQLKVDLHFTDSEQQLRDVAGAPMVSSRTLGLHFHPRNGLHHQVPVMFDYFHLSVISVTVHAALVALQQPLISFTRPGRGSWLGKGGPDTGQEQSIISLENLVFGAGYCKPTSSEGSFYITSENCMQHAHKWHRDLCLLLLHAYRGLRLHFLVIMRDIPELPHTELEALAVEETLSQLCSELQMLNNPEKIAEQISKDLAWLTSHMMTLWTQFLDTVTLHSQVTTYLTQEHHTLRVRRFSEAFFYMEHQKLAVLTFQENLIQTHSQLSLDIRNSEYLTSMPPLPAECLDIDGDWNTLPVIFEDRYVDCPATGHNLSVYPNFDVPVTSPTIMNLKDKEDNCMVNSNLSFREDLVLSTIKPSQMDSDEEVIRCPEPGENVATQNHMDMCSESQVYISIGEFQNKAGVPEDECWTGQTSDAGTYPVADVDTSRRSPGPEDGQAPVLTYIDVKSSNKNPSRAEPLVAFNAQHESRSSRDKYGLDRTGLSKVVVGGSHQNAISSDKTTLHELSTLGKGIDQEGKMVLLSLKLTPSEPCDPLSSTLREPLDIRSSLKDSHTEEQEELSVLSGVIKRSSSIISDSGIESEPSSVAWSEARSRALELPSDREVLHPFVRRHALHRNSLEGGHTESNTSLPSGIQASLTSISSLPFEEDEREVALTKLTKSVSAPHISSPEEAAEDADTKQQDGGFAEPSDMHSKSQGSPGSCSQLCGDSGTDAGADHPLVEIVLDADNQQGPGYIDIPKGKGKQFDAQGHCLPDGRTENTPGVETKGLNLKIPRVIALENPRTRSLHRALEETPKGMPKDLNVGQQALSNSGISEVEGLSQHQVPELSCTSAADAINRNSTGQQSQSGSPCIMDDTAFNRGVNAFPEAKHKAGTVCPTVTHSVHSQVLKNQELKAGTSIMGSHLTSAETFTLDSLKAVEVVNLSVSCTATCLPFSSVPKETPARAGFSSKQTLFPITHQPLGSFGVVSTHSSTLDEEVSERMFSFYQAKEKFKKELKIEGFLYSDLTVLASDIPYFPPEEEEENLEDGIHLVVCVHGLDGNSADLRLVKTFIELGLPGGKLDFLMSEKNQMDTFADFDTMTDRLLDEIIQHIQLYNLSISRISFIGHSLGNIIIRSVLTRPRFRYYLNKLHTFLSLSGPHLGTLYNNSTLVSTGLWLMQKLKKSGSLLQLTFRDNADLRKCFLYQLSQKTGLQYFKNVVLVASPQDRYVPFHSARIEMCKTALKDRHTGPVYAEMINNLLGPLVEAKDCTLIRHNVFHALPNTANTLIGRAAHIAVLDSELFLEKFFLVAGLNYFK

SEQ ID NO: 20846 - protein, 1307 aa, Homo sapiens
MEDALSEVDFQLKVDLHFTDSEQQLRDVAGAPMVSSRTLGLHFHPRNGLHHQVPVMFDYFHLSVISVTVHAALVALQQPLISFTRPGRGSWLGKGGPDTGQEQSIISLENLVFGAGYCKPTSSEGSFYITSENCMQHAHKWHRDLCLLLLHAYRGLRLHFLVIMRDIPELPHTELEALAVEETLSQLCSELQMLNNPEKIAEQISKDLAWLTSHMMTLWTQFLDTVTLHSQVTTYLTQEHHTLRVRRFSEAFFYMEHQKLAVLTFQENLIQTHSQLSLDIRNSEYLTSMPPLPAECLDIDGDWNTLPVIFEDRYVDCPATGHNLSVYPNFDVPVTSPTIMNLKDKEDNCMVNSNLSFREDLVLSTIKPSQMDSDEEVIRCPEPGENVATQNHMDMCSESQVYISIGEFQNKAGVPEDECWTGQTSDAGTYPVADVDTSRRSPGPEDGQAPVLTYIDVKSSNKNPSRAEPLVAFNAQHESRSSRDKYGLDRTGLSKVVVGGSHQNAISSDKTTLHELSTLGKGIDQEGKMVLLSLKLTPSEPCDPLSSTLREPLDIRSSLKDSHTEEQEELSVLSGVIKRSSSIISDSGIESEPSSVAWSEARSRALELPSDREVLHPFVRRHALHRNSLEGGHTESNTSLPSGIQASLTSISSLPFEEDEREVALTKLTKSVSAPHISSPEEAAEDADTKQQDGGFAEPSDMHSKSQGSPGSCSQLCGDSGTDAGADHPLVEIVLDADNQQGPGYIDIPKGKGKQFDAQGHCLPDGRTENTPGVETKGLNLKIPRVIALENPRTRSLHRALEETPKGMPKDLNVGQQALSNSGISEVEGLSQHQVPELSCTSAADAINRNSTGQQSQSGSPCIMDDTAFNRGVNAFPEAKHKAGTVCPTVTHSVHSQVLKNQELKAGTSIMGSHLTSAETFTLDSLKAVEVVNLSVSCTATCLPFSSVPKETPARAGFSSKQTLFPITHQPLGSFGVVSTHSSTLDEEVSERMFSFYQAKEKFKKELKIEGFLYSDLTVLASDIPYFPPEEEEENLEDGIHLVVCVHGLDGNSADLRLVKTFIELGLPGGKLDFLMSEKNQMDTFADFDTMTDRLLDEIIQHIQLYNLSISRISFIGHSLGNIIIRSVLTRPRFRYYLNKLHTFLSLSGPHLGTLYNNSTLVSTGLWLMQKLKKSGSLLQLTFRDNADLRKCFLYQLSQKTGLQYFKNVVLVASPQDRYVPFHSARIEMCKTALKDRHTGPVYAEMINNLLGPLVEAKDCTLIRHNVFHALPNTANTLIGRAAHIAVLDSELFLEKFFLVAGLNYFK

SEQ ID NO: 20847 - protein, 1141 aa, Homo sapiens
MSEIQGTVEFSVELHKFYNVDLFQRGYYQIRVTLKVSSRIPHRLSASIAGQTESSSLHSACVHDSTVHSRVFQILYRNEEVPINDAVVFRVHLLLGGERMEDALSEVDFQLKVDLHFTDSEQQLRDVAGAPMVSSRTLGLHFHPRNGLHHQVPVMFDYFHLSVISVTVHAALVALQQPLISFTRPGRGSWLGKGGPDTGQEQSIISLENLVFGAGYCKPTSSEGSFYITSENCMQHAHKWHRDLCLLLLHAYRGLRLHFLVIMRDIPELPHTELEALAVEETLSQLCSELQMLNNPEKIAEQISKDLAWLTSHMMTLWTQFLDTVTLHSQVTTYLTQEHHTLRVRRFSEAFFYMEHQKLAVLTFQENLIQTHSQLSLDIRNSEYLTSMPPLPAECLDIDGDWNTLPVIFEDRYVDCPATGHNLSVYPNFDVPVTSPTIMNLKDKEDNCMVNSNLSFREDLVLSTIKPSQMDSDEEVIRCPEPGENVATQNHMDMCSESQVYISIGEFQNKAGVPEDECWTGQTSDAGTYPVADVDTSRRSPGPEDGQAPVLTYIDVKSSNKNPSRAEPLVAFNAQHESRSSRDKYGLDRTGLSKVVVGGSHQNAISSDKTTLHELSTLGKGIDQEGKMVLLSLKLTPSEPCDPLSSTLREPLDIRSSLKDSHTEEQEELSVLSGVIKRSSSIISDSGIESEPSSVAWSEARSRALELPSDREVLHPFVRRHALHRNSLEGGHTESNTSLPSGIQASLTSISSLPFEEDEREVALTKLTKSVSAPHISSPEEAAEDADTKQQDGGFAEPSDMHSKSQGSPGSCSQLCGDSGTDAGADHPLVEIVLDADNQQGPGYIDIPKGKGKQFDAQGHCLPDGRTENTPGVETKGLNLKIPRVIALENPRTRSLHRALEETPKGMPKDLNVGQQALSNSGISEVEGLSQHQVPELSCTSAADAINRNSTGQQSQSGSPCIMDDTAFNRGVNAFPEAKHKAGTVCPTVTHSVHSQVLKNQELKAGTSIMGSHLTSAETFTLDSLKAVEVVNLSVSCTATCLPFSSVPKETPARAGFSSKQTLFPITHQPLGSFGVVSTHSSTLDEEVSERMFRGRGRKFGRWNSPGCLCPWPGWEQCRPPAGKDFHRTGAPWRKTGLPNV

SEQ ID NO: 20848 - protein, 1213 aa, Homo sapiens
MSEIQGTVEFSVELHKFYNVDLFQRGYYQIRVTLKVSSRIPHRLSASIAGQTESSSLHSACVHDSTVHSRVFQILYRNEEVPINDAVVFRVHLLLGGERMEDALSEVDFQLKVDLHFTDSEQQLRDVAGAPMVSSRTLGLHFHPRNGLHHQVPVMFDYFHLSVISVTVHAALVALQQPLISFTRPGRGSWLGKGGPDTGQEQSIISLENLVFGAGYCKPTSSEGSFYITSENCMQHAHKWHRDLCLLLLHAYRGLRLHFLVIMRDIPELPHTELEALAVEETLSQLCSELQMLNNPEKIAEQISKDLAWLTSHMMTLWTQFLDTVTLHSQVTTYLTQEHHTLRVRRFSEAFFYMEHQKLAVLTFQENLIQTHSQLSLDIRNSEYLTSMPPLPAECLDIDGDWNTLPVIFEDRYVDCPATGHNLSVYPNFDVPVTSPTIMNLKDKEDNCMVNSNLSFREDLVLSTIKPSQMDSDEEVIRCPEPGENVATQNHMDMCSESQVYISIGEFQNKAGVPEDECWTGQTSDAGTYPVADVDTSRRSPGPEDGQAPVLTYIDVKSSNKNPSRAEPLVAFNAQHESRSSRDKYGLDRTGLSKVVVGGSHQNAISSDKTTLHELSTLGKGIDQEGKMVLLSLKLTPSEPCDPLSSTLREPLDIRSSLKDSHTEEQEELSVLSGVIKRSSSIISDSGIESEPSSVAWSEARSRALELPSDREVLHPFVRRHALHRNSLEGGHTESNTSLPSGIQASLTSISSLPFEEDEREVALTKLTKSVSAPHISSPEEAAEDADTKQQDGGFAEPSDMHSKSQGSPGSCSQLCGDSGTDAGADHPLVEIVLDADNQQGPGYIDIPKGKGKQFDAQGHCLPDGRTENTPGVETKGLNLKIPRVIALENPRTRSLHRALEETPKGMPKDLNVGQQALSNSGISEVEGLSQHQVPELSCTSAADAINRNSTGQQSQSGSPCIMDDTAFNRGVNAFPEAKHKAGTVCPTVTHSVHSQVLKNQELKAGTSIMGSHLTSAETFTLDSLKAVEVVNLSVSCTATCLPFSSVPKETPARAGFSSKQTLFPITHQPLGSFGVVSTHSSTLDEEVSERMFSFYQAKEKFKKELKIEGFLYSDLTVLASDIPYFPPEEEEENLEDGIHLVVCVHGLDGNSADLRLVKTFIELGLPGGKLDFLMSEKNQMDTFADFDTMTDRLLDEIIQHIQLYNLSISRIR

SEQ ID NO: 20849 - protein, 1096 aa, Homo sapiens
MGVQGFQEFLEKRCPGAVVPVDLLKLARTVSRQQQQQHLHRQLPPTAALAPGAPRAARGSVPLQPPLPPAALGAYSGGAGPIRHHHPAHHFHHHGQAQPGLHPPLPPPPPPQLPGARVLVDAGSALPRLYGGYQTDWVCGGQWNAMLGYLSALCQACAYPGGDGLELVVMFPGGLGKDRLAEWGRRCQAERQTAQLIVGHVGNKGTPPPRAWFLPPACLSHCVRLALIRFRVKVFQSLEDHHLEVVAFFRENGFHGLLAHDSEYALYNIPSYYSSHALKLSWNGKNLTTNQFLMQEVAKQLGLKRMNFPIFAALLGNHILPDEDLAAFHWSLLGPEHPLASLKVRAHQLVLPPCDVVIKAVSEYVSSIKDPSNLDVVGKDVFKQSQSRTEDKIERFKKAVEYYSVTTKLSSLPVGPSFLGFRNNRLGNPPLPRNQVGTISAGKPMFSHQVPQKVKYPPPFPVGPNSSLLFSSHALGESHAFSEDPMLQNSPFANWAVSYDSSASQFPNYLPSKASPPLGPDSSHSSSSDGDEPNGASSDHITEAFHHQPEWGNPNRDRGSWAQPVDTGVSEASLGDGEPHIPSLLSMSTRNHMDITIPPLPPVAPEVLRVAEHRHRRGLMYPYIYHVLTKGEIKIPVCIEDECNMELPPAALLFRSARQYVYGVLFSLAETQRKMERLAMRRRLPVEVPSVILKEWSAYKGKSPQTPELVSALTFREWTCPNLKKLWLGKAVEDKNRRMRAFLACMKSDTPSMLNPANVPTHLLLMCCVLRYMVQWPGGRILHRHELDTFLAQAVSTQLYEPDRLQELKIEKLDARGIQLAALFMSGVDTALFANDACGQPVPWEHCCPWIYFDGKLFQSKLIKAGRERVSLVELCDGQADLATKVEKMRQSILEGVNMNHPPPSALLPSPTFVPPMVPSLYPVSLYSRAMGSMPLPPQGRSRGFAGLHPIPPQGGKLEIAGMVVGQWAGSRSSRGRGSFGMQVVSVGGPGKGHGKEQTGRGSKGHKKGNKQGSSDGVSKSLELHQGRSRSQVNGNSGALIKEEKSDHRLPAPSQCALSRDSNECNNGNRYLPMNNREKNHLQEQKLETVAQRKED

SEQ ID NO: 20850 - protein, 238 aa, Homo sapiens
MGVQGFQEFLEKRCPGAVVPVDLLKLARTVSRQQQQQHLHRQLPPTAALAPGAPRAARGSVPLQPPLPPAALGAYSGGAGPIRHHHPAHHFHHHGQAQPGLHPPLPPPPPPQLPGARVLVDAGSALPRLYGGYQTDWVCGGQWNAMLGYLSALCQACAYPGGDGLELVVMFPGGLGKDRLAEWGRRCQAERQTAQLIVGHVGNKGTPPPRAWFLPPACLSHCVRLALIRFRVKQAAML

SEQ ID NO: 20851 - protein, 171 aa, Homo sapiens
MWTLKSSLVLLLCLTCSYAFMFSSLRQKTSEPQGKVQYGEHFRIRQNLPEHTQGWLGSKWLWLLFVVVPFVILQCQRDSEKNKEQSPPGLRGGQLHSPLKKKRNASPNKDCAFNTLMELEVELMKFVSKVRNLKRAMATGSGSNLRLRKSEMPADPYHVTICEIWGEESSS

SEQ ID NO: 20852 - protein, 321 aa, Homo sapiens
MRALAALSAPPNERLLPRDPAATRDPDAARPARRSAVERLAADRAKYVRGRPGTGRGVASEGSGPGAIKCPGNDPGPPARAPAPVARRAIARKPLRPDSLIIYRQKCEFVRGSGADGPRASLVKKLFQGPGKDKAPVPRTGDEGKAGNPETVPTTPGPAADPAIPETPAPAARSAAPSSVPAAPPGPEPRVVRRRGLQRSQSDLSSRYSAALAESDTFFQYCGLDPEVVEALGRENFTAGSDCVTLKVRSVSVATSGSGFSRHSGGDDEGLQEEELIEQVPSTTSVIERNARIIKWLYTCKKAKETPSQEQSRTRGSKPSR

SEQ ID NO: 20853 - protein, 1561 aa, Homo sapiens
MQPGSAPPPGRMDPSAPQPRAETSGKDIWHPGERCLAPSPDNGKLCEASIKSITVDENGKSFAVVLYADFQERKIPLKQLQEVKFVKDCPRNLIFDDEDLEKPYFPNRKFPSSSVAFKLSDNGDSIPYTINRYLRDYQREGTRFLYGHYIHGGGCILGDDMGLGKTVQVISFLAAVLHKKGTREDIENNMPEFLLRSMKKEPLSSTAKKMFLIVAPLSVLYNWKDELDTWGYFRVTVLHGNRKDNELIRVKQRKCEIALTTYETLRLCLDELNSLEWSAVIVDEAHRIKNPKARVTEVMKALKCNVRIGLTGTILQNNMKELWCVMDWAVPGLLGSGTYFKKQFSDPVEHGQRHTATKRELATGRKAMQRLAKKMSGWFLRRTKTLIKDQLPKKEDRMVYCSLTDFQKAVYQTVLETEDVTLILQSSEPCTCRSGQKRRNCCYKTNSHGETVKTLYLSYLTVLQKVANHVALLQAASTSKQQETLIKRICDQVFSRFPDFVQKSKDAAFETLSDPKYSGKMKVLQQLLNHCRKNRDKVLLFSFSTKLLDVLQQYCMASGLDYRRLDGSTKSEERLKIVKEFNSTQDVNICLVSTMAGGLGLNFVGANVVVLFDPTWNPANDLQAIDRAYRIGQCRDVKVLRLISLGTVEEIMYLRQIYKQQLHCVVVGSENAKRYFEAVQGSKEHQGELFGIHNLFKFRSQGSCLTKDILEREGQVEAGIMTATTWLKEGPPAHKLEMPRQPDCQECRGTEQAAEPLAKEACDLCSDFSDEEPVGATGIKTAKNKAPDSSKASSSPGQLTLLQCGFSKLLETKCKAVEDSDGNTASDDESSDEQPTCLSTEAKDAGCEKNQDSLGTSKHQKLDNILNPKEKHIFYKSEKILEQNISSKSDEKKIKNTDKHCILQNVTESEDSDVICPTQYTTERFPDNSIRFKPPLEGSEDSETEHTVKTRNNDNSRNTDDKRNGIISKKLSPENTTLKSILKRKGTSDISDESDDIEISSKSRVRKRASSLRFKRIKETKKELHNSPKTMNKTNQVYAANEDHNSQFIDDYSSSDESLSVSHFSFSKQSHRPRTIRDRTSFSSKLPSHNKKNSTFIPRKPMKCSNEKVVNQEQSYESMDKFLDGVQEVAYIHSNQNVIGSSKAENHMSRWAAHDVFELKQFSQLPANIAVCSSKTYKEKVDADTLPHTKKGQQPSEGSISLPLYISNPVNQKKKKVYHTNQTTFIIGETPKGIRRKQFEEMASYFNSSSVNEFAKHITNATSEERQKMLRDFYASQYPEVKEFFVDSVSQFNNSSFEKGEQRTRKKSDKRESLIKPRLSDSETLSFKDSTNKISQVCSLKTYKRKSVKFQNHISYREEVFFNDAETKKSPVSSTQEIDSGKNSQASEDTVTSRSLNSESETRERRLENTMKDQQDLTRTGISRKEPLLKLENKKIENPVLENTSVISLLGDTSILDDLFKSHGNSPTQLPKKVLSGPMEKAKQRPKDFWDILNEQNDESLSKLTDLAVIETLCEKAPLAAPFKRREEPATSLWKSNEKFLWKKFSPSDTDENATNTQSTT

SEQ ID NO: 20854 - protein, 712 aa, Homo sapiens
MQPGSAPPPGRMDPSAPQPRAETSGKDIWHPGERCLAPSPDNGKLCEASIKSITVDENGKSFAVVLYADFQERKIPLKQLQEVKFVKDCPRNLIFDDEDLEKPYFPNRKFPSSSVAFKLSDNGDSIPYTINRYLRDYQREGTRFLYGHYIHGGGCILGDDMGLGKTVQVISFLAAVLHKKGTREDIENNMPEFLLRSMKKEPLSSTAKKMFLIVAPLSVLYNWKDELDTWGYFRVTVLHGNRKDNELIRVKQRKCEIALTTYETLRLCLDELNSLEWSAVIVDEAHRIKNPKARVTEVMKALKCNVRIGLTGTILQNNMKELWCVMDWAVPGLLGSGTYFKKQFSDPVEHGQRHTATKRELATGRKAMQRLAKKMSGWFLRRTKTLIKDQLPKKEDRMVYCSLTDFQKAVYQTVLETEDVTLILQSSEPCTCRSGQKRRNCCYKTNSHGETVKTLYLSYLTVLQKVANHVALLQAASTSKQQETLIKRICDQVFSRFPDFVQKSKDAAFETLSDPKYSGKMKVLQQLLNHCRKNRDKVLLFSFSTKLLDVLQQYCMASGLDYRRLDGSTKSEERLKIVKEFNSTQDVNICLVSTMAGGLGLNFVGANVVVLFDPTWNPANDLQAIDRAYRIGQCRDVKVLRLISLGTVEEIMYLRQIYKQQLHCVVVGSENAKRYFEAVQGSKEHQGELFGIHNLFKFRSQGSCLTKDILEV

SEQ ID NO: 20855 - protein, 523 aa, Homo sapiens
MQKERELQETIYFKNTWPACMFLIVAPLSVLYNWKDELDTWGYFRVTVLHGNRKDNELIRVKQRKCEIALTTYETLRLCLDELNSLEWSAVIVDEAHRIKNPKARVTEVMKALKCNVRIGLTGTILQNNMKELWCVMDWAVPGLLGSGTYFKKQFSDPVEHGQRHTATKRELATGRKAMQRLAKKMSGWFLRRTKTLIKDQLPKKEDRMVYCSLTDFQKAVYQTVLETEDVTLILQSSEPCTCRSGQKRRNCCYKTNSHGETVKTLYLSYLTVLQKVANHVALLQAASTSKQQETLIKRICDQVFSRFPDFVQKSKDAAFETLSDPKYSGKMKVLQQLLNHCRKNRDKVLLFSFSTKLLDVLQQYCMASGLDYRRLDGSTKSEERLKIVKEFNSTQDVNICLVSTMAGGLGLNFVGANVVVLFDPTWNPANDLQAIDRAYRIGQCRDVKVLRLISLGTVEEIMYLRQIYKQQLHCVVVGSENAKRYFEAVQGSKEHQGELFGIHNLFKFRSQGSCLTKDILEV

SEQ ID NO: 20856 - protein, 512 aa, Homo sapiens
MKAGCSIVEKPEGGGGYQFPDWAYKTESSPGSRQIQLWHFILELLQKEEFRHVIAWQQGEYGEFVIKDPDEVARLWGRRKCKPQMNYDKLSRALRYYYNKRILHKTKGKRFTYKFNFNKLVMPNYPFINIRSSGVVPQSAPPVPTASSRFHFPPLDTHSPTNDVQPGRFSASSLTASGQESSNGTDRKTELSELEDGSAADWRRGVDPVSSRNAIGGGGIGHQKRKPDIMLPLFARPGMYPDPHSPFAVSPIPGRGGVLNVPISPALSLTPTIFSYSPSPGLSPFTSSSCFSFNPEEMKHYLHSQACSVFNYHLSPRTFPRYPGLMVPPLQCQMHPEESTQFSIKLQPPPVGRKNRERVESSEESAPVTTPTMASIPPRIKVEPASEKDPESLRQSAREKEEHTQEEGTVPSRTIEEEKGTIFARPAAPPIWPSVPISTPSGEPLEVTEDSEDRPGKEPSAPEKKEDALMPPKLRLKRRWNDDPEARELSKSGKFLWNGSGPQGLATAAADA

SEQ ID NO: 20857 - protein, 143 aa, Homo sapiens
MKAGCSIVEKPEGGGGYQFPDWAYKTESSPGSRQIQLWHFILELLQKEEFRHVIAWQQGEYGEFVIKDPDEVARLWGRRKCKPQMNYDKLSRALRYYYNKRILHKTKGKRFTYKFNFNKLVMPNYPFINIRSSGKIQTLLVGN

SEQ ID NO: 20858 - protein, 464 aa, Homo sapiens
MMARRDPKSWAKRLVRAQTLQKQRRAPVGPRSPPPDEEDPRLKCKNCGAFGHTARSTRCPMKCWKAALVPATLGKKEGKENLKPWKPRAEANPGPLNKDKGEKEERPRQQDPQRKALLHMFSGKPPEKPLPNGKGSTESSDYLRVASGPMPVHTTSKRPRLDPVLADRSATEMSGRGSVLASLSPLRKASLSSSSSLGPKERQTGAAADMPQPAVRHQGREPLLVVKPTHSRPEGGCREVPQAASKTHGLLQAARPQAQDKRPAVTPQPCPPAATHSLGLGSNLSFGPGAKRPAQAPIQACLNFPKKPRLGPFQIPESAIQGGELGAPENLQPPPAATELGPSTSPQMGRRTPAQVPSVDRQPPHSRPCLPTAQACTMSHHPAASHDGAQPLRVLFRRLENGRWSSSLLAAPSFHSPEKPGAFLAQSPHVSEKSEAPCVRVPPSVLYEDLQVSSSSEDSDSDLE

SEQ ID NO: 20859 - protein, 477 aa, Homo sapiens
MTEKFLFLYLSLLPMPLLSQAQWNENSLVSFSKIIASGNHLSNCWICHNFITRSSSYQYILVRNFSLNLTFGSGIPEGQHKSVPLQVSLANSAHQVPCLDLTPPFNQSSKTSFYFYNCSSLNQTCCPCPEGHCDRKNTSEEGFPSPTIHPMSFSPAGCHPNLTHWCPAKQMNDYRDKSPQNRCAAWEGKELITWRVLYLLPKAHTVPTWPKSTVPLGGPLSPACNQTIPAGWKSQLHKWFDSHIPRWACTPPGYVFLCGPQKNKLPFDGSPKITYSTPPVANLYTCINNIQHTGECAVGLLGPRGIGVTIYNTTQPRQKRALGLILAGMGAAIGMIAPWGGFTYHDVTLRNLSRQIDNIAKSTRDSISKLKASIDSLANVVMNNRLALDYLLAEQGGVCAVISKSCCIYVNNSGAIEEDIKKIYDEVTWLHNFGKGDSAGSIWEAVKSALPSLTWFVPLLGPAALNSLLSPLWPLSL

SEQ ID NO: 20860 - protein, 535 aa, Homo sapiens
MTEKFLFLYLSLLPMPLLSQAQWNENSLVSFSKIIASGNHLSNCWICHNFITRSSSYQYILVRNFSLNLTFGSGIPEGQHKSVPLQVSLANSAHQVPCLDLTPPFNQSSKTSFYFYNCSSLNQTCCPCPEGHCDRKNTSEEGFPSPTIHPMSFSPAGCHPNLTHWCPAKQMNDYRDKSPQNRCAAWEGKELITWRVLYSLPKAHTVPTWPKSTVPLGGPLSPACNQTIPAGWKSQLHKWFDSHIPRWACTPPGYVFLCGPQKNKLPFDGSPKITYSTPPVANLYTCINNIQHTGECAVGLLGPRGIGVTIYNTTQPRQKRALGLILAGMGAAIGMIAPWGGFTYHDVTLRNLSRQIDNIAKSTRDSISKLKASIDSLANVVMDNRLALDYLLAEQGGVCAVINKSCCVYVNNSGAIEEDIKKIYDEATWLHDFGKGGASARAIWEAVKSALPSLNWFVPLLGPATVILLLFLFGPCFFNLLIKCVSSRIKQFHMKSPQMERYQLSVIGGPSTYKHISPLDASGQRFRETMEEFSL

SEQ ID NO: 20861 - protein, 601 aa, Homo sapiens
MAALTPRKRKQDSLKCDSLLHFTENLFPSPNKKHCFYQNSDKNEENLHCSQQEHFVLSALKTTEINRLPSANQGSPFKSALSTVSFYNQNKWYLNPLERKLIKESRSTCLKTNDEDKSFPIVTEKMQGKPVCSKKNNKKPQKSLTAKYQPKYRHIKPVSRNSRNSKQNRVIYKPIVEKENNCHSAENNSNAPRVLSQKIKPQVTLQGGAAFFVRKKSSLRKSSLENEPSLGRTQKSKSEVIEDSDVETVSEKKTFATRQVPKCLVLEEKLKIGLLSASSKNKEKLIKDSSDDRVSSKEHKVDKNEAFSSEDSLGENKTISPKSTVYPIFSASSVNSKRSLGEEQFSVGSVNFMKQTNIQKNTNTRDTSKKTKDQLIIDAGQKHFGATVCKSCGMIYTASNPEDEMQHVQHHHRFLEGIKYVGWKKERVVAEFWDGKIVLVLPHDPSFAIKKVEDVQELVDNELGFQQVVPKCPNKIKTFLFISDEKRVVGCLIAEPIKQAFRVLSEPIGPESPSSTECPRAWQCSDVPEPAVCGISRIWVFRLKRRKRIARRLVDTLRNCFMFGCFLSTDEIAFSDPTPDGKLFATKYCNTPNFLVYNFNS

SEQ ID NO: 20862 - protein, 239 aa, Homo sapiens
MKQTNIQKNTNTRDTSKKTKDQLIIDAGQKHFGATVCKSCGMIYTASNPEDEMQHVQHHHRFLEGIKYVGWKKERVVAEFWDGKIVLVLPHDPSFAIKKVEDVQELVDNELGFQQVVPKCPNKIKTFLFISDEKRVVGCLIAEPIKQAFRVLSEPIGPESPSSTECPRAWQCSDVPEPAVCGISRIWVFRLKRRKRIARRLVDTLRNCFMFGCFLSTDEIAFSDPTPDDCRRLNRYQET

SEQ ID NO: 20863 - protein, 445 aa, Homo sapiens
MGGVGEPGPREGPAQPGAPLPTFCWEQIRAHDQPGDKWLVIERRVYDISRWAQRHPGGSRLIGHHGAEDATDAFRAFHQDLNFVRKFLQPLLIGELAPEEPSQDGPLNAQLVEDFRALHQAAEDMKLFDASPTFFAFLLGHILAMEVLAWLLIYLLGPGWVPSALAAFILAISQAQSWCLQHDLGHASIFKKSWWNHVAQKFVMGQLKGFSAHWWNFRHFQHHAKPNIFHKDPDVTVAPVFLLGESSVEYGKKKRRYLPYNQQHLYFFLIGPPLLTLVNFEVENLAYMLVCMQWADLLWAASFYARFFLSYLPFYGVPGVLLFFVAVRVLESHWFVWITQMNHIPKEIGHEKHRDWVSSQLAATCNVEPSLFTNWFSGHLNFQIEHHLFPRMPRHNYSRVAPLVKSLCAKHGLSYEVKPFLTALVDIVRSLKKSGDIWLDAYLHQ

SEQ ID NO: 20864 - protein, 342 aa, Homo sapiens
MNNAGHGPTRRLRGLGVLAGVALLAALWLLWLLGSAPRGTPAPQPTITILVWHWPFTDQPPELPSDTCTRYGIARCHLSANRSLLASADAVVFHHRELQTRRSHLPLAQRPRGQPWVWASMESPSHTHGLSHLRGIFNWVLSYRRDSDIFVPYGRLEPHWGPSPPLPAKSRVAAWVVSNFQERQLRARLYRQLAPHLRVDVFGRANGRPLCASCLVPTVAQYRFYLSFENSQHRDYITEKFWRNALVAGTVPVVLGPPRATYEAFVPADAFVHVDDFGSARELAAFLTGMNESRYQRFFAWRDRLRVRLFTDWRERFCAICDRYPHLPRSQVYEDLEGWFQA

SEQ ID NO: 20865 - protein, 666 aa, Homo sapiens
MGQTKSKIKSKYASYLSFIKILLKRGGVKVSTKNLIKLFQIIEQFCPWFPEQGTLDLKDWKRIGKELKQAGRKGNIIPLTVWNDWAIIKAALEPFQTEEDSVSVSDAPGSCLIDCNEKTRKKSQKETESLHCEYVAEPVMAQSTQNVDYNQLQEVIYPETLKLEGKGPELVGPSESKPRGTSPLPAGQVPVTLQPQKQVKENKTQPPVAYQYWPPAELQYRPPPESQYGYPGMPPAPQGRAPYPQPPTRRLNPTAPPSRQGSELHEIIDKSRKEGDTEAWQFPVTLEPMPPGEGAQEGEPPTVEARYKSFSIKMLKDMKEGVKQYGPNSPYMRTLLDSIAYGHRLIPYDWEILAKSSLSPSQFLQFKTWWIDGVQEQVRRNRAANPPVNIDADQLLGIGQNWSTISQQALMQNEAIEQVRAICLRAWEKIQDPGSACPSFNTVRQGSKEPYPDFVARLQDVAQKSIADEKARKVIVELMAYENANPECQSAIKPLKGKVPAGSDVISEYVKACDGIGGAMHKAMLMAQAITGVVLGGQVRTFGGKCYNCGQIGHLKKNCPVLNKQNITIQATTTGREPPDLCPRCKKGKHWASQCRSKFDKNGQPLSGNEQRGQPQAPQQTGAFPIQPFVPQGFQGQQPPLSQVFQGISQLPQYNNCPLPQAAVQQ

SEQ ID NO: 20866 - protein, 666 aa, Homo sapiens
MGQTKSKIKSKYASYLSFIKILLKRGGVKVSTKNLIKLFQIIEQFCPWFPEQGTLDLKDWKRIGKELKQAGRKGNIIPLTVWNDWAIIKAALEPFQTEEDSISVSDAPGSGIIDCNEKTRKKSQKETESLHCEYVAEPVMAQSTQNVDYNQLQEVIYPETLKLEGKGPELVGPSESKPRGTSPLPAGQVPVTLQPQKQVKENKTQPPVAYQYWPPAELQYRPPPESQYGYPGMPPAPQGRAPYPQPPTRRLNPTAPPSRQGSELHEIIDKSRKEGDTEAWQFPVTLEPMPPGEGAQEGEPPTVEARYKSFSIKILKDMKEGVKQYGPNSPYMRTLLDSIAHGHRLIPYDWEILAKSSLSPSQFLQFKTWWIDGVQEQVRRNRAANPPVNIDADQLLGIGQNWSTISQQALMQNEAIEQVRAICLRAWEKIQDPGSTCPSFNTVRQGSKEPYPDFVARLQDVAQKSIADEKARKVIVELMAYENANPECQSAIKPLKGKVPAGSDVISEYVKACDGIGGAMHKAMLMAQAITGVVLGGQVRTFGGKCYNCGQIGHLKKNCPVLNKQNITIQATTTGREPPDLCPRCKKGKHWASQCRSKFDKNGQPLSGNEQRGQPQAPQQTGAFPIQPFVPQGFQGQQPPLSQVFQGISQLPQYNNCPPPQVAVQQ

SEQ ID NO: 20867 - protein, 344 aa, Homo sapiens
MRRPRQGGGGAGGSAAARARAGGLGGGSVPARARGAPAAARAAWLRDLCARMARPPRQHPGVWASLLLLLLTGPAACAASPADDGAGPGGRGPRGRARGDTGADEAVPRHDSSYGTFAGEFYDLRYLSEEGYPFPTAPPVDPFAKIKVDDCGKTKGCFRYGKPGCNAETCDYFLSYRMIGADVEFELSADTDGWVAVGFSSDKKMGGDDVMACVHDDNGRVRIQHFYNVGQWAKEIQRNPARDEEGVFENNRVTCRFKRPVNVPRDETIVDLHLSWYYLFAWGPAIQGSITRHDIDSPPASERVVSIYKYEDIFMPSAAYQTFSSPFCLLLIVALTFYLLMGTP

SEQ ID NO: 20868 - protein, 103 aa, Homo sapiens
METVQELIPLAKEMMAQKRKGKMVKLYVLGSVLALFGVVLGLMETVCSPFTAARRLRDQEAAVAELQAALERQALQKQALQEKGKQQDTVLGGRALSNRQHAS

SEQ ID NO: 20869 - protein, 444 aa, Homo sapiens
MTTEGGPPPAPLRRACSPVPGALQAALMSPPPAAAAAAAAAPETTSSSSSSSSASCASSSSSSNSASAPSAACKSAGGGGAGAGSGGAKKASSGLRRPEKPPYSYIALIVMAIQSSPSKRLTLSEIYQFLQARFPFFRGAYQGWKNSVRHNLSLNECFIKLPKGLGRPGKGHYWTIDPASEFMFEEGSFRRRPRGFRRKCQALKPMYHRVVSGLGFGASLLPQGFDFQAPPSAPLGCHSQGGYGGLDMMPAGYDAGAGAPSHAHPHHHHHHHVPHMSPNPGSTYMASCPVPAGPGGVGAAGGGGGGDYGPDSSSSPVPSSPAMASAIECHSPYTSPAAHWSSPGASPYLKQPPALTPSSNPAASAGLHSSMSSYSLEQSYLHQNAREDLSVGLPRYQHHSTPVCDRKDFVLNFNGISSFHPSASGSYYHHHHQSVCQDIKPCVM

SEQ ID NO: 20870 - protein, 359 aa, Homo sapiens
MAPNGTASSFCLDSTACKITITVVLAVLILITVAGNVVVCLAVGLNRRLRNLTNCFIVSLAITDLLLGLLVLPFSAIYQLSCKWSFGKVFCNIYTSLDVMLCTASILNLFMISLDRYCAVMDPLRYPVLVTPVRVAISLVLIWVISITLSFLSIHLGWNSRNETSKGNHTTSKCKVQVNEVYGLVDGLVTFYLPLLIMCITYYRIFKVARDQAKRINHISSWKAATIREHKATVTLAAVMGAFIICWFPYFTAFVYRGLRGDDAINEVLEAIVLWLGYANSALNPILYAALNRDFRTGYQQLFCCRLANRNSHKTSLRSNASQLSRTQSREPRQQEEKPLKLQVWSGTEVTAPQGATDR

SEQ ID NO: 20871 - protein, 397 aa, Homo sapiens
MAPNGTASSFCLDSTACKITITVVLAVLILITVAGNVVVCLAVGLNRRLRNLTNCFIVSLAITDLLLGLLVLPFSAIYQLSCKWSFGKVFCNIYTSLDVMLCTASILNLFMISLDRYCAVMDPLRYPVLVTPVRVAISLVLIWVISITLSFLSIHLGWNSRNETSKGNHTTSKCKVQVNEVYGLVDGLVTFYLPLLIMCITYYRIFKVARDQAKRINHISSWKAATIREHKATVTLAAVMGAFIICWFPYFTAFVYRGLRGDDAINEVLEAIVLWLGYANSALNPILYAALNRDFRTGYQQLFCCRLANRNSHKTSLRSNASQLSRTQSREPRQQEEKPLKLQVWSGTEVTAPQGATDRPWLCLPECWSVELTHSFIHLFIHSFANIHPIPTTCQEL

SEQ ID NO: 20872 - protein, 622 aa, Homo sapiens
MGLYGQACPSVTSLRMTSELESSLTSMDWLPQLTMRAAIQKSDATQNAHGTGISKKNALLDPNTTLDQEEVQQHKDGKPPYSYASLITFAINSSPKKKMTLSEIYQWICDNFPYYREAGSGWKNSIRHNLSLNKCFLKVPRSKDDPGKGSYWAIDTNPKEDVLPTRPKKRARSVERASTPYSIDSDSLGMECIISGSASPTLAINTVTNKVTLYNTDQDGSDSPRSSLNNSLSDQSLASVNLNSVGSVHSYTPVTSHPESVSQSLTPQQQPQYNLPERDKQLLFSEYNFEDLSASFRSLYKSVFEQSLSQQGLMNIPSESSQQSHTSCTYQHSPSSTVSTHPHSNQSSLSNSHGSGLNTTGSNSVAQVSLSHPQMHTQPSPHPPHRPHGLPQHPQRSPHPAPHPQQHSQLQSPHPQHPSPHQHIQHHPNHQHQTLTHQAPPPPQQVSCNSGVSNDWYATLDMLKESCRIASSVNWSDVDLSQFQGLMESMRQADLKNWSLDQVQFADLCSSLNQFFTQTGLIHSQSNVQQNVCHGAMHPTKPSQHIGTGNLYIDSRQNLPPSVMPPPGYPHIPQALSTPGTTMAGHHRAMNQQHMMPSQAFQMRRSLPPDDIQDDFDWDSIV

SEQ ID NO: 20873 - protein, 588 aa, Homo sapiens
MGLYGQACPSVTSLRMTSELESSLTSMDWLPQLTMRAAIQKSDATQNAHGTGISKKNALLDPNTTLDQEEVQQHKDGKPPYSYASLITFAINSSPKKKMTLSEIYQWICDNFPYYREAGSGWKNSIRHNLSLNKCFLKVPRSKDDPGKGSYWAIDTNPKEDVLPTRPKKRARSVERVTLYNTDQDGSDSPRSSLNNSLSDQSLASVNLNSVGSVHSYTPVTSHPESVSQSLTPQQQPQYNLPERDKQLLFSEYNFEDLSASFRSLYKSVFEQSLSQQGLMNIPSESSQQSHTSCTYQHSPSSTVSTHPHSNQSSLSNSHGSGLNTTGSNSVAQVSLSHPQMHTQPSPHPPHRPHGLPQHPQRSPHPAPHPQQHSQLQSPHPQHPSPHQHIQHHPNHQHQTLTHQAPPPPQQVSCNSGVSNDWYATLDMLKESCRIASSVNWSDVDLSQFQGLMESMRQADLKNWSLDQVQFADLCSSLNQFFTQTGLIHSQSNVQQNVCHGAMHPTKPSQHIGTGNLYIDSRQNLPPSVMPPPGYPHIPQALSTPGTTMAGHHRAMNQQHMMPSQAFQMRRSLPPDDIQDDFDWDSIV

SEQ ID NO: 20874 - protein, 746 aa, Homo sapiens
MRREFCWDAYSKAAGSRASSPLPRQDRDSFCHQMSFCLTELHLWSLKNTLHIADRDIGIYQYYDKKDPPATEHGNLEKKQKLAESRDYPWTLKNRRPEKLRDSLKELEELMQNSRCVLSKWKNKYVCQLLFGSGVLVSLSLSGPQLEKVVIDRSLVGKLISDTISDALLTDSFIILSFLAQNKLCFIQFTKKMESSDVNKRLEKLSALDYKIFYYEIPGPINKTTERHLAINCVHDRVVCWWPLVNDDAWPWAPISSEKDRANLLLLGYAQGRLEVLSSVRTEWDPLDVRFGTKQPYQVFTVEHSVSVDKEPMADSCIYECIRNKIQCVSVTRIPLKSKAISCCRNVTEDKLILGCEDSSLILYETHRRVTLLAQTELLPSLISCHPSGAILLVGSNQGELQIFDMALSPINIQLLAEDRLPRETLQFSKLFDASSSLVQMQWIAPQVVSQKGEGSDIYDLLFLRFERGPLGVLLFKLGVFTRGQLGLIDIIFQYIHCDEIYEAINILSSMNWDTLGHQCFISMSAIVNHLLRQKLTPEREAQLETSLGTFYAPTRPLLDSTILEYRDQISKYARRFFHHLLRYQRFEKAFLLAVDVGARDLFMDIHYLALDKGELALAEVARKRASDIDAESITSGVELLGPLDRGDMLNEAFIGLSLAPQGEDSFPDNLPPSCPTHRHILQQRILNGSSNRQIIDRRNELEKDICSGFLMTNTCNAEDGELREDGREQEIRDGGSLKMIHFGLV

SEQ ID NO: 20875 - protein, 618 aa, Homo sapiens
MRREFCWDAYSKAAGSRASSPLPRQDRDSFCHQMSFCLTELHLWSLKNTLHIADRDIGIYQYYDKKDPPATEHGNLEKKQKLAESRDYPWTLKNRRPEKLRDSLKELEELMQNSRCVLSKWKNKYVCQLLFGSGVLVSLSLSGPQLEKVVIDRSLVGKLISDTISDALLTDSFIILSFLAQNKLCFIQFTKKMESSDVNKRLEKLSALDYKIFYYEIPGPINKTTERHLAINCVHDRVVCWWPLVNDDAWPWAPISSEKDRANLLLLGYAQGRLEVLSSVRTEWDPLDVRFGTKQPYQVFTVEHSVSVDKEPMADSCIYECIRNKIQCVSVTRIPLKSKAISCCRNVTEDKLILGCEDSSLILYETHRRVTLLAQTELLPSLISCHPSGAILLVGSNQGELQIFDMALSPINIQLLAEDRLPRETLQFSKLFDASSSLVQMQWIAPQVVSQKGEGSDIYDLLFLRFERGPLGVLLFKLGVFTRGQLGLIDIIFQYIHCDEIYEAINILSSMNWDTLGHQCFISMSAIVNHLLRQKLTPEREAQLETSLGTFYAPTRPLLDSTILEYRDQISKYARRFFHHLLRYQRFEKAFLLAVDVGARDLFMASCYLTSNYTTRLQ

SEQ ID NO: 20876 - protein, 587 aa, Homo sapiens
MFSSLHSALLTDSFIILSFLAQNKLCFIQFTKKMESSDVNKRLEKLSALDYKIFYYEIPGPINKTTERHLAINCVHDRVVCWWPLVNDDAWPWAPISSEKDRANLLLLGYAQGRLEVLSSVRTEWDPLDVRFGTKQPYQVFTVEHSVSVDKEPMADSCIYECIRNKIQCVSVTRIPLKSKAISCCRNVTEDKLILGCEDSSLILYETHRRVTLLAQTELLPSLISCHPSGAILLVGSNQGELQIFDMALSPINIQLLAEDRLPRETLQFSKLFDASSSLVQMQWIAPQVVSQKGEGSDIYDLLFLRFERGPLGVLLFKLGVFTRGQLGLIDIIFQYIHCDEIYEAINILSSMNWDTLGHQCFISMSAIVNHLLRQKLTPEREAQLETSLGTFYAPTRPLLDSTILEYRDQISKYARRFFHHLLRYQRFEKAFLLAVDVGARDLFMDIHYLALDKGELALAEVARKRASDIDAESITSGVELLGPLDRGDMLNEAFIGLSLAPQGEDSFPDNLPPSCPTHRHILQQRILNGSSNRQIIDRRNELEKDICSGFLMTNTCNAEDGELREDGREQEIRDGGSLKMIHFGLV

SEQ ID NO: 20877 - protein, 572 aa, Homo sapiens
MAELVQGQSAPVGMKAEGFVDALHRVRQIAAKIDSIPHLNNSTPLVDPSVYGYGVQKRPLDDGVGNQLGALVHQRTVITEEFKVPDKMVGFIIGRGGEQISRIQAESGCKIQIASESSGIPERPCVLTGTPESIEQAKRLLGQIVDRCRNGPGFHNDIDSNSTIQEILIPASKVGLVIGRGGETIKQLQERTGVKMVMIQDGPLPTGADKPLRITGDAFKVQQAREMVLEIIREKDQADFRGVRGDFNSRMGGGSIEVSVPRFAVGIVIGRNGEMIKKIQNDAGVRIQFKPDDGISPERAAQVMGPPDRCQHAAHIISELILTAQERDGFGGLAAARGRGRGRGDWSVGAPGGVQEITYTVPADKCGLVIGKGGENIKSINQQSGAHVELQRNPPPNSDPNLRRFTIRGVPQQIEVARQLIDEKVGGTNLGAPGAFGQSPFSQPPAPPHQNTFPPRSSGCFPNMAAKVNGNPHSTPVSGPPAFLTQGWGSTYQAWQQPTQQVPSQQSQPQSSQPNYSKAWEDYYKKQSHAASAAPQASSPPDYTMAWAEYYRQQVAFYGQTLGQAQAHSQEQ

SEQ ID NO: 20878 - protein, 261 aa, Homo sapiens
MPPIGNQLGALVHQRTVITEEFKVPDKMVGFIIGRGGEQISRIQAESGCKIQIASESSGIPERPCVLTGTPESIEQAKRLLGQIVDRCRNGPGFHNDIDSNSTIQEILIPASKVGLVIGRGGETIKQLQERTGVKMVMIQDGPLPTGADKPLRITGDAFKVQQAREMVLEIIREKDQADFRGVRGDFNSRMGGGSIEVSVPRFAVGIVIGRNGEMIKKIQNDAGVRIQFKPDDGISPEYYRQQVAFYGQTLGQAQAHSQEQ

SEQ ID NO: 20879 - protein, 4008 aa, Homo sapiens
MGVLKVWLGLALALAEFAVLPHHSEGACVYQDSLLADATIWKPDSCQSCRCHGDIVICKPAVCRNPQCAFEKGEVLQIAANQCCPECVLRTPGSCHHEKKIHEHGTEWASSPCSVCSCNHGEVRCTPQPCPPLSCGHQELAFIPEGSCCPVCVGLGKPCSYEGHVFQDGEDWRLSRCAKCLCRNGVAQCFTAQCQPLFCNQDETVVRVPGKCCPQCSARSCSAAGQVYEHGEQWSENACTTCICDRGEVRCHKQACLPLRCGKGQSRARRHGQCCEECVSPAGSCSYDGVVRYQDEMWKGSACEFCMCDHGQVTCQTGECAKVECARDEELIHLDGKCCPECISRNGYCVYEETGEFMSSNASEVKRIPEGEKWEDGPCKVCECRGAQVTCYEPSCPPCPVGTLALEVKGQCCPDCTSVHCHPDCLTCSQSPDHCDLCQDPTKLLQNGWCVHSCGLGFYQAGSLCLACQPQCSTCTSGLECSSCQPPLLMRHGQCVPTCGDGFYQDRHSCAVCHESCAGCWGPTEKHCLACRDPLHVLRDGGCESSCGKGFYNRQGTCSACDQSCDSCGPSSPRCLTCTEKTVLHDGKCMSECPGGYYADATGRCKVCHNSCASCSGPTPSHCTACSPPKALRQGHCLPRCGEGFYSDHGVCKACHSSCLACMGPAPSHCTGCKKPEEGLQVEQLSDVGIPSGECLAQCRAHFYLESTGICEACHQSCFRCAGKSPHNCTDCGPSHVLLDGQCLSQCPDGYFHQEGSCTECHPTCRQCHGPLESDCISCYPHISLTNGNCRTSCREEQFLNLVGYCADCHHLCQHCAADLHNTGSICLRCQNAHYLLLGDHCVPDCPSGYYAERGACKKCHSSCRTCQGRGPFSCSSCDTNLVLSHTGTCSTTCFPGHYLDDNHVCQPCNTHCGSCDSQASCTSCRDPNKVLLFGECQYESCAPQYYLDFSTNTCKECDWSCSACSGPLKTDCLQCMDGYVLQDGACVEQCLSSFYQDSGLCKNCDSYCLQCQGPHECTRCKGPFLLLEAQCVQECGKGYFADHAKHKCTACPQGCLQCSHRDRCHLCDHGFFLKSGLCVYNCVPGFSVHTSNETCSGKIHTPSLHVNGSLILPIGSIKPLDFSLLNVQDQEGRVEDLLFHVVSTPTNGQLVLSRNGKEVQLDKAGRFSWKDVNEKKVRFVHSKEKLRKGYLFLKISDQQFFSEPQLINIQAFSTQAPYVLRNEVLHISRGERATITTQMLDIRDDDNPQDVVIEIIDPPLHGQLLQTLQSPATPIYQFQLDELSRGLLHYAHDGSDSTSDVAVLQANDGHSFHNILFQVKTVPQNDRGLQLVANSMVWVPEGGMLQITNRILQAEAPGASAEEIIYKITQDYPQFGEVVLLVNMPADSPADEGQHLPDGRTATPTSTFTQQDINEGIVWYRHSGAPAQSDSFRFEVSSASNAQTRLESHMFNIAILPQTPEAPKVSLEASLHMTAREDGLTVIQPHSLSFINSEKPSGKIVYNITLPLHPNQGIIEHRDHPHSPIRYFTQEDINQGKVMYRPPPAAPHLQELMAFSFAGLPESVKFHFTVSDGEHTSPEMVLTIHLLPSDQQLPVFQVTAPRLAVSPGGSTSVGLQVVVRDAETAPKELFFELRRPPQHGVLLKHTAEFRRPMATGDTFTYEDVEKNALQYIHDGSSTREDSMEISVTDGLTVTMLEVRVEVSLSEDRGPRLAAGSSLSITVASKSTAIITRSHLAYVDDSSPDPEIWIQLNYLPSYGTLLRISGSEVEELSEVSNFTMEDINNKKIRYSAVFETDGHLVTDSFYFSVSDMDHNHLDNQIFTIMITPAENPPPVIAFADLITVDEGGRAPLSFHHFFATDDDDNLQRDAIIKLSALPKYGCIENTGTGDRFGPETASDLEASFPIQDVLENYIYYFQSVHESIEPTHDIFSFYVSDGTSRSEIHSINITIERKNDEPPRMTLQPLRVQLSSGVVISNSSLSLQDLDTPDNELIFVLTKKPDHGHVLWRQTASEPLENGRVLVQGSTFTYQDILAGLVGYVPSVPGMVVDEFQFSLTDGLHVDTGRMKIYTELPASDTPHLAINQGLQLSAGSVARITEQHLKVTDIDSDDHQVMYIMKEDPGAGRLQMMKHGNLEQISIKGPIRSFTQADISQGQPEYSHGTGEPGGSFAFKFDVVDGEGNRLIDKSFSISISEDKSPPVITTNKGLVLDENSVKKITTLQLSATDQDSGPTELIYRITRQPQLGHLEHAASPGIQISSFTQADLTSRNVQYVHSSEAEKHSDAFSFTLSDGVSEVTQTFHITLHPVDDSLPVVQNLGMRVQEGMRKTITEFELKAVDADTEAESVTFTIVQPPRHGTIERTSNGQHFHLTSTFTMKDIYQNRVSYSHDGSNSLKDRFTFTVSDGTNPFFIIEEGGKEIMTAAPQPFRVDILPVDDGTPRIVTNLGLQWLEYMDGKATNLITKKELLTMDPDTEDAQLVYEITTGPKHGFVENKLQPGRAAATFTQEDVNLGLIRYVLHKEKIREMMDSFQFLVKDSKPNVVSDNVFHIQWSLISFKYTSYNVSEKAGSVSVTVQRTGNLNQYAIVLCRTEQGTASSSSQPGQQDYVEYAGQVQFDEREDTKSCTIVINDDDVFENVESFTVELSMPAYALLGEFTQAKVIINDTEDEPTLEFDKKIYWVNESAGFLFAPIERKGDASSIVSAICYTVPKSAMGSLFYALESGSDFKSRGMSAASRVIFGPGVTMSTCDVMLIDDSEYEEEEEFEIALADASDNARIGRVATAKVLISGPNDASTVSLGNTAFTVSEDAGTVKIPVIRHGTDLSTFASVWCATRPSDPASATPGVDYVPSSRKVEFGPGVIEQYCTLTILDDTQYPVIEGLETFVVFLSSAQGAELTKPFQAVIAINDTFQDVPSMQFAKDLLLVKEKEGVLHVPITRSGDLSYESSVRCYTQSHSAQVMEDFEERQNADSSRITFLKGDKVKNCTVYIHDDSMFEPEEQFRVYLGLPLGNHWSGARIGKNNMATITISNDEDAPTIEFEEAAYQVREPAGPDAIAILNIKVIRRGDQNRTSKVRCSTRDGSAQSGVDYYPKSRVLKFSPGVDHIFFKVEILSNEDREWHESFSLVLGPDDPVEAVLGDVTTATVTILDQEAAGSLILPAPPIVVTLADYDHVEEVTKEGVKKSPSPGYPLVCVTPCDPHFPRYAVMKERCSEAGINQTSVQFSWEVAAPTDGNGARSPFETITDNTPFTSVNHMVLDSIYFSRRFHVRCVAKAVDKVGHVGTPLRSNIVTIGTDSAICHTPVVAGTSRGFQAQSFIATLKYLDVKHKEHPNRIHISVQIPHQDGMLPLISTMPLHNLHFLLSESIYRHQHVCSNLVTTYDLRGLAEAGFLDDVVYDSTALGPGYDRPFQFDPSVREPKTIQLYKHLNLKSCVWTFDAYYDMTELIDVCGGSVTADFQVRDSAQSFLTVHVPLYVSYIYVTAPRGWASLEHHTEMEFSFFYDTVLWRTGIQTDSVLSARLQIIRIYIREDGRLVIEFKTHAKFRGQFVMEHHTLPEVKSFVLTPDHLGGIEFDLQLLWSAQTFDSPHQLWRATSSYNRKDYSGEYTIYLIPCTVQPTQPWVDPGEKPLACTAHAPERFLIPIAFQQTNRPVPVVYSLNTEFQLCNNEKVFLMDPNTSDMSLAEMDYKGAFSKGQILYGRVLWNPEQNLNSAYKLQLEKVYLCTGKDGYVPFFDPTGTIYNEGPQYGCIQPNKHLKHRFLLLDRNQPEVTDKYFHDVPFEAHFASELPDFHVVSNMPGVDGFTLKVDALYKVEAGHQWYLQVIYIIGPDTISGPRVQRSLTAPLRRNRRDLVEPDGQLILDDSLIYDNEGDQVKNGTNMKSLNLEMQELAVAASLSQTGASIGSALAAIMLLLLVFLVACFINRKCQKQRKKKPAEDILEEYPLNTKVEVPKRHPDRVEKNVNRHYCTVRNVNILSEPEAAYTFKGAKVKRLNLEVRVHNNLQDGTEV

SEQ ID NO: 20880 - protein, 4012 aa, Homo sapiens
MGVLKVWLGLALALAEFAVLPHHSEGACVYQDSLLADATIWKPDSCQSCRCHGDIVICKPAVCRNPQCAFEKGEVLQIAANQCCPECVLRTPGSCHHEKKIHEHGTEWASSPCSVCSCNHGEVRCTPQPCPPLSCGHQELAFIPEGSCCPVCVGLGKPCSYEGHVFQDGEDWRLSRCAKCLCRNGVAQCFTAQCQPLFCNQDETVVRVPGKCCPQCSARSCSAAGQVYEHGEQWSENACTTCICDRGEVRCHKQACLPLRCGKGQSRARRHGQCCEECVSPAGSCSYDGVVRYQDEMWKGSACEFCMCDHGQVTCQTGECAKVECARDEELIHLDGKCCPECISRNGYCVYEETGEFMSSNASEVKRIPEGEKWEDGPCKVCECRGAQVTCYEPSCPPCPVGTLALEVKGQCCPDCTSVHCHPDCLTCSQSPDHCDLCQDPTKLLQNGWCVHSCGLGFYQAGSLCLACQPQCSTCTSGLECSSCQPPLLMRHGQCVPTCGDGFYQDRHSCAVCHESCAGCWGPTEKHCLACRDPLHVLRDGGCESSCGKGFYNRQGTCSACDQSCDSCGPSSPRCLTCTEKTVLHDGKCMSECPGGYYADATGRCKVCHNSCASCSGPTPSHCTACSPPKALRQGHCLPRCGEGFYSDHGVCKACHSSCLACMGPAPSHCTGCKKPEEGLQVEQLSDVGIPSGECLAQCRAHFYLESTGICEACHQSCFRCAGKSPHNCTDCGPSHVLLDGQCLSQCPDGYFHQEGSCTECHPTCRQCHGPLESDCISCYPHISLTNGNCRTSCREEQFLNLVGYCADCHHLCQHCAADLHNTGSICLRCQNAHYLLLGDHCVPDCPSGYYAERGACKKCHSSCRTCQGRGPFSCSSCDTNLVLSHTGTCSTTCFPGHYLDDNHVCQPCNTHCGSCDSQASCTSCRDPNKVLLFGECQYESCAPQYYLDFSTNTCKECDWSCSACSGPLKTDCLQCMDGYVLQDGACVEQCLSSFYQDSGLCKNCDSYCLQCQGPHECTRCKGPFLLLEAQCVQECGKGYFADHAKHKCTACPQGCLQCSHRDRCHLCDHGFFLKSGLCVYNCVPGFSVHTSNETCSGKIHTPSLHVNGSLILPIGSIKPLDFSLLNVQDQEGRVEDLLFHVVSTPTNGQLVLSRNGKEVQLDKAGRFSWKDVNEKKVRFVHSKEKLRKGYLFLKISDQQFFSEPQLINIQAFSTQAPYVLRNEVLHISRGERATITTQMLDIRDDDNPQDVVIEIIDPPLHGQLLQTLQSPATPIYQFQLDELSRGLLHYAHDGSDSTSDVAVLQANDGHSFHNILFQVKTVPQNDRGLQLVANSMVWVPEGGMLQITNRILQAEAPGASAEEIIYKITQDYPQFGEVVLLVNMPADSPADEGQHLPDGRTATPTSTFTQQDINEGIVWYRHSGAPAQSDSFRFEVSSASNAQTRLESHMFNIAILPQTPEAPKVSLEASLHMTAREDGLTVIQPHSLSFINSEKPSGKIVYNITLPLHPNQGIIEHRDHPHSPIRYFTQEDINQGKVMYRPPPAAPHLQELMAFSFAGLPESVKFHFTVSDGEHTSPEMVLTIHLLPSDQQLPVFQVTAPRLAVSPGGSTSVGLQVVVRDAETAPKELFFELRRPPQHGVLLKHTAEFRRPMATGDTFTYEDVEKNALQYIHDGSSTREDSMEISVTDGLTVTMLEVRVEVSLSEDRGPRLAAGSSLSITVASKSTAIITRSHLAYVDDSSPDPEIWIQLNYLPSYGTLLRISGSEVEELSEVSNFTMEDINNKKIRYSAVFETDGHLVTDSFYFSVSDMDHNHLDNQIFTIMITPAENPPPVIAFADLITVDEGGRAPLSFHHFFATDDDDNLQRDAIIKLSALPKYGCIENTGTGDRFGPETASDLEASFPIQDVLENYIYYFQSVHESIEPTHDIFSFYVSDGTSRSEIHSINITIERKNDEPPRMTLQPLRVQLSSGVVISNSSLSLQDLDTPDNELIFVLTKKPDHGHVLWRQTASEPLENGRVLVQGSTFTYQDILAGLVGYVPSVPGMVVDEFQFSLTDGLHVDTGRMKIYTELPASDTPHLAINQGLQLSAGSVARITEQHLKVTDIDSDDHQVMYIMKEDPGAGRLQMMKHGNLEQISIKGPIRSFTQADISQGHVEYSHGTGEPGGSFAFKFDVVDGEGNRLIDKSFSISILEDKSPPVITTNKGLVLDENSVKKITTLQLSATDQDSGPTELIYRITRQPQLGHLEHAASPGIQISSFTQADLTSRNVQYVHSSEAEKHSDAFSFTLSDGVSEVTQTFHITLHPVDDSLPVVQNLGMRVQEGMRKTITEFELKAVDADTEAESVTFTIVQPPRHGTIERTSNGQHFHLTSTFTMKDIYQNRVSYSHDGSNSLKDRFTFTVSDGTNPFFIIEEGGKEIMTAAPQPFRVDILPVDDGTPRIVTNLGLQWLEYMDGKATNLITKKELLTMDPDTEDAQLVYEITTGPKHGFVENKLQPGRAAATFTQEDVNLGLIRYVLHKEKIREMMDSFQFLVKDSKPNVVSDNVFHIQWSLISFKYTSYNVSEKAGSVSVTVQRTGNLNQYAIVLCRTEQGTASSSSRVSSQPGQQDYVEYAGQVQFDEREDTKSCTIVINDDDVFENVESFTVELSMPAYALLGEFTQAKVIINDTEDEPTLEFDKKIYWVNESAGFLFAPIERKGDASSIVSAICYTVPKSAMGSSLYALESGSDFKSRGMSAASRVIFGPGVTMSTCDVMLIDDSEYEEEEEFEIALADASDNARIGRVATAKVLISGPNDASTVSLGNTAFTVSEDAGTVKIPVIRHGTDLSTFASVWCATRPSDPASATPGVDYVPSSRKVEFGPGVIEQYCTLTILDDTQYPVIEGLETFVVFLSSAQGAELTKPFQAVIAINDTFQDVPSMQFAKDLLLVKEKEGVLHVPITRSGDLSYESSVRCYTQSHSAQVMEDFEERQNADSSRITFLKGDKVKNCTVYIHDDSMFEPEEQFRVYLGLPLGNHWSGARIGKNNMATITISNDEDAPTIEFEEAAYQVREPAGPDAIAILNIKVIRRGDQNRTSKVRCSTRDGSAQSGVDYYPKSRVLKFSPGVDHIFFKVEILSNEDREWHESFSLVLGPDDPVEAVLGDVTTATVTILDQEAAGSLILPAPPIVVTLADYDHVEEVTKEGVKKSPSPGYPLVCVTPCDPHFPRYAVMKERCSEAGINQTSVQFSWEVAAPTDGNGARSPFETITDNTPFTSVNHMVLDSIYFSRRFHVRCVAKAVDKVGHVGTPLRSNIVTIGTDSAICHTPVVAGTSRGFQAQSFIATLKYLDVKHKEHPNRIHISVQIPHQDGMLPLISTMPLHNLHFLLSESIYRHQHVCSNLVTTYDLRGISEAGFLDDVVYDSTALGPGYDRPFQFDPSVREPKTIQLYKHLNLKSCVWTFDAYYDMTELIDVCGGSVTADFQVRDSAQSFLTVHVPLYVSYIYVTAPRGWASLEHHTEMEFSFFYDTVLWRTGIQTDSVLSARLQIIRIYIREDGRLVIEFKTHAKFRGQFVMEHHTLPEVKSFVLTPDHLGGIEFDLQLLWSAQTFDSPHQLWRATSSYNRKDYSGEYTIYLIPCTVQPTQPWVDPGEKPLACTAHAPERFLIPIAFQQTNRPVPVVYSLNTEFQLCNNEKVFLMDPNTSDMSLAEMDYKGAFSKGQILYGRVLWNPEQNLNSAYKLQLEKVYLCTGKDGYVPFFDPTGTIYNEGPQYGCIQPNKHLKHRFLLLDRNQPEVTDKYFHDVPFEAHFASELPDFHVVSNMPGVDGFTLKVDALYKVEAGHQWYLQVIYIIGPDTISGPRVQRSLTAPLRRNRRDLVEPDGQLILDDSLIYDNEGDQVKNGTNMKSLNLEMQELAVAASLSQTGASIGSALAAIMLLLLVFLVACFINRKCQKQRKKKPAEDILEEYPLNTKVEVPKRHPDRVEKNVNRHYCTVRNVNILSEPEAAYTFKGAKVKRLNLEVRVHNNLQDGTEV

SEQ ID NO: 20881 - protein, 737 aa, Homo sapiens
MGVLKVWLGLALALAEFAVLPHHSEGACVYQDSLLADATIWKPDSCQSCRCHGDIVICKPAVCRNPQCAFEKGEVLQIAANQCCPECVLRTPGSCHHEKKIHEHGTEWASSPCSVCSCNHGEVRCTPQPCPPLSCGHQELAFIPEGSCCPVCVGLGKPCSYEGHVFQDGEDWRLSRCAKCLCRNGVAQCFTAQCQPLFCNQDETVVRVPGKCCPQCSARSCSAAGQVYEHGEQWSENACTTCICDRGEVRCHKQACLPLRCGKGQSRARRHGQCCEECVSPAGSCSYDGVVRYQDEMWKGSACEFCMCDHGQVTCQTGECAKVECARDEELIHLDGKCCPECISRNGYCVYEETGEFMSSNASEVKRIPEGEKWEDGPCKVCECRGAQVTCYEPSCPPCPVGTLALEVKGQCCPDCTSVHCHPDCLTCSQSPDHCDLCQDPTKLLQNGWCVHSCGLGFYQAGSLCLACQPQCSTCTSGLECSSCQPPLLMRHGQCVPTCGDGFYQDRHSCAVCHESCAGCWGPTEKHCLACRDPLHVLRDGGCESSCGKGFYNRQGTCSACDQSCDSCGPSSPRCLTCTEKTVLHDGKCMSECPGGYYADATGRCKVCHNSCASCSGPTPSHCTACSPPKALRQGHCLPRCGEGFYSDHGVCKACHSSCLACMGPAPSHCTGCKKPEEGLQVEQLSDVGIPSGECLAQCRAHFYLESTGICEGQNLDFCQNLEVISAVCLGISSTEN

SEQ ID NO: 20882 - protein, 1976 aa, Homo sapiens
MGVLKVWLGLALALAEFAVLPHHSEGACVYQDSLLADATIWKPDSCQSCRCHGDIVICKPAVCRNPQCAFEKGEVLQIAANQCCPECVLRTPGSCHHEKKIHEHGTEWASSPCSVCSCNHGEVRCTPQPCPPLSCGHQELAFIPEGSCCPVCVGLGKPCSYEGHVFQDGEDWRLSRCAKCLCRNGVAQCFTAQCQPLFCNQDETVVRVPGKCCPQCSARSCSAAGQVYEHGEQWSENACTTCICDRGEVRCHKQACLPLRCGKGQSRARRHGQCCEECVSPAGSCSYDGVVRYQDEMWKGSACEFCMCDHGQVTCQTGECAKVECARDEELIHLDGKCCPECISRNGYCVYEETGEFMSSNASEVKRIPEGEKWEDGPCKVCECRGAQVTCYEPSCPPCPVGTLALEVKGQCCPDCTSVHCHPDCLTCSQSPDHCDLCQDPTKLLQNGWCVHSCGLGFYQAGSLCLACQPQCSTCTSGLECSSCQPPLLMRHGQCVPTCGDGFYQDRHSCAVCHESCAGCWGPTEKHCLACRDPLHVLRDGGCESSCGKGFYNRQGTCSACDQSCDSCGPSSPRCLTCTEKTVLHDGKCMSECPGGYYADATGRCKVCHNSCASCSGPTPSHCTACSPPKALRQGHCLPRCGEGFYSDHGVCKACHSSCLACMGPAPSHCTGCKKPEEGLQVEQLSDVGIPSGECLAQCRAHFYLESTGICEACHQSCFRCAGKSPHNCTDCGPSHVLLDGQCLSQCPDGYFHQEGSCTECHPTCRQCHGPLESDCISCYPHISLTNGNCRTSCREEQFLNLVGYCADCHHLCQHCAADLHNTGSICLRCQNAHYLLLGDHCVPDCPSGYYAERGACKKCHSSCRTCQGRGPFSCSSCDTNLVLSHTGTCSTTCFPGHYLDDNHVCQPCNTHCGSCDSQASCTSCRDPNKVLLFGECQYESCAPQYYLDFSTNTCKECDWSCSACSGPLKTDCLQCMDGYVLQDGACVEQCLSSFYQDSGLCKNCDSYCLQCQGPHECTRCKGPFLLLEAQCVQECGKGYFADHAKHKCTACPQGCLQCSHRDRCHLCDHGFFLKSGLCVYNCVPGFSVHTSNETCSGKIHTPSLHVNGSLILPIGSIKPLDFSLLNVQDQEGRVEDLLFHVVSTPTNGQLVLSRNGKEVQLDKAGRFSWKDVNEKKVRFVHSKEKLRKGYLFLKISDQQFFSEPQLINIQAFSTQAPYVLRNEVLHISRGERATITTQMLDIRDDDNPQDVVIEIIDPPLHGQLLQTLQSPATPIYQFQLDELSRGLLHYAHDGSDSTSDVAVLQANDGHSFHNILFQVKTVPQNDRGLQLVANSMVWVPEGGMLQITNRILQAEAPGASAEEIIYKITQDYPQFGEVVLLVNMPADSPADEGQHLPDGRTATPTSTFTQQDINEGIVWYRHSGAPAQSDSFRFEVSSASNAQTRLESHMFNIAILPQTPEAPKVSLEASLHMTAREDGLTVIQPHSLSFINSEKPSGKIVYNITLPLHPNQGIIEHRDHPHSPIRYFTQEDINQGKVMYRPPPAAPHLQELMAFSFAGLPESVKFHFTVSDGEHTSPEMVLTIHLLPSDQQLPVFQVTAPRLAVSPGGSTSVGLQVVVRDAETAPKELFFELRRPPQHGVLLKHTAEFRRPMATGDTFTYEDVEKNALQYIHDGSSTREDSMEISVTDGLTVTMLEVRVEVSLSEDRGPRLAAGSSLSITVASKSTAIITRSHLAYVDDSSPDPEIWIQLNYLPSYGTLLRISGSEVEELSEVSNFTMEDINNKKIRYSAVFETDGHLVTDSFYFSVSDMDHNHLDNQIFTIMITPAENPPPVIAFADLITVDEGGRAPLSFHHFFATDDDDNLQRDAIIKLSALPKYGCIENTGTGDRFGPETASDLEASFPIQDVLENYIYYFQSVHESIEPTHDIFSFYVSDGTSRSEIHSINITIEVKTLEVGKVEPLTTIFHTIRELSL

SEQ ID NO: 20883 - protein, 809 aa, Homo sapiens
MGVLKVWLGLALALAEFAVLPHHSEGACVYQDSLLADATIWKPDSCQSCRCHGDIVICKPAVCRNPQCAFEKGEVLQIAANQCCPECVLRTPGSCHHEKKIHEHGTEWASSPCSVCSCNHGEVRCTPQPCPPLSCGHQELAFIPEGSCCPVCVGLGKPCSYEGHVFQDGEDWRLSRCAKCLCRNGVAQCFTAQCQPLFCNQDETVVRVPGKCCPQCSARSCSAAGQVYEHGEQWSENACTTCICDRGEVRCHKQACLPLRCGKGQSRARRHGQCCEECVSPAGSCSYDGVVRYQDEMWKGSACEFCMCDHGQVTCQTGECAKVECARDEELIHLDGKCCPECISRNGYCVYEETGEFMSSNASEVKRIPEGEKWEDGPCKVCECRGAQVTCYEPSCPPCPVGTLALEVKGQCCPDCTSVHCHPDCLTCSQSPDHCDLCQDPTKLLQNGWCVHSCGLGFYQAGSLCLACQPQCSTCTSGLECSSCQPPLLMRHGQCVPTCGDGFYQDRHSCAVCHESCAGCWGPTEKHCLACRDPLHVLRDGGCESSCGKGFYNRQGTCSACDQSCDSCGPSSPRCLTCTEKTVLHDGKCMSECPGGYYADATGRCKVCHNSCASCSGPTPSHCTACSPPKALRQGHCLPRCGEGFYSDHGVCKACHSSCLACMGPAPSHCTGCKKPEEGLQVEQLSDVGIPSGECLAQCRAHFYLESTGICEACHQSCFRCAGKSPHNCTDCGPSHVLLDGQCLSQCPDGYFHQEGSCTECHPTCRQCHGPLESDCISCYPHISLTNGNCRTSCREEQFLNLVGYCAGE

SEQ ID NO: 20884 - protein, 384 aa, Homo sapiens
APTKAPDVFPIISGCRHPKDNSPVVLACLITGYHPTSVTVTWYMGTQSQPQRTFPEIQRRDSYYMTSSQLSTPLQQWRQGEYKCVVQHTASKSKKEIFRWPESPKAQASSVPTAQPQAEGSLAKATTAPATTRNTGRGGEEKKKEKEKEEQEERETKTPECPSHTQPLGVYLLTPAVQDLWLRDKATFTCFVVGSDLKDAHLTWEVAGKVPTGGVEEGLLERHSNGSQSQHSRLTLPRSLWNAGTSVTCTLNHPSLPPQRLMALREPAAQAPVKLSLNLLASSDPPEAASWLLCEVSGFSPPNILLMWLEDQREVNTSGFAPARPPPQPRSTTFWAWSVLRVPAPPSPQPATYTCVVSHEDSRTLLNASRSLEVSYVTDHGPMK

SEQ ID NO: 20885 - protein, 430 aa, Homo sapiens
APTKAPDVFPIISGCRHPKDNSPVVLACLITGYHPTSVTVTWYMGTQSQPQRTFPEIQRRDSYYMTSSQLSTPLQQWRQGEYKCVVQHTASKSKKEIFRWPESPKAQASSVPTAQPQAEGSLAKATTAPATTRNTGRGGEEKKKEKEKEEQEERETKTPECPSHTQPLGVYLLTPAVQDLWLRDKATFTCFVVGSDLKDAHLTWEVAGKVPTGGVEEGLLERHSNGSQSQHSRLTLPRSLWNAGTSVTCTLNHPSLPPQRLMALREPAAQAPVKLSLNLLASSDPPEAASWLLCEVSGFSPPNILLMWLEDQREVNTSGFAPARPPPQPRSTTFWAWSVLRVPAPPSPQPATYTCVVSHEDSRTLLNASRSLEVSYLAMTPLIPQSKDENSDDYTTFDDVGSLWTTLSTFVALFILTLLYSGIVTFIKVK

SEQ ID NO: 20886 - protein, 280 aa, Homo sapiens
MRRAELAGLKTMAWVPAESAVEELMPRLLPVEPCDLTEGFDPSVPPRTPQEYLRRVQIEAAQCPDVVVAQIDPKKLKRKQSVNISLSGCQPAPEGYSPTLQWQQQQVAQFSTVRQNVNKHRSHWKSQQLDSNVTMPKSEDEEGWKKFCLGEKLCADGAVGPATNESPGIDYVQIGFPPLLSIVSRMNQATVTSVLEYLSNWFGERDFTPELGRWLYALLACLEKPLLPEAHSLIRQLARRCSEVRLLVDSKDDERVPALNLLICLVSRYFDQRDLADEPS

SEQ ID NO: 20887 - protein, 265 aa, Homo sapiens
MRRAELAGLKTMAWVPAESAVEELMPRLLPVEPCDLTEGFDPSVPPRTPQEYLRRVQIEAAQCPDVVVAQIDPKKLKRKQSVNISLSGCQPAPEGYSPTLQWQQQQVAQFSTVRQNVNKHRSHWKSQQLDSNVTMPKSEDEEGWKKFCLGEKLCADGAVGPATNESPGIDYVQATVTSVLEYLSNWFGERDFTPELGRWLYALLACLEKPLLPEAHSLIRQLARRCSEVRLLVDSKDDERVPALNLLICLVSRYFDQRDLADEPS

SEQ ID NO: 20888 - protein, 250 aa, Homo sapiens
MRRAELAGLKTMAWVPAESAVEELMPRLLPVEPCDLTEGFDPSVPPRTPQEYLRRVQIEAAQCPDVVVAQIDPKKLKRKQSVNISLSGCQPAPEGYSPTLQWQQQQVAQFSTVRQNVNKHRSHWKSQQLDSNVTMPKSEDEEGWKKFCLGEKLCADGAVGPATNESPGIDYVQIGFPPLLSIVSRMNQATVTSVLEYLSNWFGERDFTPELGRWLYALLACLEKPLLPEAHSLIRQLARRCSEVRLLVVF

SEQ ID NO: 20889 - protein, 44 aa, Homo sapiens
MRRAELAGLKTMAWVPAESAVEELMPRLLPDRSSSMSRCCGSSN

SEQ ID NO: 20890 - protein, 444 aa, Homo sapiens
MAVTTRLTWLHEKILQNHFGGKRLSLLYKGSVHGFRNGVLLDRCCNQGPTLTVIYSEDHIIGAYAEESYQEGKYASIILFALQDTKISEWKLGLCTPETLFCCDVTKYNSPTNFQIDGRNRKVIMDLKTMENLGLAQNCTISIQDYEVFRCEDSLDERKIKGVIELRKSLLSALRTYEPYGSLVQQIRILLLGPIGAGKSSFFNSVRSVFQGHVTHQALVGTNTTGISEKYRTYSIRDGKDGKYLPFILCDSLGLSEKEGGLCRDDIFYILNGNIRDRYQFNPMESIKLNHHDYIDSPSLKDRIHCVAFVFDASSIQYFSSQMIVKIKRIRRELVNAGVVHVALLTHVDSMDLITKGDLIEIERCEPVRSKLEEVQRKLGFALSDISVVSNYSSEWELDPVKDVLILSALRRMLWAADDFLEDLPFEQIGNLREEIINCAQGKK

SEQ ID NO: 20891 - protein, 129 aa, Homo sapiens
MESIKLNHHDYIDSPSLKDRIHCVAFVFDASSIQYFSSQMIVKIKRIRRELVNAGVVHVALLTHVDSMDLITKGDLIEIERCEPVRSKVMNDALRKHIFWGMLLQSHTSVYKNKNKQLLGLRRITKLLK

SEQ ID NO: 20892 - protein, 300 aa, Homo sapiens
MCARGQVGRGTQLRTGRPCSQVPGSRWRPERLLRRQRAGGRPSRPHPARARPGLSLPATLLGSRAAAAVPLPLPPALAPGDPAMPVRTECPPPAGASAASAASLIPPPPINTQQPGVATSLLYSGSKFRGHQKSKGNSYDVEVVLQHVDTGNSYLCGYLKIKGLTEEYPTLTTFFEGEIISKKHPFLTRKWDADEDVDRKHWGKFLAFYQYAKSFNSDDFDYEELKNGDYVFMRWKEQFLVPDHTIKDISGASFAGFYYICFQKSAASIEGYYYHRSSEWYQSLNLTHVPEHSAPIYEFR

SEQ ID NO: 20893 - protein, 501 aa, Homo sapiens
MRLPKLLTFLLWYLAWLDLEFICTVLGAPDLGQRPQGTRPGLAKAEAKERPPLARNVFRPGGHSYGGGATNANARAKGGTGQTGGLTQPKKDEPKKLPPRPGGPEPKPGHPPQTRQATARTVTPKGQLPGGKAPPKAGSVPSSFLLKKAREPGPPREPKEPFRPPPITPHEYMLSLYRTLSDADRKGGNSSVKLEAGLANTITSFIDKGQDDRGPVVRKQRYVFDISALEKDGLLGAELRILRKKPSDTAKPAAPGGGRAAQLKLSSCPSGRQPASLLDVRSVPGLDGSGWEVFDIWKLFRNFKNSAQLCLELEAWERGRAVDLRGLGFDRAARQVHEKALFLVFGRTKKRDLFFNEIKARSGQDDKTVYEYLFSQRRKRRAPLATRQGKRPSKNLKARCSRKALHVNFKDMGWDDWIIAPLEYEAFHCEGLCEFPLRSHLEPTNHAVIQTLMNSMDPESTPPTCCVPTRLSPISILFIDSANNVVYKQYEDMVVESCGCR

SEQ ID NO: 20894 - protein, 250 aa, Homo sapiens
MTLSPLLLFLPPLLLLLDVPTAAVQASPLQALDFFGNGPPVNYKTGNLYLRGPLKKSNAPLVNVTLYYEALCGGCRAFLIRELFPTWLLVMEILNVTLVPYGNAQEQNVSGRWEFKCQHGEEECKFNKVEACVLDELDMELAFLTIVCMEEFEDMERSLPLCLQLYAPGLSPDTIMECAMGDRGMQLMHANAQRTDALQPPHEYVPWVTVNGKPLEDQTQLLTLVCQLYQGKKPDVCPSSTSSLRSVCFK

SEQ ID NO: 20895 - protein, 467 aa, Homo sapiens
MRTAPSLRRCVCLLLAAILDLARGYLTVNIEPLPPVVAGDAVTLKCNFKTDGRMREIVWYRVTDGGTIKQKIFTFDAMFSTNYSHMENYRKREDLVYQSTVRLPEVRISDNGPYECHVGIYDRATREKVVLASGNIFLNVMAPPTSIEVVAADTPAPFSRYQAQNFTLVCIVSGGKPAPMVYFKRDGEPIDAVPLSEPPAASSGPLQDSRPFRSLLHRDLDDTKMQKSLSLLDAENRGGRPYTERPSRGLTPDPNILLQPTTENIPETVVSREFPRWVHSAEPTYFLRHSRTPSSDGTVEVRALLTWTLNPQIDNEALFSCEVKHPALSMPMQAEVTLVAPKGPKIVMTPSRARVGDTVRILVHGFQNEVFPEPMFTWTRVGSRLLDGSAEFDGKELVLERVPAELNGSMYRCTAQNPLGSTDTHTRLIVFENPNIPRGTEDSNGSIGPTGARLTLVLALTVILELT

SEQ ID NO: 20896 - protein, 329 aa, Homo sapiens
MAAQYGSMSFNPSTPGASYGPGRQEPRNSQLRIVLVGKTGAGKSATGNSILGRKVFHSGTAAKSITKKCEKRSSSWKETELVVVDTPGIFDTEVPNAETSKEIIRCILLTSPGPHALLLVVPLGRYTEEEHKATEKILKMFGERARSFMILIFTRKDDLGDTNLHDYLREAPEDIQDLMDIFGDRYCALNNKATGAEQEAQRAQLLGLIQRVVRENKEGCYTNRMYQRAEEEIQKQTQAMQELHRVELEREKARIREEYEEKIRKLEDKVEQEKRKKQMEKKLAEQEAHYAVRQQRARTEVESKDGILELIMTALQIASFILLRLFAED

SEQ ID NO: 20897 - protein, 72 aa, Homo sapiens
MSSKTASTNNIAQARRTVQQLRLEASIERIKVSKASADLMSYCEEHARSDPLLIGIPTSENPFKDKKTCIIL

SEQ ID NO: 20898 - protein, 665 aa, Homo sapiens
MSEQSCQMSELRLLLLGKCRSGKSATGNAILGKHVFKSKFSDQTVIKMCQRESWVLRERKVVVIDTPDLFSSIACAEDKQRNIQHCLELSAPSLHALLLVIAIGHFTREDEETAKGIQQVFGAEARRHIIIVFTRKDDLGDDLLQDFIEKNKPLKQLVQDYEGRYCIFNNKTNSKDEQITQVLELLRKVESLVNTNGGPYHVNFKTEGSRFQDCVNEAASQEGDKPQGPRERQLQSTGPEQNPGTSELTVLLVGKRGAGKSAAGNSILGRQAFQTGFSEQSVTQSFLSESRSWRKKKVSIIDAPDISSLKNIDSEVRKHICTGPHAFLLVTPLGFYTKNDEAVLSTIQNNFGEKFFEYMIILLTRKEDLGDQDLDTFLRNSNKALYGLIQKCKNRYSAFNYRATGEEEQRQADELLEKIESMVHQNGNKHCVFREKETLNIVLVGRSGTGKSATGNSILGSLVFTSRLRAQPVTKTSQSGRRTWDGQEVVVVDTPSFNQMLDVEKDPSRLEEEVKRCLSCCEKGDTFFVLVFQLGRFTEEDKTAVAKLEAIFGADFTKYAIMLFTRKEDLGAGNLEDFMKNSDNKALRRIFKKCGRRVCAFNNKETGQAQETQVKALLTKVNDLRKESGWSGYPHTQENVSKLIKNVQEMSQAEKLLKNLIGILQ

SEQ ID NO: 20899 - protein, 490 aa, Homo sapiens
MSEVTKNSLEKILPQLKCHFTWNLFKEDSVSRDLEDRVCNQIEFLNTEFKATMYNLLAYIKHLDGNNEAALECLRQAEELIQQEHADQAEIRSLVTWGNYAWVYYHLGRLSDAQIYVDKVKQTCKKFSNPYSIEYSELDCEEGWTQLKCGRNERAKVCFEKALEEKPNNPEFSSGLAIAMYHLDNHPEKQFSTDVLKQAIELSPDNQYVKVLLGLKLQKMNKEAEGEQFVEEALEKSPCQTDVLRSAAKFYRRKGDLDKAIELFQRVLESTPNNGYLYHQIGCCYKAKVRQMQNTGESEASGNKEMIEALKQYAMDYSNKALEKGLNPLNAYSDLAEFLETECYQTPFNKEVPDAEKQQSHQRYCNLQKYNGKSEDTAVQHGLEGLSISKKSTDKEEIKDQPQNVSENLLPQNAPNYWYLQGLIHKQNGDLLQAAKCYEKELGRLLRDAPSGIGSIFLSASELEDGSEEMGQGAVSSSPRELLSNSEQLN

SEQ ID NO: 20900 - protein, 385 aa, Homo sapiens
MKMLPGVGVFGTGSSARVLVPLLRAEGFTVEALWGKTEEEAKQLAEEMNIAFYTSRTDDILLHQDVDLVCISIPPPLTRQISVKALGIGKNVVCEKAATSVDAFRMVTASRYYPQLMSLVGNVLRFLPAFVRMKQLISEHYVGAVMICDARIYSGSLLSPSYGWICDELMGGGGLHTMGTYIVDLLTHLTGRRAEKVHGLLKTFVRQNAAIRGIRHVTSDDFCFFQMLMGGGVCSTVTLNFNMPGAFVHEVMVVGSAGRLVARGADLYGQKNSATQEELLLRDSLAVGAGLPEQGPQDVPLLYLKGMVYMVQALRQSFQGQGDRRTWDRTPVSMAASFEDGLYMQSVVDAIKRSSRSGEWEAVEVLTEEPDTNQNLCEALQRNNL

SEQ ID NO: 20901 - protein, 280 aa, Homo sapiens
MVTASRYYPQLMSLVGNVLRFLPAFVRMKQLISEHYVGAVMICDARIYSGSLLSPSYGWICDELMGGGGLHTMGTYIVDLLTHLTGRRAEKVHGLLKTFVRQNAAIRGIRHVTSDDFCFFQMLMGGGVCSTVTLNFNMPGAFVHEVMVVGSAGRLVARGADLYGQKNSATQEELLLRDSLAVGAGLPEQGPQDVPLLYLKGMVYMVQALRQSFQGQGDRRTWDRTPVSMAASFEDGLYMQSVVDAIKRSSRSGEWEAVEVLTEEPDTNQNLCEALQRNNL

SEQ ID NO: 20902 - protein, 112 aa, Homo sapiens
MKMLPGVGVFGTGSSARVLVPLLRAEGFTVEALWGKTEEEAKQLAEEMNIAFYTSRTDDILLHQDVDLVCISIPPPLTRQISVKALGTPGRPQQGQIMSLPLGSPLRVTPLL

SEQ ID NO: 20903 - protein, 73 aa, Homo sapiens
MPALHIEDLPEKEKLKMEVEQLRKEVKLQRQQVSKCSEEIKNYIEERSGEDPLVKGIPEDKNPFKEKGSCVIS

SEQ ID NO: 20904 - protein, 422 aa, Homo sapiens
MPRSFLVKSKKAHSYHQPRSPGPDYSLRLENVPAPSRADSTSNAGGAKAEPRDRLSPESQLTEAPDRASASPDSCEGSVCERSSEFEDFWRPPSPSASPASEKSMCPSLDEAQPFPLPFKPYSWSGLAGSDLRHLVQSYRPCGALERGAGLGLFCEPAPEPGHPAALYGPKRAAGGAGAGAPGSCSAGAGATAGPGLGLYGDFGSAAAGLYERPTAAAGLLYPERGHGLHADKGAGVKVESELLCTRLLLGGGSYKCIKCSKVFSTPHGLEVHVRRSHSGTRPFACEMCGKTFGHAVSLEQHKAVHSQERSFDCKICGKSFKRSSTLSTHLLIHSDTRPYPCQYCGKRFHQKSDMKKHTFIHTGEKPHKCQVCGKAFSQSSNLITHSRKHTGFKPFGCDLCGKGFQRKVDLRRHRETQHGLK

SEQ ID NO: 20905 - protein, 454 aa, Homo sapiens
MARPNKFLLWFCCFAWLCFPISLGSQASGGEAQIAASAELESGAMPWSLLQHIDERDRAGLLPALFKVLSVGRGGSPRLQPDSRALHYMKKLYKTYATKEGIPKSNRSHLYNTVRLFTPCTRHKQAPGDQVTGILPSVELLFNLDRITTVEHLLKSVLLYNINNSVSFSSAVKCVCNLMIKEPKSSSRTLGRAPYSFTFNSQFEFGKKHKWIQIDVTSLLQPLVASNKRSIHMSINFTCMKDQLEHPSAQNGLFNMTLVSPSLILYLNDTSAQAYHSWYSLHYKRRPSQGPDQERSLSAYPVGEEAAEDGRSSHHRHRRGQETVSSELKKPLGPASFNLSEYFRQFLLPQNECELHDFRLSFSQLKWDNWIVAPHRYNPRYCKGDCPRAVGHRYGSPVHTMVQNIIYEKLDSSVPRPSCVPAKYSPLSVLTIEPDGSIAYKEYEDMIATKCTCR

SEQ ID NO: 20906 - protein, 75 aa, Homo sapiens
MKGETPVNSTMSIGQARKMVEQLKIEASLCRIKVSKAAADLMTYCDAHACEDPLITPVPTSENPFREKKFFCALL

SEQ ID NO: 20907 - protein, 47 aa, Homo sapiens
MKFFMVLLPASLASTSLAILDVESGLLPQLSVLLSNRLRGKTCQTGP

SEQ ID NO: 20908 - protein, 33 aa, Homo sapiens
MKFFMVLLPASLASTSLAILDVESGLLPQLSVP

SEQ ID NO: 20909 - protein, 467 aa, Homo sapiens
MAPKLLLLLCLFSGLHARSRKVEEDEYEDSSSNQKWVLAPKSQDTDVTLILNKLLREYDKKLRPDIGIKPTVIDVDIYVNSIGPVSSINMEYQIDIFFAQTWTDSRLRFNSTMKILTLNSNMVGLIWIPDTIFRNSKTAEAHWITTPNQLLRIWNDGKILYTLRLTINAECQLQLHNFPMDEHSCPLIFSSYGYPKEEMIYRWRKNSVEAADQKSWRLYQFDFMGLRNTTEIVTTSAGDYVVMTIYFELSRRMGYFTIQTYIPCILTVVLSWVSFWIKKDATPARTALGITTVLTMTTLSTIARKSLPRVSYVTAMDLFVTVCFLFVFAALMEYATLNYYSSCRKPTTTKKTTSLLHPDSSRWIPERISLQAPSNYSLLDMRPPPTAMITLNNSVYWQEFEDTCVYECLDGKDCQSFFCCYEECKSGSWRKGRIHIDILELDSYSRVFFPTSFLLFNLVYWVGYLYL

SEQ ID NO: 20910 - protein, 253 aa, Homo sapiens
MAPKLLLLLCLFSGLHARSRKVEEDEYEDSSSNQKWVLAPKSQDTDVTLILNKLLREYDKKLRPDIGIKPTVIDVDIYVNSIGPVSSINMEYQIDIFFAQTWTDSRLRFNSTMKILTLNSNMVGLIWIPDTIFRNSKTAEAHWITTPNQLLRIWNDGKILYTLRLTINAECQLQLHNFPMDEHSCPLIFSSYGYPKEEMIYRWRKNSVEAADQKSWRLYQFDFMGLRNTTEIVTTSAGRNLLKEAQLSKAREA

SEQ ID NO: 20911 - protein, 557 aa, Homo sapiens
MAAPMLRWGCRGRRWAFARVDGGSCHRRGAPTGSTSNQIRGESSVAQQPLHTAQKTRKGEHKWAAVVGLEIHAQISSNSKLFSGSQVRFSAPPNSLVSFFDASLPGTLPVLNRRCVEAAVMTGLALNCHINKKSLFDRKHYFYADLPAGYQITQQRLPIAVNGSLIYGVCAGKKQSQVIPKTVRIKQIQLEQDSGKSLHDNLRSQTLIDLNRAGVGLLEVVLEPDMSCGEEAATAVRELQLILQALGTSQANMAEGQLRVDANISVHHPGEPLGVRTEVKNLNSIRFLAKAIDYEIQRQINELENGGEILNETRSFHHKLGCTMSMRDKEGKQDYRFMPEPNLPPLVLYDATSLPAGADPQQVINIDQIRETLPELPSVTREKLVQQYGMLLEHSFTLLNEVGLLEFFQNVIKETRAEPKKVTSWVLNTFLGYLKQQNLAVSESPVTPSALAELLDLLDSRTISSSAAKQVFEELWKREGKTPGQIVSEKQLELMQDQGALEQLCHSVMEAHPQVVMDVKNRNPRAINKLIGLVRKATQSRADPVMIKEILEKKLSL

SEQ ID NO: 20912 - protein, 619 aa, Homo sapiens
MYGFVNHALELLVIRNYGPEVWEDIKKEAQLDEEGQFLVRIIYDDSKTYDLVAAASKVLNLNAGEILQMFGKMFFVFCQESGYDTILRVLGSNVREFLQNLDALHDHLATIYPGMRAPSFRCTDAEKGKGLILHYYSEREGLQDIVIGIIKTVAQQIHGTEIDMKVIQQRNEECDHTQFLIEEKESKEEDFYEDLDRFEENGTQESRISPYTFCKAFPFHIIFDRDLVVTQCGNAIYRVLPQLQPGNCSLLSVFSLVRPHIDISFHGILSHINTVFVLRSKEGLLDVEKLECEDELTGTEISCLRLKGQMIYLPEADSILFLCSPSVMNLDDLTRRGLYLSDIPLHDATRDLVLLGEQFREEYKLTQELEILTDRLQLTLRALEDEKKKTDTLLYSVLPPSVANELRHKRPVPAKRYDNVTILFSGIVGFNAFCSKHASGEGAMKIVNLLNDLYTRFDTLTDSRKNPFVYKVETVGDKYMTVSGLPEPCIHHARSICHLALDMMEIAGQVQVDGESVQITIGIHTGEVVTGVIGQRMPRYCLFGNTVNLTSRTETTGEKGKINVSEYTYRCLMSPENSDPQFHLEHRGPVSMKGKKEPMQVWFLSRKNTGTEETKQDDD

SEQ ID NO: 20913 - protein, 586 aa, Homo sapiens
MYGFVNHALELLVIRNYGPEVWEDIKKEAQLDEEGQFLVRIIYDDSKTYDLVAAASKVLNLNAGEILQMFGKMFFVFCQESGYDTILRVLGSNVREFLQNLDALHDHLATIYPGMRAPSFRCTDAEKGKGLILHYYSEREGLQDIVIGIIKTVAQQIHGTEIDMKVIQQRNEECDHTQFLIEEKESKEEDFYEDLDRFEENGTQESRISPYTFCKAFPFHIIFDRDLVVTQCGNAIYRVLPQLQPGNCSLLSVFSLVRPHIDISFHGILSHINTVFVLRSKEGLLDVEKLECEDELTGTEISCLRLKGQMIYLPEADSILFLCSPSVMNLDDLTRRGLYLSDIPLHDATRDLVLLGEQFREEYKLTQELEILTDRLQLTLRALEDEKKKTDTGIVGFNAFCSKHASGEGAMKIVNLLNDLYTRFDTLTDSRKNPFVYKVETVGDKYMTVSGLPEPCIHHARSICHLALDMMEIAGQVQVDGESVQITIGIHTGEVVTGVIGQRMPRYCLFGNTVNLTSRTETTGEKGKINVSEYTYRCLMSPENSDPQFHLEHRGPVSMKGKKEPMQVWFLSRKNTGTEETKQDDD

SEQ ID NO: 20914 - protein, 599 aa, Homo sapiens
MLMCFIKEAQLDEEGQFLVRIIYDDSKTYDLVAAASKVLNLNAGEILQMFGKMFFVFCQESGYDTILRVLGSNVREFLQNLDALHDHLATIYPGMRAPSFRCTDAEKGKGLILHYYSEREGLQDIVIGIIKTVAQQIHGTEIDMKVIQQRNEECDHTQFLIEEKESKEEDFYEDLDRFEENGTQESRISPYTFCKAFPFHIIFDRDLVVTQCGNAIYRVLPQLQPGNCSLLSVFSLVRPHIDISFHGILSHINTVFVLRSKEGLLDVEKLECEDELTGTEISCLRLKGQMIYLPEADSILFLCSPSVMNLDDLTRRGLYLSDIPLHDATRDLVLLGEQFREEYKLTQELEILTDRLQLTLRALEDEKKKTDTLLYSVLPPSVANELRHKRPVPAKRYDNVTILFSGIVGFNAFCSKHASGEGAMKIVNLLNDLYTRFDTLTDSRKNPFVYKVETVGDKYMTVSGLPEPCIHHARSICHLALDMMEIAGQVQVDGESVQITIGIHTGEVVTGVIGQRMPRYCLFGNTVNLTSRTETTGEKGKINVSEYTYRCLMSPENSDPQFHLEHRGPVSMKGKKEPMQVWFLSRKNTGTEETKQDDD

SEQ ID NO: 20915 - protein, 617 aa, Homo sapiens
MSGYDRMLRTLGGNLMEFIENLDALHSYLALSYQEMNAPSFRVERGADGKMFLHYYSDRSGLCHIVPGIIEAVAKDFFDIDVIMDILDMNEEVERTGKKEHVVFLIVQKAHRKMRKTKPKRLQDSQGMERDQEALQAAFLKMKEKYLNVSACPVKKSHWDVVRSIVMFGKGHLMNTFEPIYPERLWIEEKTFCNAFPFHIVFDESLQVKQARVNIQKYVPGLQTQNIQLDEYFSIIHPQVTFNIFSIRRFINSQFVLKTRREMMPVAWQSRTTLKLQGQMIWMESMWCMVYLCSPKLRSLQELEELNMHLSDIAPNDTTRDLILLNQQRLAEIELSNQLERKKEELQVLSKHLAIEKKKTETLLYAMLPKHVANQLREGKKVAAGEFKSCTILFSDVVTFTNICTACEPIQIVNVLNSMYSKFDRLTSVHAVYKVETIGDAYMVVGGVPVPIGNHAQRVANFALGMRISAKEVTNPVTGEPIQLRVGIHTGPVLADVVGDKMPRYCLFGDTVNTASRMESHGLPNKVHLSPTAYRALKNQGFKIIERGEIEVKGKGRMTTYFLIQNLNATEDEIMGRSKTPVDHKGSTQKASLPTTKLQGSVQPSCPEHSSLASWLL

SEQ ID NO: 20916 - protein, 298 aa, Homo sapiens
MTSLTQRSSGLVQRRTEASRNAADKERAAGGGAGSSEDDAQSRRDEQDDDDKGDSKETRLTLMEEVLLLGLKDREGYTSFWNDCISSGLRGCMLIELALRGRLQLEACGMRRKSLLTRKVICKSDAPTGDVLLDEALKHVKETQPPETVQNWIELLSGETWNPLKLHYQLRNVRERLAKNLVEKGVLTTEKQNFLLFDMTTHPLTNNNIKQRLIKKVQEAVLDKWVNDPHRMDRRLLALIYLAHASDVLENAFAPLLDEQYDLATKRVRQLLDLDPEVECLKANTNEVLWAVVAAFTK

SEQ ID NO: 20917 - protein, 92 aa, Homo sapiens
MKPIQKLLAGLILLTWCVEGCSSQHWSYGLRPGGKRDAENLIDSFQEIVKEVGQLAETQRFECTTHQPRSPLRDLKGALESLIEEETGQKKI

SEQ ID NO: 20918 - protein, 244 aa, Homo sapiens
MNGPADGEVDYKKKYRNLKRKLKFLIYEHECFQEELRKAQRKLLKVSRDKSFLLDRLLQYENVDEDSSDSDATASSDNSETEGTPKLSDTPAPKRKRSPPLGGAPSPSSLSLPPSTGFPLQASGVPSPYLSSLASSRYPPFPSDYLALQLPEPSPLRPKREKRPRLPRKLKMAVGPPDCPVGGPLTFPGRGSGAGVGTTLTPLPPPKMPPPTILSTVPRQMFSDAGSGDDALDGDDDLVIDIPE

SEQ ID NO: 20919 - protein, 137 aa, Homo sapiens
MNGPADGEVDYKKKYRNLKRKLKFLIYEHECFQEELRKAQRKLLKVSRDKSFLLDRLLQYENVDEDSSDSDATASSDNSETEGTPKLSDTPAPKRKRSPPLGGAPSPSSLSLPPSTGFPLQASGVPSPYLSSERGQA

SEQ ID NO: 20920 - protein, 1130 aa, Homo sapiens
MAAAGQLCLLYLSAGLLSRLGAAFNLDTREDNVIRKYGDPGSLFGFSLAMHWQLQPEDKRLLLVGAPRAEALPLQRANRTGGLYSCDITARGPCTRIEFDNDADPTSESKEDQWMGVTVQSQGPGGKVVTCAHRYEKRQHVNTKQESRDIFGRCYVLSQNLRIEDDMDGGDWSFCDGRLRGHEKFGSCQQGVAATFTKDFHYIVFGAPGTYNWKGIVRVEQKNNTFFDMNIFEDGPYEVGGETEHDESLVPVPANSYLGLLFLTSVSYTDPDQFVYKTRPPREQPDTFPDVMMNSYLGFSLDSGKGIVSKDEITFVSGAPRANHSGAVVLLKRDMKSAHLLPEHIFDGEGLASSFGYDVAVVDLNKDGWQDIVIGAPQYFDRDGEVGGAVYVYMNQQGRWNNVKPIRLNGTKDSMFGIAVKNIGDINQDGYPDIAVGAPYDDLGKVFIYHGSANGINTKPTQVLKGISPYFGYSIAGNMDLDRNSYPDVAVGSLSDSVTIFRSRPVINIQKTITVTPNRIDLRQKTACGAPSGICLQVKSCFEYTANPAGYNPSISIVGTLEAEKERRKSGLSSRVQFRNQGSEPKYTQELTLKRQKQKVCMEETLWLQDNIRDKLRPIPITASVEIQEPSSRRRVNSLPEVLPILNSDEPKTAHIDVHFLKEGCGDDNVCNSNLKLEYKFCTREGNQDKFSYLPIQKGVPELVLKDQKDIALEITVTNSPSNPRNPTKDGDDAHEAKLIATFPDTLTYSAYRELRAFPEKQLSCVANQNGSQADCELGNPFKRNSNVTFYLVLSTTEVTFDTPDLDINLKLETTSNQDNLAPITAKAKVVIELLLSVSGVAKPSQVYFGGTVVGEQAMKSEDEVGSLIEYEFRVINLGKPLTNLGTATLNIQWPKEISNGKWLLYLVKVESKGLEKVTCEPQKEINSLNLTESHNSRKKREITEKQIDDNRKFSLFAERKYQTLNCSVNVNCVNIRCPLRGLDSKASLILRSRLWNSTFLEEYSKLNYLDILMRAFIDVTAAAENIRLPNAGTQVRVTVFPSKTVAQYSGVPWWIILVAILAGILMLALLVFILWKCGFFKRSRYDDSVPRYHAVRIRKEEREIKDEKYIDNLEKKQWITKWNENESYS

SEQ ID NO: 20921 - protein, 1073 aa, Homo sapiens
MAAAGQLCLLYLSAGLLSRLGAAFNLDTREDNVIRKYGDPGSLFGFSLAMHWQLQPEDKRLLLVGAPRAEALPLQRANRTGGLYSCDITARGPCTRIEFDNDADPTSESKEDQWMGVTVQSQGPGGKVVTCAHRYEKRQHVNTKQESRDIFGRCYVLSQNLRIEDDMDGGDWSFCDGRLRGHEKFGSCQQGVAATFTKDFHYIVFGAPGTYNWKGIVRVEQKNNTFFDMNIFEDGPYEVGGETEHDESLVPVPANSYLGFSLDSGKGIVSKDEITFVSGAPRANHSGAVVLLKRDMKSAHLLPEHIFDGEGLASSFGYDVAVVDLNKDGWQDIVIGAPQYFDRDGEVGGAVYVYMNQQGRWNNVKPIRLNGTKDSMFGIAVKNIGDINQDGYPDIAVGAPYDDLGKVFIYHGSANGINTKPTQVLKGISPYFGYSIAGNMDLDRNSYPDVAVGSLSDSVTIFRSRPVINIQKTITVTPNRIDLRQKTACGAPSGICLQVKSCFEYTANPAGYNPSISIVGTLEAEKERRKSGLSSRVQFRNQGSEPKYTQELTLKRQKQKVCMEETLWLQDNIRDKLRPIPITASVEIQEPSSRRRVNSLPEVLPILNSDEPKTAHIDVHFLKEGCGDDNVCNSNLKLEYKFCTREGNQDKFSYLPIQKGVPELVLKDQKDIALEITVTNSPSNPRNPTKDGDDAHEAKLIATFPDTLTYSAYRELRAFPEKQLSCVANQNGSQADCELGNPFKRNSNVTFYLVLSTTEVTFDTPDLDINLKLETTSNQDNLAPITAKAKVVIELLLSVSGVAKPSQVYFGGTVVGEQAMKSEDEVGSLIEYEFRVINLGKPLTNLGTATLNIQWPKEISNGKWLLYLVKVESKGLEKVTCEPQKEINSLNLTESHNSRKKREITEKQIDDNRKFSLFAERKYQTLNCSVNVNCVNIRCPLRGLDSKASLILRSRLWNSTFLEEYSKLNYLDILMRAFIDVTAAAENIRLPNAGTQVRVTVFPSKTVAQYSGVPWWIILVAILAGILMLALLVFILWKCGFFKRNKKDHYDATYHKAEIHAQPSDKERLTSDA

SEQ ID NO: 20922 - protein, 1091 aa, Homo sapiens
MAAAGQLCLLYLSAGLLSRLGAAFNLDTREDNVIRKYGDPGSLFGFSLAMHWQLQPEDKRLLLVGAPRAEALPLQRANRTGGLYSCDITARGPCTRIEFDNDADPTSESKEDQWMGVTVQSQGPGGKVVTCAHRYEKRQHVNTKQESRDIFGRCYVLSQNLRIEDDMDGGDWSFCDGRLRGHEKFGSCQQGVAATFTKDFHYIVFGAPGTYNWKGIVRVEQKNNTFFDMNIFEDGPYEVGGETEHDESLVPVPANSYLGFSLDSGKGIVSKDEITFVSGAPRANHSGAVVLLKRDMKSAHLLPEHIFDGEGLASSFGYDVAVVDLNKDGWQDIVIGAPQYFDRDGEVGGAVYVYMNQQGRWNNVKPIRLNGTKDSMFGIAVKNIGDINQDGYPDIAVGAPYDDLGKVFIYHGSANGINTKPTQVLKGISPYFGYSIAGNMDLDRNSYPDVAVGSLSDSVTIFRSRPVINIQKTITVTPNRIDLRQKTACGAPSGICLQVKSCFEYTANPAGYNPSISIVGTLEAEKERRKSGLSSRVQFRNQGSEPKYTQELTLKRQKQKVCMEETLWLQDNIRDKLRPIPITASVEIQEPSSRRRVNSLPEVLPILNSDEPKTAHIDVHFLKEGCGDDNVCNSNLKLEYKFCTREGNQDKFSYLPIQKGVPELVLKDQKDIALEITVTNSPSNPRNPTKDGDDAHEAKLIATFPDTLTYSAYRELRAFPEKQLSCVANQNGSQADCELGNPFKRNSNVTFYLVLSTTEVTFDTPDLDINLKLETTSNQDNLAPITAKAKVVIELLLSVSGVAKPSQVYFGGTVVGEQAMKSEDEVGSLIEYEFRVINLGKPLTNLGTATLNIQWPKEISNGKWLLYLVKVESKGLEKVTCEPQKEINSLNLTESHNSRKKREITEKQIDDNRKFSLFAERKYQTLNCSVNVNCVNIRCPLRGLDSKASLILRSRLWNSTFLEEYSKLNYLDILMRAFIDVTAAAENIRLPNAGTQVRVTVFPSKTVAQYSGVPWWIILVAILAGILMLALLVFILWKCGFFKRSRYDDSVPRYHAVRIRKEEREIKDEKYIDNLEKKQWITKWNENESYS

SEQ ID NO: 20923 - protein, 1068 aa, Homo sapiens
MAAAGQLCLLYLSAGLLSRLGAAFNLDTREDNVIRKYGDPGSLFGFSLAMHWQLQPEDKRLLLVGAPRAEALPLQRANRTGGLYSCDITARGPCTRIEFDNDADPTSESKEDQWMGVTVQSQGPGGKVVTCAHRYEKRQHVNTKQESRDIFGRCYVLSQNLRIEDDMDGGDWSFCDGRLRGHEKFGSCQQGVAATFTKDFHYIVFGAPGTYNWKGLLFLTSVSYTDPDQFVYKTRPPREQPDTFPDVMMNSYLGFSLDSGKGIVSKDEITFVSGAPRANHSGAVVLLKRDMKSAHLLPEHIFDGEGLASSFGYDVAVVDLNKDGWQDIVIGAPQYFDRDGEVGGAVYVYMNQQGRWNNVKPIRLNGTKDSMFGIAVKNIGDINQDGYPDIAVGAPYDDLGKVFIYHGSANGINTKPTQVLKGISPYFGYSIAGNMDLDRNSYPDVAVGSLSDSVTIFRSRPVINIQKTITVTPNRIDLRQKTACGAPSGICLQVKSCFEYTANPAGYNPSISIVGTLEAEKERRKSGLSSRVQFRNQGSEPKYTQELTLKRQKQKVCMEETLWLQDNIRDKLRPIPITASVEIQEPSSRRRVNSLPEVLPILNSDEPKTAHIDVHFLKEGCGDDNVCNSNLKLEYKFCTREGNQDKFSYLPIQKGVPELVLKDQKDIALEITVTNSPSNPRNPTKDGDDAHEAKLIATFPDTLTYSAYRELRAFPEKQLSCVANQNGSQADCELGNPFKRNSNVTFYLVLSTTEVTFDTPDLDINLKLETTSNQDNLAPITAKAKVVIELLLSVSGVAKPSQVYFGGTVVGEQAMKSEDEVGSLIEYEFRVINLGKPLTNLGTATLNIQWPKEISNGKWLLYLVKVESKGLEKVTCEPQKEINSLNLTESHNSRKKREITEKQIDDNRKFSLFAERKYQTLNCSVNVNCVNIRCPLRGLDSKASLILRSRLWNSTFLEEYSKLNYLDILMRAFIDVTAAAENIRLPNAGTQVRVTVFPSKTVAQYSGVPWWIILVAILAGILMLALLVFILWKCGFFKRNKKDHYDATYHKAEIHAQPSDKERLTSDA

SEQ ID NO: 20924 - protein, 1086 aa, Homo sapiens
MAAAGQLCLLYLSAGLLSRLGAAFNLDTREDNVIRKYGDPGSLFGFSLAMHWQLQPEDKRLLLVGAPRAEALPLQRANRTGGLYSCDITARGPCTRIEFDNDADPTSESKEDQWMGVTVQSQGPGGKVVTCAHRYEKRQHVNTKQESRDIFGRCYVLSQNLRIEDDMDGGDWSFCDGRLRGHEKFGSCQQGVAATFTKDFHYIVFGAPGTYNWKGLLFLTSVSYTDPDQFVYKTRPPREQPDTFPDVMMNSYLGFSLDSGKGIVSKDEITFVSGAPRANHSGAVVLLKRDMKSAHLLPEHIFDGEGLASSFGYDVAVVDLNKDGWQDIVIGAPQYFDRDGEVGGAVYVYMNQQGRWNNVKPIRLNGTKDSMFGIAVKNIGDINQDGYPDIAVGAPYDDLGKVFIYHGSANGINTKPTQVLKGISPYFGYSIAGNMDLDRNSYPDVAVGSLSDSVTIFRSRPVINIQKTITVTPNRIDLRQKTACGAPSGICLQVKSCFEYTANPAGYNPSISIVGTLEAEKERRKSGLSSRVQFRNQGSEPKYTQELTLKRQKQKVCMEETLWLQDNIRDKLRPIPITASVEIQEPSSRRRVNSLPEVLPILNSDEPKTAHIDVHFLKEGCGDDNVCNSNLKLEYKFCTREGNQDKFSYLPIQKGVPELVLKDQKDIALEITVTNSPSNPRNPTKDGDDAHEAKLIATFPDTLTYSAYRELRAFPEKQLSCVANQNGSQADCELGNPFKRNSNVTFYLVLSTTEVTFDTPDLDINLKLETTSNQDNLAPITAKAKVVIELLLSVSGVAKPSQVYFGGTVVGEQAMKSEDEVGSLIEYEFRVINLGKPLTNLGTATLNIQWPKEISNGKWLLYLVKVESKGLEKVTCEPQKEINSLNLTESHNSRKKREITEKQIDDNRKFSLFAERKYQTLNCSVNVNCVNIRCPLRGLDSKASLILRSRLWNSTFLEEYSKLNYLDILMRAFIDVTAAAENIRLPNAGTQVRVTVFPSKTVAQYSGVPWWIILVAILAGILMLALLVFILWKCGFFKRSRYDDSVPRYHAVRIRKEEREIKDEKYIDNLEKKQWITKWNENESYS

SEQ ID NO: 20925 - protein, 1112 aa, Homo sapiens
MAAAGQLCLLYLSAGLLSRLGAAFNLDTREDNVIRKYGDPGSLFGFSLAMHWQLQPEDKRLLLVGAPRAEALPLQRANRTGGLYSCDITARGPCTRIEFDNDADPTSESKEDQWMGVTVQSQGPGGKVVTCAHRYEKRQHVNTKQESRDIFGRCYVLSQNLRIEDDMDGGDWSFCDGRLRGHEKFGSCQQGVAATFTKDFHYIVFGAPGTYNWKGIVRVEQKNNTFFDMNIFEDGPYEVGGETEHDESLVPVPANSYLGLLFLTSVSYTDPDQFVYKTRPPREQPDTFPDVMMNSYLGFSLDSGKGIVSKDEITFVSGAPRANHSGAVVLLKRDMKSAHLLPEHIFDGEGLASSFGYDVAVVDLNKDGWQDIVIGAPQYFDRDGEVGGAVYVYMNQQGRWNNVKPIRLNGTKDSMFGIAVKNIGDINQDGYPDIAVGAPYDDLGKVFIYHGSANGINTKPTQVLKGISPYFGYSIAGNMDLDRNSYPDVAVGSLSDSVTIFRSRPVINIQKTITVTPNRIDLRQKTACGAPSGICLQVKSCFEYTANPAGYNPSISIVGTLEAEKERRKSGLSSRVQFRNQGSEPKYTQELTLKRQKQKVCMEETLWLQDNIRDKLRPIPITASVEIQEPSSRRRVNSLPEVLPILNSDEPKTAHIDVHFLKEGCGDDNVCNSNLKLEYKFCTREGNQDKFSYLPIQKGVPELVLKDQKDIALEITVTNSPSNPRNPTKDGDDAHEAKLIATFPDTLTYSAYRELRAFPEKQLSCVANQNGSQADCELGNPFKRNSNVTFYLVLSTTEVTFDTPDLDINLKLETTSNQDNLAPITAKAKVVIELLLSVSGVAKPSQVYFGGTVVGEQAMKSEDEVGSLIEYEFRVINLGKPLTNLGTATLNIQWPKEISNGKWLLYLVKVESKGLEKVTCEPQKEINSLNLTESHNSRKKREITEKQIDDNRKFSLFAERKYQTLNCSVNVNCVNIRCPLRGLDSKASLILRSRLWNSTFLEEYSKLNYLDILMRAFIDVTAAAENIRLPNAGTQVRVTVFPSKTVAQYSGVPWWIILVAILAGILMLALLVFILWKCGFFKRNKKDHYDATYHKAEIHAQPSDKERLTSDA

SEQ ID NO: 20926 - protein, 954 aa, Homo sapiens
MGVTVQSQGPGGKVVTCAHRYEKRQHVNTKQESRDIFGRCYVLSQNLRIEDDMDGGDWSFCDGRLRGHEKFGSCQQGVAATFTKDFHYIVFGAPGTYNWKGLLFLTSVSYTDPDQFVYKTRPPREQPDTFPDVMMNSYLGFSLDSGKGIVSKDEITFVSGAPRANHSGAVVLLKRDMKSAHLLPEHIFDGEGLASSFGYDVAVVDLNKDGWQDIVIGAPQYFDRDGEVGGAVYVYMNQQGRWNNVKPIRLNGTKDSMFGIAVKNIGDINQDGYPDIAVGAPYDDLGKVFIYHGSANGINTKPTQVLKGISPYFGYSIAGNMDLDRNSYPDVAVGSLSDSVTIFRSRPVINIQKTITVTPNRIDLRQKTACGAPSGICLQVKSCFEYTANPAGYNPSISIVGTLEAEKERRKSGLSSRVQFRNQGSEPKYTQELTLKRQKQKVCMEETLWLQDNIRDKLRPIPITASVEIQEPSSRRRVNSLPEVLPILNSDEPKTAHIDVHFLKEGCGDDNVCNSNLKLEYKFCTREGNQDKFSYLPIQKGVPELVLKDQKDIALEITVTNSPSNPRNPTKDGDDAHEAKLIATFPDTLTYSAYRELRAFPEKQLSCVANQNGSQADCELGNPFKRNSNVTFYLVLSTTEVTFDTPDLDINLKLETTSNQDNLAPITAKAKVVIELLLSVSGVAKPSQVYFGGTVVGEQAMKSEDEVGSLIEYEFRVINLGKPLTNLGTATLNIQWPKEISNGKWLLYLVKVESKGLEKVTCEPQKEINSLNLTESHNSRKKREITEKQIDDNRKFSLFAERKYQTLNCSVNVNCVNIRCPLRGLDSKASLILRSRLWNSTFLEEYSKLNYLDILMRAFIDVTAAAENIRLPNAGTQVRVTVFPSKTVAQYSGVPWWIILVAILAGILMLALLVFILWKCGFFKRNKKDHYDATYHKAEIHAQPSDKERLTSDA

SEQ ID NO: 20927 - protein, 1097 aa, Homo sapiens
MAAAGQLCLLYLSAGLLSRLGAAFNLDTREDNVIRKYGDPGSLFGFSLAMHWQLQPEDKRLLLVGAPRAEALPLQRANRTGGLYSCDITARGPCTRIEFDNDADPTSESKEDQWMGVTVQSQGPGGKVVTCAHRYEKRQHVNTKQESRDIFGRCYVLSQNLRIEDDMDGGDWSFCDGRLRGHEKFGSCQQGVAATFTKDFHYIVFGAPGTYNWKGIVRVEQKNNTFFDMNIFEDGPYEVGGETEHDESLVPVPANSYLGLLFLTSVSYTDPDQFVYKTRPPREQPDTFPDVMMNSYLGFSLDSGKGIVSKDEITFVSGAPRANHSGAVVLLKRDMKSAHLLPEHIFDGEGLASSFGYDVAVVDLNKDGWQDIVIGAPQYFDRDGEVGGAVYVYMNQQGRWNNVKPIRLNGTKDSMFGIAVKNIGDINQDGYPDIAVGAPYDDLGKVFIYHGSANGINTKPTQVLKGISPYFGYSIAGNMDLDRNSYPDVAVGSLSDSVTIFRSRPVINIQKTITVTPNRIDLRQKTACGAPSGICLQVKSCFEYTANPAGYNPSISIVGTLEAEKERRKSGLSSRVQFRNQGSEPKYTQELTLKRQKQKVCMEETLWLQDNIRDKLRPIPITASVEIQEPSSRRRVNSLPEVLPILNSDEPKTAHIDVHFLKEGCGDDNVCNSNLKLEYKFCTREGNQDKFSYLPIQKGVPELVLKDQKDIALEITVTNSPSNPRNPTKDGDDAHEAKLIATFPDTLTYSAYRELRAFPEKQLSCVANQNGSQADCELGNPFKRNSNVTFYLVLSTTEVTFDTPDLDINLKLETTSNQDNLAPITAKAKVVIELLLSVSGVAKPSQVYFGGTVVGEQAMKSEDEVGSLIEYEFRVINLGKPLTNLGTATLNIQWPKEISNGKWLLYLVKVESKGLEKESHNSRKKREITEKQIDDNRKFSLFAERKYQTLNCSVNVNCVNIRCPLRGLDSKASLILRSRLWNSTFLEEYSKLNYLDILMRAFIDVTAAAENIRLPNAGTQVRVTVFPSKTVAQYSGVPWWIILVAILAGILMLALLVFILWKCGFFKRNKKDHYDATYHKAEIHAQPSDKERLTSDA

SEQ ID NO: 20928 - protein, 358 aa, Homo sapiens
MPSVSPAGPSAGAVPNATAVTTVRTNASGLEVPLFHLFARLDEELHGTFPGLWLALMAVHGAIFLAGLVLNGLALYVFCCRTRAKTPSVIYTINLVVTDLLVGLSLPTRFAVYYGARGCLRCAFPHVLGYFLNMHCSILFLTCICVDRYLAIVRPEGSRRCRQPACARAVCAFVWLAAGAVTLSVLGVTGSRPCCRVFALTVLEFLLPLLVISVFTGRIMCALSRPGLLHQGRQRRVRAMQLLLTVLIIFLVCFTPFHARQVAVALWPDMPHHTSLVVYHVAVTLSSLNSCMDPIVYCFVTSGFQATVRGLFGQHGEREPSSGDVVSMHRSSKGSGRHHILSAGPHALTQALANGPEA

SEQ ID NO: 20929 - protein, 573 aa, Homo sapiens
MANAEVSVPVGDVVVVPTEGNEGENPEDTKTQVILQLQPVQQGLFIDGHFYNRIYEAGSENNTAVVAVETHTIHKIEEGIDTGTIEANEDMEIAYPITCGESKAILLWKKFVCPGINVKCVKFNDQLISPKHFVHLAGKSTLKDWKRAIRLGGIMLRKMMDSGQIDFYQHDKVCSNTCRSTKFDLLISSARAPVPGQQTSVVQTPTSADGSITQIAISEESMEEAGLEWNSALTAAVTMATEEGVKKDSEEISEDTLMFWKGIADVGLMEEVVCNIQKEIEELLRGVQQRLIQAPFQVTDAAVLNNVAHTFGLMDTVKKVLDNRRNQVEQGEEQFLYTLTDLERQLEEQKKQGQDHRLKSQTVQNVVLMPVSTPKPPKRPRLQRPASTTVLSPSPPVQQPQFTVISPITITPVGQSFSMGNIPVATLSQGSSPVTVHTLPSGPQLFRYATVVSSAKSSSPDTVTIHPSSSLALLSSTAMQDGSTLGNMTTMVSPVELVAMESGLTSAIQAVESTSEDGQTIIEIDPAPDPEAEDTEGKAVILETELRTEEKVVAEMEEHQHQVHNVEIVVLED

SEQ ID NO: 20930 - protein, 563 aa, Homo sapiens
MANAEVSVPVGDVVVVPTEGNEGENPEDTKTQVILQLQPVQQGIYEAGSENNTAVVAVETHTIHKIEEGIDTGTIEANEDMEIAYPITCGESKAILLWKKFVCPGINVKCVKFNDQLISPKHFVHLAGKSTLKDWKRAIRLGGIMLRKMMDSGQIDFYQHDKVCSNTCRSTKFDLLISSARAPVPGQQTSVVQTPTSADGSITQIAISEESMEEAGLEWNSALTAAVTMATEEGVKKDSEEISEDTLMFWKGIADVGLMEEVVCNIQKEIEELLRGVQQRLIQAPFQVTDAAVLNNVAHTFGLMDTVKKVLDNRRNQVEQGEEQFLYTLTDLERQLEEQKKQGQDHRLKSQTVQNVVLMPVSTPKPPKRPRLQRPASTTVLSPSPPVQQPQFTVISPITITPVGQSFSMGNIPVATLSQGSSPVTVHTLPSGPQLFRYATVVSSAKSSSPDTVTIHPSSSLALLSSTAMQDGSTLGNMTTMVSPVELVAMESGLTSAIQAVESTSEDGQTIIEIDPAPDPEAEDTEGKAVILETELRTEEKVVAEMEEHQHQVHNVEIVVLED

SEQ ID NO: 20931 - protein, 1035 aa, Homo sapiens
MGGPAAPRGAGRLRALLLALVVAGIPAGAYNLDPQRPVHFQGPADSFFGYAVLEHFHDNTRWVLVGAPKADSKYSPSVKSPGAVFKCRVHTNPDRRCTELDMARGKNRGTSCGKTCREDRDDEWMGVSLARQPKADGRVLACAHRWKNIYYEADHILPHGFCYIIPSNLQAKGRTLIPCYEEYKKKYGEEHGSCQAGIAGFFTEELVVMGAPGSFYWAGTIKVLNLTDNTYLKLNDEVIMNRRYTYLGYAVTAGHFSHPSTIDVVGGAPQDKGIGKVYIFRADRRSGTLIKIFQASGKKMGSYFGSSLCAVDLNGDGLSDLLVGAPMFSEIRDEGQVTVYINRGNGALEEQLALTGDGAYNAHFGESIASLDDLDNDGFPDVAIGAPKEDDFAGAVYIYHGDAGGIVPQYSMKLSGQKINPVLRMFGQSISGGIDMDGNGYPDVTVGAFMSDSVVLLRARPVITVDVSIFLPGSINITAPQCHDGQQPVNCLNVTTCFSFHGKHVPGEIGLNYVLMADVAKKEKGQMPRVYFVLLGETMGQVTEKLQLTYMEETCRHYVAHVKRRVQDVISPIVFEAAYSLSEHVTGEEERELPPLTPVLRWKKGQKIAQKNQTVFERNCRSEDCAADLQLQGKLLLSSMDEKTLYLALGAVKNISLNISISNLGDDAYDANVSFNVSRELFFINMWQKEEMGISCELLESDFLKCSVGFPFMRSKSKYEFSVIFDTSHLSGEEEVLSFIVTAQSGNTERSESLHDNTLVLMVPLMHEVDTSITGIMSPTSFVYGESVDAANFIQLDDLECHFQPINITLQVYNTGPSTLPGSSVSISFPNRLSSGGAEMFHVQEMVVGQEKGNCSFQKNPTPCIIPQEQENIFHTIFAFFTKSGRKVLDCEKPGISCLTAHCNFSALAKEESRTIDIYMLLNTEILKKDSSSVIQFMSRAKVKVDPALRVVEIAHGNPEEVTVVFEALHNLEPRGYVVGWIIAISLLVGILIFLLLAVLLWKMGFFRRRYKEIIEAEKNRKENEDSWDWVQKNQ

SEQ ID NO: 20932 - protein, 153 aa, Homo sapiens
MKERDAAPAERGKPATYTGDKKAKMAAKTNKKWVRLATVFAYVLSVSLAAIVLAVYYSLIWQPVGAGTSGGAAGPPPGGSNATGPSGTSGAAAAGPNTTGSSRREAPRDVPPLQAARPAPPEPPADSPPAGPLERPRGPDEDEEETAAAPGSR

SEQ ID NO: 20933 - protein, 415 aa, Homo sapiens
MVFAHRMDNSKPHLIIPTLLVPLQNRSCTETATPLPSQYLMELSEEHSWMSNQTDLHYVLKPGEVATASIFFGILWLFSIFGNSLVCLVIHRSRRTQSTTNYFVVSMACADLLISVASTPFVLLQFTTGRWTLGSATCKVVRYFQYLTPGVQIYVLLSICIDRFYTIVYPLSFKVSREKAKKMIAASWVFDAGFVTPVLFFYGSNWDSHCNYFLPSSWEGTAYTVIHFLVGFVIPSVLIILFYQKVIKYIWRIGTDGRTVRRTMNIVPRTKVKTIKMFLILNLLFLLSWLPFHVAQLWHPHEQDYKKSSLVFTAITWISFSSSASKPTLYSIYNANFRRGMKETFCMSSMKCYRSNAYTITTSSRMAKKNYVGISEIPSMAKTITKDSIYDSFDREAKEKKLAWPINSNPPNTFV

SEQ ID NO: 20934 - protein, 337 aa, Homo sapiens
MNSWDAGLAGLLVGTMGVSLLSNALVLLCLLHSADIRRQAPALFTLNLTCGNLLCTVVNMPLTLAGVVAQRQPAGDRLCRLAAFLDTFLAANSMLSMAALSIDRWVAVVFPLSYRAKMRLRDAALMVAYTWLHALTFPAAALALSWLGFHQLYASCTLCSRRPDERLRFAVFTGAFHALSFLLSFVVLCCTYLKVLKVARFHCKRIDVITMQTLVLLVDLHPSVRERCLEEQKRRRQRATKKISTFIGTFLVCFAPYVITRLVELFSTVPIGSHWGVLSKCLAYSKAASDPFVYSLLRHQYRKSCKEILNRLLHRRSIHSSGLTGDSHSQNILPVSE

SEQ ID NO: 20935 - protein, 426 aa, Homo sapiens
MAEMATATRLLGWRVASWRLRPPLAGFVSQRAHSLLPVDDAINGLSEEQRQLRQTMAKFLQEHLAPKAQEIDRSNEFKNLREFWKQLGNLGVLGITAPVQYGGSGLGYLEHVLVMEEISRASGAVGLSYGAHSNLCINQLVRNGNEAQKEKYLPKLISGEYIGALAMSEPNAGSDVVSMKLKAEKKGNHYILNGNKFWITNGPDADVLIVYAKTDLAAVPASRGITAFIVEKGMPGFSTSKKLDKLGMRGSNTCELIFEDCKIPAANILGHENKGVYVLMSGLDLERLVLAGGPLGLMQAVLDHTIPYLHVREAFGQKIGHFQLMQGKMADMYTRLMACRQYVYNVAKACDEGHCTAKDCAGVILYSAECATQVALDGIQCFGGNGYINDFPMGRFLRDAKLYEIGAGTSEVRRLVIGRAFNADFH

SEQ ID NO: 20936 - protein, 396 aa, Homo sapiens
MAEMATATRLLGWRVASWRLRPPLAGFVSQRAHSLLPVDDAINGLSEEQRQEFWKQLGNLGVLGITAPVQYGGSGLGYLEHVLVMEEISRASGAVGLSYGAHSNLCINQLVRNGNEAQKEKYLPKLISGEYIGALAMSEPNAGSDVVSMKLKAEKKGNHYILNGNKFWITNGPDADVLIVYAKTDLAAVPASRGITAFIVEKGMPGFSTSKKLDKLGMRGSNTCELIFEDCKIPAANILGHENKGVYVLMSGLDLERLVLAGGPLGLMQAVLDHTIPYLHVREAFGQKIGHFQLMQGKMADMYTRLMACRQYVYNVAKACDEGHCTAKDCAGVILYSAECATQVALDGIQCFGGNGYINDFPMGRFLRDAKLYEIGAGTSEVRRLVIGRAFNADFH

SEQ ID NO: 20937 - protein, 451 aa, Homo sapiens
MESSPIPQSSGNSSTLGRVPQTPGPSTASGVPEVGLRDVASESVALFFMLLLDLTAVAGNAAVMAVIAKTPALRKFVFVFHLCLVDLLAALTLMPLAMLSSSALFDHALFGEVACRLYLFLSVCFVSLAILSVSAINVERYYYVVHPMRYEVRMTLGLVASVLVGVWVKALAMASVPVLGRVSWEEGAPSVPPGCSLQWSHSAYCQLFVVVFAVLYFLLPLLLILVVYCSMFRVARVAAMQHGPLPTWMETPRQRSESLSSRSTMVTSSGAPQTTPHRTFGGGKAAVVLLAVGGQFLLCWLPYFSFHLYVALSAQPISTGQVESVVTWIGYFCFTSNPFFYGCLNRQIRGELSKQFVCFFKPAPEEELRLPSREGSIEENFLQFLQGTGCPSESWVSRPLPSPKQEPPAVDFRIPGQIAEETSEFLEQQLTSDIIMSDSYLRPAASPRLES

SEQ ID NO: 20938 - protein, 368 aa, Homo sapiens
MANSTGLNASEVAGSLGLILAAVVEVGALLGNGALLVVVLRTPGLRDALYLAHLCVVDLLAAASIMPLGLLAAPPPGLGRVRLGPAPCRAARFLSAALLPACTLGVAALGLARYRLIVHPLRPGSRPPPVLVLTAVWAAAGLLGALSLLGTPPAPPPAPARCSVLAGGLGPFRPLWALLAFALPALLLLGAYGGIFVVARRAALRPPRPARGSRLHSDSLDSRLSILPPLRPRLPGGKAALAPALAVGQFAACWLPYGCACLAPAARAAEAEAAVTWVAYSAFAAHPFLYGLLQRPVRLALGRLSRRALPGPVRACTPQAWHPRALLQCLQRPPEGPAVGPSEAPEQTPELAGGRSPAYQGPPESSLS

SEQ ID NO: 20939 - protein, 2235 aa, Homo sapiens
MPLFFSALLVLLLVALSALFLGRWLVVRLATKWCQRKLQAELKIGSFRFFWIQNVSLKFQQHQQTVEIDNLWISSKLLSHDLPHYVALCFGEVRIRTDLQKVSDLSAPFSQSAGVDQKELSFSPSLLKIFCQLFSIHVDAINIMVLKVDTSESLWHIQISRSRFLLDSDGKRLICEVSLCKINSKVLKSGQLEDTCLVELSLALDLCLKVGISSRHLTAITVDVWTLHAELHEGLFQSQLLCQGPSLASKPVPCSEVTENLVEPTLPGLFLLQQLPDQVKVKMENTSVVLSMNSQKRHLTWTLKLLQFLYHRDEDQLPLRSFTANSDMAQMSTELLLEDGLLLSQSRQRIVCLNSLKASVQVTTIDLSASLVLNTCIIHYRHQEFSHWLHLLALETQGSSSPVLKQRKKRTFPQILAPIIFSTSISNVNISIQLGDTPPFALGFNSISLDYQHLRPQSIHQRGVLTVDHLCWRVGSDSHIQRAPHPPNMHVWGEALVLDSFTLQGSYNQPLGLSSTQSDTLFLDCTIRGLQVEASDTCAQCLSRILSLMGPQSGKSAVSRHSSFGESVSLLWKVDLKVEDMNLFTLSALVGASEVRLDTLTILGSAETSTVGIQGLVLALVKSVTEKMQPCCKAPDIPTPVLSLSMLSITYHSSIRSLEVQCGAGLTLLWSPPDHMYLYQHVLATLQCRDLLRATVFPETVPSLALETSGTTSELEGRAPEPLPPKRLLNLTLEVSTAKLTAFVAEDKFITLAAESVSLSRHGGSLQAYCPELAAGFDGNSIFNFKEVEVQLLPELEEMILHRNPFPALQTLRNRVWLLSFGSVSVEFPYQYDFSRTLDEAVGVQKWLKGLHQGTRAWASPSPVPLPPDLLLKVEHFSWVFLDDVFEVKLHDNYELMKDESKESAKRLQLLDAKVAALRKQHGELLPARKIEELYASLERKNIEIYIQRSRRLYGNTPMRRALLTWSLAGLELVALADASFHGPEHVVEQVQELDPGSPFPPEGLDLVIQWCRMLKCNVKSFLVRIRDYPRYLFEIRDWRLMGRLVGTEQSGQPCSRRRQILHLGLPWGNVAVERNMPPLKFYHDFHSEIFQYTVVWGPCWDPAWTLIGQCVDLLTKPSADPSPPLPWWDKSRLLFHGDWHMDIEQANLHQLATEDPYNTTENMHWEWSHLSFHWKPGQFVFKGDLDINVRTASKYDDCCFLHLPDLCMTLDLQWLCHGNPHDHHSVTLRAPEFLPEVPLGQLHDSYRAFRSENLNLSIKMDLTRHSGTISQPRILLYSSTLRWMQNFWATWTSVTRPICRGKLFNNLKPSKKKLGQHYKQLSYTALFPQLQVHYWASFAQQRGIQIECSQGHVFTRGTQRLIPQAGTVMRRLISDWSVTQMVSDLSQVTVHLMASPTEENADHCLDPLVTKTHLLSLSSLTYQRHSNRTAEEELSARDGDPTFHTHQLHLVDLRISWTTTNRDIAFGLYDGYKKAAVLKRNLSTEALKGLKIDPQMPAKKPKRGVPTSASAPPRVNTPSFSGQPDKGSSGGAYMLQKLIEETDRFVVFTEEESGMSDQLCGIAACQTDDIYNRNCLIELVNCQMVLRGAETEGCVIVSAAKAQLLQCQHHPAWYGDTLKQKTSWTCLLDGMQYFATTESSPTEQDGRQLWLEVKNIEEHRQRSLDSVQELMESGQAVGGMVTTTTDWNQPAEAQQAQQVQRIISRCNCRMYYISYSHDIDPELATQIKPPEVLENQEKEDLLKKQEGAVDTFTLIHHELEISTNPAQYAMILDIVNNLLLHVEPKRKEHSEKKQRVRFQLEISSNPEEQRSSILHLQEAVRQHVAQIRQLEKQMYSIMKSLQDDSKNENLLDLNQKLQLQLNQEKANLQLESEELNILIRCFKDFQLQRANKMELRKQQEDVSVVRRTEFYFAQARWRLTEEDGQLGIAELELQRFLYSKVNKSDDTAEHLLELGWFTMNNLLPNAVYKVVLRPQSSCQSGRQLALRLFSKVRPPVGGISVKEHFEVNVVPLTIQLTHQFFHRMMGFFFPGRSVEDDEVGDEEDKSKLVTTGIPVVKPRQLIATDDAVPLGPGKGVAQGLTRSSGVRRSFRKSPEHPVDDIDKMKERAAMNNSFIYIKIPQVPLCVSYKGEKNSVDWGDLNLVLPCLEYHNNTWTWLDFAMAVKRDSRKALVAQVIKEKLRLKSATGSEVRGKLETKSDLNMQQQEEEEKARLLIGLSVGDKNPGKKSIFGRRK

SEQ ID NO: 20940 - protein, 2205 aa, Homo sapiens
MPLFFSALLVLLLVALSALFLGRWLVVRLATKWCQRKLQAELKIGSFRFFWIQNVSLKFQQHQQTVEIDNLWISSKLLSHDLPHYVALCFGEVRIRTDLQKVSDLSAPFSQSAGVDQKELSFSPSLLKIFCQLFSIHVDAINIMVLKVDTSESLWHIQISRSRFLLDSDGKRLICEVSLCKINSKVLKSGQLEDTCLVELSLALDLCLKVGISSRHLTAITVDVWTLHAELHEGLFQSQLLCQGPSLASKPVPCSEVTENLVEPTLPGLFLLQQLPDQVKVKMENTSVVLSMNSQKRHLTWTLKLLQFLYHRDEDQLPLRSFTANSDMAQMSTELLLEDGLLLSQSRQRIVCLNSLKASVQVTTIDLSASLVLNTCIIHYRHQEFSHWLHLLALETQGSSSPVLKQRKKRTFPQILAPIIFSTSISNVNISIQLGDTPPFALGFNSISLDYQHLRPQSIHQRGVLTVDHLCWRVGSDSHIQRAPHPPNMHVWGEALVLDSFTLQGSYNQPLGLSSTQSDTLFLDCTIRGLQVEASDTCAQCLSRILSLMGPQSGKSAVSRHSSFGESVSLLWKVDLKVEDMNLFTLSALVGASEVRLDTLTILGSAETSTVGIQGLVLALVKSVTEKMQPCCKAPDIPTPVLSLSMLSITYHSSIRSLEVQCGAGLTLLWSPPDHMYLYQHVLATLQCRDLLRATVFPETVPSLALETSGTTSELEGRAPEPLPPKRLLNLTLEVSTAKLTAFVAEDKFITLAAESVSLSRHGGSLQAYCPELAAGFDGNSIFNFKEVEVQLLPELEFPYQYDFSRTLDEAVGVQKWLKGLHQGTRAWASPSPVPLPPDLLLKVEHFSWVFLDDVFEVKLHDNYELMKDESKESAKRLQLLDAKVAALRKQHGELLPARKIEELYASLERKNIEIYIQRSRRLYGNTPMRRALLTWSLAGLELVALADASFHGPEHVVEQVQELDPGSPFPPEGLDLVIQWCRMLKCNVKSFLVRIRDYPRYLFEIRDWRLMGRLVGTEQSGQPCSRRRQILHLGLPWGNVAVERNMPPLKFYHDFHSEIFQYTVVWGPCWDPAWTLIGQCVDLLTKPSADPSPPLPWWDKSRLLFHGDWHMDIEQANLHQLATEDPYNTTENMHWEWSHLSFHWKPGQFVFKGDLDINVRTASKYDDCCFLHLPDLCMTLDLQWLCHGNPHDHHSVTLRAPEFLPEVPLGQLHDSYRAFRSENLNLSIKMDLTRHSGTISQPRILLYSSTLRWMQNFWATWTSVTRPICRGKLFNNLKPSKKKLGQHYKQLSYTALFPQLQVHYWASFAQQRGIQIECSQGHVFTRGTQRLIPQAGTVMRRLISDWSVTQMVSDLSQVTVHLMASPTEENADHCLDPLVTKTHLLSLSSLTYQRHSNRTAEEELSARDGDPTFHTHQLHLVDLRISWTTTNRDIAFGLYDGYKKAAVLKRNLSTEALKGLKIDPQMPAKKPKRGVPTSASAPPRVNTPSFSGQPDKGSSGGAYMLQKLIEETDRFVVFTEEESGMSDQLCGIAACQTDDIYNRNCLIELVNCQMVLRGAETEGCVIVSAAKAQLLQCQHHPAWYGDTLKQKTSWTCLLDGMQYFATTESSPTEQDGRQLWLEVKNIEEHRQRSLDSVQELMESGQAVGGMVTTTTDWNQPAEAQQAQQVQRIISRCNCRMYYISYSHDIDPELATQIKPPEVLENQEKEDLLKKQEGAVDTFTLIHHELEISTNPAQYAMILDIVNNLLLHVEPKRKEHSEKKQRVRFQLEISSNPEEQRSSILHLQEAVRQHVAQIRQLEKQMYSIMKSLQDDSKNENLLDLNQKLQLQLNQEKANLQLESEELNILIRCFKDFQLQRANKMELRKQQEDVSVVRRTEFYFAQARWRLTEEDGQLGIAELELQRFLYSKVNKSDDTAEHLLELGWFTMNNLLPNAVYKVVLRPQSSCQSGRQLALRLFSKVRPPVGGISVKEHFEVNVVPLTIQLTHQFFHRMMGFFFPGRSVEDDEVGDEEDKSKLVTTGIPVVKPRQLIATDDAVPLGPGKGVAQGLTRSSGVRRSFRKSPEHPVDDIDKMKERAAMNNSFIYIKIPQVPLCVSYKGEKNSVDWGDLNLVLPCLEYHNNTWTWLDFAMAVKRDSRKALVAQVIKEKLRLKSATGSEVRGKLETKSDLNMQQQEEEEKARLLIGLSVGDKNPGKKSIFGRRK

SEQ ID NO: 20941 - protein, 389 aa, Homo sapiens
MIENLLDLNQKLQLQLNQEKANLQLESEELNILIRCFKDFQLQRANKMELRKQQEDVSVVRRTEFYFAQARWRLTEEDGQLGIAELELQRFLYSKVNKSDDTAEHLLELGWFTMNNLLPNAVYKVVLRPQSSCQSGRQLALRLFSKVRPPVGGISVKEHFEVNVVPLTIQLTHQFFHRMMGFFFPGRSVEDDEVGDEEDKSKLVTTGIPVVKPRQLIATDDAVPLGPGKGVAQGLTRSSGVRRSFRKSPEHPVDDIDKMKERAAMNNSFIYIKIPQVPLCVSYKGEKNSVDWGDLNLVLPCLEYHNNTWTWLDFAMAVKRDSRKALVAQVIKEKLRLKSATGSEVRGKLETKSDLNMQQQEEEEKARLLIGLSVGDKNPGKKSIFGRRK

SEQ ID NO: 20942 - protein, 222 aa, Homo sapiens
MVLKVDTSESLWHIQISRSRFLLDSDGKRLICEVSLCKINSKVLKSGQLEDTCLVELSLALDLCLKVGISSRHLTAITVDVWTLHAELHEGLFQSQLLCQGPSLASKPVPCSEVTENLVEPTLPGLFLLQQLPDQVKVKMENTSVVLSMNSQKRHLTWTLKLLQFLYHRDEDQLPLRSFTANSDMAQMSTELLLEGSWVGVLVLSENGRTRYSLCSCPIWSP

SEQ ID NO: 20943 - protein, 443 aa, Homo sapiens
MKLRSKAAALLLLALAALLLALLSLRAGRAEPPALPARPASAPQRHPAPVPARWPGPGALPGASPGVRRRRPPRPRPRAGRRGAARLEKLARRPGEPRSFQAVLPPELWIHLAVVACGNRLEETLVMLKSAVLFSHRKIQFHIFTEDSLKPEFDKQLRQWPDSYTKKFEHRIYPITFSVGNPQEWKKLFKPCAAQRLFLPVILKDVDSLLYVDTDVLFLRPVDDIWKLLRLFNSTQLAAMAPEHEIPKIGWYSRFARHPFYGSAGVNSGVMLMNLTRIRSTQFKNSMIPTGLAWEDMLYPLYQKYKNAITWGDQDLLNIIFYFNPECLYVFPCQWNYRPDHCMYGSNCREAEHEGVSVLHGNRGVYHDDKQPTFRALYEAIRDFPFQDNLFQSMYYPLQLKFLETVHTLCGRIPQVFLKQIEKTMKRAYEKHVIIHVGPNQMH

SEQ ID NO: 20944 - protein, 703 aa, Homo sapiens
MLRGRSLSVTSLGGLPQWEVEELPVEELLLFEVAWEVTNKVGGIYTVIQTKAKTTADEWGENYFLIGPYFEHNMKTQVEQCEPVNDAVRRAVDAMNKHGCQVHFGRWLIEGSPYVVLFDIGYSAWNLDRWKGDLWEACSVGIPYHDREANDMLIFGSLTAWFLKEVTDHADGKYVVAQFHEWQAGIGLILSRARKLPIATIFTTHATLLGRYLCAANIDFYNHLDKFNIDKEAGERQIYHRYCMERASVHCAHVFTTVSEITAIEAEHMLKRKPDVVTPNGLNVKKFSAVHEFQNLHAMYKARIQDFVRGHFYGHLDFDLEKTLFLFIAGRYEFSNKGADIFLESLSRLNFLLRMHKSDITVMVFFIMPAKTNNFNVETLKGQAVRKQLWDVAHSVKEKFGKKLYDALLRGEIPDLNDILDRDDLTIMKRAIFSTQRQSLPPVTTHNMIDDSTDPILSTIRRIGLFNNRTDRVKVILHPEFLSSTSPLLPMDYEEFVRGCHLGVFPSYYEPWGYTPAECTVMGIPSVTTNLSGFGCFMQEHVADPTAYGIYIVDRRFRSPDDSCNQLTKFLYGFCKQSRRQRIIQRNRTERLSDLLDWRYLGRYYQHARHLTLSRAFPDKFHVELTSPPTTEGFKYPRPSSVPPSPSGSQASSPQSSDVEDEVEDERYDEEEEAERDRLNIKSPFSLSHVPHGKKKLHGEYKN

SEQ ID NO: 20945 - protein, 1395 aa, Homo sapiens
MYPICTVVVDGLPSESSSSSYPGPVSVSEMSLLHALGPVQTWLGQELEKCGIDAMIYTRYVLSLLLHDSYDYDLQEQENDIFLGWEKGAYKKWGKSKKKCSDLTLEEMKKQAAVQCLRSASDESSGIETLVEELCSRLKDLQSKQEEKIHKKLEGSPSPEAELSPPAKDQVEMYYEAFPPLSEKPVCLQEIMTVWNKSKVCSYSSSSSSSTAPPASTDTSSPKDCNSESEVTKERSSEVPTTVHEKTQSKSKNEKENKFSNGTIEEKPALYKKQIRHKPEGKIRPRSWSSGSSEAGSSSSGNQGELKASMKYVKVRHKAREIRNKKGRNGQSRLSLKHGEKAERNIHTGSSSSSSSGSVKQLCKRGKRPLKEIGRKDPGSTEGKDLYMENRKDTEYKEEPLWYTEPIAEYFVPLSRKSKLETTYRNRQDTSDLTSEAVEELSESVHGLCISNNNLHKTYLAAGTFIDGHFVEMPAVINEDIDLTGTSLCSLPEDNKYLDDIHLSELTHFYEVDIDQSMLDPGASETMQGESRILNMIRQKSKENTDFEAECCIVLDGMELQGERAIWTDSTSSVGAEGLFLQDLGNLAQFWECCSSSSGDADGESFGGDSPVRLSPILDSTVLNSHLLAGNQELFSDINEGSGINSCFSVFEVQCSNSVLPFSFETLNLGNENTDSSANMLGKTQSRLLIWTKNSAFEENEHCSNLSTRTCSPWSHSEETRSDNETLNIQFEESTQFNAEDINYVVPRVSSNYVDEELLDFLQDETCQQNSRTLGEIPTLVFKKTSKLESVCGIQLEQKTENKNFETTQVCNESPHGDGYSSGVIKDIWTKMADTNSVATVEIERTDAELFSADVNNYCCCLDAEAELETLQEPDKAVRRSEYHLWEGQKESLEKRAFASSELSNVDGGDYTTPSKPWDVAQDKENTFILGGVYGELKTFNSDGEWAVVPPSHTKGSLLQCAASDVVTIAGTDVFMTPGNSFAPGHRQLWKPFVSFEQNDQPKSGENGLNKGFSFIFHEDLLGACGNFQVEDPGLEYSFSSFDLSNPFSQVLHVECSFEPEGIASFSPSFKPKSILCSDSDSEVFHPRICGVDRTQYRAIRISPRTHFRPISASELSPGGGSESEFESEKDEANIPIPSQVDIFEDPQADLKPLEEDAEKEGHYYGKSELESGKFLPRLKKSGMEKSAQTSLDSQEESTGILSVGKQNQCLECSMNESLEIDLESSEANCKIMAQCEEEINNFCGCKAGCQFPAYEDNPVSSGQLEEFPVLNTDIQGMNRSQEKQTWWEKALYSPLFPASECEECYTNAKGESGLEEYPDAKETPSNEERLLDFNRVSSVYEARCTGERDSGAKSDGFRGKMCSSASSTSEETGSEGGGEWVGPSEEELFSRTHL

SEQ ID NO: 20946 - protein, 147 aa, Homo sapiens
MGHFTEEDKATITSLWGKVNVEDAGGETLGRLLVVYPWTQRFFDSFGNLSSASAIMGNPKVKAHGKKVLTSLGDAIKHLDDLKGTFAQLSELHCDKLHVDPENFKLLGNVLVTVLAIHFGKEFTPEVQASWQKMVTGVASALSSRYH

SEQ ID NO: 20947 - protein, 520 aa, Homo sapiens
MAGCTRKLTHLRKRIHRPRRRTTRRWKRWFKFRKRKGEKRPRPNHKAVARRAKLKFSTSEKLHWPEQELAKKSILNAEDSLIIDNKRSISHLSSGVLKDIFTTGTSSYNVLLQSKEEKKYHSQKQSSSTYSKRCRKPSKSPNTSRSKDPRRMKALVPVTSSGTWYCLERRPAVFVTSSVSSPVKFTHDISVTGNGIVLPPKPKSKVKWCHFSTLPKPKPQLSRSFEKGDDFSGKKFCILTAIKPTNLEKEKLRFFKSDYTYNPQFEYANPALPSVLAKHSHASDRFLKQIVVHLTEDLLSRASMTVVNGCPTLTINVSTAREHWLEGMLRHEIGTHYFRGINNLQQPWNSWTGRKKHELKPNNPTEEGLASIHSVLFRKDPFLWRAALLYYTVYQASQMSFCELFKDIGRFVKDPNTRWDYCVRAKRGWTDTSQPGCFSKDQVYLDGILQILRYRDTIDFHLLTALGKVSYEDVDRLKGLAVTENMRVPHFLQDHGRYMEHLEKIMEVNELTDRELKDLI

SEQ ID NO: 20948 - protein, 507 aa, Homo sapiens
MVATGWARRSGLHPAPRPLRGAQEALAKNLWREERNRPLILSSLIIKKLHWPEQELAKKSILNAEDSLIIDNKRSISHLSSGVLKDIFTTGTSSYNVLLQSKEEKKYHSQKQSSSTYSKRCRKPSKSPNTSRSKDPRRMKALVPVTSSGTWYCLERRPAVFVTSSVSSPVKFTHDISVTGNGIVLPPKPKSKVKWCHFSTLPKPKPQLSRSFEKGDDFSGKKFCILTAIKPTNLEKEKLRFFKSDYTYNPQFEYANPALPSVLAKHSHASDRFLKQIVVHLTEDLLSRASMTVVNGCPTLTINVSTAREHWLEGMLRHEIGTHYFRGINNLQQPWNSWTGRKKHELKPNNPTEEGLASIHSVLFRKDPFLWRAALLYYTVYQASQMSFCELFKDIGRFVKDPNTRWDYCVRAKRGWTDTSQPGCFSKDQVYLDGILQILRYRDTIDFHLLTALGKVSYEDVDRLKGLAVTENMRVPHFLQDHGRYMEHLEKIMEVNELTDRELKDLI

SEQ ID NO: 20949 - protein, 469 aa, Homo sapiens
MLESIRVTEKLHWPEQELAKKSILNAEDSLIIDNKRSISHLSSGVLKDIFTTGTSSYNVLLQSKEEKKYHSQKQSSSTYSKRCRKPSKSPNTSRSKDPRRMKALVPVTSSGTWYCLERRPAVFVTSSVSSPVKFTHDISVTGNGIVLPPKPKSKVKWCHFSTLPKPKPQLSRSFEKGDDFSGKKFCILTAIKPTNLEKEKLRFFKSDYTYNPQFEYANPALPSVLAKHSHASDRFLKQIVVHLTEDLLSRASMTVVNGCPTLTINVSTAREHWLEGMLRHEIGTHYFRGINNLQQPWNSWTGRKKHELKPNNPTEEGLASIHSVLFRKDPFLWRAALLYYTVYQASQMSFCELFKDIGRFVKDPNTRWDYCVRAKRGWTDTSQPGCFSKDQVYLDGILQILRYRDTIDFHLLTALGKVSYEDVDRLKGLAVTENMRVPHFLQDHGRYMEHLEKIMEVNELTDRELKDLI

SEQ ID NO: 20950 - protein, 304 aa, Homo sapiens
MVATGWARRSGLHPAPRPLRGAQEALAKNLWREERNRPLILSSLIIKKLHWPEQELAKKSILNAEDSLIIDNKRSISHLSSGVLKDIFTTGTSSYNVLLQSKEEKKYHSQKQSSSTYSKRCRKPSKSPNTSRSKDPRRMKALVPVTSSGTWYCLERRPAVFVTSSVSSPVKFTHDISVTGNGIVLPPKPKSKVKWCHFSTLPKPKPQLSRSFEKGDDFSGKKFCILTAIKPTNLEKEKLRFFKSDYTYNPQFEYANPALPSVLAKHSHASDRFLKQVKCHFNSGSSFLCTKTIICDLISKNKDI

SEQ ID NO: 20951 - protein, 417 aa, Homo sapiens
MKALVPVTSSGTWYCLERRPAVFVTSSVSSPVKFTHDISVTGNGIVLPPKPKSKVKWCHFSTLPKPKPQLSRSFEKGDDFSGKKFCILTAIKPTNLEKEKLRFFKSDYTYNPQFEYANPALPSVLAKHSHASDRFLKQSINIMELTLQKYGSYEKFEQATGGSLLSKTRIWSHVRKYMMKEGCLGEIVVHLTEDLLSRASMTVVNGCPTLTINVSTAREHWLEGMLRHEIGTHYFRGINNLQQPWNSWTGRKKHELKPNNPTEEGLASIHSVLFRKDPFLWRAALLYYTVYQASQMSFCELFKDIGRFVKDPNTRWDYCVRAKRGWTDTSQPGCFSKDQVYLDGILQILRYRDTIDFHLLTALGKVSYEDVDRLKGLAVTENMRVPHFLQDHGRYMEHLEKIMEVNELTDRELKDLI

SEQ ID NO: 20952 - protein, 517 aa, Homo sapiens
MLESIRVTEKLHWPEQELAKKSILNAEDSLIIDNKRSISHLSSGVLKDIFTTGTSSYNVLLQSKEEKKYHSQKQSSSTYSKRCRKPSKSPNTSRSKDPRRMKALVPVTSSGTWYCLERRPAVFVTSSVSSPVKFTHDISVTGNGIVLPPKPKSKVKWCHFSTLPKPKPQLSRSFEKGDDFSGKKFCILTAIKPTNLEKEKLRFFKSDYTYNPQFEYANPALPSVLAKHSHASDRFLKQSINIMELTLQKYGSYEKFEQATGGSLLSKTRIWSHVRKYMMKEGCLGEIVVHLTEDLLSRASMTVVNGCPTLTINVSTAREHWLEGMLRHEIGTHYFRGINNLQQPWNSWTGRKKHELKPNNPTEEGLASIHSVLFRKDPFLWRAALLYYTVYQASQMSFCELFKDIGRFVKDPNTRWDYCVRAKRGWTDTSQPGCFSKDQVYLDGILQILRYRDTIDFHLLTALGKVSYEDVDRLKGLAVTENMRVPHFLQDHGRYMEHLEKIMEVNELTDRELKDLI

SEQ ID NO: 20953 - protein, 711 aa, Homo sapiens
MESGAVLLESKSSPFNLLHEMHELRLLGHLCDVTVSVEYQGVRKDFMAHKAVLAATSKFFKEVFLNEKSVDGTRTNVYLNEVQVADFASFLEFVYTAKVQVEEDRVQRMLEVAEKLKCLDLSETCFQLKKQMLESVLLELQNFSESQEVEVSSGSQVSAAPAPRASVATDGPHPSGLTDSLDYPGERASNGMSSDLPPKKSKDKLDKKKEVVKPPYPKIRRASGRLAGRKVFVEIPKKKYTRRLREQQKTAEGDVGDYRCPQDQSPDRVGTEMEQVSKNEGCQAGAELEELSKKAGPEEEEEEEEEDEEGEKKKSNFKCSICEKAFLYEKSFLKHSKHRHGVATEVVYRCDTCGQTFANRCNLKSHQRHVHSSERHFPCELCGKKFKRKKDVKRHVLQVHEGGGERHRCGQCGKGLSSKTALRLHERTHTGDRPYGCTECGARFSQPSALKTHMRIHTGEKPFVCDECGARFTQNHMLIYHKRCHTGERPFMCETCGKSFASKEYLKHHNRIHTGSKPFKCEVCFRTFAQRNSLYQHIKVHTGERPYCCDQCGKQFTQLNALQRHRRIHTGERPFMCNACGRTFTDKSTLRRHTSIHDKNTPWKSFLVIVDGSPKNDDGHKTEQPDEEYVSSKLSDKLLSFAENGHFHNLAAVQDTVPTMQENSSADTACKADDSVVSQDTLLATTISELSELTPQTDSMPTQLHSLSNME

SEQ ID NO: 20954 - protein, 220 aa, Homo sapiens
MCETCGKSFASKEYLKHHNRIHTGSKPFKCEVCFRTFAQRNSLYQHIKVHTGERPYCCDQCGKQFTQLNALQRHRRIHTGERPFMCNACGRTFTDKSTLRRHTSIHDKNTPWKSFLVIVDGSPKNDDGHKTEQPDEEYVSSKLSDKLLSFAENGHFHNLAAVQDTVPTMQENSSADTACKADDSVVSQDTLLATTISELSELTPQTDSMPTQLHSLSNME

SEQ ID NO: 20955 - protein, 684 aa, Homo sapiens
MARHRNVRGYNYDEDFEDDDLYGQSVEDDYCISPSTAAQFIYSRRDKPSVEPVEEYDYEDLKESSNSVSNHQLSGFDQARLYSCLDHMREVLGDAVPDEILIEAVLKNKFDVQKALSGVLEQDRVQSLKDKNEATVSTGKIAKGKPVDSQTSRSESEIVPKVAKMTVSGKKQTMGFEVPGVSSEENGHSFHTPQKGPPIEDAIASSDVLETASKSANPPHTIQASEEQSSTPAPVKKSGKLRQQIDVKAELEKRQGGKQLLNLVVIGHVDAGKSTLMGHMLYLLGNINKRTMHKYEQESKKAGKASFAYAWVLDETGEERERGVTMDVGMTKFETTTKVITLMDAPGHKDFIPNMITGAAQADVAVLVVDASRGEFEAGFETGGQTREHGLLVRSLGVTQLAVAVNKMDQVNWQQERFQEITGKLGHFLKQAGFKESDVGFIPTSGLSGENLITRSQSSELTKWYKGLCLLEQIDSFKPPQRSIDKPFRLCVSDVFKDQGSGFCITGKIEAGYIQTGDRLLAMPPNETCTVKGITLHDEPVDWAAAGDHVSLTLVGMDIIKINVGCIFCGPKVPIKACTRFRARILIFNIEIPITKGFPVLLHYQTVSEPAVIKRLISVLNKSTGEVTKKKPKFLTKGQNALVELQTQRPIALELYKDFKELGRFMLRYGGSTIAAGVVTEIKE

SEQ ID NO: 20956 - protein, 632 aa, Homo sapiens
MARHRNVRGYNYDEDFEDDDLYGQSVEDDYCISPSTAAQFIYSRRDKPSVEPVEEYDYEDLKESSNSVSNHQLSGFDQARLYSCLDHMREVLGDAVPDEILIEAVLKNKFDVQKALSGVLEQDRVQSLKDKNEATVSTGKIAKGVLFSSSEVSADNVQSSYPQSANHLDYSSKPFDFASSVGKYGLSHNSSVPTHCLLHRKKKLDTRKSEKKLESCKLTKELSLANLIHDMSRDSCESQPSVRLSSTDSLESLLSKNLDADLLRPHASECISKDDSAFKEIPDLKTIIIKGTTPNNSLYIQNNSLSDFQNIPVQDSLGSSNNPLYLTSSLENMTVDNLNASKETEVGNVSLVEQSAKNHTFKNDNLQFSQCESPSLTELFQEHKENNISQCFTLSDLCNQSSASFTDLSLGSFPLSQLANRCQSSPGISELTGSLSSLAFHKASPTRDLENLSLSELIAETIDVDNSQIKKESFEVSLSEVRSPGIDSNIDLSVLIKNPDFVPKPVVDPSIAPSSRTKVLSSKLGKNSNFAKDNKKNNKGSLTRKPPFSLSWTKALAARPSAFASTLCLRYPLKSCKRRTLDLYKTFLYSRQVQDVKDKEISPLVAITPFDFKSASPDDIVKANQKKAFTRE

SEQ ID NO: 20957 - protein, 642 aa, Homo sapiens
MARHRNVRGYNYDEDFEDDDLYGQSVEDDYCISPSTARLYSCLDHMREVLGDAVPDEILIEAVLKNKFDVQKALSGVLEQDRVQSLKDKNEATVSTGKIAKGKPVDSQTSRSESEIVPKVAKMTVSGKKQTMGFEVPGVSSEENGHSFHTPQKGPPIEDAIASSDVLETASKSANPPHTIQASEEQSSTPAPVKKSGKLRQQIDVKAELEKRQGGKQLLNLVVIGHVDAGKSTLMGHMLYLLGNINKRTMHKYEQESKKAGKASFAYAWVLDETGEERERGVTMDVGMTKFETTTKVITLMDAPGHKDFIPNMITGAAQADVAVLVVDASRGEFEAGFETGGQTREHGLLVRSLGVTQLAVAVNKMDQVNWQQERFQEITGKLGHFLKQAGFKESDVGFIPTSGLSGENLITRSQSSELTKWYKGLCLLEQIDSFKPPQRSIDKPFRLCVSDVFKDQGSGFCITGKIEAGYIQTGDRLLAMPPNETCTVKGITLHDEPVDWAAAGDHVSLTLVGMDIIKINVGCIFCGPKVPIKACTRFRARILIFNIEIPITKGFPVLLHYQTVSEPAVIKRLISVLNKSTGEVTKKKPKFLTKGQNALVELQTQRPIALELYKDFKELGRFMLRYGGSTIAAGVVTEIKE

SEQ ID NO: 20958 - protein, 594 aa, Homo sapiens
MALAGCPDSFLHHPYYQDKVEQTPRSQQDPAGPGLPAQSDRLANHQEDDVDLEALVNDMNASLESLYSACSMQSDTVPLLQNGQHARSQPRASGPPRSIQPQVSPRQRVQRSQPVHILAVRRLQEEDQQFRTSSLPAIPNPFPELCGPGSPPVLTPGSLPPSQAAAKQDVKVFSEDGTSKVVEILADMTARDLCQLLVYKSHCVDDNSWTLVEHHPHLGLERCLEDHELVVQVESTMASESKFLFRKNYAKYEFFKNPMNFFPEQMVTWCQQSNGSQTQLLQNFLNSSSCPEIQGFLHVKELGKKSWKKLYVCLRRSGLYCSTKGTSKEPRHLQLLADLEDSNIFSLIAGRKQYNAPTDHGLCIKPNKVRNETKELRLLCAEDEQTRTCWMTAFRLLKYGMLLYQNYRIPQQRKALLSPFSTPVRSVSENSLVAMDFSGQTGRVIENPAEAQSAALEEGHAWRKRSTRMNILGSQSPLHPSTLSTVIHRTQHWFHGRISREESHRIIKQQGLVDGLFLLRDSQSNPKAFVLTLCHHQKIKNFQILPCEDDGQTFFSLDDGNTKFSDLIQLVDFYQLNKGVLPCKLKHHCIRVAL

SEQ ID NO: 20959 - protein, 548 aa, Homo sapiens
MALAGCPDSFLHHPYYQDKVEQTPRSQQDPAGPGLPAQSDRLANHQEDDVDLEALVNDMNASLESLYSACSMQSDTVPLLQNGQHARSQPRASGPPRSIQPQVSPRQRVQRSQPVHILAVRRLQEEDQQFRTSSLPAIPNPFPELCGPGSPPVLTPGSLPPSQAAAKQDVKVFSEDGTSKVVEILADMTARDLCQLLVYKSHCVDDNSWTLVEHHPHLGLERCLEDHELVVQVESTMASESKFLFRKNYAKYEFFKNPMNFFPEQMVTWCQQSNGSQTQLLQEPRHLQLLADLEDSNIFSLIAGRKQYNAPTDHGLCIKPNKVRNETKELRLLCAEDEQTRTCWMTAFRLLKYGMLLYQNYRIPQQRKALLSPFSTPVRSVSENSLVAMDFSGQTGRVIENPAEAQSAALEEGHAWRKRSTRMNILGSQSPLHPSTLSTVIHRTQHWFHGRISREESHRIIKQQGLVDGLFLLRDSQSNPKAFVLTLCHHQKIKNFQILPCEDDGQTFFSLDDGNTKFSDLIQLVDFYQLNKGVLPCKLKHHCIRVAL

SEQ ID NO: 20960 - protein, 536 aa, Homo sapiens
MNASLESLYSACSMQSDTVPLLQNGQHARSQPRASGPPRSIQPQVSPRQRVQRSQPVHILAVRRLQEEDQQFRTSSLPAIPNPFPELCGPGSPPVLTPGSLPPSQAAAKQDVKVFSEDGTSKVVEILADMTARDLCQLLVYKSHCVDDNSWTLVEHHPHLGLERCLEDHELVVQVESTMASESKFLFRKNYAKYEFFKNPMNFFPEQMVTWCQQSNGSQTQLLQNFLNSSSCPEIQGFLHVKELGKKSWKKLYVCLRRSGLYCSTKGTSKEPRHLQLLADLEDSNIFSLIAGRKQYNAPTDHGLCIKPNKVRNETKELRLLCAEDEQTRTCWMTAFRLLKYGMLLYQNYRIPQQRKALLSPFSTPVRSVSENSLVAMDFSGQTGRVIENPAEAQSAALEEGHAWRKRSTRMNILGSQSPLHPSTLSTVIHRTQHWFHGRISREESHRIIKQQGLVDGLFLLRDSQSNPKAFVLTLCHHQKIKNFQILPCEDDGQTFFSLDDGNTKFSDLIQLVDFYQLNKGVLPCKLKHHCIRVAL

SEQ ID NO: 20961 - protein, 588 aa, Homo sapiens
MQAAGPLFRSKDKVEQTPRSQQDPAGPGLPAQSDRLANHQEDDVDLEALVNDMNASLESLYSACSMQSDTVPLLQNGQHARSQPRASGPPRSIQPQVSPRQRVQRSQPVHILAVRRLQEEDQQFRTSSLPAIPNPFPELCGPGSPPVLTPGSLPPSQAAAKQDVKVFSEDGTSKVVEILADMTARDLCQLLVYKSHCVDDNSWTLVEHHPHLGLERCLEDHELVVQVESTMASESKFLFRKNYAKYEFFKNPMNFFPEQMVTWCQQSNGSQTQLLQNFLNSSSCPEIQGFLHVKELGKKSWKKLYVCLRRSGLYCSTKGTSKEPRHLQLLADLEDSNIFSLIAGRKQYNAPTDHGLCIKPNKVRNETKELRLLCAEDEQTRTCWMTAFRLLKYGMLLYQNYRIPQQRKALLSPFSTPVRSVSENSLVAMDFSGQTGRVIENPAEAQSAALEEGHAWRKRSTRMNILGSQSPLHPSTLSTVIHRTQHWFHGRISREESHRIIKQQGLVDGLFLLRDSQSNPKAFVLTLCHHQKIKNFQILPCEDDGQTFFSLDDGNTKFSDLIQLVDFYQLNKGVLPCKLKHHCIRVAL

SEQ ID NO: 20962 - protein, 908 aa, Homo sapiens
MVCEGKRSASCPCFFLLTAKFYWILTMMQRTHSQEYAHSIRVDGDIILGGLFPVHAKGERGVPCGELKKEKGIHRLEAMLYAIDQINKDPDLLSNITLGVRILDTCSRDTYALEQSLTFVQALIEKDASDVKCANGDPPIFTKPDKISGVIGAAASSVSIMVANILRLFKIPQISYASTAPELSDNTRYDFFSRVVPPDSYQAQAMVDIVTALGWNYVSTLASEGNYGESGVEAFTQISREIGGVCIAQSQKIPREPRPGEFEKIIKRLLETPNARAVIMFANEDDIRRILEAAKKLNQSGHFLWIGSDSWGSKIAPVYQQEEIAEGAVTILPKRASIDGFDRYFRSRTLANNRRNVWFAEFWEENFGCKLGSHGKRNSHIKKCTGLERIARDSSYEQEGKVQFVIDAVYSMAYALHNMHKDLCPGYIGLCPRMSTIDGKELLGYIRAVNFNGSAGTPVTFNENGDAPGRYDIFQYQITNKSTEYKVIGHWTNQLHLKVEDMQWAHREHTHPASVCSLPCKPGERKKTVKGVPCCWHCERCEGYNYQVDELSCELCPLDQRPNMNRTGCQLIPIIKLEWHSPWAVVPVFVAILGIIATTFVIVTFVRYNDTPIVRASGRELSYVLLTGIFLCYSITFLMIAAPDTIICSFRRVFLGLGMCFSYAALLTKTNRIHRIFEQGKKSVTAPKFISPASQLVITFSLISVQLLGVFVWFVVDPPHIIIDYGEQRTLDPEKARGVLKCDISDLSLICSLGYSILLMVTCTVYAIKTRGVPETFNEAKPIGFTMYTTCIIWLAFIPIFFGTAQSAEKMYIQTTTLTVSMSLSASVSLGMLYMPKVYIIIFHPEQNVQKRKRSFKAVVTAATMQSKLIQKGNDRPNGEVKSELCESLETNTSSTKTTYISYSNHSI

SEQ ID NO: 20963 - protein, 908 aa, Homo sapiens
MVCEGKRSASCPCFFLLTAKFYWILTMMQRTHSQEYAHSIRVDGDIILGGLFPVHAKGERGVPCGELKKEKGIHRLEAMLYAIDQINKDPDLLSNITLGVRILDTCSRDTYALEQSLTFVQALIEKDASDVKCANGDPPIFTKPDKISGVIGAAASSVSIMVANILRLFKIPQISYASTAPELSDNTRYDFFSRVVPPDSYQAQAMVDIVTALGWNYVSTLASEGNYGESGVEAFTQISREIGGVCIAQSQKIPREPRPGEFEKIIKRLLETPNARAVIMFANEDDIRRILEAAKKLNQSGHFLWIGSDSWGSKIAPVYQQEEIAEGAVTILPKRASIDGFDRYFRSRTLANNRRNVWFAEFWEENFGCKLGSHGKRNSHIKKCTGLERIARDSSYEQEGKVQFVIDAVYSMAYALHNMHKDLCPGYIGLCPRMSTIDGKELLGYIRAVNFNGSAGTPVTFNENGDAPGRYDIFQYQITNKSTEYKVIGHWTNQLHLKVEDMQWAHREHTHPASVCSLPCKPGERKKTVKGVPCCWHCERCEGYNYQVDELSCELCPLDQRPNMNRTGCQLIPIIKLEWHSPWAVVPVFVAILGIIATTFVIVTFVRYNDTPIVRASGRELSYVLLTGIFLCYSITFLMIAAPDTIICSFRRVFLGLGMCFSYAALLTKTNRIHRIFEQGKKSVTAPKFISPASQLVITFSLISVQLLGVFVWFVVDPPHIIIDYGEQRTLDPEKARGVLKCDISDLSLICSLGYSILLMVTCTVYAIKTRGVPETFNEAKPIGFTMYTTCIIWLAFIPIFFGTAQSAEKMYIQTTTLTVSMSLSASVSLGMLYMPKVYIIIFHPEQNVQKRKRSFKAVVTAATMQSKLIQKGNDRPNGEVKSELCESLETNSKSSVEFPMVKSGSTS

SEQ ID NO: 20964 - protein, 501 aa, Homo sapiens
MVCEGKRSASCPCFFLLTAKFYWILTMMQRTHSQEYAHSIRVDGDIILGGLFPVHAKGERGVPCGELKKEKGIHRLEAMLYAIDQINKDPDLLSNITLGVRILDTCSRDTYALEQSLTFVQALIEKDASDVKCANGDPPIFTKPDKISGVIGAAASSVSIMVANILRLFKIPQISYASTAPELSDNTRYDFFSRVVPPDSYQAQAMVDIVTALGWNYVSTLASEGNYGESGVEAFTQISREIGGVCIAQSQKIPREPRPGEFEKIIKRLLETPNARAVIMFANEDDIRRILEAAKKLNQSGHFLWIGSDSWGSKIAPVYQQEEIAEGAVTILPKRASIDGFDRYFRSRTLANNRRNVWFAEFWEENFGCKLGSHGKRNSHIKKCTGLERIARDSSYEQEGKVQFVIDAVYSMAYALHNMHKDLCPGYIGLCPRMSTIDGKELLGYIRAVNFNGCRRGIQMSLPWPTLFTPSFSSSWAVLALLSLLMKTEMLLDVMISSSIK

SEQ ID NO: 20965 - protein, 392 aa, Homo sapiens
MQSPAVLVTSRRLQNAHTGLDLTVPQHQEVRGKMMSGHVEYQILVVTRLAAFKSAKHRPEDVVQFLVSKKYSEIEEFYQKLSSRYAAASLPPLPRKVLFVGESDIRERRAVFNEILRCVSKDAELAGSPELLEFLGTRSPGAAGLTSRDSSVLDGTDSQTGNDEEAFDFFEEQDQVAEEGPPVQSLKGEDAEESLEEEEALDPLGIMRSKKPKKHPKVAVKAKPSPRLTIFDEEVDPDEGLFGPGRKLSPQDPSEDVSSVDPLKLFDDPDLGGAIPLGDSLLLPAACESGGPTPSLSHRDASKELFRVEEDLDQILNLGAEPKPKPQLKPKPPVAAKPVIPRKPAVPPKAGPAEAVAGQQKPQEQIQAMDEMDILQYIQDHDTPAQAAPSLF

SEQ ID NO: 20966 - protein, 377 aa, Homo sapiens
MSMSPTVIILACLGFFLDQSVWAHVGGQDKPFCSAWPSAVVPQGGHVTLRCHYRRGFNIFTLYKKDGVPVPELYNRIFWNSFLISPVTPAHAGTYRCRGFHPHSPTEWSAPSNPLVIMVTGLYEKPSLTARPGPTVRAGENVTLSCSSQSSFDIYHLSREGEAHELRLPAVPSINGTFQADFPLGPATHGETYRCFGSFHGSPYEWSDPSDPLPVSVTGNPSSSWPSPTEPSFKTGIARHLHAVIRYSVAIILFTILPFFLLHRWCSKKKDAAVMNQEPAGHRTVNREDSDEQDPQEVTYAQLDHCIFTQRKITGPSQRSKRPSTDTSVCIELPNAEPRALSPAHEHHSQALMGSSRETTALSQTQLASSNVPAAGI

SEQ ID NO: 20967 - protein, 360 aa, Homo sapiens
MSMSPTVIILACLGFFLDQSVWAHVGGQDKPFCSAWPSAVVPQGGHVTLRCHYRRGFNIFTLYKKDGVPVPELYNRIFWNSFLISPVTPAHAGTYRCRGFHPHSPTEWSAPSNPLVIMVTGLYEKPSLTARPGPTVRAGENVTLSCSSQSSFDIYHLSREGEAHELRLPAVPSINGTFQADFPLGPATHGETYRCFGSFHGSPYEWSDPSDPLPVSVTGIARHLHAVIRYSVAIILFTILPFFLLHRWCSKKKDAAVMNQEPAGHRTVNREDSDEQDPQEVTYAQLDHCIFTQRKITGPSQRSKRPSTDTSVCIELPNAEPRALSPAHEHHSQALMGSSRETTALSQTQLASSNVPAAGI

SEQ ID NO: 20968 - protein, 342 aa, Homo sapiens
MSMSPTVIILACLGFFLDQSVWAHVGGQDKPFCSAWPSAVVPQGGHVTLRCHYRRGFNIFTLYKKDGVPVPELYNRIFWNSFLISPVTPAHAGTYRCRGFHPHSPTEWSAPSNPLVIMVTGLYEKPSLTARPGPTVRAGENVTLSCSSQSSFDIYHLSREGEAHELRLPAVPSINGTFQADFPLGPATHGETYRCFGSFHGSPYEWSDPSDPLPVSVTGNPSSSWPSPTEPSFKTDAAVMNQEPAGHRTVNREDSDEQDPQEVTYAQLDHCIFTQRKITGPSQRSKRPSTDTSVCIELPNAEPRALSPAHEHHSQALMGSSRETTALSQTQLASSNVPAAGI

SEQ ID NO: 20969 - protein, 325 aa, Homo sapiens
MSMSPTVIILACLGFFLDQSVWAHVGGQDKPFCSAWPSAVVPQGGHVTLRCHYRRGFNIFTLYKKDGVPVPELYNRIFWNSFLISPVTPAHAGTYRCRGFHPHSPTEWSAPSNPLVIMVTGLYEKPSLTARPGPTVRAGENVTLSCSSQSSFDIYHLSREGEAHELRLPAVPSINGTFQADFPLGPATHGETYRCFGSFHGSPYEWSDPSDPLPVSVTDAAVMNQEPAGHRTVNREDSDEQDPQEVTYAQLDHCIFTQRKITGPSQRSKRPSTDTSVCIELPNAEPRALSPAHEHHSQALMGSSRETTALSQTQLASSNVPAAGI

SEQ ID NO: 20970 - protein, 307 aa, Homo sapiens
MSMSPTVIILACLGFFLDQSVWAHVGGQDKPFCSAWPSAVVPQGGHVTLRCHYRRGFNIFTLYKKDGVPVPELYNRIFWNSFLISPVTPAHAGTYRCRGFHPHSPTEWSAPSNPLVIMVTGLYEKPSLTARPGPTVRAGENVTLSCSSQSSFDIYHLSREGEAHELRLPAVPSINGTFQADFPLGPATHGETYRCFGSFHGSPYEWSDPSDPLPVSVTDSDEQDPQEVTYAQLDHCIFTQRKITGPSQRSKRPSTDTSVCIELPNAEPRALSPAHEHHSQALMGSSRETTALSQTQLASSNVPAAGI

SEQ ID NO: 20971 - protein, 230 aa, Homo sapiens
MSMSPTVIILACLGFFLDQSVWAHVGLYEKPSLTARPGPTVRAGENVTLSCSSQSSFDIYHLSREGEAHELRLPAVPSINGTFQADFPLGPATHGETYRCFGSFHGSPYEWSDPSDPLPVSVTDAAVMNQEPAGHRTVNREDSDEQDPQEVTYAQLDHCIFTQRKITGPSQRSKRPSTDTSVCIELPNAEPRALSPAHEHHSQALMGSSRETTALSQTQLASSNVPAAGI

SEQ ID NO: 20972 - protein, 516 aa, Homo sapiens
MWALRAAVRPGLRLSRVGRGRSAPRAAAPSCPARALAAVGRRSPGNLEGPWGGGRGLRADGGRSRTGDDEEEPEDADENAEEELLRGEPLLPAGTQRVCLVHPDVKWGPGKSQMTRAEWQVAEATALVHTLDGWSVVQTMVVSTKTPDRKLIFGKGNFEHLTEKIRGSPDITCVFLNVERMAAPTKKELEAAWGVEVFDRFTVVLHIFRCNARTKEARLQVALAEMPLHRSNLKRDVAHLYRGVGSRYIMGSGESFMQLQQRLLREKEAKIRKALDRLRKKRHLLRRQRTRREFPVISVVGYTNCGKTTLIKALTGDAAIQPRDQLFATLDVTAHAGTLPSRMTVLYVDTIGFLSQLPHGLIESFSATLEDVAHSDLILHVRDVSHPEAELQKCSVLSTLRGLQLPAPLLDSMVEVHNKVDLVPGYSPTEPNVVPVSALRGHGLQELKAELDAAVLKATGRQILTLRVRLAGAQLSWLYKEATVQEVDVIPEDGAADVRVIISNSAYGKFRKLFPG

SEQ ID NO: 20973 - protein, 617 aa, Homo sapiens
MVPVENTEGPSLLNQKGTAVETEGSGSRHPPWARGCGMFTFLSSVTAAVSGLLVGYELGIISGALLQIKTLLALSCHEQEMVVSSLVIGALLASLTGGVLIDRYGRRTAIILSSCLLGLGSLVLILSLSYTVLIVGRIAIGVSISLSSIATCVYIAEIAPQHRRGLLVSLNELMIVIGILSAYISNYAFANVFHGWKYMFGLVIPLGVLQAIAMYFLPPSPRFLVMKGQEGAASKVLGRLRALSDTTEELTVIKSSLKDEYQYSFWDLFRSKDNMRTRIMIGLTLVFFVQITGQPNILFYASTVLKSVGFQSNEAASLASTGVGVVKVISTIPATLLVDHVGSKTFLCIGSSVMAASLVTMGIVNLNIHMNFTHICRSHNSINQSLDESVIYGPGNLSTNNNTLRDHFKGISSHSRSSLMPLRNDVDKRGETTSASLLNAGLSHTEYQIVTDPGDVPAFLKWLSLASLLVYVAAFSIGLGPMPWLVLSEIFPGGIRGRAMALTSSMNWGINLLISLTFLTVTDLIGLPWVCFIYTIMSLASLLFVVMFIPETKGCSLEQISMELAKVNYVKNNICFMSHHQEELVPKQPQKRKPQEQLLECNKLCGRGQSRQLSPET

SEQ ID NO: 20974 - protein, 257 aa, Homo sapiens
MPASMFSIDNILAARPRCKDSVLPVAHSAAAPVVFPALHGDSLYGASGGASSDYGAFYPRPVAPGGAGLPAAVSGSRLGYNNYFYGQLHVQAAPVGPACCGAVPPLGAQQCSCVPTPPGYEGPGSVLVSPVPHQMLPYMNVGTLSRTELQLLNQLHCRRKRRHRTIFTDEQLEALENLFQETKYPDVGTREQLARKVHLREEKVEVWFKNRRAKWRRQKRSSSEESENAEKWNKTSSSKASPEKREEEGKSDLDSDS

SEQ ID NO: 20975 - protein, 410 aa, Homo sapiens
MSLMVVSMACVGFFLLEGPWPHVGGQDKPFLSAWPGTVVSEGQHVTLQCRSRLGFNEFSLSKEDGMPVPELYNRIFRNSFLMGPVTPAHAGTYRCCSSHPHSPTGWSAPSNPVVIMVTGVHRKPSLLAHPGPLVKSGETVILQCWSDVRFERFLLHREGITEDPLRLVGQLHDAGSQVNYSMGPMTPALAGTYRCFGSVTHLPYELSAPSDPLDIVVVGLYGKPSLSAQPGPTVQAGENVTLSCSSRSLFDIYHLSREAEAGELRLTAVLRVNGTFQANFPLGPVTHGGNYRCFGSFRALPHAWSDPSDPLPVSVTGNSRHLHVLIGTSVVIIPFAILLFFLLHRWCANKKNAVVMDQEPAGNRTVNREDSDEQDPQEVTYAQLNHCVFTQRKITRPSQRPKTPPTDTSV

SEQ ID NO: 20976 - protein, 458 aa, Homo sapiens
MSILIIEAFYGGSHKQLVDLLQEELGDCVVYTLPAKKWHWRARTSALYFSQTIPISEHYRTLFASSVLNLTELAALRPDLGKLKKILYFHENQLIYPVKKCQERDFQYGYNQILSCLVADVVVFNSVFNMESFLTSMGKFMKLIPDHRPKDLESIIRPKCQVIYFPIRFPDVSRFMPKHKTTHLKKMLGLKGNGGAVLSMALPFQPEQRDSEDLLKNFNSECDTHCGLDTARQEYLGNSLRQESDLKKSTSSDNSSSHHGENKQNLTVDPCDILGGVDNQQRLLHIVWPHRWEHDKDPESFFKVLMHLKDLGLNFHVSVLGETFTDVPDIFSEAKKALGSSVLHWGYLPSKDDYFQVLCMADVVISTAKHEFFGVAMLEAVYCGCYPLCPKDLVYPEIFPAEYLYSTPEQLSKRLQNFCKRPDIIRKHLYKGEIAPFSWAALHGKFRSLLTTEPREDL

SEQ ID NO: 20977 - protein, 373 aa, Homo sapiens
MSILIIEAFYGGSHKQLVDLLQEELGDCVVYTLPAKKWHWRARTSALYFSQTIPISEHYRTLFASSVLNLTELAALRPDLGKLKKILYFHENQLIYPVKKCQERDFQYGYNQILSCLVADVVVFNSVFNMESFLTSMGKFMKLIPDHRPKDLESIIRPKCQVIYFPIRFPDVSRFMPKHKTTHLKKMLGLKGNGGAVLSMALPFQPEQRDSEDLLKNFNSECDTHCGLDTARQEYLGNSLRQESDLKKSTSSDNSSSHHGENKQNLTVDPCDILGGVDNQQRLLHIVWPHRWLEAVYCGCYPLCPKDLVYPEIFPAEYLYSTPEQLSKRLQNFCKRPDIIRKHLYKGEIAPFSWAALHGKFRSLLTTEPREDL

SEQ ID NO: 20978 - protein, 292 aa, Homo sapiens
MSILIIEAFYGGSHKQLVDLLQEELGDCVVYTLPAKKWHWRARTSALYFSQTIPISEHYRTLFASSVLNLTELAALRPDLGKLKKILYFHENQLIYPVKKCQERDFQYGYNQILSCLVADVVVFNSVFNMESFLTSMGKFMKLIPDHRPKDLESIIRPKCQVIYFPIRFPDVSRFMPKHKTTHLKKMLGLKGNGGAVLSMALPFQPEQRDSEDLLKNFNSECDTHCGLDTARQEYLGNSLRQESDLKKSTSSDNSSSHHGENKQNLTVDPCDILGGVDNQQRLLHIVWPHRW

SEQ ID NO: 20979 - protein, 376 aa, Homo sapiens
MSILIIEAFYGGSHKQLVDLLQEELGDCVVYTLPAKKWHWRARTSALYFSQTIPISEHYRTLFASSVLNLTELAALRPDLGKLKKILYFHENQLIYPVKKCQERDFQYGYNQILSCLVADVVVFNSVFNMESFLTSMGKFMKLIPDHRPKDLESIIRPKCQVIYFPIRFPDVSRFMPKHKTTHLKKMLGLKGNGGAVLSMALPFQPEQRDSEDLLKNFNSECDTHCGLDTARQEYLGNSLRQESDLKKSTSSDNSSSHHGENKQNLTVDPCDILGGVDNQQRLLHIVWPHRWEHDKDPESFFKVLMHLKDLGLNFHVSVLGETFTDVPGWKLCTVGVTHFVLKIWFIPKYFQLNICILHLNSFQKGSRISARDQIL

SEQ ID NO: 20980 - protein, 426 aa, Homo sapiens
MLTLHVWIWFGFMPCPNLMQNYNHQCCRTLFASSVLNLTELAALRPDLGKLKKILYFHENQLIYPVKKCQERDFQYGYNQILSCLVADVVVFNSVFNMESFLTSMGKFMKLIPDHRPKDLESIIRPKCQVIYFPIRFPDVSRFMPKHKTTHLKKMLGLKGNGGAVLSMALPFQPEQRDSEDLLKNFNSECDTHCGLDTARQEYLGNSLRQESDLKKSTSSDNSSSHHGENKQNLTVDPCDILGGVDNQQRLLHIVWPHRWEHDKDPESFFKVLMHLKDLGLNFHVSVLGETFTDVPDIFSEAKKALGSSVLHWGYLPSKDDYFQVLCMADVVISTAKHEFFGVAMLEAVYCGCYPLCPKDLVYPEIFPAEYLYSTPEQLSKRLQNFCKRPDIIRKHLYKGEIAPFSWAALHGKFRSLLTTEPREDL

SEQ ID NO: 20981 - protein, 329 aa, Homo sapiens
MESFLTSMGKFMKLIPDHRPKDLESIIRPKCQVIYFPIRFPDVSRFMPKHKTTHLKKMLGLKGNGGAVLSMALPFQPEQRDSEDLLKNFNSECDTHCGLDTARQEYLGNSLRQESDLKKSTSSDNSSSHHGENKQNLTVDPCDILGGVDNQQRLLHIVWPHRWEHDKDPESFFKVLMHLKDLGLNFHVSVLGETFTDVPDIFSEAKKALGSSVLHWGYLPSKDDYFQVLCMADVVISTAKHEFFGVAMLEAVYCGCYPLCPKDLVYPEIFPAEYLYSTPEQLSKRLQNFCKRPDIIRKHLYKGEIAPFSWAALHGKFRSLLTTEPREDL

SEQ ID NO: 20982 - protein, 569 aa, Homo sapiens
MGSAVMDTKKKKDVSSPGGSGGKKNASQKRRSLRVHIPDLSSFAMPLLDGDLEGSGKHSSRKVDSPFGPGSPSKGFFSRGPQPRPSSPMSAPVRPKTSPGSPKTVFPFSYQESPPRSPRRMSFSGIFRSSSKESSPNSNPATSPGGIRFFSRSRKTSGLSSSPSTPTQVTKQHTFPLESYKHEPERLENRIYASSSPPDTGQRFCPSSFQSPTRPPLASPTHYAPSKAAALAAALGPAEAGMLEKLEFEDEAVEDSESGVYMRFMRSHKCYDIVPTSSKLVVFDTTLQVKKAFFALVANGVRAAPLWESKKQSFVGMLTITDFINILHRYYKSPMVQIYELEEHKIETWRELYLQETFKPLVNISPDASLFDAVYSLIKNKIHRLPVIDPISGNALYILTHKRILKFLQLFMSDMPKPAFMKQNLDELGIGTYHNIAFIHPDTPIIKALNIFVERRISALPVVDESGKVVDIYSKFDVINLAAEKTYNNLDITVTQALQHRSQYFEGVVKCNKLEILETIVDRIVRAEVHRLVVVNEADSIVGIISLSDILQALILTPAGAKQKETETE

SEQ ID NO: 20983 - protein, 328 aa, Homo sapiens
MLEKLEFEDEAVEDSESGVYMRFMRSHKCYDIVPTSSKLVVFDTTLQVKKAFFALVANGVRAAPLWESKKQSFVGMLTITDFINILHRYYKSPMVQIYELEEHKIETWRELYLQETFKPLVNISPDASLFDAVYSLIKNKIHRLPVIDPISGNALYILTHKRILKFLQLFMSDMPKPAFMKQNLDELGIGTYHNIAFIHPDTPIIKALNIFVERRISALPVVDESGKVVDIYSKFDVINLAAEKTYNNLDITVTQALQHRSQYFEGVVKCNKLEILETIVDRIVRAEVHRLVVVNEADSIVGIISLSDILQALILTPAGAKQKETETE

SEQ ID NO: 20984 - protein, 525 aa, Homo sapiens
MPLLDGDLEGSGKHSSRKVDSPFGPGSPSKGFFSRGPQPRPSSPMSAPVRPKTSPGSPKTVFPFSYQESPPRSPRRMSFSGIFRSSSKESSPNSNPATSPGGIRFFSRSRKTSGLSSSPSTPTQVTKQHTFPLESYKHEPERLENRIYASSSPPDTGQRFCPSSFQSPTRPPLASPTHYAPSKAAALAAALGPAEAGMLEKLEFEDEAVEDSESGVYMRFMRSHKCYDIVPTSSKLVVFDTTLQVKKAFFALVANGVRAAPLWESKKQSFVGMLTITDFINILHRYYKSPMVQIYELEEHKIETWRELYLQETFKPLVNISPDASLFDAVYSLIKNKIHRLPVIDPISGNALYILTHKRILKFLQLFMSDMPKPAFMKQNLDELGIGTYHNIAFIHPDTPIIKALNIFVERRISALPVVDESGKVVDIYSKFDVINLAAEKTYNNLDITVTQALQHRSQYFEGVVKCNKLEILETIVDRIVRAEVHRLVVVNEADSIVGIISLSDILQALILTPAGAKQKETETE

SEQ ID NO: 20985 - protein, 610 aa, Homo sapiens
MSQTSLKQKKNEPGMRSSKESLEAEKRKESDKTGVRLSNQMRRAVNPNHSLRCCPFQGHSSCRRCLCAAEGTALGPCHTIRIYIHMCLLWEQGQQITMMRGSQESSLRKTDSRGYLVRSQWSRISRSPSTKAPSIDEPRSRNTSAKLPSSSTSSRTPSTSPSLHDSSPPPLSGQPSLQPPASPQLPRSLDSRPPTPPEPDPGSRRSTKMQENPEAWAQGIVREIRQTRDSQPLEYSRTSPTEWKSSSQRRGIYPASTQLDRNSLSEQQQQQREDEDDYEAAYWASMRSFYEKNPSCSRPWPPKPKNAITIALSSCALFNMVDGRKIYEQEGLEKYMEYQLTNENVILTPGPAFRFVKALQYVNARLRDLYPDEQDLFDIVLMTNNHAQVGVRLINSVNHYGLLIDRFCLTGGKDPIGYLKAYLTNLYIAADSEKVQEAIQEGIASATMFDGAKDMAYCDTQLRVAFDGDAVLFSDESEHFTKEHGLDKFFQYDTLCESKPLAQGPLKGFLEDLGRLQKKFYAKNERLLCPIRTYLVTARSAASSGARVLKTLRRWGLEIDEALFLAGAPKSPILVKIRPHIFFDDHMFHIEGAQRLGSIAAYGFNKKFSS

SEQ ID NO: 20986 - protein, 550 aa, Homo sapiens
MSQTSLKQKKNEPGMRSSKESLEAEKRKESDKTGVRLSNQGSQESSLRKTDSRGYLVRSQWSRISRSPSTKAPSIDEPRSRNTSAKLPSSSTSSRTPSTSPSLHDSSPPPLSGQPSLQPPASPQLPRSLDSRPPTPPEPDPGSRRSTKMQENPEAWAQGIVREIRQTRDSQPLEYSRTSPTEWKSSSQRRGIYPASTQLDRNSLSEQQQQQREDEDDYEAAYWASMRSFYEKNPSCSRPWPPKPKNAITIALSSCALFNMVDGRKIYEQEGLEKYMEYQLTNENVILTPGPAFRFVKALQYVNARLRDLYPDEQDLFDIVLMTNNHAQVGVRLINSVNHYGLLIDRFCLTGGKDPIGYLKAYLTNLYIAADSEKVQEAIQEGIASATMFDGAKDMAYCDTQLRVAFDGDAVLFSDESEHFTKEHGLDKFFQYDTLCESKPLAQGPLKGFLEDLGRLQKKFYAKNERLLCPIRTYLVTARSAASSGARVLKTLRRWGLEIDEALFLAGAPKSPILVKIRPHIFFDDHMFHIEGAQRLGSIAAYGFNKKFSS

SEQ ID NO: 20987 - protein, 402 aa, Homo sapiens
MQENPEAWAQGIVREIRQTRDSQPLEYSRTSPTEWKSSSQRRGIYPASTQLDRNSLSEQQQQQREDEDDYEAAYWASMRSFYEKNPSCSRPWPPKPKNAITIALSSCALFNMVDGRKIYEQEGLEKYMEYQLTNENVILTPGPAFRFVKALQYVNARLRDLYPDEQDLFDIVLMTNNHAQVGVRLINSVNHYGLLIDRFCLTGGKDPIGYLKAYLTNLYIAADSEKVQEAIQEGIASATMFDGAKDMAYCDTQLRVAFDGDAVLFSDESEHFTKEHGLDKFFQYDTLCESKPLAQGPLKGFLEDLGRLQKKFYAKNERLLCPIRTYLVTARSAASSGARVLKTLRRWGLEIDEALFLAGAPKSPILVKIRPHIFFDDHMFHIEGAQRLGSIAAYGFNKKFSS

SEQ ID NO: 20988 - protein, 602 aa, Homo sapiens
MSQTSLKQKKNEPGMRSSKESLEAEKRKESDKTGVRLSNQMRRAVNPNHSLRCCPFQGHSSCRRCLCAAEGTALGPCHTIRIYIHMCLLWEQGQQITMMRGSQESSLRKTDSRGYLVRSQWSRISRSPSTKAPSIDEPRSRNTSAKLPSSSTSSRTPSTSPSLHDSSPPPLSGQPSLQPPASPQLPRSLDSRPPTPPEPDPGSRRSTKMQENPEAWAQGIVREIRQTRDSQPLEYSRTSPTEWKSSSQRRGIYPASTQLDRNSLSEQQQQQREDEDDYEAAYWASMRSFYEKNPSCSRPWPPKPKNAITIALSSCALFNMVDGRKIYEQEGLEKYMEYQLTNENVILTPGPAFRFVKALQYVNARLRDLYPDEQDLFDIVLMTNNHAQVGVRLINSVNHYGLLIDRFCLTGGKDPIGYLKAYLTNLYIAADSEKVQEAIQEGIASATMFDGAKDMAYCDTQLRVAFDGDAVLFSDESEHFTKEHGLDKFFQYDTLCESKPLAQGPLKGFLEDLGRLQKKFYAKNERLLCPIRTYLVTARSAASSGARVLKTLRRWGLEIDEALFLAGAPKSPILVKIRPHIFFDDHMFHIEGAQRKSLGWMS

SEQ ID NO: 20989 - protein, 546 aa, Homo sapiens [sequence omitted]

SEQ ID NO: 20990 - protein, 513 aa, Homo sapiens
MCSLGLFPPPPPRGQVTLYEHNNELVTGSSYESPPPDFRGQWINLPVLQLTKDPLKTPGRLDHGTRTAFIHHREQVWKRCINIWRDVGLFGVLNEIANSEEEVFEWVKTASGWALALCRWASSLHGSLFPHLSLRSEDLIAEFAQVTNCTIVPSLKHRLQRNVASLAWKPLSASVLAVACQSCILIWTLDPTSLSTRPSSGCAQVLSHPGHTPVTSLAWAPSGGRLLSASPVDAAIRVWDVSTETCVPLPWFRGGGVTNLLWSPDGSKILATTPSAVFRVWEAQMWTCERWPTLSGRCQTGCWSPDGSRLLFTVLGEPLIYSLSFPERCGEGKGCVGGAKSATIVADLSETTIQTPDGEERLGGEAHSMVWDPSGERLAVLMKGKPRVQDGKPVILLFRTRNSPVFELLPCGIIQGEPGAQPQLITFHPSFNKGALLSVGWSTGRIAHIPLYFVNAQFPRFSPVLGRAQEPPAGGGGSIHDLPLFTETSPTSAPWDPLPGPPPVLPHSPHSHL

SEQ ID NO: 20991 - protein, 672 aa, Homo sapiens
MSKEERPGREEILECQVMWEPDSKKNTQMDRFRAAVGAACGLALESYDDLYHWSVESYSDFWAEFWKFSGIVFSRVYDEVVDTSKGIADVPEWFKGSRLNYAENLLRHKENDRVALYIAREGKEEIVKVTFEELRQEVALFAAAMRKMGVKKGDRVVGYLPNSEHAVEAMLAAASIGAIWSSTSPDFGVNGVLDRFSQIQPKLIFSVEAVVYNGKEHNHMEKLQQVVKGLPDLKKVVVIPYVSSRENIDLSKIPNSVFLDDFLATGTSEQAPQLEFEQLPFSHPLFIMFSSGTTGAPKCMVHSAGGTLIQHLKEHLLHGNMTSSDILLCYTTVGWMMWNWMVSLLATGAAMVLYDGSPLVPTPNVLWDLVDRIGITVLVTGAKWLSVLEEKAMKPVETHSLQMLHTILSTGSPLKAQSYEYVYRCIKSSILLGSISGGTDIISCFMGHNFSLPVYKGEIQARNLGMAVEAWNEEGKAVWGESGELVCTKPIPCQPTHFWNDENGNKYRKAYFSKFPGIWAHGDYCRINPKTGGIVMLGRSDGTLNPNGVRFGSSEIYNIVESFEEVEDSLCVPQYNKYREERVILFLKMASGHAFQPDLVKRIRDAIRMGLSARHVPSLILETKGIPYTLNGKKVEVAVKQIIAGKAVEQGGAFSNPETLDLYRDIPELQGF

SEQ ID NO: 20992 - protein, 599 aa, Homo sapiens
MSKEERPGREEILECQVMWEPDSKKNTQMDRFRAAVGAACGLALESYDDLYHWSVESYSDFWAEFWKFSGIVFSRVYDEVVDTSKGIADVPEWFKGSRLNYAENLLRHKENDRVALYIAREGKEEIVKVTFEELRQEVALFAAAMRKMGVKKGDRVVGYLPNSEHAVEAMLAAASIGAIWSSTSPDFGVNGVLDRFSQIQPKLIFSVEAVVYNGKEHNHMEKLQQVVKGLPDLKKVVVIPYVSSRENIDLSKIPNSVFLDDFLATGTSEQAPQLEFEQLPFSHPLFIMFSSGTTGAPKCMVHSAGGTLIQHLKEHLLHGNMTSSDILLCYTTVGWMMWNWMVSLLATGAAMVLYDGSPLVPTPNVLWDLVDRIGITVLVTGAKWLSVLEEKAMKPVETHSLQMLHTILSTGSPLKAQSYEYVYRCIKSSILLGSISGGTDIISCFMGHNFSLPVYKGEIQARNLGMAVEAWNEEGKAVWGESGELVCTKPIPCQPTHFWNDENGNKYRKAYFSKFPGIWAHGDYCRINPKTGGIVMLGRSDGTLNPNGVRFGSSEIYNIVYAQRQESGSCRQTDHRWKSRGARRCFLEPRDPGSVPGHP

SEQ ID NO: 20993 - protein, 270 aa, Homo sapiens
MLHTILSTGSPLKAQSYEYVYRCIKSSILLGSISGGTDIISCFMGHNFSLPVYKGEIQARNLGMAVEAWNEEGKAVWGESGELVCTKPIPCQPTHFWNDENGNKYRKAYFSKFPGIWAHGDYCRINPKTGGIVMLGRSDGTLNPNGVRFGSSEIYNIVESFEEVEDSLCVPQYNKYREERVILFLKMASGHAFQPDLVKRIRDAIRMGLSARHVPSLILETKGIPYTLNGKKVEVAVKQIIAGKAVEQGGAFSNPETLDLYRDIPELQGF

SEQ ID NO: 20994 - protein, 805 aa, Homo sapiens [sequence omitted]

SEQ ID NO: 20995 - protein, 459 aa, Homo sapiens
MREAGWDKGGRILMCTKVTMDDFLTAHHEMGHIQYDMAYAAQPFLLRNGANEGFHEAVGEIMSLSAATPKHLKSIGLLSPDFQEDNETEINFLLKQALTIVGTLPFTYMLEKWRWMVFKGEIPKDQWMKKWWEMKREIVGVVEPVPHDETYCDPASLFHVSNDYSFIRYYTRTLYQFQFQEALCQAAKHEGPLHKCDISNSTEAGQKLFNMLRLGKSEPWTLALENVVGAKNMNVRPLLNYFEPLFTWLKDQNKNSFVGWSTDWSPYADQSIKVRISLKSALGDKAYEWNDNEMYLFRSSVAYAMRQYFLKVKNQMILFGEEDVRVANLKPRISFNFFVTAPKNVSDIIPRTEVEKAIRMSRSRINDAFRLNDNSLEFLGIQPTLGPPNQPPVSIWLIVFGVVMGVIVVGIVILIFTGIRDRKKKNKARSGENPYASIDISKGENNPGFQNTDDVQTSF

SEQ ID NO: 20996 - protein, 326 aa, Homo sapiens
MEFLSEKFALKSPPSKNSDFYMGAGGPLEHVMETLDNESFYSKASAGKCVQAFGPLPRAEHHVRLERTSPCQDSSVNYGITKVEGQPLHTELNRAMDNCNSLRMSPVKGMQEKGELDELGDKCDSNVSSSKKRRHRTTFTSLQLEELEKVFQKTHYPDVYVREQLALRTELTEARVQVWFQNRRAKWRKRERYGQIQQAKSHFAATYDISVLPRTDSYPQIQNNLWAGNASGGSVVTSCMLPRDTSSCMTPYSHSPRTDSSYTGFSNHQNQFSHVPLNNFFTDSLLTGATNGHAFETKPEFERRSSSIAVLRMKAKEHTANISWAM

SEQ ID NO: 20997 - protein, 206 aa, Homo sapiens
MGTWILFACLVGAAFAMPLPPHPGHPGYINFSYENSHSQAINVDRIALVLTPLKWYQSMIRPPYSSYGYEPMGGWLHHQIIPVVSQQHPLTHTLQSHHHIPVVPAQQPRVRQQALMPVPGQQSMTPTQHHQPNLPLPAQQPFQPQPVQPQPHQPMQPQPPVQPMQPLLPQPPLPPMFPLRPLPPILPDLHLEAWPATDKTKQEEVD

SEQ ID NO: 20998 - protein, 192 aa, Homo sapiens
MGTWILFACLVGAAFAMPLPPHPGHPGYINFSYEVLTPLKWYQSMIRPPYSSYGYEPMGGWLHHQIIPVVSQQHPLTHTLQSHHHIPVVPAQQPRVRQQALMPVPGQQSMTPTQHHQPNLPLPAQQPFQPQPVQPQPHQPMQPQPPVQPMQPLLPQPPLPPMFPLRPLPPILPDLHLEAWPATDKTKQEEVD

SEQ ID NO: 20999 - protein, 150 aa, Homo sapiens
MSGELSNRFQGGKAFGLLKARQERRLAEINREFLCDQKYSDEENLPEKLTAFKEKYMEFDLNNEGEIDLMSLKRMMEKLGVPKTHLEMKKMISEVTGGVSDTISYRDFVNMMLGKRSAVLKLVMMFEGKANESSPKPVGPPPERDIASLP

SEQ ID NO: 21000 - protein, 176 aa, Homo sapiens
MSGELSNRFQGGKAFGLLKARQERRLAEINRYCAGREPQLQRISCSQHSCLLALLFQEFLCDQKYSDEENLPEKLTAFKEKYMEFDLNNEGEIDLMSLKRMMEKLGVPKTHLEMKKMISEVTGGVSDTISYRDFVNMMLGKRSAVLKLVMMFEGKANESSPKPVGPPPERDIASLP

SEQ ID NO: 21001 - protein, 142 aa, Homo sapiens
MSGELSNRFQGGKAFGLLKARQERRLAEINREFLCDQKYSDEENLPEKLTAFKEKYMEFDLMSLKRMMEKLGVPKTHLEMKKMISEVTGGVSDTISYRDFVNMMLGKRSAVLKLVMMFEGKANESSPKPVGPPPERDIASLP

SEQ ID NO: 21002 - protein, 102 aa, Homo sapiens
MSGELSNRFQGGKAFGLLKARQERRLAEINREFLCDQKYSDEENLPEKLTAFKEKYMEFDLNNEGEIDLMSLKRMMEKLGVPKTHLEMKKMISEVTGGSHDV

SEQ ID NO: 21003 - protein, 333 aa, Homo sapiens
MAAGCCGVKKQKLSSSPPSGSGGGGGASSSSHCSGESQCRAGELGLGGAGTRLNGLGGLTGGGSGSGCTLSPPQGCGGGGGGIALSPPPSCGVGTLLSTPAAATSSSPSSSSAASSSSPGSRKMVVSAEMCCFCFDVLYCHLYGYQQPRTPRFTNEPYPLFVTWKIGRDKRLRGCIGTFSAMNLHSGLREYTLTSALKDSRFPPMTRDELPRLFCSVSLLTNFEDVCDYLDWEVGVHGIRIEFINEKGSKRTATYLPEVAKEQGWDHIQTIDSLLRKGGYKAPITNEFRKTIKLTRYRSEKMTLSYAEYLAHRQHHHFQNGIGHPLPPYNHYS

SEQ ID NO: 21004 - protein, 157 aa, Homo sapiens
MAAGCCGVKKQKLSSSPPSGSGGGGGASSSSHCSGESQCRAGELGLGGAGTRLNGLGGLTGGGSGSGCTLSPPQGCGGGGGGIALSPPPSCGVGTLLSTPAAATSSSPSSSSAASSSSPGSRKMVVSAEMCCFCFDVLYCHLYGYQQPRTPRFTNEP

SEQ ID NO: 21005 - protein, 296 aa, Homo sapiens
MAAGCCGVKKQKLSSSPPSGSGGGGGASSSSHCSGESQCRAGELGLGGAGTRLNGLGGLTGGGSGSGCTLSPPQGCGGGGGGIALSPPPSCGVGTLLSTPAAATSSSPSSSSAASSSSPGSRKMVVSAEMCCFCFDVLYCHLYGYQQPRTPRFTNEPYALKDSRFPPMTRDELPRLFCSVSLLTNFEDVCDYLDWEVGVHGIRIEFINEKGSKRTATYLPEVAKEQGWDHIQTIDSLLRKGGYKAPITNEFRKTIKLTRYRSEKMTLSYAEYLAHRQHHHFQNGIGHPLPPYNHYS

SEQ ID NO: 21006 - protein, 210 aa, Homo sapiens
MVVSAEMCCFCFDVLYCHLYGYQQPRTPRFTNEPYPLFVTWKIGRDKRLRGCIGTFSAMNLHSGLREYTLTSALKDSRFPPMTRDELPRLFCSVSLLTNFEDVCDYLDWEVGVHGIRIEFINEKGSKRTATYLPEVAKEQGWDHIQTIDSLLRKGGYKAPITNEFRKTIKLTRYRSEKMTLSYAEYLAHRQHHHFQNGIGHPLPPYNHYS

SEQ ID NO: 21007 - protein, 956 aa, Homo sapiens
MWRAKLRRGTCEPAVKGSPSACYSPSSPVQVLEDSTYFSPDFQLYSGRHETSALTVEATSSIREKVVEDPLCNFHSPNFLRISEVEMRGSEDAAAGTVLQRLIQEQLRYGTPTENMNLLAIQHQATGSAGPAHPTNNFSSTENLTQEDPQMVYQSARQEPQGQEHQVDNTVMEKQVRSTQPQQNNEELPTYEEAKAQSQFFRGQQQQQQQQGAVGHGYYMAGGTSQKSRTEGRPTVNRANSGQAHKDEALKELKQGHVRSLSERIMQLSLERNGAKQHLPGSGNGKGFKVGGGPSPAQPAGKVLDPRGPPPEYPFKTKQMMSPVSKTQEHGLFYGDQHPGMLHEMVKPYPAPQPVRTDVAVLRYQPPPEYGVTSRPCQLPFPSTMQQHSPMSSQTSSASGPLHSVSLPLPLPMALGAPQPPPAASPSQQLGPDAFAIVERAQQMVEILTEENRVLHQELQGYYDNADKLHKFEKELQRISEAYESLVKSTTKRESLDKAMRNKLEGEIRRLHDFNRDLRDRLETANRQLSSREYEGHEDKAAEGHYASQNKEFLKEKEKLEMELAAVRTASEDHRRHIEILDQALSNAQARVIKLEEELREKQAYVEKVEKLQQALTQLQSACEKREQMERRLRTWLERELDALRTQQKHGNGQPANMPEYNAPALLELVREKEERILALEADMTKWEQKYLEESTIRHFAMNAAATAAAERDTTIINHSRNGSYGESSLEAHIWQEEEEVVQANRRCQDMEYTIKNLHAKIIEKDAMIKVLQQRSRKDAGKTDSSSLRPARSVPSIAAATGTHSRQTSLTSSQLAEEKKEEKTWKGSIGLLLGKEHHEHASAPLLPPPPTSALSSIASTTAASSAHAKTGSKDSSTQTDKSAELFWPSMASLPSRGRLSTTPAHSPVLKHPAAKGTAEKLENSPGHGKSPDHRGRVSSLLHKPEFPDGEMMEVLI

SEQ ID NO: 21008 - protein, 906 aa, Homo sapiens
MWRAKLRRGTCEPAVKVEDPLCNFHSPNFLRISEVEMRGSEDAAAGTVLQRLIQEQLRYGTPTENMNLLAIQHQATGSAGPAHPTNNFSSTENLTQEDPQMVYQSARQEPQGQEHQVDNTVMEKQVRSTQPQQNNEELPTYEEAKAQSQFFRGQQQQQQQQGAVGHGYYMAGGTSQKSRTEGRPTVNRANSGQAHKDEALKELKQGHVRSLSERIMQLSLERNGAKQHLPGSGNGKGFKVGGGPSPAQPAGKVLDPRGPPPEYPFKTKQMMSPVSKTQEHGLFYGDQHPGMLHEMVKPYPAPQPVRTDVAVLRYQPPPEYGVTSRPCQLPFPSTMQQHSPMSSQTSSASGPLHSVSLPLPLPMALGAPQPPPAASPSQQLGPDAFAIVERAQQMVEILTEENRVLHQELQGYYDNADKLHKFEKELQRISEAYESLVKSTTKRESLDKAMRNKLEGEIRRLHDFNRDLRDRLETANRQLSSREYEGHEDKAAEGHYASQNKEFLKEKEKLEMELAAVRTASEDHRRHIEILDQALSNAQARVIKLEEELREKQAYVEKVEKLQQALTQLQSACEKREQMERRLRTWLERELDALRTQQKHGNGQPANMPEYNAPALLELVREKEERILALEADMTKWEQKYLEESTIRHFAMNAAATAAAERDTTIINHSRNGSYGESSLEAHIWQEEEEVVQANRRCQDMEYTIKNLHAKIIEKDAMIKVLQQRSRKDAGKTDSSSLRPARSVPSIAAATGTHSRQTSLTSSQLAEEKKEEKTWKGSIGLLLGKEHHEHASAPLLPPPPTSALSSIASTTAASSAHAKTGSKDSSTQTDKSAELFWPSMASLPSRGRLSTTPAHSPVLKHPAAKGTAEKLENSPGHGKSPDHRGRVSSLLHKPEFPDGEMMEVLI

SEQ ID NO: 21009 - protein, 517 aa, Homo sapiens
MLRFLAPRLLSLQGRTARYSSAAALPSPILNPDIPYNQLFINNEWQDAVSKKTFPTVNPTTGEVIGHVAEGDRADVDRAVKAAREAFRLGSPWRRMDASERGRLLNLLADLVERDRVYLASLETLDNGKPFQESYALDLDEVIKVYRYFAGWADKWHGKTIPMDGQHFCFTRHEPVGVCGQIIPWNFPLVMQGWKLAPALATGNTVVMKVAEQTPLSALYLASLIKEAGFPPGVVNIITGYGPTAGAAIAQHVDVDKVAFTGSTEVGHLIQKAAGDSNLKRVTLELGGKSPSIVLADADMEHAVEQCHEALFFNMGQCCCAGSRTFVEESIYNEFLERTVEKAKQRKVGNPFELDTQQGPQVDKEQFERVLGYIQLGQKEGAKLLCGGERFGERGFFIKPTVFGGVQDDMRIAKEEIFGPVQPLFKFKKIEEVVERANNTRYGLAAAVFTRDLDKAMYFTQALQAGTVWVNTYNIVTCHTPFGGFKESGNGRELGEDGLKAYTEVKTVTIKVPQKNS

SEQ ID NO: 21010 - protein, 320 aa, Homo sapiens
MPMYQVKPYHGGGAPLRVELPTCMYRLPNVHGRSYGPAPGAGHVQEESNLSLQALESRQDDILKRLYELKAAVDGLSKMIQTPDADLDVTNIIQADEPTTLTTNALDLNSVLGKDYGALKDIVINANPASPPLSLLVLHRLLCEHFRVLSTVHTHSSVKSVPENLLKCFGEQNKKQPRQDYQLGFTLIWKNVPKTQMKFSIQTMCPIEGEGNIARFLFSLFGQKHNAVNATLIDSWVDIAIFQLKEGSSKEKAAVFRSMNSALGKSPWLAGNELTVADVVLWSVLQQIGGCSVTVPANVQRWMRSCENLAPFNTALKLLK

SEQ ID NO: 21011 - protein, 251 aa, Homo sapiens
MPMYQVKPYHGGGAPLRVELPTCMYRLPNVHGRSYGPAPGAGHVQDYGALKDIVINANPASPPLSLLVLHRLLCEHFRVLSTVHTHSSVKSVPENLLKCFGEQNKKQPRQDYQLGFTLIWKNVPKTQMKFSIQTMCPIEGEGNIARFLFSLFGQKHNAVNATLIDSWVDIAIFQLKEGSSKEKAAVFRSMNSALGKSPWLAGNELTVADVVLWSVLQQIGGCSVTVPANVQRWMRSCENLAPFNTALKLLK

SEQ ID NO: 21012 - protein, 376 aa, Homo sapiens
MESYDIIANQPVVIDNGSGVIKAGFAGDQIPKYCFPNYVGRPKHMRVMAGALEGDLFIGPKAEEHRGLLTIRYPMEHGVVRDWNDMERIWQYVYSKDQLQTFSEEHPVLLTEAPLNPSKNREKAAEVFFETFNVPALFISMQAVLSLYATGRTTGVVLDSGDGVTHAVPIYEGFAMPHSIMRVDIAGRDVSRYLRLLLRKEGVDFHTSAEFEVVRTIKERACYLSINPQKDEALETEKVQYTLPDGSTLDVGPARFRAPELLFQPDLVGDESEGLHEVVAFAIHKSDMDLRRTLFANIVLSGGSTLFKGFGDRLLSEVKKLAPKDIKIKISAPQERLYSTWIGGSILASLDTFKKMWVSKKEYEEDGSRAIHRKTF

SEQ ID NO: 21013 - protein, 523 aa, Homo sapiens
MQRAAALVRRGCGPRTPSSWGRSQSSAAAEASAVLKVRPERSRRERILTLESMNPQVKAVEYAVRGPIVLKAGEIELELQRGIKKPFTEVIRANIGDAQAMGQQPITFLRQVMALCTYPNLLDSPSFPEDAKKRARRILQACGGNSLGSYSASQGVNCIREDVAAYITRRDGGVPADPDNIYLTTGASDGISTILKILVSGGGKSRTGVMIPIPQYPLYSAVISELDAIQVNYYLDEENCWALNVNELRRAVQEAKDHCDPKVLCIINPGNPTGQVQSRKCIEDVIHFAWEEKLFLLADEVYQDNVYSPDCRFHSFKKVLYEMGPEYSSNVELASFHSTSKGYMGECGYRGGYMEVINLHPEIKGQLVKLLSVRLCPPVSGQAAMDIVVNPPVAGEESFEQFSREKESVLGNLAKKAKLTEDLFNQVPGIHCNPLQGAMYAFPRIFIPAKAVEAAQAHQMAPDMFYCMKLLEETGICVVPGSGFGQREGTYHFRMTILPPVEKLKTVLQKVKDFHINFLEKYA

SEQ ID NO: 21014 - protein, 423 aa, Homo sapiens
MGQQPITFLRQVMALCTYPNLLDSPSFPEDAKKRARRILQACGGNSLGSYSASQGVNCIREDVAAYITRRDGGVPADPDNIYLTTGASDGISTILKILVSGGGKSRTGVMIPIPQYPLYSAVISELDAIQVNYYLDEENCWALNVNELRRAVQEAKDHCDPKVLCIINPGNPTGQVQSRKCIEDVIHFAWEEKLFLLADEVYQDNVYSPDCRFHSFKKVLYEMGPEYSSNVELASFHSTSKGYMGECGYRGGYMEVINLHPEIKGQLVKLLSVRLCPPVSGQAAMDIVVNPPVAGEESFEQFSREKESVLGNLAKKAKLTEDLFNQVPGIHCNPLQGAMYAFPRIFIPAKAVEAAQAHQMAPDMFYCMKLLEETGICVVPGSGFGQREGTYHFRMTILPPVEKLKTVLQKVKDFHINFLEKYA

SEQ ID NO: 21015 - protein, 739 aa, Homo sapiens
MFLLLALLTELGRLQAHEGSEGIFLHVTVPRKIKSNDSEVSERKMIYIITIDGQPYTLHLGKQSFLPQNFLVYTYNETGSLHSVSPYFMMHCHYQGYAAEFPNSFVTLSICSGLRGFLQFENISYGIEPVESSARFEHIIYQMKNNDPNVSILAVNYSHIWQKDQPYKVPLNSQIKNLSKLLPQYLEIYIIVEKALYDYMGSEMMAVTQKIVQVIGLVNTMFTQFKLTVILSSLELWSNENQISTSGDADDILQRFLAWKRDYLILRPHDIAYLLVYRKHPKYVGATFPGTVCNKSYDAGIAMYPDAIGLEGFSVIIAQLLGLNVGLTYDDITQCFCLRATCIMNHEAVSASGRKIFSNCSMHDYRYFVSKFETKCLQKLSNLQPLHQNQPVCGNGILESNEECDCGNKNECQFKKCCDYNTCKLKGSVKCGSGPCCTSKCELSIAGTPCRKSIDPECDFTEYCNGTSSNCVPDTYALNGRLCKLGTAYCYNGQCQTTDNQCAKIFGKGAQGAPFACFKEVNSLHERSENCGFKNSQPLPCERKDVLCGKLACVQPHKNANKSDAQSTVYSYIQDHVCVSIATGSSMRSDGTDNAYVADGTMCGPEMYCVNKTCRKVHLMGYNCNATTKCKGKGICNNFGNCQCFPGHRPPDCKFQFGSPGGSIDDGNFQKSGDFYTEKGYNTHWNNWFILSFCIFLPFFIVFTTVIFKRNEISKSCNRENAEYNRNSSVVSESDDVGH

SEQ ID NO: 21016 - protein, 715 aa, Homo sapiens
MFLLLALLTELGRLQAHEGSEGIFLHVTVPRKIKSNDSEVSERKMIYIITIDGQPYTLHLGKQSFLPQNFLVYTYNETGSLHSVSPYFMMHCHYQGYAAEFPNSFVTLSICSGLRGFLQFENISYGIEPVESSARFEHIIYQMKNNDPNVSILAVNYSHIWQKDQPYKVPLNSQIKNLSKLLPQYLEIYIIVEKALMFTQFKLTVILSSLELWSNENQISTSGDADDILQRFLAWKRDYLILRPHDIAYLLVYRKHPKYVGATFPGTVCNKSYDAGIAMYPDAIGLEGFSVIIAQLLGLNVGLTYDDITQCFCLRATCIMNHEAVSASGRKIFSNCSMHDYRYFVSKFETKCLQKLSNLQPLHQNQPVCGNGILESNEECDCGNKNECQFKKCCDYNTCKLKGSVKCGSGPCCTSKCELSIAGTPCRKSIDPECDFTEYCNGTSSNCVPDTYALNGRLCKLGTAYCYNGQCQTTDNQCAKIFGKGAQGAPFACFKEVNSLHERSENCGFKNSQPLPCERKDVLCGKLACVQPHKNANKSDAQSTVYSYIQDHVCVSIATGSSMRSDGTDNAYVADGTMCGPEMYCVNKTCRKVHLMGYNCNATTKCKGKGICNNFGNCQCFPGHRPPDCKFQFGSPGGSIDDGNFQKSGDFYTEKGYNTHWNNWFILSFCIFLPFFIVFTTVIFKRNEISKSCNRENAEYNRNSSVVSESDDVGH

SEQ ID NO: 21017 - protein, 182 aa, Homo sapiens
MFLLLALLTELGRLQAHEGSEGIFLHVTVPRKIKSNDSEVSERKMIYIITIDGQPYTLHLGKQSFLPQNFLVYTYNETGSLHSVSPYFMMHCHYQGYAAEFPNSFVTLSICSGLRGFLQFENISYGIEPVESSARFEHIIYQMKNNDPNVSILAVNYSHIWQKDQPYKVPLNSQVTVIILML

SEQ ID NO: 21018 - protein, 538 aa, Homo sapiens
MERLGEKASRLLEKFGRRKGESSRSGSDGTPGPGKGRLSGLGGPRKSGPRGATGGPGDEPLEPAREQGSLDAERNQRGSFEAPRYEGSFPAGPPPTRALPLPQSLPPDFRLEPTAPALSPRSSFASSSASDASKPSSPRGSLLLDGAGAGGAGGSRPCSNRTSGISMGYDQRHGSPLPAGPCLFGPPLAGAPAGYSPGGVPSAYPELHAALDRLYAQRPAGFGCQESRHSYPPALGSPGALAGAGVGAAGPLERRGAQPGRHSVTGYGDCAVGARYQDELTALLRLTVGTGGREAGARGEPSGIEPSGLEEPPGPFVPEAARARMREPEAREDYFGTCIKCNKGIYGQSNACQALDSLYHTQCFVCCSCGRTLRCKAFYSVNGSVYCEEDYLFSGFQEAAEKCCVCGHLILEKILQAMGKSYHPGCFRCIVCNKCLDGIPFTVDFSNQVYCVTDYHKNYAPKCAACGQPILPSEGCEDIVRVISMDRDYHFECYHCEDCRMQLSDEEGCCCFPLDGHLLCHGCHMQRLNARQPPANYI

SEQ ID NO: 21019 - protein, 121 aa, Homo sapiens
MGKSYHPGCFRCIVCNKCLDGIPFTVDFSNQVYCVTDYHKNYAPKCAACGQPILPSEGCEDIVRVISMDRDYHFECYHCEDCRMQLSDEEGCCCFPLDGHLLCHGCHMQRLNARQPPANYI

SEQ ID NO: 21020 - protein, 1782 aa, Homo sapiens
MGAGSSTEQRSPEQPPEGSSTPAEPEPSGGGPSAEAAPDTTADPAIAASDPATKLLQKNGQLSTINGVAEQDELSLQEGDLNGQKGALNGQGALNSQEEEEVIVTEVGQRDSEDVSKRDSDKEMATKSAVVHDITDDGQEETPEIIEQIPSSESNLEELTQPTESQANDIGFKKVFKFVGFKFTVKKDKTEKPDTVQLLTVKKDEGEGAAGAGDHKDPSLGAGEAASKESEPKQSTEKPEETLKREQSHAEISPPAESGQAVEECKEEGEEKQEKEPSKSAESPTSPVTSETGSTFKKFFTQGWAGWRKKTSFRKPKEDEVEASEKKKEQEPEKVDTEEDGKAEVASEKLTASEQAHPQEPAESAHEPRLSAEYEKVELPSEEQVSGSQGPSEEKPAPLATEVFDEKIEVHQEEVVAEVHVSTVEERTEEQKTEVEETAGSVPAEELVEMDAEPQEAEPAKELVKLKETCVSGEDPTQGADLSPDEKVLSKPPEGVVSEVEMLSSQERMKVQGSPLKKLFTSTGLKKLSGKKQKGKRGGGDEESGEHTQVPADSPDSQEEQKGESSASSPEEPEEITCLEKGLAEVQQDGEAEEGATSDGEKKREGVTPWASFKKMVTPKKRVRRPSESDKEDELDKVKSATLSSTESTASEMQEEMKGSVEEPKPEEPKRKVDTSVSWEALICVGSSKKRARRGSSSDEEGGPKAMGGDHQKADEAGKDKETGTDGILAGSQEHDPGQGSSSPEQAGSPTEGEGVSTWESFKRLVTPRKKSKSKLEEKSEDSIAGSGVEHSTPDTEPGKEESWVSIKKFIPGRRKKRPDGKQEQAPVEDAGPTGANEDDSDVPAVVPLSEYDAVEREKMEAQQAQKSAEQPEQKAATEVSKELSESQVHMMAAAVADGTRAATIIEERSPSWISASVTEPLEQVEAEAALLTEEVLEREVIAEEEPPTVTEPLPENREARGDTVVSEAELTPEAVTAAETAGPLGAEEGTEASAAEETTEMVSAVSQLTDSPDTTEEATPVQEVEGGVPDIEEQERRTQEVLQAVAEKVKEESQLPGTGGPEDVLQPVQRAEAERPEEQAEASGLKKETDVVLKVDAQEAKTEPFTQGKVVGQTTPESFEKAPQVTESIESSELVTTCQAETLAGVKSQEMVMEQAIPPDSVETPTDSETDGSTPVADFDAPGTTQKDEIVEIHEENEVASGTQSGGTEAEAVPAQKERPPAPSSFVFQEETKEQSKMEDTLEHTDKEVSVETVSILSKTEGTQEADQYADEKTKDVPFFEGLEGSIDTGITVSREKVTEVALKGEGTEEAECKKDDALELQSHAKSPPSPVEREMVVQVEREKTEAEPTHVNEEKLEHETAVTVSEEVSKQLLQTVNVPIIDGAKEVSSLEGSPPPCLGQEEAVCTKIQVQSSEASFTLTAAAEEEKVLGETANILETGETLEPAGAHLVLEEKSSEKNEDFAAHPGEDAVPTGPDCQAKSTPVIVSATTKKGLSSDLEGEKTTSLKWKSDEVDEQVACQEVKVSVAIEDLEPENGILELETKSSKLVQNIIQTAVDQFVRTEETATEMLTSELQTQAHVIKADSQDAGQETEKEGEEPQASAQDETPITSAKEESESTAVGQAHSDISKDMSEASEKTMTVEVEGSTVNDQQLEEVVLPSEEEGGGAGTKSVPEDDGHALLAERIEKSLVEPKEDEKGDDVDDPENQNSALADTDASGGLTKESPDTNGPKQKEKEDAQEVELQEGKVHSESDKAITPQAQEELQKQERESAKSELTES

SEQ ID NO: 21021 - protein, 1684 aa, Homo sapiens
MLGTITITVGQRDSEDVSKRDSDKEMATKSAVVHDITDDGQEETPEIIEQIPSSESNLEELTQPTESQANDIGFKKVFKFVGFKFTVKKDKTEKPDTVQLLTVKKDEGEGAAGAGDHKDPSLGAGEAASKESEPKQSTEKPEETLKREQSHAEISPPAESGQAVEECKEEGEEKQEKEPSKSAESPTSPVTSETGSTFKKFFTQGWAGWRKKTSFRKPKEDEVEASEKKKEQEPEKVDTEEDGKAEVASEKLTASEQAHPQEPAESAHEPRLSAEYEKVELPSEEQVSGSQGPSEEKPAPLATEVFDEKIEVHQEEVVAEVHVSTVEERTEEQKTEVEETAGSVPAEELVEMDAEPQEAEPAKELVKLKETCVSGEDPTQGADLSPDEKVLSKPPEGVVSEVEMLSSQERMKVQGSPLKKLFTSTGLKKLSGKKQKGKRGGGDEESGEHTQVPADSPDSQEEQKGESSASSPEEPEEITCLEKGLAEVQQDGEAEEGATSDGEKKREGVTPWASFKKMVTPKKRVRRPSESDKEDELDKVKSATLSSTESTASEMQEEMKGSVEEPKPEEPKRKVDTSVSWEALICVGSSKKRARRGSSSDEEGGPKAMGGDHQKADEAGKDKETGTDGILAGSQEHDPGQGSSSPEQAGSPTEGEGVSTWESFKRLVTPRKKSKSKLEEKSEDSIAGSGVEHSTPDTEPGKEESWVSIKKFIPGRRKKRPDGKQEQAPVEDAGPTGANEDDSDVPAVVPLSEYDAVEREKMEAQQAQKSAEQPEQKAATEVSKELSESQVHMMAAAVADGTRAATIIEERSPSWISASVTEPLEQVEAEAALLTEEVLEREVIAEEEPPTVTEPLPENREARGDTVVSEAELTPEAVTAAETAGPLGAEEGTEASAAEETTEMVSAVSQLTDSPDTTEEATPVQEVEGGVPDIEEQERRTQEVLQAVAEKVKEESQLPGTGGPEDVLQPVQRAEAERPEEQAEASGLKKETDVVLKVDAQEAKTEPFTQGKVVGQTTPESFEKAPQVTESIESSELVTTCQAETLAGVKSQEMVMEQAIPPDSVETPTDSETDGSTPVADFDAPGTTQKDEIVEIHEENEVASGTQSGGTEAEAVPAQKERPPAPSSFVFQEETKEQSKMEDTLEHTDKEVSVETVSILSKTEGTQEADQYADEKTKDVPFFEGLEGSIDTGITVSREKVTEVALKGEGTEEAECKKDDALELQSHAKSPPSPVEREMVVQVEREKTEAEPTHVNEEKLEHETAVTVSEEVSKQLLQTVNVPIIDGAKEVSSLEGSPPPCLGQEEAVCTKIQVQSSEASFTLTAAAEEEKVLGETANILETGETLEPAGAHLVLEEKSSEKNEDFAAHPGEDAVPTGPDCQAKSTPVIVSATTKKGLSSDLEGEKTTSLKWKSDEVDEQVACQEVKVSVAIEDLEPENGILELETKSSKLVQNIIQTAVDQFVRTEETATEMLTSELQTQAHVIKADSQDAGQETEKEGEEPQASAQDETPITSAKEESESTAVGQAHSDISKDMSEASEKTMTVEVEGSTVNDQQLEEVVLPSEEEGGGAGTKSVPEDDGHALLAERIEKSLVEPKEDEKGDDVDDPENQNSALADTDASGGLTKESPDTNGPKQKEKEDAQEVELQEGKVHSESDKAITPQAQEELQKQERESAKSELTES

SEQ ID NO: 21022 - protein, 1677 aa, Homo sapiens
MVGQRDSEDVSKRDSDKEMATKSAVVHDITDDGQEETPEIIEQIPSSESNLEELTQPTESQANDIGFKKVFKFVGFKFTVKKDKTEKPDTVQLLTVKKDEGEGAAGAGDHKDPSLGAGEAASKESEPKQSTEKPEETLKREQSHAEISPPAESGQAVEECKEEGEEKQEKEPSKSAESPTSPVTSETGSTFKKFFTQGWAGWRKKTSFRKPKEDEVEASEKKKEQEPEKVDTEEDGKAEVASEKLTASEQAHPQEPAESAHEPRLSAEYEKVELPSEEQVSGSQGPSEEKPAPLATEVFDEKIEVHQEEVVAEVHVSTVEERTEEQKTEVEETAGSVPAEELVEMDAEPQEAEPAKELVKLKETCVSGEDPTQGADLSPDEKVLSKPPEGVVSEVEMLSSQERMKVQGSPLKKLFTSTGLKKLSGKKQKGKRGGGDEESGEHTQVPADSPDSQEEQKGESSASSPEEPEEITCLEKGLAEVQQDGEAEEGATSDGEKKREGVTPWASFKKMVTPKKRVRRPSESDKEDELDKVKSATLSSTESTASEMQEEMKGSVEEPKPEEPKRKVDTSVSWEALICVGSSKKRARRGSSSDEEGGPKAMGGDHQKADEAGKDKETGTDGILAGSQEHDPGQGSSSPEQAGSPTEGEGVSTWESFKRLVTPRKKSKSKLEEKSEDSIAGSGVEHSTPDTEPGKEESWVSIKKFIPGRRKKRPDGKQEQAPVEDAGPTGANEDDSDVPAVVPLSEYDAVEREKMEAQQAQKSAEQPEQKAATEVSKELSESQVHMMAAAVADGTRAATIIEERSPSWISASVTEPLEQVEAEAALLTEEVLEREVIAEEEPPTVTEPLPENREARGDTVVSEAELTPEAVTAAETAGPLGAEEGTEASAAEETTEMVSAVSQLTDSPDTTEEATPVQEVEGGVPDIEEQERRTQEVLQAVAEKVKEESQLPGTGGPEDVLQPVQRAEAERPEEQAEASGLKKETDVVLKVDAQEAKTEPFTQGKVVGQTTPESFEKAPQVTESIESSELVTTCQAETLAGVKSQEMVMEQAIPPDSVETPTDSETDGSTPVADFDAPGTTQKDEIVEIHEENEVASGTQSGGTEAEAVPAQKERPPAPSSFVFQEETKEQSKMEDTLEHTDKEVSVETVSILSKTEGTQEADQYADEKTKDVPFFEGLEGSIDTGITVSREKVTEVALKGEGTEEAECKKDDALELQSHAKSPPSPVEREMVVQVEREKTEAEPTHVNEEKLEHETAVTVSEEVSKQLLQTVNVPIIDGAKEVSSLEGSPPPCLGQEEAVCTKIQVQSSEASFTLTAAAEEEKVLGETANILETGETLEPAGAHLVLEEKSSEKNEDFAAHPGEDAVPTGPDCQAKSTPVIVSATTKKGLSSDLEGEKTTSLKWKSDEVDEQVACQEVKVSVAIEDLEPENGILELETKSSKLVQNIIQTAVDQFVRTEETATEMLTSELQTQAHVIKADSQDAGQETEKEGEEPQASAQDETPITSAKEESESTAVGQAHSDISKDMSEASEKTMTVEVEGSTVNDQQLEEVVLPSEEEGGGAGTKSVPEDDGHALLAERIEKSLVEPKEDEKGDDVDDPENQNSALADTDASGGLTKESPDTNGPKQKEKEDAQEVELQEGKVHSESDKAITPQAQEELQKQERESAKSELTES

SEQ ID NO: 21023 - protein, 5795 aa, Homo sapiens
MCDCFHMVLPTWPGTPGSVSGRQLQPGEPGAETEDDHSVTEGPADEGIRPRPQGSSPVYEYTTEAADFGLQEDAPGRQGSAGRRRSWWKRDSGDSRTFFRMSRPEAVQEATEVTLKTEVEAGASGYSVTGGGDQGIFVKQVLKDSSAAKLFNLREGDQLLSTTVFFENIKYEDALKILQYSEPYKVQFKIRRQLPAPQDEEWASSDAQHGPQGKEKEDTDVADGCRETPTKTLEGDGDQERLISKPRVGRGRQSQRERLSWPKFQSIKSKRGPGPQRSHSSSEAYEPRDAHDVSPTSTDTEAQLTVERQEQKAGPGSQRRRKFLNLRFRTGSGQGPSSTGQPGRGFQSGVGRAGVLEELGPWGDSLEETGAATGSRREERAEQDREVMPAQSMPLPTELGDPRLCEGTPQEGGLRAARLHGKTLEGQAQETAVAQRKPRAQPTPGMSREGEGEGLQSLEIGIARLSLRDTTEGGTQIGPPEIRVRVHDLKTPKFAFSTEKEPERERRLSTPQRGKRQDASSKAGTGLKGEEVEGAGWMPGREPTTHAEAQGDEGDGEEGLQRTRITEEQDKGREDTEGQIRMPKFKIPSLGWSPSKHTKTGREKATEDTEQGREGEATATADRREQRRTEEGLKDKEDSDSMTNTTKIQLIHDEKRLKKEQILTEKEVATKDSKFKMPKFKMPLFGASAPGKSMEASVDVSAPKVEADVSLLSMQGDLKTTDLSVQTPSADLEVQDGQVDVKLPEGPLPEGASLKGHLPKVQRPSLKMPKVDLKGPKLDLKGPKAEVTAPDVKMSLSSMEVDVQAPRAKLDGARLEGDLSLADKEVTAKDSKFKMPKFKMPSFGVSAPGKSMEDSVDVSAPKVEADVSLSSMQGDLKATDLSIQPPSADLEVQAGQVDVKLPEGPVPEGAGPKVHLPKVEMPSFKMPKVDLKGPQIDVKGPKLDLKGPKAEVTAPDGEVSLPSMEVDVQAQKAKLDGAWLEGDLSLADKDVTAKDSKFKMPKFKMPSFGVSAPGKSIKALVDVSAPKVEADLSLPSMQGDLKTTDLSIQPASTDLKVQADQVDVKLPEGHLPEGAGLKGHLPKVEMPSFKMPKVALKGPQVDVKGPKLDLKSPKAEVTAPDVEVSLPSVEVDVEAPGAKLDSARLEGELSLADKDVTAKDSRFKMPKFKMPSFGASAPGKSIEASVDVSAPKVEADVSLPSMQGDLKTTDLSIQPPSADLEVHAGQVDVKLLEGHVPEGAGFKGHLPKVQMPSLKMPKVDLKGPQVEVRGPKLDLKGHKAEVTAHEVAVSLPSVEVDMQAPGAKLDGAQLDGDLSLADKDVTAKDSKFKMPKFKMPSFGVSAPGKSIEASVDLSAPKVEADMSLPSMQGDLKTTDLSIQPPSTDLELQAGQLDVKLPEGPVPEGAGLKGHLPKLQMPSFKVPKVDLKGPEIDIKGPKLDLKDPKVEVTAPDVEVSLPSVEVDVEAPGAKLDGGRLEEDMSLADKDLTTKDSKFKMPKFKMPSFGVSAPGKSIEASVDVSAPKVEADVSLPSMQGDLKATDLSIQPPSADLEVQAGQVDVKLPEGPVSEGAGLKGHLPKVQMPSFKMPKVDLKGPQIDVKGPKLDLKGPKVEVTAPDVKMSLSSMEVDVQAPRAKLDGAQLEGDLSLADKAVTAKDSKFKMPKFKMPSFGVSAPGKSIEASVDVSEPKVEADVSLPSMQGDLKTTDLSIQSPSADLEVQAGQVNVKLPEGPLPEGAGFKGHLPKVQMPSLKMPKVALKGPQMDVKGPKLDLKGPKAEVMAPDVEVSLPSVEVDVEAPGAKLDSVRLEGDLSLADKDVTAKDSKFKMPKFKMPSFGVSAPGKSIEASVDVSAPKVEAEVSLPSMQGDLKTTDLCIPLPSADLVVQAGQVDMKLPEGQVPEGAGLKGHLPKVDMPSFKMPKVDLKGPQTDVKGAKLDLKGPKAEVTAPDVEVSLPSMEVDVQAQKAKLDGARLEGDLSLADKDMTAKDSKFKMPKFKMPSFGVSAPGRSIEASVDVPAPKVEADVSLPSMQGDLKTTDLSIQPPSADLKVQTGQVDVKLPEGHVPEGAGLKGHLPKVEMPSLKMPKVDLKGPQVDIKGPKLDLKDPKVEMRVPDVEVSLPSMEVDVQAPRAKLDSAHLQGDLTLANKDLTTKDSKFKMPKFKMPSFGVSAPGKSIEASVDVSPPKVEADMSLPSMQGDLKTTDLSIQPLSADVKVQAGQVDVKLLEGPVPEEVGLKGHLPKLQMPSFKVPKVDLKGPEIDIKGPKLDLKDPKVEVTAPDVEVSLPSVEVDVKAPGAKLDGARLEGDMSLADKDVTAKDSKFKMPKFKMLSFGVSALGKSIEASADVSALKVEADVSLPSMQGDLKTTDLSVQPPSADLEVQAGQVDVKLPEGPVPEGAGLKGHLPKLQMPSFKMPKVDLKGPQIDVKGPKLDLKGPKTDVMAPDVEVSQPSVEVDVEAPGAKLDGAWLEGDLSVADKDVTTKDSRFKIPKFKMPSFGVSAPGKSIEASVDVSAPKVEADGSLSSMQGDLKATDLSIQPPSADLEVQAGQVDVKLPEGPVPEGAGLKGHLPKVQMPSFKMPEMDLKGPQLDVKGPKLDLKGPKAEVTAPDVEMSLSSMEVDVQAPRAKLDGARLEGDLSLADKGVTAKDSKFKMPKFKMPSFRVSAPGESIEALVDVSELKVEADMSLPSMQGDLKTTDISIQPPSAQLEVQAGQVDVKLPEGHVPEGAGLKGHLPKLQMPSFKMPEVDLKGPQIDVKGPNVDLKGPKAEVTAPDVKMSLSSMEVDVQAPRAKLDGARLEGDLSLADKGMTAKDSKFKMPKFKMPSFGVSAPGKSIEASVDVSELKVEADGSFPSMQGDLKTTDIRIQPPSAQLEVQAGQVDVKLPEGHVPEGAGLKGHLPKVQMPSFKMPKVDLKGPQIDVKGPKLDLKGPKAEVTAPDVEVSLPSVEVDVEAPRAKLDGARLEGDLSLADKDVTAKDSKFKMPKFKMPSFGVSAPGKSIEVSVDVSAPKVEAEVSLPSMQGDLKTTDISIEPPSAQLEVQAGQVDLKLPEGHVPEGAGLKGHLPKLQMPSFKMPKVDRKGPQIDVKGPKLDLKGPKTDVTAPDVEVSQPGMEVDVEAPGAKLDGARLEGDLSLADKDVTAKDSKFKMPKFKMPSFGVSAPGKSIEVLVDVSAPKVEADLSLPSMQGDLKNTDISIEPPSAQLEVQAGQVDVKLPEGHVLEGAGLKGHLPKLQMPSFKMPKVDRKGPQIDIKGPKLDLKGPKMDVTAPDVEVSQPSMEVDVEAPGAKLDGARLEGDLSLADKDVTAKDSKFKMPKFKMPSYRASAPGKSIQASVDVSAPKAEADVSLPSMQGDLKTTDLSIQLPSVDLEVQAGQVDVKLPEGHVPEGAGLKGHLPKVEMPSFKMPKVDLKSPQVDIKGPKLDLKVPKAEVTVPDVEVSLPSVEVDVQAPRAKLDGARLEGDLSLAEKDVTAKDSKFKMPKFKMPSFGVSAPGRSIEASLDVSAPKVEADVSLSSMQGDLKATDLSIQPPSADLEVQAVQVDVELLEGPVPEGAGLKGHLPKVEMPSLKTPKVDLKGPQIDVKGPKLDLKGPKAEVRVPDVEVSLPSVEVDVQAPKAKLDAGRLEGDLSLADKDVTAKDSKFKMPKFKMPSFRVSAPGKSMEASVDVSAPKVEADVSLPSMQGDLKTTDLSIQPPSADLKVQAGQMDVKLPEGQVPEGAGLKEHLPKVEMPSLKMPKVDLKGPQVDIKGPKLDLKVSKAEVTAPDVEVSLPSVEVDVQAPRAKLDSAQLEGDLSLADKDVTAKDSKFKMPKFKMPSFGVSAPGKSIEASVHVSAPKVEADVSLPSMQGDLKTTDLSIQPHSADLTVQARQVDMKLLEGHVPEEAGLKGHLPKVQMPSFKMPKVDLKGPEIDIKGPKLDLKDPKVEVTAPDVEVSLPSVEVDVEAPGAKLDGARLEGDLSLADKDMTAKDSKFKMPKFKMPSFGVSAPGKSMEASVDVTAPKVEADVSLPSMQGDLKATDLSVQPPSADLEVQAGQVDVKLPEGPVPEGASLKGHLPKVQMPSFKMPKVDLKGPQIDVKGPKLDLKGPKAEVTAPDVKMSLSSMEVDVQAPRAKLDGVQLEGDLSLADKDVTAKDSKFKMPKFKMPSFGVSAPGKSMEASVDVSELKAKADVSLPSMQGDLKTTDLSIQSPSADLEVQAGQVDVKLPEGPLPKGAGLKGHLPKVQMPCLKMPKVALKGPQVDVKGPKLDLKGPKADVMTPVVEVSLPSMEVDVEAPGAKLDSVRLEGDLSLADKDMTAKDSKFKMPKFKMPSFGVSAPGKSIEASLDVSALKVEADVSLPSMQGDLKTTHLSIQPPSADLEVQAGQEDVKLPEGPVHEGAGLKGHLPKLQMPSFKVPKVDLKGPQIDVNVPKLDLKGPKVEVTSPNLDVSLPSMEVDIQAPGAKLDSTRLEGDLSLADKDVTAKDSKFKMPKFKMPSFGMLSPGKSIEVSVDVSAPKMEADMSIPSMQGDLKTTDLRIQAPSADLEVQAGQVDLKLPEGHMPEVAGLKGHLPKVEMPSFKMPKVDLKGPQVDVKGPKLDLKGPKAEVMAPDVEVSLPSVETDVQAPGSMLDGARLEGDLSLAHEDVAGKDSKFQGPKLSTSGFEWSSKKVSMSSSEIEGNVTFHEKTSTFPIVESVVHEGDLHDPSRDGNLGLAVGEVGMDSKFKKLHFKVPKVSFSSTKTPKDSLVPGAKSSIGLSTIPLSSSECSSFELQQVSACSEPSMQMPKVGFAGFPSSRLDLTGPHFESSILSPCEDVTLTKYQVTVPRAALAPELALEIPSGSQADIPLPKTECSTDLQPPEGVPTSQAESHSGPLNSMIPVSLGQVSFPKFYKPKFVFSVPQMAVPEGDLHAAVGAPVMSPLSPGERVQCPLPSTQLPSPGTCVSQGPEELVASLQTSVVAPGEAPSEDADHEGKGSPLKMPKIKLPSFRWSPKKETGPKVDPECSVEDSKLSLVLDKDEVAPQSAIHMDLPPERDGEKGRSTKPGFAMPKLALPKMKASKSGVSLPQRDVDPSLSSATAGGSFQDTEKASSDGGRGGLGATASATGSEGVNLHRPQVHIPSLGFAKPDLRSSKAKVEVSQPEADLPLPKHDLSTEGDSRGCGLGDVPVSQPCGEGIAPTPEDPLQPSCRKPDAEVLTVESPEEEAMTKYSQESWFKMPKFRMPSLRRSFRDRGGAGKLEVAQTQAPAATGGEAAAKVKEFLVSGSNVEAAMSLQLPEADAEVTASESKSSTDILRCDLDSTGLKLHLSTAGMTGDELSTSEVRIHPSKGPLPFQMPGMRLPETQVLPGEIDETPLSKPGHDLASMEDKTEKWSSQPEGPLKLKASSTDMPSQISVVNVDQLWEDSVLTVKFPKLMVPRFSFPAPSSEDDVFIPTVREVQCPEANIDTALCKESPGLWGASILKAGAGVPGEQPVDLNLPLEAPPISKVRVHIQGAQVESQEVTIHSIVTPEFVDLSVPRTFSTQIVRESEIPTSEIQTPSYGFSLLKVKIPEPHTQARVYTTMTQHSRTQEGTEEAPIQATPGVDSISGDLQPDTGEPFEMISSSVNVLGQQTLTFEVPSGHQLADSCSDEEPAEILEFPPDDSQEATTPLADEGRAPKDKPESKKSGLLWFWLPNIGFSSSVDETGVDSKNDVQRSAPIQTQPEARPEAELPKKQEKAGWFRFPKLGFSSSPTKKSKSTEDGAELEEQKLQEETITFFDARESFSPEEKEEGELIGPVGTGLDSRVMVTSAARTELILPEQDRKADDESKGSGLGPNEG

SEQ ID NO: 21024 - protein, 793 aa, Homo sapiens
MDLPPERDGEKGRSTKPGFAMPKLALPKMKASKSGVSLPQRDVDPSLSSATAGGSFQDTEKASSDGGRGGLGATASATGSEGVNLHRPQVHIPSLGFAKPDLRSSKAKVEVSQPEADLPLPKHDLSTEGDSRGCGLGDVPVSQPCGEGIAPTPEDPLQPSCRKPDAEVLTVESPEEEAMTKYSQESWFKMPKFRMPSLRRSFRDRGGAGKLEVAQTQAPAATGGEAAAKVKEFLVSGSNVEAAMSLQLPEADAEVTASESKSSTDILRCDLDSTGLKLHLSTAGMTGDELSTSEVRIHPSKGPLPFQMPGMRLPETQVLPGEIDETPLSKPGHDLASMEDKTEKWSSQPEGPLKLKASSTDMPSQISVVNVDQLWEDSVLTVKFPKLMVPRFSFPAPSSEDDVFIPTVREVQCPEANIDTALCKESPGLWGASILKAGAGVPGEQPVDLNLPLEAPPISKVRVHIQGAQVESQEVTIHSIVTPEFVDLSVPRTFSTQIVRESEIPTSEIQTPSYGFSLLKVKIPEPHTQARVYTTMTQHSRTQEGTEEAPIQATPGVDSISGDLQPDTGEPFEMISSSVNVLGQQTLTFEVPSGHQLADSCSDEEPAEILEFPPDDSQEATTPLADEGRAPKDKPESKKSGLLWFWLPNIGFSSSVDETGVDSKNDVQRSAPIQTQPEARPEAELPKKQEKAGWFRFPKLGFSSSPTKKSKSTEDGAELEEQKLQEETITFFDARESFSPEEKEEGELIGPVGTGLDSRVMVTSAARTELILPEQDRKADDESKGSGLGPNEG

SEQ ID NO: 21025 - protein, 5695 aa, Homo sapiens
MSRPEAVQEATEVTLKTEVEAGASGYSVTGGGDQGIFVKQVLKDSSAAKLFNLREGDQLLSTTVFFENIKYEDALKILQYSEPYKVQFKIRRQLPAPQDEEWASSDAQHGPQGKEKEDTDVADGCRETPTKTLEGDGDQERLISKPRVGRGRQSQRERLSWPKFQSIKSKRGPGPQRSHSSSEAYEPRDAHDVSPTSTDTEAQLTVERQEQKAGPGSQRRRKFLNLRFRTGSGQGPSSTGQPGRGFQSGVGRAGVLEELGPWGDSLEETGAATGSRREERAEQDREVMPAQSMPLPTELGDPRLCEGTPQEGGLRAARLHGKTLEGQAQETAVAQRKPRAQPTPGMSREGEGEGLQSLEIGIARLSLRDTTEGGTQIGPPEIRVRVHDLKTPKFAFSTEKEPERERRLSTPQRGKRQDASSKAGTGLKGEEVEGAGWMPGREPTTHAEAQGDEGDGEEGLQRTRITEEQDKGREDTEGQIRMPKFKIPSLGWSPSKHTKTGREKATEDTEQGREGEATATADRREQRRTEEGLKDKEDSDSMTNTTKIQLIHDEKRLKKEQILTEKEVATKDSKFKMPKFKMPLFGASAPGKSMEASVDVSAPKVEADVSLLSMQGDLKTTDLSVQTPSADLEVQDGQVDVKLPEGPLPEGASLKGHLPKVQRPSLKMPKVDLKGPKLDLKGPKAEVTAPDVKMSLSSMEVDVQAPRAKLDGARLEGDLSLADKEVTAKDSKFKMPKFKMPSFGVSAPGKSMEDSVDVSAPKVEADVSLSSMQGDLKATDLSIQPPSADLEVQAGQVDVKLPEGPVPEGAGPKVHLPKVEMPSFKMPKVDLKGPQIDVKGPKLDLKGPKAEVTAPDGEVSLPSMEVDVQAQKAKLDGAWLEGDLSLADKDVTAKDSKFKMPKFKMPSFGVSAPGKSIKALVDVSAPKVEADLSLPSMQGDLKTTDLSIQPASTDLKVQADQVDVKLPEGHLPEGAGLKGHLPKVEMPSFKMPKVALKGPQVDVKGPKLDLKSPKAEVTAPDVEVSLPSVEVDVEAPGAKLDSARLEGELSLADKDVTAKDSRFKMPKFKMPSFGASAPGKSIEASVDVSAPKVEADVSLPSMQGDLKTTDLSIQPPSADLEVHAGQVDVKLLEGHVPEGAGFKGHLPKVQMPSLKMPKVDLKGPQVEVRGPKLDLKGHKAEVTAHEVAVSLPSVEVDMQAPGAKLDGAQLDGDLSLADKDVTAKDSKFKMPKFKMPSFGVSAPGKSIEASVDLSAPKVEADMSLPSMQGDLKTTDLSIQPPSTDLELQAGQLDVKLPEGPVPEGAGLKGHLPKLQMPSFKVPKVDLKGPEIDIKGPKLDLKDPKVEVTAPDVEVSLPSVEVDVEAPGAKLDGGRLEEDMSLADKDLTTKDSKFKMPKFKMPSFGVSAPGKSIEASVDVSAPKVEADVSLPSMQGDLKATDLSIQPPSADLEVQAGQVDVKLPEGPVSEGAGLKGHLPKVQMPSFKMPKVDLKGPQIDVKGPKLDLKGPKVEVTAPDVKMSLSSMEVDVQAPRAKLDGAQLEGDLSLADKAVTAKDSKFKMPKFKMPSFGVSAPGKSIEASVDVSEPKVEADVSLPSMQGDLKTTDLSIQSPSADLEVQAGQVNVKLPEGPLPEGAGFKGHLPKVQMPSLKMPKVALKGPQMDVKGPKLDLKGPKAEVMAPDVEVSLPSVEVDVEAPGAKLDSVRLEGDLSLADKDVTAKDSKFKMPKFKMPSFGVSAPGKSIEASVDVSAPKVEAEVSLPSMQGDLKTTDLCIPLPSADLVVQAGQVDMKLPEGQVPEGAGLKGHLPKVDMPSFKMPKVDLKGPQTDVKGAKLDLKGPKAEVTAPDVEVSLPSMEVDVQAQKAKLDGARLEGDLSLADKDMTAKDSKFKMPKFKMPSFGVSAPGRSIEASVDVPAPKVEADVSLPSMQGDLKTTDLSIQPPSADLKVQTGQVDVKLPEGHVPEGAGLKGHLPKVEMPSLKMPKVDLKGPQVDIKGPKLDLKDPKVEMRVPDVEVSLPSMEVDVQAPRAKLDSAHLQGDLTLANKDLTTKDSKFKMPKFKMPSFGVSAPGKSIEASVDVSPPKVEADMSLPSMQGDLKTTDLSIQPLSADVKVQAGQVDVKLLEGPVPEEVGLKGHLPKLQMPSFKVPKVDLKGPEIDIKGPKLDLKDPKVEVTAPDVEVSLPSVEVDVKAPGAKLDGARLEGDMSLADKDVTAKDSKFKMPKFKMLSFGVSALGKSIEASADVSALKVEADVSLPSMQGDLKTTDLSVQPPSADLEVQAGQVDVKLPEGPVPEGAGLKGHLPKLQMPSFKMPKVDLKGPQIDVKGPKLDLKGPKTDVMAPDVEVSQPSVEVDVEAPGAKLDGAWLEGDLSVADKDVTTKDSRFKIPKFKMPSFGVSAPGKSIEASVDVSAPKVEADGSLSSMQGDLKATDLSIQPPSADLEVQAGQVDVKLPEGPVPEGAGLKGHLPKVQMPSFKMPEMDLKGPQLDVKGPKLDLKGPKAEVTAPDVEMSLSSMEVDVQAPRAKLDGARLEGDLSLADKGVTAKDSKFKMPKFKMPSFRVSAPGESIEALVDVSELKVEADMSLPSMQGDLKTTDISIQPPSAQLEVQAGQVDVKLPEGHVPEGAGLKGHLPKLQMPSFKMPEVDLKGPQIDVKGPNVDLKGPKAEVTAPDVKMSLSSMEVDVQAPRAKLDGARLEGDLSLADKGMTAKDSKFKMPKFKMPSFGVSAPGKSIEASVDVSELKVEADGSFPSMQGDLKTTDIRIQPPSAQLEVQAGQVDVKLPEGHVPEGAGLKGHLPKVQMPSFKMPKVDLKGPQIDVKGPKLDLKGPKAEVTAPDVEVSLPSVEVDVEAPRAKLDGARLEGDLSLADKDVTAKDSKFKMPKFKMPSFGVSAPGKSIEVSVDVSAPKVEAEVSLPSMQGDLKTTDISIEPPSAQLEVQAGQVDLKLPEGHVPEGAGLKGHLPKLQMPSFKMPKVDRKGPQIDVKGPKLDLKGPKTDVTAPDVEVSQPGMEVDVEAPGAKLDGARLEGDLSLADKDVTAKDSKFKMPKFKMPSFGVSAPGKSIEVLVDVSAPKVEADLSLPSMQGDLKNTDISIEPPSAQLEVQAGQVDVKLPEGHVLEGAGLKGHLPKLQMPSFKMPKVDRKGPQIDIKGPKLDLKGPKMDVTAPDVEVSQPSMEVDVEAPGAKLDGARLEGDLSLADKDVTAKDSKFKMPKFKMPSYRASAPGKSIQASVDVSAPKAEADVSLPSMQGDLKTTDLSIQLPSVDLEVQAGQVDVKLPEGHVPEGAGLKGHLPKVEMPSFKMPKVDLKSPQVDIKGPKLDLKVPKAEVTVPDVEVSLPSVEVDVQAPRAKLDGARLEGDLSLAEKDVTAKDSKFKMPKFKMPSFGVSAPGRSIEASLDVSAPKVEADVSLSSMQGDLKATDLSIQPPSADLEVQAVQVDVELLEGPVPEGAGLKGHLPKVEMPSLKTPKVDLKGPQIDVKGPKLDLKGPKAEVRVPDVEVSLPSVEVDVQAPKAKLDAGRLEGDLSLADKDVTAKDSKFKMPKFKMPSFRVSAPGKSMEASVDVSAPKVEADVSLPSMQGDLKTTDLSIQPPSADLKVQAGQMDVKLPEGQVPEGAGLKEHLPKVEMPSLKMPKVDLKGPQVDIKGPKLDLKVSKAEVTAPDVEVSLPSVEVDVQAPRAKLDSAQLEGDLSLADKDVTAKDSKFKMPKFKMPSFGVSAPGKSIEASVHVSAPKVEADVSLPSMQGDLKTTDLSIQPHSADLTVQARQVDMKLLEGHVPEEAGLKGHLPKVQMPSFKMPKVDLKGPEIDIKGPKLDLKDPKVEVTAPDVEVSLPSVEVDVEAPGAKLDGARLEGDLSLADKDMTAKDSKFKMPKFKMPSFGVSAPGKSMEASVDVTAPKVEADVSLPSMQGDLKATDLSVQPPSADLEVQAGQVDVKLPEGPVPEGASLKGHLPKVQMPSFKMPKVDLKGPQIDVKGPKLDLKGPKAEVTAPDVKMSLSSMEVDVQAPRAKLDGVQLEGDLSLADKDVTAKDSKFKMPKFKMPSFGVSAPGKSMEASVDVSELKAKADVSLPSMQGDLKTTDLSIQSPSADLEVQAGQVDVKLPEGPLPKGAGLKGHLPKVQMPCLKMPKVALKGPQVDVKGPKLDLKGPKADVMTPVVEVSLPSMEVDVEAPGAKLDSVRLEGDLSLADKDMTAKDSKFKMPKFKMPSFGVSAPGKSIEASLDVSALKVEADVSLPSMQGDLKTTHLSIQPPSADLEVQAGQEDVKLPEGPVHEGAGLKGHLPKLQMPSFKVPKVDLKGPQIDVNVPKLDLKGPKVEVTSPNLDVSLPSMEVDIQAPGAKLDSTRLEGDLSLADKDVTAKDSKFKMPKFKMPSFGMLSPGKSIEVSVDVSAPKMEADMSIPSMQGDLKTTDLRIQAPSADLEVQAGQVDLKLPEGHMPEVAGLKGHLPKVEMPSFKMPKVDLKGPQVDVKGPKLDLKGPKAEVMAPDVEVSLPSVETDVQAPGSMLDGARLEGDLSLAHEDVAGKDSKFQGPKLSTSGFEWSSKKVSMSSSEIEGNVTFHEKTSTFPIVESVVHEGDLHDPSRDGNLGLAVGEVGMDSKFKKLHFKVPKVSFSSTKTPKDSLVPGAKSSIGLSTIPLSSSECSSFELQQVSACSEPSMQMPKVGFAGFPSSRLDLTGPHFESSILSPCEDVTLTKYQVTVPRAALAPELALEIPSGSQADIPLPKTECSTDLQPPEGVPTSQAESHSGPLNSMIPVSLGQVSFPKFYKPKFVFSVPQMAVPEGDLHAAVGAPVMSPLSPGERVQCPLPSTQLPSPGTCVSQGPEELVASLQTSVVAPGEAPSEDADHEGKGSPLKMPKIKLPSFRWSPKKETGPKVDPECSVEDSKLSLVLDKDEVAPQSAIHMDLPPERDGEKGRSTKPGFAMPKLALPKMKASKSGVSLPQRDVDPSLSSATAGGSFQDTEKASSDGGRGGLGATASATGSEGVNLHRPQVHIPSLGFAKPDLRSSKAKVEVSQPEADLPLPKHDLSTEGDSRGCGLGDVPVSQPCGEGIAPTPEDPLQPSCRKPDAEVLTVESPEEEAMTKYSQESWFKMPKFRMPSLRRSFRDRGGAGKLEVAQTQAPAATGGEAAAKVKEFLVSGSNVEAAMSLQLPEADAEVTASESKSSTDILRCDLDSTGLKLHLSTAGMTGDELSTSEVRIHPSKGPLPFQMPGMRLPETQVLPGEIDETPLSKPGHDLASMEDKTEKWSSQPEGPLKLKASSTDMPSQISVVNVDQLWEDSVLTVKFPKLMVPRFSFPAPSSEDDVFIPTVREVQCPEANIDTALCKESPGLWGASILKAGAGVPGEQPVDLNLPLEAPPISKVRVHIQGAQVESQEVTIHSIVTPEFVDLSVPRTFSTQIVRESEIPTSEIQTPSYGFSLLKVKIPEPHTQARVYTTMTQHSRTQEGTEEAPIQATPGVDSISGDLQPDTGEPFEMISSSVNVLGQQTLTFEVPSGHQLADSCSDEEPAEILEFPPDDSQEATTPLADEGRAPKDKPESKKSGLLWFWLPNIGFSSSVDETGVDSKNDVQRSAPIQTQPEARPEAELPKKQEKAGWFRFPKLGFSSSPTKKSKSTEDGAELEEQKLQEETITFFDARESFSPEEKEEGELIGPVGTGLDSRVMVTSAARTELILPEQDRKADDESKGSGLGPNEG

SEQ ID NO: 21026 - protein, 609 aa, Homo sapiens [sequence omitted]

SEQ ID NO: 21027 - protein, 417 aa, Homo sapiens
MKWVTFISLLFLFSSAYSRGVFRRDAHKSEVAHRFKDLGEENFKAWAVARLSQRFPKAEFAEVSKLVTDLTKVHTECCHGDLLECADDRADLAKYICENQDSISSKLKECCEKPLLEKSHCIAEVENDEMPADLPSLAADFVESKDVCKNYAEAKDVFLGMFLYEYARRHPDYSVVLLLRLAKTYETTLEKCCAAADPHECYAKVFDEFKPLVEEPQNLIKQNCELFEQLGEYKFQNALLVRYTKKVPQVSTPTLVEVSRNLGKVGSKCCKHPEAKRMPCAEDYLSVVLNQLCVLHEKTPVSDRVTKCCTESLVNRRPCFSALEVDETYVPKEFNAETFTFHADICTLSEKERQIKKQTALVELVKHKPKATKEQLKAVMDDFAAFVEKCCKADDKETCFAEEGKKLVAASQAALGL

SEQ ID NO: 21028 - protein, 396 aa, Homo sapiens
MKWVTFISLLFLFSSAYSRGVFRRDAHKSEVAHRFKDLGEENFKALVLIAFAQYLQQCPFEDHVKLVNEVTEFAKTCVADESAENCDKSLHTLFGDKLCTVATLRETYGEMADCCAKQEPERNECFLQHKDDNPNLPRLVRPEVDVMCTAFHDNEETFLKKYLYETTLEKCCAAADPHECYAKVFDEFKPLVEEPQNLIKQNCELFEQLGEYKFQNALLVRYTKKVPQVSTPTLVEVSRNLGKVGSKCCKHPEAKRMPCAEDYLSVVLNQLCVLHEKTPVSDRVTKCCTESLVNRRPCFSALEVDETYVPKEFNAETFTFHADICTLSEKERQIKKQTALVELVKHKPKATKEQLKAVMDDFAAFVEKCCKADDKETCFAEEGKKLVAASQAALGL

SEQ ID NO: 21029 - protein, 1311 aa, Homo sapiens
MDLFDFFRDWDLEQQCHYEQDRSALKKREWERRNQEVQQEDDLFSSGFDLFGEPYKVAEYTNKGDALANRVQNTLGNYDEMKNLLTNHSNQNHLVGIPKNSVPQNPNNKNEPSFFPEQKNRIIPPHQDNTHPSAPMPPPSVVILNSTLIHSNRKSKPEWSRDSHNPSTVLASQASGQPNKMQTLTQDQSQAKLEDFFVYPAEQPQIGEVEESNPSAKEDSNPNSSGEDAFKEIFQSNSPEESEFAVQAPGSPLVASSLLAPSSGLSVQNFPPGLYCKTSMGQQKPTAYVRPMDGQDQAPDISPTLKPSIEFENSFGNLSFGTLLDGKPSAASSKTKLPKFTILQTSEVSLPSDPSCVEEILREMTHSWPTPLTSMHTAGHSEQSTFSIPGQESQHLTPGFTLQKWNDPTTRASTKSVSFKSMLEDDLKLSSDEDDLEPVKTLTTQCTATELYQAVEKAKPRNNPVNPPLATPQPPPAVQASGGSGSSSESESSSESDSDTESSTTDSESNEAPRVATPEPEPPSTNKWQLDKWLNKVTSQNKSFICGQNETPMETISLPPPIIQPMEVQMKVKTNASQVPAEPKERPLLSLIREKARPRPTQKIPETKALKHKLSTTSETVSQRTIGKKQPKKVEKNTSTDEFTWPKPNITSSTPKEKESVELHDPPRGRNKATAHKPAPRKEPRPNIPLAPEKKKYRGPGKIVPKSREFIETDSSTSDSNTDQEETLQIKVLPPCIISGGNTAKSKEICGASLTLSTLMSSSGSNNNLSISNEEPTFSPIPVMQTEILSPLRDHENLKNLWVKIDLDLLSRVPGHSSLHAAPAKPDHKETATKPKRQTAVTAVEKPAPKGKRKHKPIEVAEKIPEKKQRLEEATTICLLPPCISPAPPHKPPNTRENNSSRRANRRKEEKLFPPPLSPLPEDPPRRRNVSGNNGPFGQDKNIAMTGQITSTKPKRTEGKFCATFKGISVNEGDTPKKASSATITVTNTAIATATVTATAIVTTTVTATATATATTTTTTTTISTITSTITTGLMDSSHLEMTSWAALPLLSSSSTNVRRPKLTFDDSVHNADYYMQEAKKLKHKADALFEKFGKAVNYADAALSFTECGNAMERDPLEAKSPYTMYSETVELLRYAMRLKNFASPLASDGDKKLAVLCYRCLSLLYLRMFKLKKDHAMKYSRSLMEYFKQNASKVAQIPSPWVSNGKNTPSPVSLNNVSPINAMGNCNNGPVTIPQRIHHMAASHVNITSNVLRGYEHWDMADKLTRENKEFFGDLDTLMGPLTQHSSMTNLVRYVRQGLCWLRIDAHLL

SEQ ID NO: 21030 - protein, 1272 aa, Homo sapiens
MDLFDFFRDWDLEQQCHYEQDRSALKKREWERRNQEVQQEDDLFSSGFDLFGEPYKTNKGDALANRVQNTLGNYDEMKNLLTNHSNQNHLVGIPKNSVPQNPNNKNEPSFFPEQKNRIIPPHQDNTHPSAPMPPPSVVILNSTLIHSNRKSKPEWSRDSHNPSTVLASQASGQPNKMQTLTQDQSQAKLEDFFVYPAEQPQIGEVEESNPSAKEDSNPNSSGEDAFKEIFQSNSPEESEFAVQAPGSPLVASSLLAPSSGLSVQNFPPGLYCKTSMGQQKPTAYVRPMDGQDQAPDISPTLKPSIEFENSFGNLSFGTLLDGKPSAASSKTKLPKFTILQTSEVSLPSDPSCVEEILRESQHLTPGFTLQKWNDPTTRASTKMLEDDLKLSSDEDDLEPVKTLTTQCTATELYQAVEKAKPRNNPVNPPLATPQPPPAVQASGGSGSSSESESSSESDSDTESSTTDSESNEAPRVATPEPEPPSTNKWQLDKWLNKVTSQNKSFICGQNETPMETISLPPPIIQPMEVQMKVKTNASQVPAEPKERPLLSLIREKARPRPTQKIPETKALKHKLSTTSETVSQRTIGKKQPKKVEKNTSTDEFTWPKPNITSSTPKEKESVELHDPPRGRNKATAHKPAPRKEPRPNIPLAPEKKKYRGPGKIVPKSREFIETDSSTSDSNTDQEETLQIKVLPPCIISGGNTAKSKEICGASLTLSTLMSSSGSNNNLSISNEEPTFSPIPVMQTEILSPLRDHENLKNLWVKIDLDLLSRVPGHSSLHAAPAKPDHKETATKPKRQTAVTAVEKPAPKGKRKHKPIEVAEKIPEKKQRLEEATTICLLPPCISPAPPHKPPNTRENNSSRRANRRKEEKLFPPPLSPLPEDPPRRRNVSGNNGPFGQDKNIAMTGQITSTKPKRTEGKFCATFKGISVNEGDTPKKASSATITVTNTAIATATVTATAIVTTTVTATATATATTTTTTTTISTITSTITTGLMDSSHLEMTSWAALPLLSSSSTNVRRPKLTFDDSVHNADYYMQEAKKLKHKADALFEKFGKAVNYADAALSFTECGNAMERDPLEAKSPYTMYSETVELLRYAMRLKNFASPLASDGDKKLAVLCYRCLSLLYLRMFKLKKDHAMKYSRSLMEYFKQNASKVAQIPSPWVSNGKNTPSPVSLNNVSPINAMGNCNNGPVTIPQRIHHMAASHVNITSNVLRGYEHWDMADKLTRENKEFFGDLDTLMGPLTQHSSMTNLVRYVRQGLCWLRIDAHLL

SEQ ID NO: 21031 - protein, 1276 aa, Homo sapiens
MDLFDFFRDWDLEQQCHYEQDRSALKKREWERRNQEVQQEDDLFSSGFDLFGEPYKTNKGDALANRVQNTLGNYDEMKNLLTNHSNQNHLVGIPKNSVPQNPNNKNEPSFFPEQKNRIIPPHQDNTHPSAPMPPPSVVILNSTLIHSNRKSKPEWSRDSHNPSTVLASQASGQPNKMQTLTQDQSQAKLEDFFVYPAEQPQIGEVEESNPSAKEDSNPNSSGEDAFKEIFQSNSPEESEFAVQAPGSPLVASSLLAPSSGLSVQNFPPGLYCKTSMGQQKPTAYVRPMDGQDQAPDISPTLKPSIEFENSFGNLSFGTLLDGKPSAASSKTKLPKFTILQTSEVSLPSDPSCVEEILRESQHLTPGFTLQKWNDPTTRASTKSVSFKSMLEDDLKLSSDEDDLEPVKTLTTQCTATELYQAVEKAKPRNNPVNPPLATPQPPPAVQASGGSGSSSESESSSESDSDTESSTTDSESNEAPRVATPEPEPPSTNKWQLDKWLNKVTSQNKSFICGQNETPMETISLPPPIIQPMEVQMKVKTNASQVPAEPKERPLLSLIREKARPRPTQKIPETKALKHKLSTTSETVSQRTIGKKQPKKVEKNTSTDEFTWPKPNITSSTPKEKESVELHDPPRGRNKATAHKPAPRKEPRPNIPLAPEKKKYRGPGKIVPKSREFIETDSSTSDSNTDQEETLQIKVLPPCIISGGNTAKSKEICGASLTLSTLMSSSGSNNNLSISNEEPTFSPIPVMQTEILSPLRDHENLKNLWVKIDLDLLSRVPGHSSLHAAPAKPDHKETATKPKRQTAVTAVEKPAPKGKRKHKPIEVAEKIPEKKQRLEEATTICLLPPCISPAPPHKPPNTRENNSSRRANRRKEEKLFPPPLSPLPEDPPRRRNVSGNNGPFGQDKNIAMTGQITSTKPKRTEGKFCATFKGISEGDTPKKASSATITVTNTAIATATVTATAIVTTTVTATATATATTTTTTTTISTITSTITTGLMDSSHLEMTSWAALPLLSSSSTNVRRPKLTFDDSVHNADYYMQEAKKLKHKADALFEKFGKAVNYADAALSFTECGNAMERDPLEAKSPYTMYSETVELLRYAMRLKNFASPLASDGDKKLAVLCYRCLSLLYLRMFKLKKDHAMKYSRSLMEYFKQNASKVAQIPSPWVSNGKNTPSPVSLNNVSPINAMGNCNNGPVTIPQRIHHMAASHVNITSNVLRGYEHWDMADKLTRENKEFFGDLDTLMGPLTQHSSMTNLVRYVRQGLCWLRIDAHLL

SEQ ID NO: 21032 - protein, 427 aa, Homo sapiens
MDLFDFFRDWDLEQQCHYEQDRSALKKREWERRNQEVQQEDDLFSSGFDLFGEPYKTNKGDALANRVQNTLGNYDEMKNLLTNHSNQNHLVGIPKNSVPQNPNNKNEPSFFPEQKNRIIPPHQDNTHPSAPMPPPSVVILNSTLIHSNRKSKPEWSRDSHNPSTVLASQASGQPNKMQTLTQDQSQAKLEDFFVYPAEQPQIGEVEESNPSAKEDSNPNSSGEDAFKEIFQSNSPEESEFAVQAPGSPLVASSLLAPSSGLSVQNFPPGLYCKTSMGQQKPTAYVRPMDGQDQAPDISPTLKPSIEFENSFGNLSFGTLLDGKPSAASSKTKLPKFTILQTSEVSLPSDPSCVEEILRESQHLTPGFTLQKWNDPTTRASTKMLEDDLKLSSDEDDLEPVKTLTTQCTATELYQAVEKAKPRNNPVK

SEQ ID NO: 21033 - protein, 1301 aa, Homo sapiens
MDLFDFFRDWDLEQQCHYEQDRSALKKREWERRNQEVQQEDDLFSSGFDLFGEPYKTNKGDALANRVQNTLGNYDEMKNLLTNHSNQNHLVGIPKNSVPQNPNNKNEPSFFPEQKNRIIPPHQDNTHPSAPMPPPSVVILNSTLIHSNRKSKPEWSRDSHNPSTVLASQASGQPNKMQTLTQDQSQAKLEDFFVYPAEQPQIGEVEESNPSAKEDSNPNSSGEDAFKEIFQSNSPEESEFAVQAPGSPLVASSLLAPSSGLSVQNFPPGLYCKTSMGQQKPTAYVRPMDGQDQAPDISPTLKPSIEFENSFGNLSFGTLLDGKPSAASSKTKLPKFTILQTSEVSLPSDPSCVEEILREMTHSWPTPLTSMHTAGHSEQSTFSIPGQESQHLTPGFTLQKWNDPTTRASTKMLEDDLKLSSDEDDLEPVKTLTTQCTATELYQAVEKAKPRNNPVNPPLATPQPPPAVQASGGSGSSSESESSSESDSDTESSTTDSESNEAPRVATPEPEPPSTNKWQLDKWLNKVTSQNKSFICGQNETPMETISLPPPIIQPMEVQMKVKTNASQVPAEPKERPLLSLIREKARPRPTQKIPETKALKHKLSTTSETVSQRTIGKKQPKKVEKNTSTDEFTWPKPNITSSTPKEKESVELHDPPRGRNKATAHKPAPRKEPRPNIPLAPEKKKYRGPGKIVPKSREFIETDSSTSDSNTDQEETLQIKVLPPCIISGGNTAKSKEICGASLTLSTLMSSSGSNNNLSISNEEPTFSPIPVMQTEILSPLRDHENLKNLWVKIDLDLLSRVPGHSSLHAAPAKPDHKETATKPKRQTAVTAVEKPAPKGKRKHKPIEVAEKIPEKKQRLEEATTICLLPPCISPAPPHKPPNTRENNSSRRANRRKEEKLFPPPLSPLPEDPPRRRNVSGNNGPFGQDKNIAMTGQITSTKPKRTEGKFCATFKGISVNEGDTPKKASSATITVTNTAIATATVTATAIVTTTVTATATATATTTTTTTTISTITSTITTGLMDSSHLEMTSWAALPLLSSSSTNVRRPKLTFDDSVHNADYYMQEAKKLKHKADALFEKFGKAVNYADAALSFTECGNAMERDPLEAKSPYTMYSETVELLRYAMRLKNFASPLASDGDKKLAVLCYRCLSLLYLRMFKLKKDHAMKYSRSLMEYFKQNASKVAQIPSPWVSNGKNTPSPVSLNNVSPINAMGNCNNGPVTIPQRIHHMAASHVNITSNVLRGYEHWDMADKLTRENKEFFGDLDTLMGPLTQHSSMTNLVRYVRQGLCWLRIDAHLL

SEQ ID NO: 21034 - protein, 1276 aa, Homo sapiens
MDLFDFFRDWDLEQQCHYEQDRSALKKREWERRNQEVQQEDDLFSSGFDLFGEPYKVAEYTNKGDALANRVQNTLGNYDEMKNLLTNHSNQNHLVGIPKNSVPQNPNNKNEPSFFPEQKNRIIPPHQDNTHPSAPMPPPSVVILNSTLIHSNRKSKPEWSRDSHNPSTVLASQASGQPNKMQTLTQDQSQAKLEDFFVYPAEQPQIGEVEESNPSAKEDSNPNSSGEDAFKEIFQSNSPEESEFAVQAPGSPLVASSLLAPSSGLSVQNFPPGLYCKTSMGQQKPTAYVRPMDGQDQAPDISPTLKPSIEFENSFGNLSFGTLLDGKPSAASSKTKLPKFTILQTSEVSLPSDPSCVEEILRESQHLTPGFTLQKWNDPTTRASTKMLEDDLKLSSDEDDLEPVKTLTTQCTATELYQAVEKAKPRNNPVNPPLATPQPPPAVQASGGSGSSSESESSSESDSDTESSTTDSESNEAPRVATPEPEPPSTNKWQLDKWLNKVTSQNKSFICGQNETPMETISLPPPIIQPMEVQMKVKTNASQVPAEPKERPLLSLIREKARPRPTQKIPETKALKHKLSTTSETVSQRTIGKKQPKKVEKNTSTDEFTWPKPNITSSTPKEKESVELHDPPRGRNKATAHKPAPRKEPRPNIPLAPEKKKYRGPGKIVPKSREFIETDSSTSDSNTDQEETLQIKVLPPCIISGGNTAKSKEICGASLTLSTLMSSSGSNNNLSISNEEPTFSPIPVMQTEILSPLRDHENLKNLWVKIDLDLLSRVPGHSSLHAAPAKPDHKETATKPKRQTAVTAVEKPAPKGKRKHKPIEVAEKIPEKKQRLEEATTICLLPPCISPAPPHKPPNTRENNSSRRANRRKEEKLFPPPLSPLPEDPPRRRNVSGNNGPFGQDKNIAMTGQITSTKPKRTEGKFCATFKGISVNEGDTPKKASSATITVTNTAIATATVTATAIVTTTVTATATATATTTTTTTTISTITSTITTGLMDSSHLEMTSWAALPLLSSSSTNVRRPKLTFDDSVHNADYYMQEAKKLKHKADALFEKFGKAVNYADAALSFTECGNAMERDPLEAKSPYTMYSETVELLRYAMRLKNFASPLASDGDKKLAVLCYRCLSLLYLRMFKLKKDHAMKYSRSLMEYFKQNASKVAQIPSPWVSNGKNTPSPVSLNNVSPINAMGNCNNGPVTIPQRIHHMAASHVNITSNVLRGYEHWDMADKLTRENKEFFGDLDTLMGPLTQHSSMTNLVRYVRQGLCWLRIDAHLL

SEQ ID NO: 21035 - protein, 952 aa, Homo sapiens
MKFKRRHQAFPSFFKMKVSLPSDPSCVEEILRESQHLTPGFTLQKWNDPTTRASTKSVSFKSMLEDDLKLSSDEDDLEPVKTLTTQCTATELYQAVEKAKPRNNPVNPPLATPQPPPAVQASGGSGSSSESESSSESDSDTESSTTDSESNEAPRVATPEPEPPSTNKWQLDKWLNKVTSQNKSFICGQNETPMETISLPPPIIQPMEVQMKVKTNASQVPAEPKERPLLSLIREKARPRPTQKIPETKALKHKLSTTSETVSQRTIGKKQPKKVEKNTSTDEFTWPKPNITSSTPKEKESVELHDPPRGRNKATAHKPAPRKEPRPNIPLAPEKKKYRGPGKIVPKSREFIETDSSTSDSNTDQEETLQIKVLPPCIISGGNTAKSKEICGASLTLSTLMSSSGSNNNLSISNEEPTFSPIPVMQTEILSPLRDHENLKNLWVKIDLDLLSRVPGHSSLHAAPAKPDHKETATKPKRQTAVTAVEKPAPKGKRKHKPIEVAEKIPEKKQRLEEATTICLLPPCISPAPPHKPPNTRENNSSRRANRRKEEKLFPPPLSPLPEDPPRRRNVSGNNGPFGQDKNIAMTGQITSTKPKRTEGKFCATFKGISVNEGDTPKKASSATITVTNTAIATATVTATAIVTTTVTATATATATTTTTTTTISTITSTITTGLMDSSHLEMTSWAALPLLSSSSTNVRRPKLTFDDSVHNADYYMQEAKKLKHKADALFEKFGKAVNYADAALSFTECGNAMERDPLEAKSPYTMYSETVELLRYAMRLKNFASPLASDGDKKLAVLCYRCLSLLYLRMFKLKKDHAMKYSRSLMEYFKQNASKVAQIPSPWVSNGKNTPSPVSLNNVSPINAMGNCNNGPVTIPQRIHHMAASHVNITSNVLRGYEHWDMADKLTRENKEFFGDLDTLMGPLTQHSSMTNLVRYVRQGLCWLRIDAHLL

SEQ ID NO: 21036 - protein, 522 aa, Homo sapiens
MQEELAWETDGLLPLERQLHEAARQNNVGRMQELIGRRVNTRARNHVGRVALHWAAGAGHEQAVRLLLEHEAAVDEEDAVGALTEARLCFGMNALLLSAWFGHLRILQILVNSGAKIHCESKDGLTLLHCAAQKGHVPVLAFIMEDLEDVALDHVDKLGRTAFHRAAEHGQLDALDFLVGSGCDHNVKDKEGNTALHLAAGRGHMAVLQRLVDIGLDLEEQNAEGLTALHSAAGGSHPDCVQLLLRAGSTVNALTQKNLSCLHYAALSGSEDVSRVLIHAGGCANVVDHQGASPLHLAVRHNFPALVRLLINSDSDVNAVDNRQQTPLHLAAEHAWQDIADMLLIAGVDLNLRDKQGKTALAVAVRSNHVSLVDMIIKADRFYRWEKDHPSDPSGKSLSFKQDHRQETQQLRSVLWRLASRYLQPREWKKLAYSWEFTEAHVDAIEQQWTGTRSYQEHGHRMLLIWLHGVATAGENPSKALFEGLVAIGRRDLAGWSTMARSQLTATSASRVQMILVPQPPE

SEQ ID NO: 21037 - protein, 490 aa, Homo sapiens
MQEELAWETDGLLPLERQLHEAARQNNVGRMQELIGRRVNTRARNHVGRVALHWAAGAGHEQAVRLLLEHEAAVDEEDAVGALTEARLCFGMNALLLSAWFGHLRILQILVNSGAKIHCESKDGLTLLHCAAQKGHVPVLAFIMEDLEDVALDHVDKLGRTAFHRAAEHGQLDALDFLVGSGCDHNVKDKEGNTALHLAAGRGHMAVLQRLVDIGLDLEEQNAEGLTALHSAAGGSHPDCVQLLLRAGSTVNALTQKNLSCLHYAALSGSEDVSRVLIHAGGCANVVDHQGASPLHLAVRHNFPALVRLLINSDSDVNAVDNRQQTPLHLAAEHAWQDIADMLLIAGVDLNLRDKDHPSDPSGKSLSFKQDHRQETQQLRSVLWRLASRYLQPREWKKLAYSWEFTEAHVDAIEQQWTGTRSYQEHGHRMLLIWLHGVATAGENPSKALFEGLVAIGRRDLAGWSTMARSQLTATSASRVQMILVPQPPE

SEQ ID NO: 21038 - protein, 41 aa, Homo sapiens
MQEELAWETDGLWDECASPVCLVRPLTNPLDLDKLRGQDPL

SEQ ID NO: 21039 - protein, 514 aa, Homo sapiens
MQEELAWETDGLLPLERQLHEAARQNNVGRMQELIGRRVNTRARNHVGRVALHWAAGAGHEQAVRLLLEHEAAVDEEDAVGALTEARLCFGMNALLLSAWFGHLRILQILVNSGAKIHCESKDGLTLLHCAAQKGHVPVLAFIMEDLEDVALDHVDKLGRTAFHRAAEHGQLDALDFLVGSGCDHNVKDKEGNTALHLAAGRGHMAVLQRLVDIGLDLEEQNAEGLTALHSAAGGSHPDCVQLLLRAGSTVNALTQKNLSCLHYAALSGSEDVSRVLIHAGGCANVVDHQGASPLHLAVRHNFPALVRLLINSDSDVNAVDNRQQTPLHLAAEHAWQDIADMLLIAGVDLNLRDKQGKTALAVAVRSNHVSLVDMIIKADRFYRWEKDHPSDPSGKSLSFKQDHRQETQQLRSVLWRLASRYLQPREWKKLAYSWEFTEAHVDAIEQQWTGTRSYQEHGHRMLLIWLHGVATAGENPSKALFEGLVAIGRRDLAENIRKKANAAPSAPRRCTAM

SEQ ID NO: 21040 - protein, 580 aa, Homo sapiens
MWRPVQLCHFHSALLHSRQKPWPSPAVFFRRNVRGLPPRFSSPTPLWRKVLSTAVVGAPLLLGARYVMAEAREKRRMRLVVDGMGRFGRSLKVGLQISLDYWWCTNVVLRGVEENSPGYLEVMSACHQRAADALVAGAISNGGLYVKLGQGLCSFNHLLPPEYTRTLRVLEDRALKRGFQEVDELFLEDFQALPHELFQEFDYQPIAAASLAQVHRAKLHDGTSVAVKVQYIDLRDRFDGDIHTLELLLRLVEVMHPSFGFSWVLQDLKGTLAQELDFENEGRNAERCARELAHFPYVVVPRVHWDKSSKRVLTADFCAGCKVNDVEAIRSQGLAVHDIAEKLIKAFAEQIFYTGFIHSDPHPGNVLVRKGPDGKAELVLLDHGLYQFLEEKDRAALCQLWRAIILRDDAAMRAHAAALGVQDYLLFAEMLMQRPVRLGQLWGSHLLSREEAAYMVDMARERFEAVMAVLRELPRPMLLVLRNINTVRAINVALGAPVDRYFLMAKRAVRGWSRLAGATYRGVYGTSLLRHAKVVWEMLKFEVALRLETLAMRLTALLARALVHLSLVPPAEELYQYLET

SEQ ID NO: 21041 - protein, 835 aa, Homo sapiens
MSRRKQGKPQHLSKREFSPEPLEAILTDDEPDHGPLGAPEGDHDLLTCGQCQMNFPLGDILIFIEHKRKQCNGSLCLEKAVDKPPSPSPIEMKKASNPVEVGIQVTPEDDDCLSTSSRGICPKQEHIADKLLHWRGLSSPRSAHGALIPTPGMSAEYAPQGICKDEPSSYTCTTCKQPFTSAWFLLQHAQNTHGLRIYLESEHGSPLTPRVGIPSGLGAECPSQPPLHGIHIADNNPFNLLRIPGSVSREASGLAEGRFPPTPPLFSPPPRHHLDPHRIERLGAEEMALATHHPSAFDRVLRLNPMAMEPPAMDFSRRLRELAGNTSSPPLSPGRPSPMQRLLQPFQPGSKPPFLATPPLPPLQSAPPPSQPPVKSKSCEFCGKTFKFQSNLVVHRRSHTGEKPYKCNLCDHACTQASKLKRHMKTHMHKSSPMTVKSDDGLSTASSPEPGTSDLVGSASSALKSVVAKFKSENDPNLIPENGDEEEEEDDEEEEEEEEEEEEELTESERVDYGFGLSLEAARHHENSSRGAVVGVGDESRALPDVMQGMVLSSMQHFSEAFHQVLGEKHKRGHLAEAEGHRDTCDEDSVAGESDRIDDGTVNGRGCSPGESASGGLSKKLLLGSPSSLSPFSKRIKLEKEFDLPPAAMPNTENVYSQWLAGYAASRQLKDPFLSFGDSRQSPFASSSEHSSENGSLRFSTPPGELDGGISGRSGTGSGGSTPHISGPGPGRPSSKEGRRSDTCEYCGKVFKNCSNLTVHRRSHTGERPYKCELCNYACAQSSKLTRHMKTHGQVGKDVYKCEICKMPFSVYSTLEKHMKKWHSDRVLNNDIKTE

SEQ ID NO: 21042 - protein, 773 aa, Homo sapiens
MSRRKQGKPQHLSKREFSPEPLEAILTDDEPDHGPLGAPEGDHDLLTCGQCQMNFPLGDILIFIEHKRKQCNGSLCLEKAVDKPPSPSPIEMKKASNPVEVGIQVTPEDDDCLSTSSRGICPKQEHIADKLLHWRGLSSPRSAHGALIPTPGMSAEYAPQGICKDEPSSYTCTTCKQPFTSAWFLLQHAQNTHGLRIYLESEHGSPLTPRVGIPSGLGAECPSQPPLHGIHIADNNPFNLLRIPGSVSREASGLAEGRFPPTPPLFSPPPRHHLDPHRIERLGAEEMALATHHPSAFDRVLRLNPMAMEPPAMDFSRRLRELAGNTSSPPLSPGRPSPMQRLLQPFQPGSKPPFLATPPLPPLQSAPPPSQPPVKSKSCEFCGKTFKFQSNLVVHRRSHTGEKPYKCNLCDHACTQASKLKRHMKTHMHKSSPMTVKSDDGLSTASSPEPGTSDLVGSASSALKSVVAKFKSENDPNLIPENGDEEEEEDDEEEEEEEEEEEEELTESERVDYGFGLSLEAARHHENSSRGAVVGVGDESRALPDVMQGMVLSSMQHFSEAFHQVLGEKHKRGHLAEAEGHRDTCDEDSVAGESDRIDDGTVNGRGCSPGESASGGLSKKLLLGSPSSLSPFSKRIKLEKEFDLPPAAMPNTENVYSQWLAGYAASRQLKDPFLSFGDSRQSPFASSSEHSSENGSLRFSTPPGELDGGISGRSGTGSGGSTPHISGPGPGRPSSKEGRRSDTCSSHTPIRRSTQRAQDVWQFSDGSSRALKF

SEQ ID NO: 21043 - protein, 243 aa, Homo sapiens
MSRRKQGKPQHLSKREFSPEPLEAILTDDEPDHGPLGAPEGDHDLLTCGQCQMNFPLGDILIFIEHKRKQCNGSLCLEKAVDKPPSPSPIEMKKASNPVEVGIQVTPEDDDCLSTSSRGICPKQEHIADKLLHWRGLSSPRSAHGALIPTPGMSAEYAPQGICKDEPSSYTCTTCKQPFTSAWFLLQHAQNTHGLRIYLESEHGSPLTPRVLHTPPFGVVPRELKMCGSFRMEAREPLSSEKI

SEQ ID NO: 21044 - protein, 801 aa, Homo sapiens
MSRRKQGKPQHLSKREFSPEPLEAILTDDEPDHGPLGAPEGDHDLLTCGQCQMNFPLGDILIFIEHKRKQCNGSLCLEKAVDKPPSPSPIEMKKASNPVEVGIQVTPEDDDCLSTSSRGICPKQEHIAGKDEPSSYTCTTCKQPFTSAWFLLQHAQNTHGLRIYLESEHGSPLTPRVGIPSGLGAECPSQPPLHGIHIADNNPFNLLRIPGSVSREASGLAEGRFPPTPPLFSPPPRHHLDPHRIERLGAEEMALATHHPSAFDRVLRLNPMAMEPPAMDFSRRLRELAGNTSSPPLSPGRPSPMQRLLQPFQPGSKPPFLATPPLPPLQSAPPPSQPPVKSKSCEFCGKTFKFQSNLVVHRRSHTGEKPYKCNLCDHACTQASKLKRHMKTHMHKSSPMTVKSDDGLSTASSPEPGTSDLVGSASSALKSVVAKFKSENDPNLIPENGDEEEEEDDEEEEEEEEEEEEELTESERVDYGFGLSLEAARHHENSSRGAVVGVGDESRALPDVMQGMVLSSMQHFSEAFHQVLGEKHKRGHLAEAEGHRDTCDEDSVAGESDRIDDGTVNGRGCSPGESASGGLSKKLLLGSPSSLSPFSKRIKLEKEFDLPPAAMPNTENVYSQWLAGYAASRQLKDPFLSFGDSRQSPFASSSEHSSENGSLRFSTPPGELDGGISGRSGTGSGGSTPHISGPGPGRPSSKEGRRSDTCEYCGKVFKNCSNLTVHRRSHTGERPYKCELCNYACAQSSKLTRHMKTHGQVGKDVYKCEICKMPFSVYSTLEKHMKKWHSDRVLNNDIKTE

SEQ ID NO: 21045 - protein, 142 aa, Homo sapiens
MSRRKQGKPQHLSKREFSPEPLEAILTDDEPDHGPLGAPEGDHDLLTCGQCQMNFPLGDILIFIEHKRKQCNGSLCLEKAVDKPPSPSPIEMKKASNPVEVGIQVTPEDDDCLSTSSRGICPKQEHIAAQTELEDVFVYLMV

SEQ ID NO: 21046 - protein, 1158 aa, Homo sapiens
MAAVRGAPLLSCLLALLALCPGGRPQTVLTDDEIEEFLEGFLSELEPEPREDDVEAPPPPEPTPRVRKAQAGGKPGKRPGTAAEVPPEKTKDKGKKGKKDKGPKVPKESLEGSPRPPKKGKEKPPKATKKPKEKPPKATKKPKEKPPKATKKPKEKPPKATKKPPSGKRPPILAPSETLEWPLPPPPSPGPEELPQEGGAPLSNNWQNPGEETHVEAREHQPEPEEETEQPTLDYNDQIEREDYEDFEYIRRQKQPRPPPSRRRRPERVWPEPPEEKAPAPAPEERIEPPVKPLLPPLPPDYGDGYVIPNYDDMDYYFGPPPPQKPDAERQTDEEKEELKKPKKEDSSPKEETDKWAVEKGKDHKEPRKGEELEEEWTPTEKVKCPPIGMESHRIEDNQIRASSMLRHGLGAQRGRLNMQTGATEDDYYDGAWCAEDDARTQWIEVDTRRTTRFTGVITQGRDSSIHDDFVTTFFVGFSNDSQTWVMYTNGYEEMTFHGNVDKDTPVLSELPEPVVARFIRIYPLTWNGSLCMRLEVLGCSVAPVYSYYAQNEVVATDDLDFRHHSYKDMRQLMKVVNEECPTITRTYSLGKSSRGLKIYAMEISDNPGEHELGEPEFRYTAGIHGNEVLGRELLLLLMQYLCREYRDGNPRVRSLVQDTRIHLVPSLNPDGYEVAAQMGSEFGNWALGLWTEEGFDIFEDFPDLNSVLWGAEERKWVPYRVPNNNLPIPERYLSPDATVSTEVRAIIAWMEKNPFVLGANLNGGERLVSYPYDMARTPTQEQLLAAAMAAARGEDEDEVSEAQETPDHAIFRWLAISFASAHLTLTEPYRGGCQAQDYTGGMGIVNGAKWNPRTGTINDFSYLHTNCLELSFYLGCDKFPHESELPREWENNKEALLTFMEQVHRGIKGVVTDEQGIPIANATISVSGINHGVKTASGGDYWRILNPGEYRVTAHAEGYTPSAKTCNVDYDIGATQCNFILARSNWKRIREIMAMNGNRPIPHIDPSRPMTPQQRRLQQRRLQHRLRLRAQMRLRRLNATTTLGPHTVPPTLPPAPATTLSTTIEPWGLIPPTTAGWEESETETYTEVVTEFGTEVEPEFGTKVEPEFETQLEPEFETQLEPEFEEEEEEEKEEEIATGQAFPFTTVETYTVNFGDF

SEQ ID NO: 21047 - protein, 733 aa, Homo sapiens
MRKWWAPCPGSWLCSHCLGEGWALRGAGSTALRPASPQTFHGNVDKDTPVLSELPEPVVARFIRIYPLTWNGSLCMRLEVLGCSVARECGGLAGALSGGGVLGWASRHPAKDNPASLAAVYSYYAQNEVVATDDLDFRHHSYKDMRQLMKVVNEECPTITRTYSLGKSSRGLKIYAMEISDNPGEHELGEPEFRYTAGIHGNEVLGRELLLLLMQYLCREYRDGNPRVRSLVQDTRIHLVPSLNPDGYEVAAQMGSEFGNWALGLWTEEGFDIFEDFPDLNSVLWGAEERKWVPYRVPNNNLPIPERYLSPDATVSTEVRAIIAWMEKNPFVLGANLNGGERLVSYPYDMARTPTQEQLLAAAMAAARGEDEDEVSEAQETPDHAIFRWLAISFASAHLTLTEPYRGGCQAQDYTGGMGIVNGAKWNPRTGTINDFSYLHTNCLELSFYLGCDKFPHESELPREWENNKEALLTFMEQVHRGIKGVVTDEQGIPIANATISVSGINHGVKTASGGDYWRILNPGEYRVTAHAEGYTPSAKTCNVDYDIGATQCNFILARSNWKRIREIMAMNGNRPIPHIDPSRPMTPQQRRLQQRRLQHRLRLRAQMRLRRLNATTTLGPHTVPPTLPPAPATTLSTTIEPWGLIPPTTAGWEESETETYTEVVTEFGTEVEPEFGTKVEPEFETQLEPEFETQLEPEFEEEEEEEKEEEIATGQAFPFTTVETYTVNFGDF

SEQ ID NO: 21048 - protein, 389 aa, Homo sapiens
MPGVANSGPSTSSRETANPCSRKKVHFGSIHDAVRAGDVKQLSEIVCLHWLLWHGADITHVTTRGWTASHIAAIRGQDACVQALIMNGANLTAQDDRGCTPLHLAATHGHSFTLQIMLRSGVDPSVTDKREWRPVHYAAFHGRLGCLQLLVKWGCSIEDVDYNGNLPVHLAAMEGHLHCFKFLVSRMSSATQVLKAFNDNGENVLDLAQRFFKQNILQFIQGAEYEGKDLEDQETLAFPGHVAAFKGDLGMLKKLVEDGVININERADNGSTPMHKAAGQGHIECLQWLIKMGADSNITNKAGERPSDVAKRFAHLAAVKLLEELQKYDIDDENEIDENDVKYFIRHGVEGSTDAKDDLCLSDLDKTDARRPSKNCRASWSMNDYVEKN

SEQ ID NO: 21049 - protein, 198 aa, Homo sapiens
MPGVANSGPSTSSRETANPCSRKKVHFGSIHDAVRAGDVKQLSEIVVRGASINELDVLHKFTPLHWAAHSGSLECLHWLLWHGADITHVTTRGWTASHIAAIRGQDACVQALIMNGANLTAQDDRGCTPLHLAATHGHSFTLQIMLRSGVDPSVTDKREWRPVHYAAFHGRLGCLQLLVKWGCSIEDVDYNGNLPEPP

SEQ ID NO: 21050 - protein, 763 aa, Homo sapiens
MAATGTAAAAATGRLLLLLLVGLTAPALALAGYIEALAANAGTGFAVAEPQIAMFCGKLNMHVNIQTGKWEPDPTGTKSCFETKEEVLQYCQEMYPELQITNVMEANQRVSIDNWCRRDKKQCKSRFVTPFKCLVGEFVSDVLLVPEKCQFFHKERMEVCENHQHWHTVVKEACLTQGMTLYSYGMLLPCGVDQFHGTEYVCCPQTKIIGSVSKEEEEEDEEEEEEEDEEEDYDVYKSEFPTEADLEDFTEAAVDEDDEDEEEGEEVVEDRDYYYDTFKGDDYNEENPTEPGSDGTMSDKEITHDVKAVCSQEAMTGPCRAVMPRWYFDLSKGKCVRFIYGGCGGNRNNFESEDYCMAVCKAMIPPTPLPTNDVDVYFETSADDNEHARFQKAKEQLEIRHRNRMDRVKKEWEEAELQAKNLPKAERQTLIQHFQAMVKALEKEAASEKQQLVETHLARVEAMLNDRRRMALENYLAALQSDPPRPHRILQALRRYVRAENKDRLHTIRHYQHVLAVDPEKAAQMKSQVMTHLHVIEERRNQSLSLLYKVPYVAQEIQEEIDELLQEQRADMDQFTASISETPVDVRVSSEESEEIPPFHPFHPFPALPENEDTQPELYHPMKKGSGVGEQDGGLIGAEEKVINSKNKVDENMVIDETLDVKEMIFNAERVGGLEEERESVGPLREDFSLSSSALIGLLVIAVAIATVIVISLVMLRKRQYGTISHGIVEVDPMLTPEERHLNKMQNHGYENPTYKYLEQMQI

SEQ ID NO: 21051 - protein, 707 aa, Homo sapiens
MAATGTAAAAATGRLLLLLLVGLTAPALALAGYIEALAANAGTGFAVAEPQIAMFCGKLNMHVNIQTGKWEPDPTGTKSCFETKEEVLQYCQEMYPELQITNVMEANQRVSIDNWCRRDKKQCKSRFVTPFKCLVGEFVSDVLLVPEKCQFFHKERMEVCENHQHWHTVVKEACLTQGMTLYSYGMLLPCGVDQFHGTEYVCCPQTKIIGSVSKEEEEEDEEEEEEEDEEEDYDVYKSEFPTEADLEDFTEAAVDEDDEDEEEGEEVVEDRDYYYDTFKGDDYNEENPTEPGSDGTMSDKEITHDVKIPPTPLPTNDVDVYFETSADDNEHARFQKAKEQLEIRHRNRMDRVKKEWEEAELQAKNLPKAERQTLIQHFQAMVKALEKEAASEKQQLVETHLARVEAMLNDRRRMALENYLAALQSDPPRPHRILQALRRYVRAENKDRLHTIRHYQHVLAVDPEKAAQMKSQVMTHLHVIEERRNQSLSLLYKVPYVAQEIQEEIDELLQEQRADMDQFTASISETPVDVRVSSEESEEIPPFHPFHPFPALPENEDTQPELYHPMKKGSGVGEQDGGLIGAEEKVINSKNKVDENMVIDETLDVKEMIFNAERVGGLEEERESVGPLREDFSLSSSALIGLLVIAVAIATVIVISLVMLRKRQYGTISHGIVEVDPMLTPEERHLNKMQNHGYENPTYKYLEQMQI

SEQ ID NO: 21052 - protein, 751 aa, Homo sapiens
MAATGTAAAAATGRLLLLLLVGLTAPALALAGYIEALAANAGTGFAVAEPQIAMFCGKLNMHVNIQTGKWEPDPTGTKSCFETKEEVLQYCQEMYPELQITNVMEANQRVSIDNWCRRDKKQCKSRFVTPFKCLVGEFVSDVLLVPEKCQFFHKERMEVCENHQHWHTVVKEACLTQGMTLYSYGMLLPCGVDQFHGTEYVCCPQTKIIGSVSKEEEEEDEEEEEEEDEEEDYDVYKSEFPTEADLEDFTEAAVDEDDEDEEEGEEVVEDRDYYYDTFKGDDYNEENPTEPGSDGTMSDKEITHDVKAVCSQEAMTGPCRAVMPRWYFDLSKGKCVRFIYGGCGGNRNNFESEDYCMAVCKAMIPPTPLPTNDVDVYFETSADDNEHARFQKAKEQLEIRHRNRMDRVKKEWEEAELQAKNLPKAERQTLIQHFQAMVKALEKEAASEKQQLVETHLARVEAMLNDRRRMALENYLAALQSDPPRPHRILQALRRYVRAENKDRLHTIRHYQHVLAVDPEKAAQMKSQVMTHLHVIEERRNQSLSLLYKVPYVAQEIQEEIDELLQEQRADMDQFTASISETPVDVRVSSEESEEIPPFHPFHPFPALPENEGSGVGEQDGGLIGAEEKVINSKNKVDENMVIDETLDVKEMIFNAERVGGLEEERESVGPLREDFSLSSSALIGLLVIAVAIATVIVISLVMLRKRQYGTISHGIVEVDPMLTPEERHLNKMQNHGYENPTYKYLEQMQI

SEQ ID NO: 21053 - protein, 695 aa, Homo sapiens
MAATGTAAAAATGRLLLLLLVGLTAPALALAGYIEALAANAGTGFAVAEPQIAMFCGKLNMHVNIQTGKWEPDPTGTKSCFETKEEVLQYCQEMYPELQITNVMEANQRVSIDNWCRRDKKQCKSRFVTPFKCLVGEFVSDVLLVPEKCQFFHKERMEVCENHQHWHTVVKEACLTQGMTLYSYGMLLPCGVDQFHGTEYVCCPQTKIIGSVSKEEEEEDEEEEEEEDEEEDYDVYKSEFPTEADLEDFTEAAVDEDDEDEEEGEEVVEDRDYYYDTFKGDDYNEENPTEPGSDGTMSDKEITHDVKVPPTPLPTNDVDVYFETSADDNEHARFQKAKEQLEIRHRNRMDRVKKEWEEAELQAKNLPKAERQTLIQHFQAMVKALEKEAASEKQQLVETHLARVEAMLNDRRRMALENYLAALQSDPPRPHRILQALRRYVRAENKDRLHTIRHYQHVLAVDPEKAAQMKSQVMTHLHVIEERRNQSLSLLYKVPYVAQEIQEEIDELLQEQRADMDQFTASISETPVDVRVSSEESEEIPPFHPFHPFPALPENEGSGVGEQDGGLIGAEEKVINSKNKVDENMVIDETLDVKEMIFNAERVGGLEEERESVGPLREDFSLSSSALIGLLVIAVAIATVIVISLVMLRKRQYGTISHGIVEVDPMLTPEERHLNKMQNHGYENPTYKYLEQMQI

SEQ ID NO: 21054 - protein, 522 aa, Homo sapiens
MAATGTAAAAATGRLLLLLLVGLTAPALALAGYIEALAANAGTGFAVAEPQIAMFCGKLNMHVNIQTGKWEPDPTGTKSCFETKEEVLQYCQEMYPELQITNVMEANQRVSIDNWCRRDKKQCKSRFVTPFKCLVPPTPLPTNDVDVYFETSADDNEHARFQKAKEQLEIRHRNRMDRVKKEWEEAELQAKNLPKAERQTLIQHFQAMVKALEKEAASEKQQLVETHLARVEAMLNDRRRMALENYLAALQSDPPRPHRILQALRRYVRAENKDRLHTIRHYQHVLAVDPEKAAQMKSQVMTHLHVIEERRNQSLSLLYKVPYVAQEIQEEIDELLQEQRADMDQFTASISETPVDVRVSSEESEEIPPFHPFHPFPALPENEGSGVGEQDGGLIGAEEKVINSKNKVDENMVIDETLDVKEMIFNAERVGGLEEERESVGPLREDFSLSSSALIGLLVIAVAIATVIVISLVMLRKRQYGTISHGIVEVDPMLTPEERHLNKMQNHGYENPTYKYLEQMQI

SEQ ID NO: 21055 - protein, 761 aa, Homo sapiens
MLRAPGELPRQAARCSLCRLGPGRGRAFFKWRCLPASVDRGNPLWALAANAGTGFAVAEPQIAMFCGKLNMHVNIQTGKWEPDPTGTKSCFETKEEVLQYCQEMYPELQITNVMEANQRVSIDNWCRRDKKQCKSRFVTPFKCLVGEFVSDVLLVPEKCQFFHKERMEVCENHQHWHTVVKEACLTQGMTLYSYGMLLPCGVDQFHGTEYVCCPQTKIIGSVSKEEEEEDEEEEEEEDEEEDYDVYKSEFPTEADLEDFTEAAVDEDDEDEEEGEEVVEDRDYYYDTFKGDDYNEENPTEPGSDGTMSDKEITHDVKAVCSQEAMTGPCRAVMPRWYFDLSKGKCVRFIYGGCGGNRNNFESEDYCMAVCKAMIPPTPLPTNDVDVYFETSADDNEHARFQKAKEQLEIRHRNRMDRVKKEWEEAELQAKNLPKAERQTLIQHFQAMVKALEKEAASEKQQLVETHLARVEAMLNDRRRMALENYLAALQSDPPRPHRILQALRRYVRAENKDRLHTIRHYQHVLAVDPEKAAQMKSQVMTHLHVIEERRNQSLSLLYKVPYVAQEIQEEIDELLQEQRADMDQFTASISETPVDVRVSSEESEEIPPFHPFHPFPALPENEGSGVGEQDGGLIGAEEKVINSKNKVDENMVIDETLDVKEMIFNAERVGGLEEERESVGPLREDFSLSSSALIGLLVIAVAIATVIVISLVMLRKRQYGTISHGIVEVDPMLTPEERHLNKMQNHGYENPTYKYLEQMQI

SEQ ID NO: 21056 - protein, 1134 aa, Homo sapiens
MGKEQELLEAARTGHLPAVEKLLSGKRLSSGFGGGGGGGSGGGGGGSGGGGGGLGSSSHPLSSLLSMWRGPNVNCVDSTGYTPLHHAALNGHKDVVEVLLRNDALTNVADSKGCYPLHLAAWKGDAQIVRLLIHQGPSHTRVNEQNNDNETALHCAAQYGHTEVVKVLLEELTDPTMRNNKFETPLDLAALYGRLEVVKMLLNAHPNLLSCNTKKHTPLHLAARNGHKAVVQVLLDAGMDSNYQTEMGSALHEAALFGKTDVVQILLAAGTDVNIKDNHGLTALDTVRELPSQKSQQIAALIEDHMTGKRSTKEVDKTPPPQPPLISSMDSISQKSQGDVEKAVTELIIDFDANAEEEGPYEALYNAISCHSLDSMASGRSSDQDSTNKEAEAAGVKPAGVRPRERPPPPAKPPPDEEEEDHIDKKYFPLTASEVLSMRPRIHGSAAREEDEHPYELLLTAETKKVVLVDGKTKDHRRSSSSRSQDSAEGQDGQVPEQFSGLLHGSSPVCEVGQDPFQLLCTAGQSHPDGSPQQGACHKASMQLEETGVHAPGASQPSALDQSKRVGYLTGLPTTNSRSHPETLTHTASPHPGGAEEGDRSGARSRAPPTSKPKAELKLSRSLSKSDSDLLTCSPTEDATMGSRSESLSNCSIGKKRLEKSPSFASEWDEIEKIMSSIGEGIDFSQERQKISGLRTLEQSVGEWLESIGLQQYESKLLLNGFDDVHFLGSNVMEEQDLRDIGISDPQHRRKLLQAARSLPKVKALGYDGNSPPSVPSWLDSLGLQDYVHSFLSSGYSSIDTVKNLWELELVNVLKVQLLGHRKRIIASLADRPYEEPPQKPPRFSQLRCQDLLSQTSSPLSQNDSCTGRSADLLLPPGDTGRRRHDSLHDPAAPSRAERFRIQEEHREAKLTLRPPSLAAPYAPVQSWQHQPEKLIFESCGYEANYLGSMLIKDLRGTESTQDACAKMRKSTEHMKKIPTIILSITYKGVKFIDASNKNVIAEHEIRNISCAAQDPEDLCTFAYITKDLQTSHHYCHVFSTVDVNLTYEIILTLGQAFEVAYQLALQAQKSRATGASAAEMIETKSSKPVPKPRVGVRKSALEPPDMDQDAQSHASVSWVVDPKPDSKRSLSTN

SEQ ID NO: 21057 - protein, 320 aa, Homo sapiens
MGKEQELLEAARTGHLPAVEKLLSGKRLSSGFGGGGGGGSGGGGGGSGGGGGGLGSSSHPLSSLLSMWRGPNVNCVDSTGYTPLHHAALNGHKDVVEVLLRNDALTNVADSKGCYPLHLAAWKGDAQIVRLLIHQGPSHTRVNEQNNDNETALHCAAQYGHTEVVKVLLEELTDPTMRNNKFETPLDLAALYGRLEVVKMLLNAHPNLLSCNTKKHTPLHLAARNGHKAVVQVLLDAGMDSNYQTEMGSALHEAALFGKTDVVQILLAAGTDVNIKDNHGLTALDTVRELPSQKSQQIAALIEDLDTLQFYFISCPFQGL

SEQ ID NO: 21058 - protein, 802 aa, Homo sapiens
MPRIMIKGGVWRNTEDEILKAAVMKYGKNQWSRIASLLHRKSAKQCKARWYEWLDPSIKKTEWSREEEEKLLHLAKLMPTQWRTIAPIIGRTAAQCLEHYEFLLDKAAQRDNEEETTDDPRKLKPGEIDPNPETKPARPDPIDMDEDELEMLSEARARLANTQGKKAKRKAREKQLEEARRLAALQKRRELRAAGIEIQKKRKRKRGVDYNAEIPFEKKPALGFYDTSEENYQALDADFRKLRQQDLDGELRSEKEGRDRKKDKQHLKRKKESDLPSAILQTSGVSEFTKKRSKLVLPAPQISDAELQEVVKVGQASEIARQTAEESGITNSASSTLLSEYNVTNNSVALRTPRTPASQDRILQEAQNLMALTNVDTPLKGGLNTPLHESDFSGVTPQRQVVQTPNTVLSTPFRTPSNGAEGLTPRSGTTPKPVINSTPGRTPLRDKLNINPEDGMADYSDPSYVKQMERESREHLRLGLLGLPAPKNDFEIVLPENAEKELEEREIDDTYIEDAADVDARKQAIRDAERVKEMKRMHKAVQKDLPRPSEVNETILRPLNVEPPLTDLQKSEELIKKEMITMLHYDLLHHPYEPSGNKKGKTVGFGTNNSEHITYLEHNPYEKFSKEELKKAQDVLVQEMEVVKQGMSHGELSSEAYNQVWEECYSQVLYLPGQSRYTRANLASKKDRIESLEKRLEINRGHMTTEAKRAAKMEKKMKILLGGYQSRAMGLMKQLNDLWDQIEQAHLELRTFEELKKHEDSAIPRRLECLKEDVQRQQEREKELQHRYADLLLEKETLKSKF

SEQ ID NO: 21059 - protein, 300 aa, Homo sapiens
MAAAAGDADDEPRSGHSSSEGECAVAPEPLTDAEGLFSFADFGSALGGGGAGLSGRASGGAQSPLRYLHVLWQQDAEPRDELRCKIPAGRLRRAARPHRRLGPTGKEVHALKRLRDSANANDVETVQQLLEDGADPCAADDKGRTALHFASCNGNDQIVQLLLDHGADPNQRDGLGNTPLHLAACTNHVPVITTLLRGGARVDALDRAGRTPLHLAKSKLNILQEGHAQCLEAVRLEVKQIIHMLREYLERLGQHEQRERLDDLCTRLQMTSTKEQVDEVTDLLASFTSLSLQMQSMEKR

SEQ ID NO: 21060 - protein, 161 aa, Homo sapiens
MVLILTSEMGWGTRHCTWRPAPTTFLSSPHCYEEVCGFFPSLSSFSPSPPECSPQLVPAGARVDALDRAGRTPLHLAKSKLNILQEGHAQCLEAVRLEVKQIIHMLREYLERLGQHEQRERLDDLCTRLQMTSTKEQVDEVTDLLASFTSLSLQMQSMEKR

SEQ ID NO: 21061 - protein, 1097 aa, Homo sapiens
MDFLRLYLPGLHQALRGALDSLGTFVSYLLGDAVPTVEREAQAAEELGVVAVGKTGKIVEEEAQEDLEGLRGSQNEGAGRLRGPGDDRRHEVGSSAVEQTWGWGDGSSHGSQAERQDSGAGETAKAARCQEPSAHLEARKKSKAGSGACQDRSGQAQERQESHEQEVNREERLRSWEQEEEEEEVRAREPGMARGAESEWTWHGETEGKAGAVGPKAAGDNREMEQGVREADAGETEEPGAEGAGKGEEVVVVEKACESTRAWGTWGPGAEPEDWGILGREEARTTPGREEARAILDGEEARTISGGEEAETASGGEEAETASGGEEAGTASGGEEAGIASGGEAGTASGGEEAGTASGGEEAGTASGGDEAWTTSGKEEADLLGVRQTEYGAVPGERLLEATGKVWVLEEEGDEEREAEVSPFPKQPQVLGTERTEEAAESQTAGREAVGGQEAGESFEGQVDLRGKEAEMRQDLGIRADRARMEELVQAEEAQEERGSSRDPVAELPSDGEAEGTADLEATPEARPEEELTGEESEAAQTSCGLLGVEWGGLTHSVTKGQGPELMGGAQTPTKQPEEREAGEVELMGVLALSKEEQERSLEAGPRHAGSVKPEASEAFPGAWENRTRKDMERGNTQEDAADGEQREEEETAGGQTLAAEAEGDRESELSEVPEAGGEGLTTQDAGCGTEEGEASVSENQELDGSTGADAGPCPSLGEAYARETEDEEAEADRTSRRGWRLQAVAVGLPDREDAQTGSVAAGIMGGDVVPHISAAGAGEALEGVLGQGWDSKEKEEAAAGEHAGGQEFGLEGSAEEEVTGRGSQVEAFESREGGPWGGRVEAEESAGAEDSCGLDPAGSQTARAEGMGAMVEAGGLLEKWTLLEEEAVGWQEREQREDSEGRCGDYHPEGEAPRLLDAEGLMVTGGRRAEAKETEPESLEHVRGQEEQPTHQAPAEAAPESVGEAETAEAMGSARGGAANSWSEAPLPGSLLDVSVPRSRVHLSRSSSQRRSRPSFRRTPAWEQQEEPPAPNPPEEELSAPEQRPLQLEEPLEPSPLRHDGTPVPARRRPLGHGFGLAHPGMMQELQARLGRPKPQ

SEQ ID NO: 21062 - protein, 626 aa, Homo sapiens
MRQDLGIRADRARMEELVQAEEAQEERGSSRDPVAELPSDGEAEGTADLEATPEARPEEELTGEESEAAQTSCGLLGVEWGGLTHSVTKGQGPELMGGAQTPTKQPEEREAGEVELMGVLALSKEEQERSLEAGPRHAGSVKPEASEAFPGAWENRTRKDMERGNTQEDAADGEQREEEETAGGQTLAAEAEGDRESELSEVPEAGGEGLTTQDAGCGTEEGEASVSENQELDGSTGADAGPCPSLGEAYARETEDEEAEADRTSRRGWRLQAVAVGLPDREDAQTGSVAAGIMGGDVVPHISAAGAGEALEGVLGQGWDSKEKEEAAAGEHAGGQEFGLEGSAEEEVTGRGSQVEAFESREGGPWGGRVEAEESAGAEDSCGLDPAGSQTARAEGMGAMVEAGGLLEKWTLLEEEAVGWQEREQREDSEGRCGDYHPEGEAPRLLDAEGLMVTGGRRAEAKETEPESLEHVRGQEEQPTHQAPAEAAPESVGEAETAEAMGSARGGAANSWSEAPLPGSLLDVSVPRSRVHLSRSSSQRRSRPSFRRTPAWEQQEEPPAPNPPEEELSAPEQRPLQLEEPLEPSPLRHDGTPVPARRRPLGHGFGLAHPGMMQELQARLGRPKPQ

SEQ ID NO: 21063 - protein, 1078 aa, Homo sapiens
MDFLRLYLPGLHQALRGALDSLGTFVSYLLGDAVPTVEREAQAAEELGVVAVGKTGKIVEEEAQEDLEGLRGSQNEGAGRLRGPGDDRRHEVGSSAVEQTWGWGDGSSHGSQAERQDSGAGETAKAARCQEPSAHLEARKKSKAGSGACQDRSGQAQERQESHEQEVNREERLRSWEQEEEEEEVRAREPGMARGAESEWTWHGETEGKAGAVGPKAAGDNREMEQGVREADAGETEEPGAEGAGKGEEVVVVEKACESTRAWGTWGPGAEPEDWGILGREEARTTPGREEARAILDGEEARTISGGEEAETASGGEEAETASGGEEAGTASGGEEAGIASGGEAGTASGGEEAGTASGGEEAGTASGGDEAWTTSGKEEADLLGVRQTEYGAVPGERLLEATGKVWVLEEEGDEEREAEVSPFPKQPQVLGTERTEEAAESQTAGREAVGGQEAGESFEGQVDLRGKEAEMRQDLGIRADRARMEELVQAEEAQEERGSSRDPVAELPSDGEAEGTADLEATPEARPEEELTGEESEAAQTSCGLLGVEWGGLTHSVTKGQGPELMGGAQTPTKQPEEREAGEVELMGVLALSKEEQERSLEAGPRHAGSVKPEASEAFPGAWENRTRKDMERGNTQEDAADGEQREEEETAGGQTLAAEAEGDRESELSEVPEAGGEGLTTQDAGCGTEEGEASVSENQELDGSTGADAGPCPSLGEAYARETEDEEAEADRTSRRGWRLQAVAVGLPDREDAQTGSVAAGIMGGDVVPHISAAGAGEALEGVLGQGWDSKEKEEAAAGEHAGGQEFGLEGSAEEEVTGRGSQVEAFESREGGPWGGRVEAEESAGAEDSCGLDPAGSQTARAEGMGAMVEAGGLLEKWTLLEEEAVGWQEREQREDSEGRCGDYHPEGEAPRLLDAEGLMVTGGRRAEAKETEPESLEHVRGQEEQPTHQAPAEAAPESVGEAETAEAMGSARGGAANSWSEAPLPGSLLDVSVPRSRVHLSRSSSQRRSRPSFRRTPAWEQQEEPPAPNPPEEELSAPEQRPLQLEEPLEPRWEDRLRPGVRDQPGQHSKIPIF

SEQ ID NO: 21064 - protein, 83 aa, Homo sapiens
MRLFLSLPVLVVVLSIVLEGPAPAQGTPDVSSALDKLKEFGNTLEDKARELISRIKQSELSAKMREWFSETFQKVKEKLKIDS

SEQ ID NO: 21065 - protein, 320 aa, Homo sapiens
MAQVLRGTVTDFPGFDERADAETLRKAMKGLGTDEESILTLLTSRSNAQRQEISAAFKTLFGRDLLDDLKSELTGKFEKLIVALMKPSRLYDAYELKHALKGAGTNEKVLTEIIASRTPEELRAIKQVYEEEYGSSLEDDVVGDTSGYYQRMLVVLLQANRDPDAGIDEAQVEQDAQALFQAGELKWGTDEEKFITIFGTRSVSHLRKVFDKYMTISGFQIEETIDRETSGNLEQLLLAVVKSIRSIPAYLAETLYYAMKGAGTDDHTLIRVMVSRSEIDLFNIRKEFRKNFATSLYSMIKGDTSGDYKKALLLLCGEDD

SEQ ID NO: 21066 - protein, 505 aa, Homo sapiens
MSYPGYPPPPGGYPPAAPGGGPWGGAAYPPPPSMPPIGLDNVATYAGQFNQDYLSGMAANMSGTFGGANMPNLYPGAPGAGYPPVPPGGFGQPPSAQQPVPPYGMYPPPGGNPPSRMPSYPPYPGAPVPGQPMPPPGQQPPGAYPGQPPVTYPGQPPVPLPGQQQPVPSYPGYPGSGTVTPAVPPTQFGSRGTITDAPGFDPLRDAEVLRKAMKGFGTDEQAIIDCLGSRSNKQRQQILLSFKTAYGKDLIKDLKSELSGNFEKTILALMKTPVLFDIYEIKEAIKGVGTDEACLIEILASRSNEHIRELNRAYKAEFKKTLEEAIRSDTSGHFQRLLISLSQGNRDESTNVDMSLAQRDAQELYAAGENRLGTDESKFNAVLCSRSRAHLVAVFNEYQRMTGRDIEKSICREMSGDLEEGMLAVVKCLKNTPAFFAERLNKAMRGAGTKDRTLIRIMVSRSETDLLDIRSEYKRMYGKSLYHDISGDTSGDYRKILLKICGGND

SEQ ID NO: 21067 - protein, 472 aa, Homo sapiens
MPPIGLDNVATYAGQFNQDYLSGMAANMSGTFGGANMPNLYPGAPGAGYPPVPPGGFGQPPSAQQPVPPYGMYPPPGGNPPSRMPSYPPYPGAPVPGQPMPPPGQQPPGAYPGQPPVTYPGQPPVPLPGQQQPVPSYPGYPGSGTVTPAVPPTQFGSRGTITDAPGFDPLRDAEVLRKAMKGFGTDEQAIIDCLGSRSNKQRQQILLSFKTAYGKDLIKDLKSELSGNFEKTILALMKTPVLFDIYEIKEAIKGVGTDEACLIEILASRSNEHIRELNRAYKAEFKKTLEEAIRSDTSGHFQRLLISLSQGNRDESTNVDMSLAQRDAQELYAAGENRLGTDESKFNAVLCSRSRAHLVAVFNEYQRMTGRDIEKSICREMSGDLEEGMLAVVKCLKNTPAFFAERLNKAMRGAGTKDRTLIRIMVSRSETDLLDIRSEYKRMYGKSLYHDISGDTSGDYRKILLKICGGND

SEQ ID NO: 21068 - protein, 503 aa, Homo sapiens
MLSQLAMLQGSLLLVVATMSVAQQTRQEADRGCETLVVQHGHCSYTFLLPKSEPCPPGPEVSRDSNTLQRESLANPLHLGKLPTQQVKQLEQALQNNTQWLKKLERAIKTILRSKLEQVQQQMAQNQTAPMLELGTSLLNQTTAQIRKLTDMEAQLLNQTSRMDAQMPETFLSTNKLENQLLLQRQKLQQLQGQNSALEKRLQALETKQQEELASILSKKAKLLNTLSRQSAALTNIERGLRGVRHNSSLLQDQQHSLRQLLVLLRHLVQERANASAPAFIMAGEQVFQDCAEIQRSGASASGVYTIQVSNATKPRKVFCDLQSSGGRWTLIQRRENGTVNFQRNWKDYKQGFGDPAGEHWLGNEVVHQLTRRAAYSLRVELQDWEGHEAYAQYEHFHLGSENQLYRLSVVGYSGSAGRQSSLVLQNTSFSTLDSDNDHCLCKCAQVMSGGWWFDACGLSNLNGVYYHAPDNKYKMDGIRWHYFKGPSYSLRASRMMIRPLDI

SEQ ID NO: 21069 - protein, 410 aa, Homo sapiens
MLSQLAMLQGSLLLVVATMSVAQQTRQEADRGCETLVVQHGHCSYTFLLPKSEPCPPGPEVSRDSNTLQRESLANPLHLGKLPTQQVKQLEQALQNNTQWLKKLERAIKTILRSKLEQVQQQMAQNQTAPMLELGTSLLNQTTAQIRKLTDMEAQLLNQTSRMDAQMPETFLSTNKLENQLLLQRQKLQQLQGQNSALEKRLQALETKQQEELASILSKKAKLLNTLSRQSAALTNIERGLRGVRHNSSLLQDQQHSLRQLLVLLRHLVQERANASAPAFIMAGEQVFQDCAEIQRSGASASGVYTIQVSNATKPRKVFCDLQSSGGRWTLIQRRENGTVNFQRNWKDYKQGFGDPAGEHWLGNEVVHQLTRRAAYSLRVELQDWEGHEAYAQYEHFHLGSENQLYRVVV

SEQ ID NO: 21070 - protein, 756 aa, Homo sapiens
MSPQKRVKNVQAQNRTSQGSSSFQTTLSAWKVKQDPSNSKNISKHGQNNPVGDYEHADDQAEEDALQMAVGYFEKGPIKASQNKDKTLEKHLKTVENVAWKNGLASEEIDILLNIALSGKFGNAVNTRILKCMIPATVISEDSVVKAVSWLCVGKCSGSTKVLFYRWLVAMFDFIDRKEQINLLYGFFFASLQDDALCPYVCHLLYLLTKKENVKPFRVRKLLDLQAKMGMQPHLQALLSLYKFFAPALISVSLPVRKKIYFKNSENLWKTALLAVKQRNRGPSPEPLKLMLGPANVRPLKRKWNSLSVIPVLNSSSYTKECGKKEMSLSDCLNRSGSFPLEQLQSFPQLLQNIHCLELPSQMGSVLNNSLLLHYINCVRDEPVLLRFYYWLSQTLQEECIWYKVNNYEHGKEFTNFLDTIIRAECFLQEGFYSCEAFLYKSLPLWDGLCCRSQFLQLVSWIPFSSFSEVKPLLFDHLAQLFFTSTIYFKCSVLQSLKELLQNWLLWLSMDIHMKPVTNSPLETTLGGSMNSVSKLIHYVGWLSTTAMRLESNNTFLLHFILDFYEKVCDIYINYNLPLVVLFPPGIFYSALLSLDTSILNQLCFIMHRYRKNLTAAKKNELVQKTKSEFNFSSKTYQEFNHYLTSMVGCLWTSKPFGKGIYIDPEILEKTGVAEYKNSLNVVHHPSFLSYAVSFLLQESPEERTVNVSSIRGKKWSWYLDYLFSQGLQGLKLFIRSSVHHSSIPRAEGINCNNQY

SEQ ID NO: 21071 - protein, 522 aa, Homo sapiens
MSPQKRVKNVQAQNRTSQGSSSFQTTLSAWKVKQDPSNSKNISKHGQNNPVGDYEHADDQAEEDALQMAVGYFEKGPIKASQNKDKTLEKHLKTVENVAWKNGLASEEIDILLNIALSGKFGNAVNTRILKCMIPATVISEDSVVKAVSWLCVGKCSGSTKVLFYRWLVAMFDFIDRKEQINLLYGFFFASLQDDALCPYVCHLLYLLTKKENVKPFRVRKLLDLQAKMGMQPHLQALLSLYKFFAPALISVSLPVRKKIYFKNSENLWKTALLAVKQRNRGPSPEPLKLMLGPANVRPLKRKWNSLSVIPVLNSSSYTKECGKKEMSLSDCLNRSGSFPLEQLQSFPQLLQNIHCLELPSQMGSVLNNSLLLHYINCVRDEPVLLRFYYWLSQTLQEECIWYKVNNYEHGKEFTNFLDTIIRAECFLQEGFYSCEAFLYKSLPLWDGLCCRSQFLQLVSWIPFSSFSEVKPLLFDHLAQLFFTSTIYFKCSVLQSLKELLQNWLLWLSMDIHMKPVTNSPL

SEQ ID NO: 21072 - protein, 460 aa, Homo sapiens
MFTIKLLLFIVPLVISSRIDQDNSSFDSLSPEPKSRFAMLDDVKILANGLLQLGHGLKDFVHKTKGQINDIFQKLNIFDQSFYDLSLQTSEIKEEEKELRRTTYKLQVKNEEVKNMSLELNSKLESLLEEKILLQQKVKYLEEQLTNLIQNQPETPEHPEVTSLKTFVEKQDNSIKDLLQTVEDQYKQLNQQHSQIKEIENQLRRTSIQEPTEISLSSKPRAPRTTPFLQLNEIRNVKHDGIPAECTTIYNRGEHTSGMYAIRPSNSQVFHVYCDVISGSPWTLIQHRIDGSQNFNETWENYKYGFGRLDGEFWLGLEKIYSIVKQSNYVLRIELEDWKDNKHYIEYSFYLGNHETNYTLHLVAITGNVPNAIPENKDLVFSTWDHKAKGHFNCPEGYSGGWWWHDECGENNLNGKYNKPRAKSKPERRRGLSWKSQNGRLYSIKSTKMLIHPTDSESFE

SEQ ID NO: 21073 - protein, 406 aa, Homo sapiens
MSGAPTAGAALMLCAATAVLLSAQGGPVQSKSPRFASWDEMNVLAHGLLQLGQGLREHAERTRSQLSALERRLSACGSACQGTEGSTDLPLAPESRVDPEVLHSLQTQLKAQNSRIQQLFHKVAQQQRHLEKQHLRIQHLQSQFGLLDHKHLDHEVAKPARRKRLPEMAQPVDPAHNVSRLHRLPRDCQELFQVGERQSGLFEIQPQGSPPFLVNCKMTSDGGWTVIQRRHDGSVDFNRPWEAYKAGFGDPHGEFWLGLEKVHSITGDRNSRLAVQLRDWDGNAELLQFSVHLGGEDTAYSLQLTAPVAGQLGATTVPPSGLSVPFSTWDQDHDLRRDKNCAKSLSGGWWFGTCSHSNLNGQYFRSIPQQRQKLKKGIFWKTWRGRYYPLQATTMLIQPMAAEAAS

SEQ ID NO: 21074 - protein, 368 aa, Homo sapiens
MSGAPTAGAALMLCAATAVLLSAQGGPVQSKSPRFASWDEMNVLAHGLLQLGQGLREHAERTRSQLSALERRLSACGSACQGTEGSTDLPLAPESRVDPEVLHSLQTQLKAQNSRIQQLFHKVAQQQRHLEKQHLRIQHLQSQFGLLDHKHLDHEVAKPARRKRLPEMAQPVDPAHNVSRLHHGGWTVIQRRHDGSVDFNRPWEAYKAGFGDPHGEFWLGLEKVHSITGDRNSRLAVQLRDWDGNAELLQFSVHLGGEDTAYSLQLTAPVAGQLGATTVPPSGLSVPFSTWDQDHDLRRDKNCAKSLSGGWWFGTCSHSNLNGQYFRSIPQQRQKLKKGIFWKTWRGRYYPLQATTMLIQPMAAEAAS

SEQ ID NO: 21075 - protein, 239 aa, Homo sapiens
MAQPVDPAHNVSRLHRLPRDCQELFQVGERQSGLFEIQPQGSPPFLVNCKMTSDGGWTVIQRRHDGSVDFNRPWEAYKAGFGDPHGEFWLGLEKVHSITGDRNSRLAVQLRDWDGNAELLQFSVHLGGEDTAYSLQLTAPVAGQLGATTVPPSGLSVPFSTWDQDHDLRRDKNCAKSLSGGWWFGTCSHSNLNGQYFRSIPQQRQKLKKGIFWKTWRGRYYPLQATTMLIQPMAAEAAS

SEQ ID NO: 21076 - protein, 999 aa, Homo sapiens
MEAAHLLPAADVLRHFSVTAEGGLSPAQVTGARERYGPNELPSEEGKSLWELVLEQFEDLLVRILLLAALVSFVLAWFEEGEETTTAFVEPLVIMLILVANAIVGVWQERNAESAIEALKEYEPEMGKVIRSDRKGVQRIRARDIVPGDIVEVAVGDKVPADLRLIEIKSTTLRVDQSILTGESVSVTKHTEAIPDPRAVNQDKKNMLFSGTNITSGKAVGVAVATGLHTELGKIRSQMAAVEPERTPLQRKLDEFGRQLSHAISVICVAVWVINIGHFADPAHGGSWLRGAVYYFKIAVALAVAAIPEGLPAVITTCLALGTRRMARKNAIVRSLPSVETLGCTSVICSDKTGTLTTNQMSVCRMFVVAEADAGSCLLHEFTISGTTYTPEGEVRQGDQPVRCGQFDGLVELATICALCNDSALDYNEAKGVYEKVGEATETALTCLVEKMNVFDTDLQALSRVERAGACNTVIKQLMRKEFTLEFSRDRKSMSVYCTPTRPHPTGQGSKMFVKGAPESVIERCSSVRVGSRTAPLTPTSREQILAKIRDWGSGSDTLRCLALATRDAPPRKEDMELDDCSKFVQYETDLTFVGCVGMLDPPRPEVAACITRCYQAGIRVVMITGDNKGTAVAICRRLGIFGDTEDVAGKAYTGREFDDLSPEQQRQACRTARCFARVEPAHKSRIVENLQSFNEITAMTGDGVNDAPALKKAEIGIAMGSGTAVAKSAAEMVLSDDNFASIVAAVEEGRAIYSNMKQFIRYLISSNVGEVVCIFLTAILGLPEALIPVQLLWVNLVTDGLPATALGFNPPDLDIMEKLPRSPREALISGWLFFRYLAIGVYVGLATVAAATWWFVYDAEGPHINFYQLRNFLKCSEDNPLFAGIDCEVFESRFPTTMALSVLVTIEMCNALNSVSENQSLLRMPPWMNPWLLVAVAMSMALHFLILLVPPLPLIFQVTPLSGRQWVVVLQISLPVILLDEALKYLSRNHMHEEMSQK

SEQ ID NO: 21077 - protein, 1043 aa, Homo sapiens
MEAAHLLPAADVLRHFSVTAEGGLSPAQVTGARERYGPNELPSEEGKSLWELVLEQFEDLLVRILLLAALVSFVLAWFEEGEETTTAFVEPLVIMLILVANAIVGVWQERNAESAIEALKEYEPEMGKVIRSDRKGVQRIRARDIVPGDIVEVAVGDKVPADLRLIEIKSTTLRVDQSILTGESVSVTKHTEAIPDPRAVNQDKKNMLFSGTNITSGKAVGVAVATGLHTELGKIRSQMAAVEPERTPLQRKLDEFGRQLSHAISVICVAVWVINIGHFADPAHGGSWLRGAVYYFKIAVALAVAAIPEGLPAVITTCLALGTRRMARKNAIVRSLPSVETLGCTSVICSDKTGTLTTNQMSVCRMFVVAEADAGSCLLHEFTISGTTYTPEGEVRQGDQPVRCGQFDGLVELATICALCNDSALDYNEAKGVYEKVGEATETALTCLVEKMNVFDTDLQALSRVERAGACNTVIKQLMRKEFTLEFSRDRKSMSVYCTPTRPHPTGQGSKMFVKGAPESVIERCSSVRVGSRTAPLTPTSREQILAKIRDWGSGSDTLRCLALATRDAPPRKEDMELDDCSKFVQYETDLTFVGCVGMLDPPRPEVAACITRCYQAGIRVVMITGDNKGTAVAICRRLGIFGDTEDVAGKAYTGREFDDLSPEQQRQACRTARCFARVEPAHKSRIVENLQSFNEITAMTGDGVNDAPALKKAEIGIAMGSGTAVAKSAAEMVLSDDNFASIVAAVEEGRAIYSNMKQFIRYLISSNVGEVVCIFLTAILGLPEALIPVQLLWVNLVTDGLPATALGFNPPDLDIMEKLPRSPREALISGWLFFRYLAIGVYVGLATVAAATWWFVYDAEGPHINFYQLRNFLKCSEDNPLFAGIDCEVFESRFPTTMALSVLVTIEMCNALNSVSENQSLLRMPPWMNPWLLVAVAMSMALHFLILLVPPLPLIFQVTPLSGRQWVVVLQISLPVILLDEALKYLSRNHMHACLYPGLLRTVSQAWSRQPLTTSWTPDHTGRNEPEVSAGNRVESPVCTSD

SEQ ID NO: 21078 - protein, 1029 aa, Homo sapiens
MEAAHLLPAADVLRHFSVTAEGGLSPAQVTGARERYGPNELPSEEGKSLWELVLEQFEDLLVRILLLAALVSFVLAWFEEGEETTTAFVEPLVIMLILVANAIVGVWQERNAESAIEALKEYEPEMGKVIRSDRKGVQRIRARDIVPGDIVEVAVGDKVPADLRLIEIKSTTLRVDQSILTGESVSVTKHTEAIPDPRAVNQDKKNMLFSGTNITSGKAVGVAVATGLHTELGKIRSQMAAVEPERTPLQRKLDEFGRQLSHAISVICVAVWVINIGHFADPAHGGSWLRGAVYYFKIAVALAVAAIPEGLPAVITTCLALGTRRMARKNAIVRSLPSVETLGCTSVICSDKTGTLTTNQMSVCRMFVVAEADAGSCLLHEFTISGTTYTPEGEVRQGDQPVRCGQFDGLVELATICALCNDSALDYNEAKGVYEKVGEATETALTCLVEKMNVFDTDLQALSRVERAGACNTVIKQLMRKEFTLEFSRDRKSMSVYCTPTRPHPTGQGSKMFVKGAPESVIERCSSVRVGSRTAPLTPTSREQILAKIRDWGSGSDTLRCLALATRDAPPRKEDMELDDCSKFVQYETDLTFVGCVGMLDPPRPEVAACITRCYQAGIRVVMITGDNKGTAVAICRRLGIFGDTEDVAGKAYTGREFDDLSPEQQRQACRTARCFARVEPAHKSRIVENLQSFNEITAMTGDGVNDAPALKKAEIGIAMGSGTAVAKSAAEMVLSDDNFASIVAAVEEGRAIYSNMKQFIRYLISSNVGEVVCIFLTAILGLPEALIPVQLLWVNLVTDGLPATALGFNPPDLDIMEKLPRSPREALISGWLFFRYLAIGVYVGLATVAAATWWFVYDAEGPHINFYQLRNFLKCSEDNPLFAGIDCEVFESRFPTTMALSVLVTIEMCNALNSVSENQSLLRMPPWMNPWLLVAVAMSMALHFLILLVPPLPLIFQVTPLSGRQWVVVLQISLPVILLDEALKYLSRNHMHACLYPGLLRTVSQAWSRQPLTTSWTPDHTGLASLKK

SEQ ID NO: 21079 - protein, 998 aa, Homo sapiens
MEAAHLLPAADVLRHFSVTAEGGLSPAQVTGARERYGPNELPSEEGKSLWELVLEQFEDLLVRILLLAALVSFVLAWFEEGEETTTAFVEPLVIMLILVANAIVGVWQERNAESAIEALKEYEPEMGKVIRSDRKGVQRIRARDIVPGDIVEVAVGDKVPADLRLIEIKSTTLRVDQSILTGESVSVTKHTEAIPDPRAVNQDKKNMLFSGTNITSGKAVGVAVATGLHTELGKIRSQMAAVEPERTPLQRKLDEFGRQLSHAISVICVAVWVINIGHFADPAHGGSWLRGAVYYFKIAVALAVAAIPEGLPAVITTCLALGTRRMARKNAIVRSLPSVETLGCTSVICSDKTGTLTTNQMSVCRMFVVAEADAGSCLLHEFTISGTTYTPEGEVRQGDQPVRCGQFDGLVELATICALCNDSALDYNEAKGVYEKVGEATETALTCLVEKMNVFDTDLQALSRVERAGACNTVIKQLMRKEFTLEFSRDRKSMSVYCTPTRPHPTGQGSKMFVKGAPESVIERCSSVRVGSRTAPLTPTSREQILAKIRDWGSGSDTLRCLALATRDAPPRKEDMELDDCSKFVQYETDLTFVGCVGMLDPPRPEVAACITRCYQAGIRVVMITGDNKGTAVAICRRLGIFGDTEDVAGKAYTGREFDDLSPEQQRQACRTARCFARVEPAHKSRIVENLQSFNEITAMTGDGVNDAPALKKAEIGIAMGSGTAVAKSAAEMVLSDDNFASIVAAVEEGRAIYSNMKQFIRYLISSNVGEVVCIFLTAILGLPEALIPVQLLWVNLVTDGLPATALGFNPPDLDIMEKLPRSPREALISGWLFFRYLAIGVYVGLATVAAATWWFVYDAEGPHINFYQLRNFLKCSEDNPLFAGIDCEVFESRFPTTMALSVLVTIEMCNALNSVSENQSLLRMPPWMNPWLLVAVAMSMALHFLILLVPPLPLIFQVTPLSGRQWVVVLQISLPVILLDEALKYLSRNHMHEMSQK

SEQ ID NO: 21080 - protein, 1052 aa, Homo sapiens
MEAAHLLPAADVLRHFSVTAEGGLSPAQVTGARERYGPNELPSEEGKSLWELVLEQFEDLLVRILLLAALVSFVLAWFEEGEETTTAFVEPLVIMLILVANAIVGVWQERNAESAIEALKEYEPEMGKVIRSDRKGVQRIRARDIVPGDIVEVAVGDKVPADLRLIEIKSTTLRVDQSILTGESVSVTKHTEAIPDPRAVNQDKKNMLFSGTNITSGKAVGVAVATGLHTELGKIRSQMAAVEPERTPLQRKLDEFGRQLSHAISVICVAVWVINIGHFADPAHGGSWLRGAVYYFKIAVALAVAAIPEGLPAVITTCLALGTRRMARKNAIVRSLPSVETLGCTSVICSDKTGTLTTNQMSVCRMFVVAEADAGSCLLHEFTISGTTYTPEGEVRQGDQPVRCGQFDGLVELATICALCNDSALDYNEAKGVYEKVGEATETALTCLVEKMNVFDTDLQALSRVERAGACNTVIKQLMRKEFTLEFSRDRKSMSVYCTPTRPHPTGQGSKMFVKGAPESVIERCSSVRVGSRTAPLTPTSREQILAKIRDWGSGSDTLRCLALATRDAPPRKEDMELDDCSKFVQYETDLTFVGCVGMLDPPRPEVAACITRCYQAGIRVVMITGDNKGTAVAICRRLGIFGDTEDVAGKAYTGREFDDLSPEQQRQACRTARCFARVEPAHKSRIVENLQSFNEITAMTGDGVNDAPALKKAEIGIAMGSGTAVAKSAAEMVLSDDNFASIVAAVEEGRAIYSNMKQFIRYLISSNVGEVVCIFLTAILGLPEALIPVQLLWVNLVTDGLPATALGFNPPDLDIMEKLPRSPREALISGWLFFRYLAIGVYVGLATVAAATWWFVYDAEGPHINFYQLRNFLKCSEDNPLFAGIDCEVFESRFPTTMALSVLVTIEMCNALNSVSENQSLLRMPPWMNPWLLVAVAMSMALHFLILLVPPLPLIFQVTPLSGRQWVVVLQISLPVILLDEALKYLSRNHMHACLYPGLLRTVSQAWSRQPLTTSWTPDHTGLASLGQGHSIVSLSELLREGGSREEMSQK

SEQ ID NO: 21081 - protein, 1044 aa, Homo sapiens
MEAAHLLPAADVLRHFSVTAEGGLSPAQVTGARERYGPNELPSEEGKSLWELVLEQFEDLLVRILLLAALVSFVLAWFEEGEETTTAFVEPLVIMLILVANAIVGVWQERNAESAIEALKEYEPEMGKVIRSDRKGVQRIRARDIVPGDIVEVAVGDKVPADLRLIEIKSTTLRVDQSILTGESVSVTKHTEAIPDPRAVNQDKKNMLFSGTNITSGKAVGVAVATGLHTELGKIRSQMAAVEPERTPLQRKLDEFGRQLSHAISVICVAVWVINIGHFADPAHGGSWLRGAVYYFKIAVALAVAAIPEGLPAVITTCLALGTRRMARKNAIVRSLPSVETLGCTSVICSDKTGTLTTNQMSVCRMFVVAEADAGSCLLHEFTISGTTYTPEGEVRQGDQPVRCGQFDGLVELATICALCNDSALDYNEAKGVYEKVGEATETALTCLVEKMNVFDTDLQALSRVERAGACNTVIKQLMRKEFTLEFSRDRKSMSVYCTPTRPHPTGQGSKMFVKGAPESVIERCSSVRVGSRTAPLTPTSREQILAKIRDWGSGSDTLRCLALATRDAPPRKEDMELDDCSKFVQYETDLTFVGCVGMLDPPRPEVAACITRCYQAGIRVVMITGDNKGTAVAICRRLGIFGDTEDVAGKAYTGREFDDLSPEQQRQACRTARCFARVEPAHKSRIVENLQSFNEITAMTGDGVNDAPALKKAEIGIAMGSGTAVAKSAAEMVLSDDNFASIVAAVEEGRAIYSNMKQFIRYLISSNVGEVVCIFLTAILGLPEALIPVQLLWVNLVTDGLPATALGFNPPDLDIMEKLPRSPREALISGWLFFRYLAIGVYVGLATVAAATWWFVYDAEGPHINFYQLRNFLKCSEDNPLFAGIDCEVFESRFPTTMALSVLVTIEMCNALNSVSENQSLLRMPPWMNPWLLVAVAMSMALHFLILLVPPLPLIFQVTPLSGRQWVVVLQISLPVILLDEALKYLSRNHMHACLYPGLLRTVSQAWSRQPLTTSWTPDHTGARDTASSRCQSCSEREEAGKK

SEQ ID NO: 21082 - protein, 1033 aa, Homo sapiens
MEAAHLLPAADVLRHFSVTAEGGLSPAQVTGARERYGPNELPSEEGKSLWELVLEQFEDLLVRILLLAALVSFVLAWFEEGEETTTAFVEPLVIMLILVANAIVGVWQERNAESAIEALKEYEPEMGKVIRSDRKGVQRIRARDIVPGDIVEVAVGDKVPADLRLIEIKSTTLRVDQSILTGESVSVTKHTEAIPDPRAVNQDKKNMLFSGTNITSGKAVGVAVATGLHTELGKIRSQMAAVEPERTPLQRKLDEFGRQLSHAISVICVAVWVINIGHFADPAHGGSWLRGAVYYFKIAVALAVAAIPEGLPAVITTCLALGTRRMARKNAIVRSLPSVETLGCTSVICSDKTGTLTTNQMSVCRMFVVAEADAGSCLLHEFTISGTTYTPEGEVRQGDQPVRCGQFDGLVELATICALCNDSALDYNEAKGVYEKVGEATETALTCLVEKMNVFDTDLQALSRVERAGACNTVIKQLMRKEFTLEFSRDRKSMSVYCTPTRPHPTGQGSKMFVKGAPESVIERCSSVRVGSRTAPLTPTSREQILAKIRDWGSGSDTLRCLALATRDAPPRKEDMELDDCSKFVQYETDLTFVGCVGMLDPPRPEVAACITRCYQAGIRVVMITGDNKGTAVAICRRLGIFGDTEDVAGKAYTGREFDDLSPEQQRQACRTARCFARVEPAHKSRIVENLQSFNEITAMTGDGVNDAPALKKAEIGIAMGSGTAVAKSAAEMVLSDDNFASIVAAVEEGRAIYSNMKQFIRYLISSNVGEVVCIFLTAILGLPEALIPVQLLWVNLVTDGLPATALGFNPPDLDIMEKLPRSPREALISGWLFFRYLAIGVYVGLATVAAATWWFVYDAEGPHINFYQLRNFLKCSEDNPLFAGIDCEVFESRFPTTMALSVLVTIEMCNALNSVSENQSLLRMPPWMNPWLLVAVAMSMALHFLILLVPPLPLIFQVTPLSGRQWVVVLQISLPVILLDEALKYLSRNHMHGPGTQHRLAVRAAQRGRKQGRNEPEVSAGNRVESPVCTSD

SEQ ID NO: 21083 - protein, 146 aa, Homo sapiens [sequence omitted]

SEQ ID NO: 21084 - protein, 1001 aa, Homo sapiens
MEAAHAKTTEECLAYFGVSETTGLTPDQVKRNLEKYGLNELPAEEGKTLWELVIEQFEDLLVRILLLAACISFVLAWFEEGEETITAFVEPFVILLILIANAIVGVWQERNAENAIEALKEYEPEMGKVYRADRKSVQRIKARDIVPGDIVEVAVGDKVPADIRILAIKSTTLRVDQSILTGESVSVIKHTEPVPDPRAVNQDKKNMLFSGTNIAAGKALGIVATTGVGTEIGKIRDQMAATEQDKTPLQQKLDEFGEQLSKVISLICVAVWLINIGHFNDPVHGGSWFRGAIYYFKIAVALAVAAIPEGLPAVITTCLALGTRRMAKKNAIVRSLPSVETLGCTSVICSDKTGTLTTNQMSVCKMFIIDKVDGDICLLNEFSITGSTYAPEGEVLKNDKPVRPGQYDGLVELATICALCNDSSLDFNEAKGVYEKVGEATETALTTLVEKMNVFNTDVRSLSKVERANACNSVIRQLMKKEFTLEFSRDRKSMSVYCSPAKSSRAAVGNKMFVKGAPEGVIDRCNYVRVGTTRVPLTGPVKEKIMAVIKEWGTGRDTLRCLALATRDTPPKREEMVLDDSARFLEYETDLTFVGVVGMLDPPRKEVTGSIQLCRDAGIRVIMITGDNKGTAIAICRRIGIFGENEEVADRAYTGREFDDLPLAEQREACRRACCFARVEPSHKSKIVEYLQSYDEITAMTGDGVNDAPALKKAEIGIAMGSGTAVAKTASEMVLADDNFSTIVAAVEEGRAIYNNMKQFIRYLISSNVGEVVCIFLTAALGLPEALIPVQLLWVNLVTDGLPATALGFNPPDLDIMDRPPRSPKEPLISGWLFFRYMAIGGYVGAATVGAAAWWFLYAEDGPHVNYSQLTHFMQCTEDNTHFEGIDCEVFEAPEPMTMALSVLVTIEMCNALNSLSENQSLLRMPPWVNIWLLGSICLSMSLHFLILYVDPLPMIFKLRALDLTQWLMVLKISLPVIGLDEILKFVARNYLEDPEDERRK

SEQ ID NO: 21085 - protein, 994 aa, Homo sapiens
MEAAHAKTTEECLAYFGVSETTGLTPDQVKRNLEKYGLNELPAEEGKTLWELVIEQFEDLLVRILLLAACISFVLAWFEEGEETITAFVEPFVILLILIANAIVGVWQERNAENAIEALKEYEPEMGKVYRADRKSVQRIKARDIVPGDIVEVAVGDKVPADIRILAIKSTTLRVDQSILTGESVSVIKHTEPVPDPRAVNQDKKNMLFSGTNIAAGKALGIVATTGVGTEIGKIRDQMAATEQDKTPLQQKLDEFGEQLSKVISLICVAVWLINIGHFNDPVHGGSWFRGAIYYFKIAVALAVAAIPEGLPAVITTCLALGTRRMAKKNAIVRSLPSVETLGCTSVICSDKTGTLTTNQMSVCKMFIIDKVDGDICLLNEFSITGSTYAPEGEVLKNDKPVRPGQYDGLVELATICALCNDSSLDFNEAKGVYEKVGEATETALTTLVEKMNVFNTDVRSLSKVERANACNSVIRQLMKKEFTLEFSRDRKSMSVYCSPAKSSRAAVGNKMFVKGAPEGVIDRCNYVRVGTTRVPLTGPVKEKIMAVIKEWGTGRDTLRCLALATRDTPPKREEMVLDDSARFLEYETDLTFVGVVGMLDPPRKEVTGSIQLCRDAGIRVIMITGDNKGTAIAICRRIGIFGENEEVADRAYTGREFDDLPLAEQREACRRACCFARVEPSHKSKIVEYLQSYDEITAMTGDGVNDAPALKKAEIGIAMGSGTAVAKTASEMVLADDNFSTIVAAVEEGRAIYNNMKQFIRYLISSNVGEVVCIFLTAALGLPEALIPVQLLWVNLVTDGLPATALGFNPPDLDIMDRPPRSPKEPLISGWLFFRYMAIGGYVGAATVGAAAWWFLYAEDGPHVNYSQLTHFMQCTEDNTHFEGIDCEVFEAPEPMTMALSVLVTIEMCNALNSLSENQSLLRMPPWVNIWLLGSICLSMSLHFLILYVDPLPMIFKLRALDLTQWLMVLKISLPVIGLDEILKFVARNYLEG

SEQ ID NO: 21086 - protein, 869 aa, Homo sapiens
MGKVYRADRKSVQRIKARDIVPGDIVEVAVGDKVPADIRILAIKSTTLRVDQSILTGESVSVIKHTEPVPDPRAVNQDKKNMLFSGTNIAAGKALGIVATTGVGTEIGKIRDQMAATEQDKTPLQQKLDEFGEQLSKVISLICVAVWLINIGHFNDPVHGGSWFRGAIYYFKIAVALAVAAIPEGLPAVITTCLALGTRRMAKKNAIVRSLPSVETLGCTSVICSDKTGTLTTNQMSVCKMFIIDKVDGDICLLNEFSITGSTYAPEGEVLKNDKPVRPGQYDGLVELATICALCNDSSLDFNEAKGVYEKVGEATETALTTLVEKMNVFNTDVRSLSKVERANACNSVIRQLMKKEFTLEFSRDRKSMSVYCSPAKSSRAAVGNKMFVKGAPEGVIDRCNYVRVGTTRVPLTGPVKEKIMAVIKEWGTGRDTLRCLALATRDTPPKREEMVLDDSARFLEYETDLTFVGVVGMLDPPRKEVTGSIQLCRDAGIRVIMITGDNKGTAIAICRRIGIFGENEEVADRAYTGREFDDLPLAEQREACRRACCFARVEPSHKSKIVEYLQSYDEITAMTGDGVNDAPALKKAEIGIAMGSGTAVAKTASEMVLADDNFSTIVAAVEEGRAIYNNMKQFIRYLISSNVGEVVCIFLTAALGLPEALIPVQLLWVNLVTDGLPATALGFNPPDLDIMDRPPRSPKEPLISGWLFFRYMAIGGYVGAATVGAAAWWFLYAEDGPHVNYSQLTHFMQCTEDNTHFEGIDCEVFEAPEPMTMALSVLVTIEMCNALNSLSENQSLLRMPPWVNIWLLGSICLSMSLHFLILYVDPLPMIFKLRALDLTQWLMVLKISLPVIGLDEILKFVARNYLEG

SEQ ID NO: 21087 - protein, 351 aa, Homo sapiens
MTEMSFLSSEVLVGDLMSPFDQSGLGAEESLGLLDDYLEVAKHFKPHGFSSDKAKAGSSEWLAVDGLVSPSNNSKEDAFSGTDWMLEKMDLKEFDLDALLGIDDLETMPDDLLTTLDDTCDLFAPLVQETNKQPPQTVNPIGHLPESLTKPDQVAPFTFLQPLPLSPGVLSSTPDHSFSLELGSEVDITEGDRKPDYTAYVAMIPQCIKEEDTPSDNDSGICMSPESYLGSPQHSPSTRGSPNRSLPSPGVLCGSARPKPYDPPGEKMVAAKVKGEKLDKKLKKMEQNKTAATRYRQKKRAEQEALTGECKELEKKNEALKERADSLAKEIQYLKDLIEEVRKARGKKRVP

SEQ ID NO: 21088 - protein, 283 aa, Homo sapiens
MADRGPWRVGVVGYGRLGQSLVSRLLAQGPELGLELVFVWNRDPGRMAGSVPPSLQLQNLAALGERRPDLVVEVAHPKIIHESGAQILRHANLLVGSPSALSDQTTERQLLEASQHWDHAVFVARGALWGAEDIRRLDAAGGLRSLRVTMATHPDGFRLEGPLAAAHSPGPCTVLYEGPVRGLCPFAPRNSNTMAAAALAAPSLGFDGVIGVLVADTSLTDMHVVDVELSGPRGPTGRSFAVHTRRENPAEPGAVTGSATVTAFWQSLLACCQLPSRPGIHLC

SEQ ID NO: 21089 - protein, 178 aa, Homo sapiens
MGDRVKGSKSRRPDLVVEVAHPKIIHESGAQILRHANLLSLRVTMATHPDGFRLEGPLAAAHSPGPCTVLYEGPVRGLCPFAPRNSNTMAAAALAAPSLGFDGVIGVLVADTSLTDMHVVDVELSGPRGPTGRSFAVHTRRENPAEPGAVTGSATVTAFWQSLLACCQLPSRPGIHLC

SEQ ID NO: 21090 - protein, 278 aa, Homo sapiens [sequence omitted]

SEQ ID NO: 21091 - protein, 54 aa, Homo sapiens
MDSMPEPASRCLLLLPLLLLLLLLLPAPELGPSQAGAEENDWVRLPSKCEGTCG

SEQ ID NO: 21092 - protein, 431 aa, Homo sapiens
MEGVGGLWPWVLGLLSLPGVILGAPLASSCAGACGTSFPDGLTPEGTQASGDKDIPAINQGLILEETPESSFLIEGDIIRPSPFRLLSATSNKWPMGGSGVVEVPFLLSSKYDEPSRQVILEALAEFERSTCIRFVTYQDQRDFISIIPMYGCFSSVGRSGGMQVVSLAPTCLQKGRGIVLHELMHVLGFWHEHTRADRDRYIRVNWNEILPGFEINFIKSQSSNMLTPYDYSSVMHYGRLAFSRRGLPTITPLWAPSVHIGQRWNLSASDITRVLKLYGCSPSGPRPRGRGSHAHSTGRSPAPASLSLQRLLEALSAESRSPDPSGSSAGGQPVPAGPGESPHGWESPALKKLSAEASARQPQTLASSPRSRPGAGAPGVAQEQSWLAGVSTKPTVPSSEAGIQPVPVQGSPALPGGCVPRNHFKGMSED

SEQ ID NO: 21093 - protein, 903 aa, Homo sapiens
MPEQFSVAEFLAVTAEDLSSPAGAAAFAAKMPRYRGAALAREEILEGDQAILQRIKKAVRAIHSSGLGHVENEEQYREAVESLGNSHLSQNSHELSTGFLNLAVFTREVAALFKNLIQNLNNIVSFPLDSLMKGQLRDGRQDSKKQLEKAWKDYEAKMAKLEKERDRARVTGGIPGEVAQDMQRERRIFQLHMCEYLLKAGESQMKQGPDFLQSLIKFFHAQHNFFQDGWKAAQSLFPFIEKLAASVHALHQAQEDELQKLTQLRDSLRGTLQLESREEHLSRKNSGCGYSIHQHQGNKQFGTEKVGFLYKKSDGIRRVWQKRKCGVKYGCLTISHSTINRPPVKLTLLTCQVRPNPEEKKCFDLVTHNRTYHFQAEDEHECEAWVSVLQNSKDEALSSAFLGEPSAGPGSWGSAGHDGEPHDLTKLLIAEVKSRPGNSQCCDCGAADPTWLSTNLGVLTCIQCSGVHRELGVRFSRMQSLTLDLLGPSELLLALNMGNTSFNEVMEAQLPSHGGPKPSAESDMGTRRDYIMAKYVEHRFARRCTPEPQRLWTAICNRDLLSVLEAFANGQDFGQPLPGPDAQAPEELVLHLAVKVANQASLPLVDFIIQNGGHLDAKAADGNTALHYAALYNQPDCLKLLLKGRALVGTVNEAGETALDIARKKHHKECEELLEQAQAGTFAFPLHVDYSWVISTEPGSDSEEDEEEKRCLLKLPAQAHWASGRLDISNKTYETVASLGAATPQGESEDCPPPLPVKNSSRTLVQGCARHASGDRSEVSSLSSEAPETPESLGSPASSSSLMSPLEPGDPSQAPPNSEEGLREPPGTSRPSLTSGTTPSEMYLPVRFSSESTRSYRRGARSPEDGPSARQPLPRRNVPVGITEGDGSRTGSLPASSVQLLQD

SEQ ID NO: 21094 - protein, 407 aa, Homo sapiens
MGNTSFNEVMEAQLPSHGGPKPSAESDMGTRRDYIMAKYVEHRFARRCTPEPQRLWTAICNRDLLSVLEAFANGQDFGQPLPGPDAQAPEELVLHLAVKVANQASLPLVDFIIQNGGHLDAKAADGNTALHYAALYNQPDCLKLLLKGRALVGTVNEAGETALDIARKKHHKECEELLEQAQAGTFAFPLHVDYSWVISTEPGSDSEEDEEEKRCLLKLPAQAHWASGRLDISNKTYETVASLGAATPQGESEDCPPPLPVKNSSRTLVQGCARHASGDRSEVSSLSSEAPETPESLGSPASSSSLMSPLEPGDPSQAPPNSEEGLREPPGTSRPSLTSGTTPSEMYLPVRFSSESTRSYRRGARSPEDGPSARQPLPRRNVPVGITEGDGSRTGSLPASSVQLLQD

SEQ ID NO: 21095 - protein, 894 aa, Homo sapiens
MPEQFSVAEFLAVTAEDLSSPAGAAAFAAKMPRYRGAALAREEILEGDQAILQRIKKAVRAIHSSGLGHVENEEQYREAVESLGNSHLSQNSHELSTGFLNLAVFTREVAALFKNLIQNLNNIVSFPLDSLMKGQLRDGRQASLSLGSRAKLEKERDRARVTGGIPGEVAQDMQRERRIFQLHMCEYLLKAGESQMKQGPDFLQSLIKFFHAQHNFFQDGWKAAQSLFPFIEKLAASVHALHQAQEDELQKLTQLRDSLRGTLQLESREEHLSRKNSGCGYSIHQHQGNKQFGTEKVGFLYKKSDGIRRVWQKRKCGVKYGCLTISHSTINRPPVKLTLLTCQVRPNPEEKKCFDLVTHNRTYHFQAEDEHECEAWVSVLQNSKDEALSSAFLGEPSAGPGSWGSAGHDGEPHDLTKLLIAEVKSRPGNSQCCDCGAADPTWLSTNLGVLTCIQCSGVHRELGVRFSRMQSLTLDLLGPSELLLALNMGNTSFNEVMEAQLPSHGGPKPSAESDMGTRRDYIMAKYVEHRFARRCTPEPQRLWTAICNRDLLSVLEAFANGQDFGQPLPGPDAQAPEELVLHLAVKVANQASLPLVDFIIQNGGHLDAKAADGNTALHYAALYNQPDCLKLLLKGRALVGTVNEAGETALDIARKKHHKECEELLEQAQAGTFAFPLHVDYSWVISTEPGSDSEEDEEEKRCLLKLPAQAHWASGRLDISNKTYETVASLGAATPQGESEDCPPPLPVKNSSRTLVQGCARHASGDRSEVSSLSSEAPETPESLGSPASSSSLMSPLEPGDPSQAPPNSEEGLREPPGTSRPSLTSGTTPSEMYLPVRFSSESTRSYRRGARSPEDGPSARQPLPRRNVPVGITEGDGSRTGSLPASSVQLLQD

SEQ ID NO: 21096 - protein, 1209 aa, Homo sapiens
MTVPKEMPEKWARAQAPPSWSRKKPSWGTEEERRARANDREYNEKFQYASNCIKTSKYNILTFLPVNLFEQFQEVANTYFLFLLILQLIPQISSLSWFTTIVPLVLVLTITAVKDATDDYFRHKSDNQVNNRQSQVLINGILQQEQWMNVCVGDIIKLENNQFVAADLLLLSSSEPHGLCYIETAELDGETNMKVRQAIPVTSELGDISKLAKFDGEVICEPPNNKLDKFSGTLYWKENKFPLSNQNMLLRGCVLRNTEWCFGLVIFAGPDTKLMQNSGRTKFKRTSIDRLMNTLVLWIFGFLVCMGVILAIGNAIWEHEVGMRFQVYLPWDEAVDSAFFSGFLSFWSYIIILNTVVPISLYVSVEVIRLGHSYFINWDKKMFCMKKRTPAEARTTTLNEELGQVEYIFSDKTGTLTQNIMVFNKCSINGHSYGDVFDVLGHKAELGERPEPVDFSFNPLADKKFLFWDPSLLEAVKIGDPHTHEFFRLLSLCHTVMSEEKNEGELYYKAQSPDEGALVTAARNFGFVFRSRTPKTITVHEMGTAITYQLLAILDFNNIRKRMSVIVRNPEGKIRLYCKGADTILLDRLHHSTQELLNTTMDHLNEYAGEGLRTLVLAYKDLDEEYYEEWAERRLQASLAQDSREDRLASIYEEVENNMMLLGATAIEDKLQQGVPETIALLTLANIKIWVLTGDKQETAVNIGYSCKMLTDDMTEVFIVTGHTVLEVREELRKAREKMMDSSRSVGNGFTYQDKLSSSKLTSVLEAVAGEYALVINGHSLAHALEADMELEFLETACACKAVICCRVTPLQKAQVVELVKKYKKAVTLAIGDGANDVSMIKTAHIGVGISGQEGIQAVLASDYSFSQFKFLQRLLLVHGRWSYLRMCKFLCYFFYKNFAFTMVHFWFGFFCGFSAQTVYDQYFITLYNIVYTSLPVLAMGVFDQDVPEQRSMEYPKLYEPGQLNLLFNKREFFICIAQGIYTSVLMFFIPYGVFADATRDDGTQLADYQSFAVTVATSLVIVVSVQIGLDTGYWTAINHFFIWGSLAVYFAILFAMHSNGLFDMFPNQFRFVGNAQNTLAQPTVWLTIVLTTVVCIMPVVAFRFLRLNLKPDLSDTVRYTQLVRKKQKAQHRCMRRVGRTGSRRSGYAFSHQEGFGELIMSGKNMRLSSLALSSFTTRSSSSWIESLRRKKSDSASSPSGGADKPLKG

SEQ ID NO: 21097 - protein, 461 aa, Homo sapiens
MTVPKEMPEKWARAQAPPSWSRKKPSWGTEEERRARANDREYNEKFQYASNCIKTSKYNILTFLPVNLFEQFQEVANTYFLFLLILQLIPQISSLSWFTTIVPLVLVLTITAVKDATDDYFRHKSDNQVNNRQSQVLINGILQQEQWMNVCVGDIIKLENNQFVAADLLLLSSSEPHGLCYIETAELDGETNMKVRQAIPVTSELGDISKLAKFDGEVICEPPNNKLDKFSGTLYWKENKFPLSNQNMLLRGCVLRNTEWCFGLVIFAGPDTKLMQNSGRTKFKRTSIDRLMNTLVLWIFGFLVCMGVILAIGNAIWEHEVGMRFQVYLPWDEAVDSAFFSGFLSFWSYIIILNTVVPISLYVSVEVIRLGHSYFINWDKKMFCMKKRTPAEARTTTLNEELGQVEYIFSDKTGTLTQNIMVFNKCSINGHSYVGSEGPRRKGPSWPGTVAHAYSHSTLGG

SEQ ID NO: 21098 - protein, 1223 aa, Homo sapiens
MDTLRAVPLFSISGLFSFPYRVSHGIAGILLGEMAVCAKKRPPEEERRARANDREYNEKFQYASNCIKTSKYNILTFLPVNLFEQFQEVANTYFLFLLILQLIPQISSLSWFTTIVPLVLVLTITAVKDATDDYFRHKSDNQVNNRQSQVLINGILQQEQWMNVCVGDIIKLENNQFVAADLLLLSSSEPHGLCYIETAELDGETNMKVRQAIPVTSELGDISKLAKFDGEVICEPPNNKLDKFSGTLYWKENKFPLSNQNMLLRGCVLRNTEWCFGLVIFAGPDTKLMQNSGRTKFKRTSIDRLMNTLVLWIFGFLVCMGVILAIGNAIWEHEVGMRFQVYLPWDEAVDSAFFSGFLSFWSYIIILNTVVPISLYVSVEVIRLGHSYFINWDKKMFCMKKRTPAEARTTTLNEELGQVEYIFSDKTGTLTQNIMVFNKCSINGHSYGDVFDVLGHKAELGERPEPVDFSFNPLADKKFLFWDPSLLEAVKIGDPHTHEFFRLLSLCHTVMSEEKNEGELYYKAQSPDEGALVTAARNFGFVFRSRTPKTITVHEMGTAITYQLLAILDFNNIRKRMSVIVRNPEGKIRLYCKGADTILLDRLHHSTQELLNTTMDHLNEYAGEGLRTLVLAYKDLDEEYYEEWAERRLQASLAQDSREDRLASIYEEVENNMMLLGATAIEDKLQQGVPETIALLTLANIKIWVLTGDKQETAVNIGYSCKMLTDDMTEVFIVTGHTVLEVREELRKAREKMMDSSRSVGNGFTYQDKLSSSKLTSVLEAVAGEYALVINGHSLAHALEADMELEFLETACACKAVICCRVTPLQKAQVVELVKKYKKAVTLAIGDGANDVSMIKTAHIGVGISGQEGIQAVLASDYSFSQFKFLQRLLLVHGRWSYLRMCKFLCYFFYKNFAFTMVHFWFGFFCGFSAQTVYDQYFITLYNIVYTSLPVLAMGVFDQDVPEQRSMEYPKLYEPGQLNLLFNKREFFICIAQGIYTSVLMFFIPYGVFADATRDDGTQLADYQSFAVTVATSLVIVVSVQIGLDTGYWTAINHFFIWGSLAVYFAILFAMHSNGLFDMFPNQFRFVGNAQNTLAQPTVWLTIVLTTVVCIMPVVAFRFLRLNLKPDLSDTVRYTQLVRKKQKAQHRCMRRVGRTGSRRSGYAFSHQEGFGELIMSGKNMRLSSLALSSFTTRSSSSWIESLRRKKSDSASSPSGGADKPLKG

SEQ ID NO: 21099 - protein, 387 aa, Homo sapiens
MAVCAKKRPPEEERRARANDREYNEKFQYASNCIKTSKYNILTFLPVNLFEQFQEVANTYFLFLLILQLIPQISSLSWFTTIVPLVLVLTITAVKDATDDYFRHKSDNQVNNRQSQVLINGILQQEQWMNVCVGDIIKLENNQFVAADLLLLSSSEPHGLCYIETAELDGETNMKVRQAIPVTSELGDISKLAKFDGEVICEPPNNKLDKFSGTLYWKENKFPLSNQNMLLRGCVLRNTEWCFGLVIFAGPDTKLMQNSGRTKFKRTSIDRLMNTLVLWIFGFLVCMGVILAIGNAIWEHEVGMRFQVYLPWDEAVDSAFFSGFLSFWSYIIILNTVVPISLYVRYVPSLTWGLSRESGGPIELFFSMKMKSLRSNEKSSSSCTVNI

SEQ ID NO: 21100 - protein, 323 aa, Homo sapiens
MEDGPVFYGFKNIFITMFATFFFFKLLIKVFLALLTHFYIVKGNRKEAARIAEEIYGGISDCWADRSPLHEAAAQGRLLALKTLIAQGVNVNLVTINRVSSLHEACLGGHVACAKALLENGAHVNGVTVHGATPLFNACCSGSAACVNVLLEFGAKAQLEVHLASPIHEAVKRGHRECMEILLANNVNIDHEVPQLGTPLYVACTYQRVDCVKKLLELGASVDHGQWLDTPLHAAARQSNVEVIHLLTDYGANLKRRNAQGKSALDLAAPKSSVEQALLLREGPPALSQLCRLCVRKCLGRACHQAIHKLHLPEPLERFLLYQ

SEQ ID NO: 21101 - protein, 306 aa, Homo sapiens
MEDGPVFYGFKNIFITMFATFFFFKLLIKVFLALLTHFYIVKGNRKEAARIAEEIYGGISDCWADRSPLHEAAAQGRLLALKTLIAQACLGGHVACAKALLENGAHVNGVTVHGATPLFNACCSGSAACVNVLLEFGAKAQLEVHLASPIHEAVKRGHRECMEILLANNVNIDHEVPQLGTPLYVACTYQRVDCVKKLLELGASVDHGQWLDTPLHAAARQSNVEVIHLLTDYGANLKRRNAQGKSALDLAAPKSSVEQALLLREGPPALSQLCRLCVRKCLGRACHQAIHKLHLPEPLERFLLYQ

SEQ ID NO: 21102 - protein, 302 aa, Homo sapiens
MLQLTGENEKNCEVSERIRRSGPWKEISFGDYICHTFQGDCWADRSPLHEAAAQGRLLALKTLIAQGVNVNLVTINRVSSLHEACLGGHVACAKALLENGAHVNGVTVHGATPLFNACCSGSAACVNVLLEFGAKAQLEVHLASPIHEAVKRGHRECMEILLANNVNIDHEVPQLGTPLYVACTYQRVDCVKKLLELGASVDHGQWLDTPLHAAARQSNVEVIHLLTDYGANLKRRNAQGKSALDLAAPKSSVEQALLLREGPPALSQLCRLCVRKCLGRACHQAIHKLHLPEPLERFLLYQ

SEQ ID NO: 21103 - protein, 361 aa, Homo sapiens
MVHAEAFSRPLSRNEVVGLIFRLTIFGAVTYFTIKWMVDAIDPTRKQKVEAQKQAEKLMKQIGVKNVKLSEYEMSIAAHLVDPLNMHVTWSDIAGLDDVITDLKDTVILPIKKKHLFENSRLLQPPKGVLLYGPPGCGKTLIAKATAKEAGCRFINLQPSTLTDKWYGESQKLAAAVFSLAIKLQPSIIFIDEIDSFLRNRSSSDHEATAMMKAQFMSLWDGLDTDHSCQVIVMGATNRPQDLDSAIMRRMPTRFHINQPALKQREAILKLILKNENVDRHVDLLEVAQETDGFSGSDLKEMCRDAALLCVREYVNSTSEESHDEDEIRPVQQQDLHRAIEKMKKSKDAAFQNVLTHVCLD

SEQ ID NO: 21104 - protein, 287 aa, Homo sapiens
MVHAEAFSRPLSRNEVVGLIFRLTIFGAVTYFTIKWMVDAIDPTRKQKVEAQKQAEKLMKQIGVKNVKLSEYEMSIAAHLVDPLNMHVTWSDIAGLDDVITDLKDTVILPIKKKHLFENSRLLQPPKGVLLYGPPGCGKTLIAKATAKEAGCRFINLQPSTLTDKWYGESQKLAAAVFSLAIKLQPSIIFIDEIDSFLRNRSSSDHEATAMMKAQFMSLWDGLDTDHSCQVIVMGATNRPQDLDSAIMRRMPTRFHINQPALKQREAILKLILKNENLRKLKPREVL

SEQ ID NO: 21105 - protein, 588 aa, Homo sapiens
MDTNDDPDEDHLTSYDIQLSIQESIEASKTALCPERFVPLSAQNRKLVEAIKQGHIPELQEYVKYKYAMDEADEKGWFPLHEAVVQPIQQILEIVLDASYKTLWEFKTCDGETPLTLAVKAGLVENVRTLLEKGVWPNTKNDKGETPLLIAVKKGSYDMVSTLIKHNTSLDQPCVKRWSAMHEAAKQGRKDIVALLLKHGGNVHLRDGFGVTPLGVAAEYGHCDVLEHLIHKGGDVLALADDGASVLFEAAGGGNPDCISLLLEYGGSGNVPNRAGHLPIHRAAYEGHYLALKYLIPVTSKNAIRKSGLTPIHSAADGQNAQCLELLIENGFDVNTLLADHISQSYDDERKTALYFGVSNNDVHCTEVLLAAGADPNLDPLNCLLVAVRANNYEIVRLLLSHGANVNCYFMHVNDTRFPSVIQYALNDEVMLRLLLNNGYQVEMCFDCMHGDIFGNSFVWSEIQEEVLPGWTSCVIKDNPFCEFITVPWMKHLVGRVTRVLIDYMDYVPLCAKLKSALEVQREWPEIRQILENPCSLKHLCRLKIRRLMGLQKLCQPASVEKLPLPPAIQRYILFKEYDLYGQELKLT

SEQ ID NO: 21106 - protein, 1300 aa, Homo sapiens
MGTGPAQTPRSTRAGPEPSPAPPGPGDTGDSDVTQEGSGPAGIRGGETVIRAGMGDSPGRGAPERRHKAQPGRARKYEWRPEGPTSMGSLGQREDLQDEDRNSAFTWKVQANNRAYNGQFKEKVILCWQRKKYKTNVIRTAKYNFYSFLPLNLYEQFHRVSNLFFLIIIILQSIPDISTLPWFSLSTPMVCLLFIRATRDLVDDMGRHKSDRAINNRPCQILMGKSFKQKKWQDLCVGDVVCLRKDNIVPADMLLLASTEPSSLCYVETVDIDGETNLKFRQALMVTHKELATIKKMASFQGTVTCEAPNSRMHHFVGCLEWNDKKYSLDIGNLLLRGCRIRNTDTCYGLVIYAGFDTKIMKNCGKIHLKRTKLDLLMNKLVVVIFISVVLVCLVLAFGFGFSVKEFKDHHYYLSGVHGSSVAAESFFVFWSFLILLSVTIPMSMFILSEFIYLGNSVFIDWDVQMYYKPQDVPAKARSTSLNDHLGQVEYIFSDKTGTLTQNILTFNKCCISGRVYGPDSEATTRPKENPYLWNKFADGKLLFHNAALLHLVRTNGDEAVREFWRLLAICHTVMVRESPRERPDQLLYQAASPDEGALVTAARNFGYVFLSRTQDTVTIMELGEERVYQVLAIMDFNSTRKRMSVLVRKPEGAICLYTKGADTVIFERLHRRGAMEFATEEALAAFAQETLRTLCLAYREVAEDIYEDWQQRHQEASLLLQNRAQALQQLLGATAIEDRLQDGVPETIKCLKKSNIKIWVLTGDKQETAVNIGFACELLSENMLILEEKEISRILETYWENSNNLLTRESLSQVKLALVINGDFLDKLLVSLRKEPRALAQNVNMDEAWQELGQSRRDFLYARRLSLLCRRFGLPLAAPPAQDSRARRSSEVLQERAFVDLASKCQAVICCRVTPKQKALIVALVKKYHQVVTLAIGDGANDINMIKTADVGVGLAGQEGMQAVQNSDFVLGQFCFLQRLLLVHGRWSYVRICKFLRYFFYKSMASMMVQVWFACYNGFTGQPLYEGWFLALFNLLYSTLPVLYIGLFEQDVSAEQSLEKPELYVVGQKDELFNYWVFVQAIAHGVTTSLVNFFMTLWISRDTAGPASFSDHQSFAVVVALSCLLSITMEVILIIKYWTALCVATILLSLGFYAIMTTTTQSFWLFRVSPTTFPFLYADLSVMSSPSILLVVLLSVSINTFPVLALRVIFPALKELRAKEEKVEEGPSEEIFTMEPLPHVHRESRARRSSYAFSHREGYANLITQGTILRRGPGVSSDIASESLDPSDEEAASSPKESQ

SEQ ID NO: 21107 - protein, 1310 aa, Homo sapiens
MGTGPAQTPRSTRAGPEPSPAPPGPGDTGDSDVTQEGSGPAGIRGGETVIRAGMGDSPGRGAPERRHKAQPGRARKYEWRPEGPTSMGSLGQREDLQDEDRNSAFTWKVQANNRAYNGQFKEKVILCWQRKKYKTNVIRTAKYNFYSFLPLNLYEQFHRVSNLFFLIIIILQSIPDISTLPWFSLSTPMVCLLFIRATRDLVDDMGRHKSDRAINNRPCQILMGKSFKQKKWQDLCVGDVVCLRKDNIVPADMLLLASTEPSSLCYVETVDIDGETNLKFRQALMVTHKELATIKKMASFQGTVTCEAPNSRMHHFVGCLEWNDKKYSLDIGNLLLRGCRIRNTDTCYGLVIYAGFDTKIMKNCGKIHLKRTKLDLLMNKLVVVIFISVVLVCLVLAFGFGFSVKEFKDHHYYLSGVHGSSVAAESFFVFWSFLILLSVTIPMSMFILSEFIYLGNSVFIDWDVQMYYKPQDVPAKARSTSLNDHLGQVEYIFSDKTGTLTQNILTFNKCCISGRVYGPDSEATTRPKENPYLWNKFADGKLLFHNAALLHLVRTNGDEAVREFWRLLAICHTVMVRESPRERPDQLLYQAASPDEGALVTAARNFGYVFLSRTQDTVTIMELGEERVYQVLAIMDFNSTRKRMSVLVRKPEGAICLYTKGADTVIFERLHRRGAMEFATEEALAAFAQETLRTLCLAYREVAEDIYEDWQQRHQEASLLLQNRAQALQQVYNEMEQDLRLLGATAIEDRLQDGVPETIKCLKKSNIKIWVLTGDKQETAVNIGFACELLSENMLILEEKEISRILETYWENSNNLLTRESLSQVKLALVINGDFLDKLLVSLRKEPRALAQNVNMDEAWQELGQSRRDFLYARRLSLLCRRFGLPLAAPPAQDSRARRSSEVLQERAFVDLASKCQAVICCRVTPKQKALIVALVKKYHQVVTLAIGDGANDINMIKTADVGVGLAGQEGMQAVQNSDFVLGQFCFLQRLLLVHGRWSYVRICKFLRYFFYKSMASMMVQVWFACYNGFTGQPLYEGWFLALFNLLYSTLPVLYIGLFEQDVSAEQSLEKPELYVVGQKDELFNYWVFVQAIAHGVTTSLVNFFMTLWISRDTAGPASFSDHQSFAVVVALSCLLSITMEVILIIKYWTALCVATILLSLGFYAIMTTTTQSFWLFRVSPTTFPFLYADLSVMSSPSILLVVLLSVSINTFPVLALRVIFPALKELRAKEEKVEEGPSEEIFTMEPLPHVHRESRARRSSYAFSHREGYANLITQGTILRRGPGVSSDIASESLDPSDEEAASSPKESQ

SEQ ID NO: 21108 - protein, 1263 aa, Homo sapiens
MGDSPGRGAPERRHKAQPGRARKYEWRPEGPTSMGSLGQREDLQDEDRNSAFTWKVQANNRAYNGQFKEKVILCWQRKKYKTNVIRTAKYNFYSFLPLNLYEQFHRVSNLFFLIIIILQSIPDISTLPWFSLSTPMVCLLFIRATRDLVDDMGRHKSDRAINNRPCQILMGKSFKQKKWQDLCVGDVVCLRKDNIVPADMLLLASTEPSSLCYVETVDIDGETNLKFRQALMVTHKELATIKKMASFQGTVTCEAPNSRMHHFVGCLEWNDKKYSLDIGNLLLRGCRIRNTDTCYGLVIYADGYMFVGFDTKIMKNCGKIHLKRTKLDLLMNKLVVVIFISVVLVCLVLAFGFGFSVKEFKDHHYYLSGVHGSSVAAESFFVFWSFLILLSVTIPMSMFILSEFIYLGNSVFIDWDVQMYYKPQDVPAKARSTSLNDHLGQVEYIFSDKTGTLTQNILTFNKCCISGRVYGPDSEATTRPKENPYLWNKFADGKLLFHNAALLHLVRTNGDEAVREFWRLLAICHTVMVRESPRERPDQLLYQAASPDEGALVTAARNFGYVFLSRTQDTVTIMELGEERVYQVLAIMDFNSTRKRMSVLVRKPEGAICLYTKGADTVIFERLHRRGAMEFATEEALAAFAQETLRTLCLAYREVAEDIYEDWQQRHQEASLLLQNRAQALQQVYNEMEQDLRLLGATAIEDRLQDGVPETIKCLKKSNIKIWVLTGDKQETAVNIGFACELLSENMLILEEKEISRILETYWENSNNLLTRESLSQVKLALVINGDFLDKLLVSLRKEPRALAQNVNMDEAWQELGQSRRDFLYARRLSLLCRRFGLPLAAPPAQDSRARRSSEVLQERAFVDLASKCQAVICCRVTPKQKALIVALVKKYHQVVTLAIGDGANDINMIKTADVGVGLAGQEGMQAVQNSDFVLGQFCFLQRLLLVHGRWSYVRICKFLRYFFYKSMASMMVQVWFACYNGFTGQPLYEGWFLALFNLLYSTLPVLYIGLFEQDVSAEQSLEKPELYVVGQKDELFNYWVFVQAIAHGVTTSLVNFFMTLWISRDTAGPASFSDHQSFAVVVALSCLLSITMEVILIIKYWTALCVATILLSLGFYAIMTTTTQSFWLFRVSPTTFPFLYADLSVMSSPSILLVVLLSVSINTFPVLALRVIFPALKELRAKEEKVEEGPSEEIFTMEPLPHVHRESRARRSSYAFSHREGYANLITQGTILRRGPGVSSDIASESLDPSDEEAASSPKESQ

SEQ ID NO: 21109 - protein, 110 aa, Homo sapiens
MEWGPGSDWSRGEAAGVDRGKAGLGLGGRPPPQPPREERAQQLLDAVEQRQRQLLDTIAACEEMLRQLGRRRPEPAGGGNVSAKPGAPPQPAVSARGGFPKDAGDGAAEP

SEQ ID NO: 21110 - protein, 47 aa, Homo sapiens
MLRQLGRRRPEPAGGGNVSAKPGAPPQPAVSARGGFPKDAGDGAAEP

SEQ ID NO: 21111 - protein, 272 aa, Homo sapiens
MFENLNTALTPKLQASRSFPHLSKPVAPGSAPLGSGEPGGPGLWVGSSQHLKNLGKAMGAKVNDFLRRKEPSSLGSVGVTEINKTAGAQLASGTDAAPEAWLEDERSVLQETFPRLDPPPPITRKRTPRALKTTQDMLISSQPVLSSLEYGTEPSPGQAQDSAPTAQPDVPADASQPEATMEREERGKVLPNGEVSLSVPDLIHKDSQDESKLKMTECRRASSPSLIERNGFKLSLSPISLAESWEDGSPPPQARTSSLDNEGPHPDLLSFE

SEQ ID NO: 21112 - protein, 315 aa, Homo sapiens
MLVLVAQAGGDTLKVTGHYVKCVFLLFVSHLLSEPLSRTVDHGMFENLNTALTPKLQASRSFPHLSKPVAPGSAPLGSGEPGGPGLWVGSSQHLKNLGKAMGAKVNDFLRRKEPSSLGSVGVTEINKTAGAQLASGTDAAPEAWLEDERSVLQETFPRLDPPPPITRKRTPRALKTTQDMLISSQPVLSSLEYGTEPSPGQAQDSAPTAQPDVPADASQPEATMEREERGKVLPNGEVSLSVPDLIHKDSQDESKLKMTECRRASSPSLIERNGFKLSLSPISLAESWEDGSPPPQARTSSLDNEGPHPDLLSFE

SEQ ID NO: 21113 - protein, 326 aa, Homo sapiens
MEKDGLCRADQQYECVAEIGEGAYGKVFKARDLKNGGRFVALKRVRVQTGEEGMPLSTIREVAVLRHLETFEHPNVVRLFDVCTVSRTDRETKLTLVFEHVDQDLTTYLDKVPEPGVPTETIKDMMFQLLRGLDFLHSHRVVHRDLKPQNILVTSSGQIKLADFGLARIYSFQMALTSVVVTLWYRAPEVLLQSSYATPVDLWSVGCIFAEMFRRKPLFRGSSDVDQLGKILDVIGLPGEEDWPRDVALPRQAFHSKSAQPIEKFVTDIDELGKDLLLKCLTFNPAKRISAYSALSHPYFQDLERCKENLDSHLPPSQNTSELNTA

SEQ ID NO: 21114 - protein, 336 aa, Homo sapiens
MKKEHVLHCQFSAWYPFFRGVTIKSVILPLPQNVKDYLLDDGTLVVSGRDDPPTHSQPDSDDEAEEIQWSDDENTATLTAPEFPEFATKVQEAINSLGGSVFPKLNWSAPRDAYWIAMNSSLKCKTLSDIFLLFKSSDFITRDFTQPFIHCTDDSPDPCIEYELVLRKWCELIPGAEFRCFVKENKLIGISQRDYTQYYDHISKQKEEIRRCIQDFFKKHIQYKFLDEDFVFDIYRDSRGKVWLIDFNPFGEVTDSLLFTWEELISENNLNGDFSEVDAQEQDSPAFRCTNSEVTVQPSPYLSYRLPKDFVDLSTGEDAHKLIDFLKLKRNQQEDD

SEQ ID NO: 21115 - protein, 303 aa, Homo sapiens
MATSRYEPVAEIGVGAYGTVYKARDPHSGHFVALKSVRVPNGGGGGGGLPISTVREVALLRRLEAFEHPNVVRLMDVCATSRTDREIKVTLVFEHVDQDLRTYLDKAPPPGLPAETIKDLMRQFLRGLDFLHANCIVHRDLKPENILVTSGGTVKLADFGLARIYSYQMALTPVVVTLWYRAPEVLLQSTYATPVDMWSVGCIFAEMFRRKPLFCGNSEADQLGKIFDLIGLPPEDDWPRDVSLPRGAFPPRGPRPVQSVVPEMEESGAQLLLEMLTFNPHKRISAFRALQHSYLHKDEGNPE

SEQ ID NO: 21116 - protein, 183 aa, Homo sapiens
MRQFLRGLDFLHANCIVHRDLKPENILVTSGGTVKLADFGLARIYSYQMALTPVVVTLWYRAPEVLLQSTYATPVDMWSVGCIFAEMFRRKPLFCGNSEADQLGKIFDLIGLPPEDDWPRDVSLPRGAFPPRGPRPVQSVVPEMEESGAQLLLEMLTFNPHKRISAFRALQHSYLHKDEGNPE

SEQ ID NO: 21117 - protein, 167 aa, Homo sapiens
MERFVVTAPPARNRSKTALYVTPLDRVTEFGGELHEDGGKLFCTSCNVVLNHVRKSAISDHLKSKTHTKRKAEFEEQNVRKKQRPLTASLQCNSTAQTEKVSVIQDFVKMCLEANIPLEKADHPAVRAFLSRHVKNGGSIPKSDQLRRAYLPDGYENENQLLNSQDC

SEQ ID NO: 21118 - protein, 762 aa, Homo sapiens
MEGPRSSTHVPLVLPLLVLLLLAPARQAAAQRCPQACICDNSRRHVACRYQNLTEVPDAIPELTQRLDLQGNLLKVIPAAAFQGVPHLTHLDLRHCEVELVAEGAFRGLGRLLLLNLASNHLRELPQEALDGLGSLRRLELEGNALEELRPGTFGALGALATLNLAHNALVYLPAMAFQGLLRVRWLRLSHNALSVLAPEALAGLPALRRLSLHHNELQALPGPVLSQARGLARLELGHNPLTYAGEEDGLALPGLRELLLDGGALQALGPRAFAHCPRLHTLDLRGNQLDTLPPLQGPGQLRRLRLQGNPLWCGCQARPLLEWLARARVRSDGACQGPRRLRGEALDALRPWDLRCPGDAAQEEEELEERAVAGPRAPPRGPPRGPGEERAVAPCPRACVCVPESRHSSCEGCGLQAVPRGFPSDTQLLDLRRNHFPSVPRAAFPGLGHLVSLHLQHCGIAELEAGALAGLGRLIYLYLSDNQLAGLSAAALEGAPRLGYLYLERNRFLQVPGAALRALPSLFSLHLQDNAVDRLAPGDLGRTRALRWVYLSGNRITEVSLGALGPARELEKLHLDRNQLREVPTGALEGLPALLELQLSGNPLRALRDGAFQPVGRSLQHLFLNSSGLEQICPGAFSGLGPGLQSLHLQKNQLRALPALPSLSQLELIDLSSNPFHCDCQLLPLHRWLTGLNLRVGATCATPPNARGQRVKAAAAVFEDCPGWAARKAKRTPASRPSARRTPIKGRQCGADKVGKEKGRL

SEQ ID NO: 21119 - protein, 686 aa, Homo sapiens
MEGPRSSTHVPLVLPLLVLLLLAPARQAAAQRCPQACICDNSRRHVACRYQNLTEVPDAIPELTQRLDLQGNLLKVIPAAAFQGVPHLTHLDLRHCEVELVAEGAFRGLGRLLLLNLASNHLRELPQEALDGLGSLRRLELEGNALEELRPGTFGALGALATLNLAHNALVYLPAMAFQGLLRVRWLRLSHNALSVLAPEALAGLPALRRLSLHHNELQALPGPVLSQARGLARLELGHNPLTYAGEEDGLALPGLRELLLDGGALQALGPRAFAHCPRLHTLDLRGNQLDTLPPLQGPGQLRRLRLQGNPLWCGCQARPLLEWLARARVRSDGACQGPRRLRGEALDALRPWDLRCPGDAAQEEEELEERAVAGPRAPPRGPPRGPGEERAVAPCPRACVCVPESRHSSCEGCGLQAVPRGFPSDTQLLDLRRNHFPSVPRAAFPGLGHLVSLHLQHCGIAELEAGALAGLGRLIYLYLSDNQLAGLSAAALEGAPRLGYLYLERNRFLQVPGAALRALPSLFSLHLQDNAVDRLAPGDLGRTRALRWVYLSGNRITEVSLGALGPARELEKLHLDRNQLREVPTGALEGLPALLELQLSGNPLRALRDGAFQPVGRSLQHLFLNSSGLEQICPGAFSGLGPGLQSLHLQKNQLRALPALPSARRTPIKGRQCGADKVGKEKGRL

SEQ ID NO: 21120 - protein, 196 aa, Homo sapiens
MGSRSSHAAVIPDGDSIRRETGFSQASLLRLHHRFRALDRNKKGYLSRMDLQQIGALAVNPLGDRIIESFFPDGSQRVDFPGFVRVLAHFRPVEDEDTETQDPKKPEPLNSRRNKLHYAFQLYDLDRDGKISRHEMLQVLRLMVGVQVTEEQLENIADRTVQEADEDGDGAVSFVEFTKSLEKMDVEQKMSIRILK

SEQ ID NO: 21121 - protein, 318 aa, Homo sapiens
MLPLTMTVLILLLLPTGQAAPKDGVTRPDSEVQHQLLPNPFQPGQEQLGLLQSYLKGLGRTEVQLEHLSREQVLLYLFALHDYDQSGQLDGLELLSMLTAALAPGAANSPTTNPVILIVDKVLETQDLNGDGLMTPAELINFPGVALRHVEPGEPLAPSPQEPQAVGRQSLLAKSPLRQETQEAPGPREEAKGQVEARRESLDPVQEPGGQAEADGDVPGPRGEAEGQAEAKGDAPGPRGEAGGQAEAEGDAPGPRGEAGGQAEAEGDAPGPRGEAGGQAEARENGEEAKELPGETLESKNTQNDFEVHIVQVENDEI

SEQ ID NO: 21122 - protein, 132 aa, Homo sapiens
MLPLTMTVLILLLLPTGQAAPKDGVTRPDSEVQHQLLPNPFQPGQEQLGLLQSYLKGLGRTEVQLEHLSREQVLLYLFALHDYDQSGQLDGLELLSMLTAALAPGAANSPTTNPGNLDARLDGGEKAMQPQW

SEQ ID NO: 21123 - protein, 112 aa, Homo sapiens
MLTAALAPGAANSPTTNPVILIVDKVLETQDLNGDGLMTPAELINFPGVALRPYPPYIGVGPNSNMCSRSDLPEDSNTLYPGSHLWLRHALNSKGNLDARLDGGEKAMQPQW

SEQ ID NO: 21124 - protein, 3117 aa, Homo sapiens
MRSSKSKEVPLPNPRNSQSKDTVQADITTSWDALSQTKAALRHIENKLEVAPTSTAVCDSVMDTKKSSTSATRKISRKDGRYLDDSWVNAPISKSTKSRKEKSRSPLRATTLESNVKKNNRVEFREPLVSYREIHGAPSNFSSSHLESKHVYCVDVNEEKTESGNWMIGSREERNIRSCDFESSQSSVINDTVVRFLNDRPAIDALQNSECLIRMGASMRTEEEMPNRTKGSENNLKLSVNNMAHDTDPKALRLTDSSPSSTSTSNSQRLDILKRRQHDVKLEKLKERIRKQWEHSEETNGRGQKLGHIDHPVMVVNVDNSVTAKVRKVATAPPAPAYKGFNPSETKIRTPDGKVWQEAEFQNMSRELYRDLALHFADDISIKEKPAEKSKEKKVVKPVRKVQKVAQLSSTECRTGSSHLISTSSWRDGQKLVKKILGPAPRMEPKEQRTASSDRGGRERTAKSGGHIGRAESDPRLDVLHRHLQRNSERSRSKSRSENNIKKLASSLPDNKQEENTALNKDFLPIEIRGILDDLQLDSTAHTAKQDTVELQNQKSSAPVHAPRSHSPVKRKPDKITANEDPPVISKRRHYDTDEVRQYIVRQQEERKRKQNEEKKAQKEATEQKNKRLQELYRKQKEAFTKVKNVPPSEPSATRRLQETYSKLLLEKTLLEEPSHQHVTQETQAKPGYQPSGESDKENKVQERPPSASSSSDMSLSEPPQPLARKDLMESTWMQPERLSPQVHHSQPQPFAGTAGSLLSHLLSLEHVGILHKDFESILPTRKNHNMASRPLTFTPQPYVTSPAAYTDALLKPSASQYKSKLDRIEALKATAASLSSRIESEAKKLAGASINYGSAWNTEYDVQQAPQEDGPWTKAVTPPVKDDNEDVFSARIQKMLGSCVSHATFDDDLPGVGNLSEFKKLPEMIRPQSAISSFRVRSPGPKPEGLLAQLCKRQTDSSSSDMQACSQDKAKISLGSSIDSVSEGPLLSEGSLSEEEGDQDGQPLLKVAEILKEKEFCPGERNSYEPIKEFQKEAEKFLPLFGHIGGTQSKGPWEELAKGSPHSVINIFTKSYQLYGKGFEDKLDRGTSTSRPLNATATPLSGVSYEDDFVSSPGTGTSTEKKSTLEPHSTLSPQEDHSNRKSAYDPSSVDVTSQHSSGAQSAASSRSSTSSKGKKGKKEKTEWLDSFTGNVQNSLLDEEKAERGSHQGKKSGTSSKLSVKDFEQTLDTDSTLEDLSGHSVSVSSDKGRSQKTPTSPLSPSSQKSLQFDVAGTSSERSKSSVMPPTITGFKPNAPLTDLNPAASRTTTENMAPIPGSKRFSPAGLHHRMAAELSYLNAIEESVRQLSDVERVRGISLAQQESVSLAQIIKAQQQRHERDLALLKLKAEQEALESQRQLEETRNKAAQVHAESLQQVVQSQREVTEVLQEATCKIAAQQSETARLTTDAARQICEMAELTRTHISDAVVASGAPLAILYDHQRQHLPDFVKQLRTRTETDRKSPSVSLSQSKEGTLDSKHQKYSASYDSYSESSGYKNHDRRSSSGSSRQESPSVPSCKENEKKLNGEKIESSIDEQVQTAADDSLRSDSVPSLPDEKDSTSIATEYSLKFDESMTEDEIEEQSFRSLLPSESHRRFNMEKRRGHHDDSDEEASPEKTTLSTAKELNMPFSGGQDSFSKFTMEMVRQYMKEEEMRAAHQSSLLRLREKALKEKTKAELAWLEHQKKHLRDKGEDDKMPPLRKKQRGLLLRLQQEKAEIKRLQEANKAARKERQLILKQQEEIEKIRQTTIKLQEKLKSAGESKLDSHSDDDTKDNKATSPGPTDLETRSPSPISISSSETSSIMQKLKKMRSRMDEKFLTKREQKLMQRRQHAEELLEWKRRLDAEEAEIRQMEKQALAAWDKELIKPKTPKKELEDQRTEQKEIASEEESPVPLYSHLNSESSIPEELGSPAVEYVPSESIGQEQPGSPDHSILTEEMICSQELESSTSPSKHSLPKSCTSVSKQESSKGSHRTGGQCHLPIKSHQHCYSWSDESLSMTQSETTSDQSDIEGRIRALKDELRKRKSVVNQLKKEQKKRQKERLKAQEASLIKQLESYDEFIKKTEAELSQDLETSPTAKPQIKTLSSASEKPKIKPLTPLHRSETAKNWKSLTESERSRGSLESIAEHVDASLSGSERSVSERSLSAYAKRVNEWDSRTEDFQTPSPVLRSSRKIREESGDSLENVPALHLLKELNATSRILDMSDGKVGESSKKSEIKEIEYTKLKKSKIEDAFSKEGKSDVLLKLVLEQGDSSEILSKKDLPLDSENVQKDLVGLAIENLHKSEEMLKERQSDQDMNHSPNIQSGKDIHEQKNTKEKDLSWSEHLFAPKEIPYSEDFEVSSFKKEISAELYKDDFEVSSLLSLRKDSQSCRDKPQPMRSSTSGATSFGSNEEISECLSEKSLSIHSNVHSDRLLELKSPTELMKSKERSDVEHEQQVTESPSLASVPTADELFDFHIGDRVLIGNVQPGILRFKGETSFAKGFWAGVELDKPEGNNNGTYDGIAYFECKEKHGIFAPPQKISHIPENFDDYVDINEDEDCYSDERYQCYNQEQNDTEGPKDREKDVSEYFYEKSLPSVNDIEASVNRSRSLKIETDNVQDISGVLEAHVHQQSSVDSQISSKENKDLISDATEKVSIAAEDDTLDNTFSEELEKQQQFTEEEDNLYAEASEKLCTPLLDLLTREKNQLEAQLKSSLNEEKKSKQQLEKISLLTDSLLKVFVKDTVNQLQQIKKTRDEKIQLSNQELLGDDQKKVTPQDLSQNVEEQSPSISGCFLSSELEDEKEEISSPDMCPRPESPVFGASGQEELAKRLAELELSREFLSALGDDQDWFDEDFGLSSSHKIQKNKAEETIVPLMAEPKRVTQQPCETLLAVPHTAEEVEILVHNAAEELWKWKELGHDLHSISIPTKLLGCASKGLDIESTSKRVYKQAVFDLTKEIFEEIFAEDPNLNQPVWMKPCRINSSYFRRVKNPNNLDEIKSFIASEVLKLFSLKKEPNHKTDWQKMMKFGRKKRDRVDHILVQELHEEEAQWVNYDEDELCVKMQLADGIFETLIKDTIDVLNQISEKQGRMLLV

SEQ ID NO: 21125 - protein, 344 aa, Homo sapiens
MACAVFQIPPWHLDRKYGSCSTILLDNSTASQPDLRHTLERYANRSLAIFEEPVHPLPQEKLPGKSFKHDPKRNCIFRHFCTLFQVIKLTAPCAIVALVYIKRLLTSANIDLCPTNWKKIVLGTMLLASKVWRNHGLWSVDDSQNSKDTAVENMSKMEKCFLELLEFNIHVSASVYAKYYFDLCALANDHDLYFLFSFLHKDKAQKLEGHTSQHSLSLGPCRVGMENYATYSPLSSQPVLGALSLAEVLPQEIKQEIHQVLMDHGVPCHYTCFLLHPEDSTLERFLVLHSIQGLQEDSVLCKVEIHGLSPQPQTYQSHFRSPSLAELLNRISGTCRNHFAGMQK

SEQ ID NO: 21126 - protein, 3096 aa, Homo sapiens
MAAQGSPSSSPSDDSTTSGSLPELPPTSTATSRSPPESKGSSRSSLLQWTCPEDSLPLAVFYGPLDAKNPLLASCEKEIQELLGFMRKKKALATTEEEKHEFRRRCATSLFNIWTKYAPRLPADYYNEKLLKVGDSLCQMKEYKLALLQCYGRYLQQFNTNFDENKVDVTQFKATFFPKGFKDKTAGLTFHALSGKNMCNYQLVCDSDENLKNKESVVQCLHILSSLRLIMQVALPQEHLCWIIFNGTIYIYTICRKLMVIGQSSKALEYLLWASMCMESLVPLLSLRYLTWRATLYTAVCQCCYDCHAGIHGEAFARRALAKIDELRQLELMSSSKSQEESRRYFREATMKMAVMIFKRGVFESRRKNKAVFRPKIRINLREVQTLSWPRTVTERLLDEMFDSTASQFLAVLEALSDSNRRILQTGPIVTDEVEIHDVVSELFMAGKELLIMSNIGADGMLDFPKTSLLELMIGRKDVISVDAAVKFIKLAFTYEEWSLFESSAVHLIYFLQRQDDPESKKAEKDLTLLIAMEPLINVKRNKGLIFPLENYKEGQSTQIYLKKIAVHDTCLKTCGYSEDIFHLAATLYVCVCTAPQDVQPDKEIVVDTIMFLWQKCKLGIQRLNISRNDYAKFTQKISTNKWIYLLWQINEVIHCYKMEDIDIVVVAEVTLRLSEILESLGSPGRKFKQSLDVPLREGTNKFPGAPKGITEILPILQKNPVEQLLFAYKLLDRAIGGINLNCMLTSLPNGSSVIDHCYAKRTHHIDGDTYKPLASNSFMMDLHLELIQAQHRIAVVLLDKLQVLQTPTVSKDISTKGPEKLKQSGSTDCFTELNIMNKIKKNTLSKAIYLMQKALLIFEKDATSTSSWELLMEAYSLIQRIEAEQNALYSYQKYLESSKRKKSRVPPPPILLSRTHCSVTLKPAPFTSEVKVSWYCILGCKAEGSYGKVRLNNNHLPNSGEAIPADGKSVFEVKGLETNEKYVFAVAAYSNNGKLVGGAIGETTKPILVYPPLSTITARMFLTQVAYQVGNYELAKKVFSPVWDYFVASPLQDEQSVICLSNIITITQRRLHSDILAETSSILLYLFLRNIFVTSDIKIKEENLFCDNIKGNEIFPSQQIARLIECERVLVALELSNFLNDSSYALQAVTQCYGLLAPIIYHNIVLVPVVQILIKCIVVLQGLPSIVCSKKHTASFESIQHMIACCIFYITKILRSWREYDLAVMIINYGKKMLDITPGCKSLFDGSNEQEEMPEEDSSKKSLKTKKPQQILLPEKINEQLALLETHLLKLTKQYVTSELSGGEDPIFLYPVVLNWSVKGAVKEVMKFKQKPRFLEFFTQVMLKCMNEEKFHLMVEVTTPVHDFLKRRNESLLGLIKVKYKDSALNKKANKSLKFKAAVMEIGRSAEMQQRIRSKKKETLRDFIFKNPAISEMVAHERNRRTSVRKAAQRYLMDYLNPLILSYVKRKRFHRLSLEEMPWRAQMNLYLAGAHFNLVLQKLWECTKMKFGTSHMMVSFRSCDPNMFSLYNSGTVLPTRKLTVENYKAMLDFLLTAKKRKANLPSDAEEFSTFINSIMSDENMSKTQTVYDSDSQSGSSAKEKDRGANLCVMDHFMKIFLYCRRAMVLAHRGGYWTLLQNCCRALWNFTQELQILLKQAVDLDKTFPISQDGFLCTSVLPFYLGAELLIDMLIQLQNTSSIKPIEDKGEFSVPSCYGNIKNDNGGSSLTFEHPLDDVNVVDLKWIHDFVLKSLEVLYQVEKWETLVSLAIQFNTVSHERYTEQVTPLLVYAQRQLLLRIQKFKGPDITQQPCARYEAEYGEKITCRNFIGKQLKINSSTIEATSNCTDLLKMLISSEYSRAKALVCVPVDVTDTLRCFRETLEKSKYHNRSIRHSRKLLSLFLAQTQDVLQASNQRSLKVQALHSLGSLLIFAEKKRAAFKCWCQALDDIFRKPDVLHTWKEFGPSLTNVTNSHSPPGFKDYSEEFLSRVGIWGCLQGAVISAKIAQFIKSLNVEKKTDCCILSALLFQGLLRTTLPHPKAERCYAQYEITQLLPGIELFSDRYRADICSVIASLYYIIRELHFVRQNLIVLPLLALYQYFVSGICQDITRNLEARILKIEVLIDLRFFSEAFYEISQIFYGKNMPCPIPAGYKATGKMKIFQSFDSGKLLTSKENIQAIDELRNKGLPAVLVTIGQPHLLNKFNFVKAYFFLSVAATINCVPENKFKTVITNKSKPNLPNLEEIYSKDDGSSFYNLTKLKDEITLSMLKSMLLMEAEDRLNFLLSEVEQKTLSQCSAGELEIVVEARLQLAAVALQRHRAAYSAAIVFSTLTLLQDSKLFEKKVVQDDTENPVSPGTSVTENKDDSEFLDPISLNAREYFNIHLWLRCRLALVTAFVAQIHGIGIVKEDDMTDCLSLINEVCMEAKSAGDTELQAEFLTQAVILGLQEKHLKADIMTNLQDIIHLLEGNEFISPQSRLTLARSLVLLDDLTKAEKFKESPSSKTGKLNLLTRAHSILTEQMLAFGETIEFRSSNTKYANPLQPLKNIYLPHVMLLAKIKMRIGHTVAKQVYYKNKRKDPSKWLPALHLFDVALKLCRTTAVEEHEVEAEILFQKGKIERQILMEEKSPSFQLESLYEAIQLSLKNDQNSGLIRDSYLEMALLYFHLKKPKIKISGSPLTLKPPLRRSSSVKETSANKFEMYSSLAWIAIRAAAQVSEAVLAINLLIGKKNTRMHKVNQVALPNIPEFAALDLLSSYTDYLLDNYQVLFQTSCTFLYQNDDVCDSADGRKKTQTKVDITWILLLRYYIHLQRINNLSKLLASATPVSGISLPDDTLLTSLYNSELILRQKEVHFFLKKFLQLYSSSCIDEFPKELLCQLENPPLSEKDLRESSAKLYRDSSVQSILSFKPVSGSSCVDITPIEMVTQASNKELCFQWYIPPLDRPPKETEPMVLLLYAYNLKPLKISDVRHSTYNSTCVGSLWIPLNRVIAIHEKLSNLAQIAELSLPAAPEITSNENIYEVEVEEESVDNEMEDMIIQCCSEIASLFLNDKEPTPLSEVPFDISLPSIFNLERLFDLANGCILSGGSLFNWIVSIIP

SEQ ID NO: 21127 - protein, 2772 aa, Homo sapiens
MAAQGSPSSSPSDDSTTSGSLPELPPTSTATSRSPPESKGSSRSSLLQWTCPEDSLPLAVFYGPLDAKNPLLASCEKEIQELLGFMRKKKALATTEEEKHEFRRRCATSLFNIWTKYAPRLPADYYNEKLLKVGDSLCQMKEYKLALLQCYGRYLQQFNTNFDENKVDVTQFKATFFPKGFKDKTAGLTFHALSGKNMCNYQLVCDSDENLKNKESVVQCLHILSSLRLIMQVALPQEHLCWIIFNGTIYIYTICRKLMVIGQSSKALEYLLWASMCMESLVPLLSLRYLTWRATLYTAVCQCCYDCHAGIHGEAFARRALAKIDELRQLELMSSSKSQEESRRYFREATMKMAVMIFKRGVFESRRKNKAVFRPKIRINLREVQTLSWPRTVTERLLDEMFDSTASQFLAVLEALSDSNRRILQTGPIVTDEVEIHDVVSELFMAGKELLIMSNIGADGMLDFPKTSLLELMIGRKDVISVDAAVKFIKLAFTYEEWSLFESSAVHLIYFLQRQDDPESKKAEKDLTLLIAMEPLINVKRNKGLIFPLENYKEGQSTQIYLKKIAVHDTCLKTCGYSEDIFHLAATLYVCVCTAPQDVQPDKEIVVDTIMFLWQKCKLGIQRLNISRNDYAKFTQKISTNKWIYLLWQINEVIHCYKMEDIDIVVVAEVTLRLSEILESLGSPGRKFKQSLDVPLREGTNKFPGAPKGITEILPILQKNPVEQLLFAYKLLDRAIGGINLNCMLTSLPNGSSVIDHCYAKRTHHIDGDTYKPLASNSFMMDLHLELIQAQHRIAVVLLDKLQVLQTPTVSKDISTKGPEKLKQSGSTDCFTELNIMNKIKKNTLSKAIYLMQKALLIFEKDATSTSSWELLMEAYSLIQRIEAEQNALYSYQKYLESSKRKKSRVPPPPILLSRTHCSVTLKPAPFTSEVKVSWYCILGCKAEGSYGKVRLNNNHLPNSGEAIPADGKSVFEVKGLETNEKYVFAVAAYSNNGKLVGGAIGETTKPILVYPPLSTITARMFLTQVAYQVGNYELAKKVFSPVWDYFVASPLQDEQSVICLSNIITITQRRLHSDILAETSSILLYLFLRNIFVTSDIKIKEENLFCDNIKGNEIFPSQQIARLIECERVLVALELSNFLNDSSYALQAVTQCYGLLAPIIYHNIVLVPVVQILIKCIVVLQGLPSIVCSKKHTASFESIQHMIACCIFYITKILRSWREYDLAVMIINYGKKMLDITPGCKSLFDGSNEQEEMPEEDSSKKSLKTKKPQQILLPEKINEQLALLETHLLKLTKQYVTSELSGGEDPIFLYPVVLNWSVKGAVKEVMKFKQKPRFLEFFTQVMLKCMNEEKFHLMVEVTTPVHDFLKRRNESLLGLIKVKYKDSALNKKANKSLKFKAAVMEIGRSAEMQQRIRSKKKETLRDFIFKNPAISEMVAHERNRRTSVRKAAQRYLMDYLNPLILSYVKRKRFHRLSLEEMPWRAQMNLYLAGAHFNLVLQKLWECTKMKFGTSHMMVSFRSCDPNMFSLYNSGTVLPTRKLTVENYKAMLDFLLTAKKRKANLPSDAEEFSTFINSIMSDENMSKTQTVYDSDSQSGSSAKEKDRGANLCVMDHFMKIFLYCRRAMVLAHRGGYWTLLQNCCRALWNFTQELQILLKQAVDLDKTFPISQDGFLCTSVLPFYLGAELLIDMLIQLQNTSSIKPIEDKGEFSVPSCYGNIKNDNGGSSLTFEHPLDDVNVVDLKWIHDFVLKSLEVLYQVEKWETLVSLAIQFNTVSHERYTEQVTPLLVYAQRQLLLRIQKFKGPDITQQPCARYEAEYGEKITCRNFIGKQLKINSSTIEATSNCTDLLKMLISSEYSRAKALVCVPVDVTDTLRCFRETLEKSKYHNRSIRHSRKLLSLFLAQTQDVLQASNQRSLKVQALHSLGSLLIFAEKKRAAFKCWCQALDDIFRKPDVLHTWKEFGPSLTNVTNSHSPPGFKDYSEEFLSRVGIWGCLQGAVISAKIAQFIKSLNVEKKTDCCILSALLFQGLLRTTLPHPKAERCYAQYEITQLLPGIELFSDRYRADICSVIASLYYIIRELHFVRQNLIVLPLLALYQYFVSGICQDITRNLEARILKIEVLIDLRFFSEAFYEISQIFYGKNMPCPIPAGYKATGKMKIFQSFDSGKLLTSKENIQAIDELRNKGLPAVLVTIGQPHLLNKFNFVKAYFFLSVAATINCVPENKFKTVITNKSKPNLPNLEEIYSKDDGSSFYNLTKLKDEITLSMLKSMLLMEAEDRLNFLLSEVEQKTLSQCSAGELEIVVEARLQLAAVALQRHRAAYSAAIVFSTLTLLQDSKLFEKKVVQDDTENPVSPGTSVTENKDDSEFLDPISLNAREYFNIHLWLRCRLALVTAFVAQIHGIGIVKEDDMTDCLSLINEVCMEAKSAGDTELQAEFLTQAVILGLQEKHLKADIMTNLQDIIHLLEGNEFISPQSRLTLARSLVLLDDLTKAEKFKESPSSKTGKLNLLTRAHSILTEQMLAFGETIEFRSSNTKYANPLQPLKNIYLPHVMLLAKIKMRIGHTVAKQVYYKNKRKDPSKWLPALHLFDVALKLCRTTAVEEHEVEAEILFQKGKIERQILMEEKSPSFQLESLYEAIQLSLKNDQNSGLIRDSYLEMALLYFHLKKPKIKISGSPLTLKPPLRRSSSVKETSANKFEMYSSLAWIAIRAAAQVSEAVLAINLLIGKKNTRMHKVNQVALPNIPEFAALDLLSSYTDYLLGMFGCLHIMQKN

SEQ ID NO: 21128 - protein, 222 aa, Homo sapiens
MGLFGKTQEKPPKELVNEWSLKIRKEMRVVDRQIRDIQREEEKVKRSVKDAAKKGQKDVCIVLAKEMIRSRKAVSKLYASKAHMNSVLMGMKNQLAVLRVAGSLQKSTEVMKAMQSLVKIPEIQATMRELSKEMMKAGIIEEMLEDTFESMDDQEEMEEEAEMEIDRILFEITAGALGKAPSKVTDALPEPEPPGAMAASEDEEEEEEALEAMQSRLATLRS

SEQ ID NO: 21129 - protein, 156 aa, Homo sapiens
MIRSRKAVSKLYASKAHMNSVLMGMKNQLAVLRVAGSLQKSTEVMKAMQSLVKIPEIQATMRELSKEMMKAGIIEEMLEDTFESMDDQEEMEEEAEMEIDRILFEITAGALGKAPSKVTDALPEPEPPGAMAASEDEEEEEEALEAMQSRLATLRS

SEQ ID NO: 21130 - protein, 251 aa, Homo sapiens
MEGELYSALKEEEASESVSSTNFSGEMHFYELVEDTKDGIWLVQVNEWSLKIRKEMRVVDRQIRDIQREEEKVKRSVKDAAKKGQKDVCIVLAKEMIRSRKAVSKLYASKAHMNSVLMGMKNQLAVLRVAGSLQKSTEVMKAMQSLVKIPEIQATMRELSKEMMKAGIIEEMLEDTFESMDDQEEMEEEAEMEIDRILFEITAGALGKAPSKVTDALPEPEPPGAMAASEDEEEEEEALEAMQSRLATLRS

SEQ ID NO: 21131 - protein, 182 aa, Homo sapiens
MGLFGKTQEKPPKELVNEWSLKIRKEMRVVDRQIRDIQREEEKVKRSVKDAAKKGQKDVCIVLAKEMIRSRKAMQSLVKIPEIQATMRELSKEMMKAGIIEEMLEDTFESMDDQEEMEEEAEMEIDRILFEITAGALGKAPSKVTDALPEPEPPGAMAASEDEEEEEEALEAMQSRLATLRS

SEQ ID NO: 21132 - protein, 345 aa, Homo sapiens
MQRLVAWDPACLPLPPPPPAFKSMEVANFYYEADCLAAAYGGKAAPAAPPAARPGPRPPAGELGSIGDHERAIDFSPYLEPLGAPQAPAPATATDTFEAAPPAPAPAPASSGQHHDFLSDLFSDDYGGKNCKKPAEYGYVSLGRLGAAKGALHPGCFAPLHPPPPPPPPPAELKAEPGFEPADCKRKEEAGAPGGGAGMAAGFPYALRAYLGYQAVPSGSSGSLSTSSSSSPPGTPSPADAKAPPTACYAGAAPAPSQVKSKAKKTVDKHSDEYKIRRERNNIAVRKSRDKAKMRNLETQHKVLELTAENERLQKKVEQLSRELSTLRNLFKQLPEPLLASSGHC

SEQ ID NO: 21133 - protein, 322 aa, Homo sapiens
MEVANFYYEADCLAAAYGGKAAPAAPPAARPGPRPPAGELGSIGDHERAIDFSPYLEPLGAPQAPAPATATDTFEAAPPAPAPAPASSGQHHDFLSDLFSDDYGGKNCKKPAEYGYVSLGRLGAAKGALHPGCFAPLHPPPPPPPPPAELKAEPGFEPADCKRKEEAGAPGGGAGMAAGFPYALRAYLGYQAVPSGSSGSLSTSSSSSPPGTPSPADAKAPPTACYAGAAPAPSQVKSKAKKTVDKHSDEYKIRRERNNIAVRKSRDKAKMRNLETQHKVLELTAENERLQKKVEQLSRELSTLRNLFKQLPEPLLASSGHC

SEQ ID NO: 21134 - protein, 147 aa, Homo sapiens
MAAGFPYALRAYLGYQAVPSGSSGSLSTSSSSSPPGTPSPADAKAPPTACYAGAAPAPSQVKSKAKKTVDKHSDEYKIRRERNNIAVRKSRDKAKMRNLETQHKVLELTAENERLQKKVEQLSRELSTLRNLFKQLPEPLLASSGHC

SEQ ID NO: 21135 - protein, 186 aa, Homo sapiens
MASVSYQKPTSTTVGKQMIFTGPDYIKDYLPKIHQHTSYVGEQHLALEKTGDLRYLWRPASNRSLPAKYKHEYVSEIGWRIPQYNFINKSRLGSGFHIKYEELSQASLDSITHRYQNPWQPKPHVLDMQGKQSRASFAWHMSAFEDTDQRNSKWAILVRQCKSSLPRASKPPKLPKLPKKEKKRKH

SEQ ID NO: 21136 - protein, 219 aa, Homo sapiens
MNRLFGKAKPKAPPPSLTDCIGTVDSRAESIDKKISRLDAELVKYKDQIKKMREGPAKNMVKQKALRVLKQKRMYEQQRDNLAQQSFNMEQANYTIQSLKDTKTTVDAMKLGVKEMKKAYKQVKIDQIEDLQDQLEDMMEDANEIQEALSRSYGTPELDEDDLEAELDALGDELLADEDSSYLDEAASAPAIPEGVPTDTKNKDGVLVDEFGLPQIPAS

SEQ ID NO: 21137 - protein, 171 aa, Homo sapiens
MNRLFGKAKPKAPPPSLTDCIGTVDSRAESIDKKISRLDAELVKYKDQIKKMREGPAKNMVKQKALRVLKQKRMYEQQRDNLAQQSFNMEQANYTIQSLKDTKTTVDAMKLGVKEMKKAYKQVKIDQIEDLQDQLEDMMEDANEIQEALSRSYGTPELDEDDLEAGWSSGG

SEQ ID NO: 21138 - protein, 767 aa, Homo sapiens
MSHAVTIEEPQAQPQVSQTRYRERSRAGSHISSNRAYDFLYDPLFIVSSEKDHTQANIQATLIRSRLRKVPRFKTMFSNLIHYPRYSLYWSKSDPVPPFISREWKGHKEKHREALRQLTTTDASFQMPKEVYEDPEVTGKNRYKYFERPFLPFFQQMPFNVVYAVSKAEPYTFPPTSTKHLSIPSKSTVGTQTDYRDADVQTDPYSAEYVVCQDSIPELLTLATLTWGRGLPAGQAEVEMIERAREKRAWEASLPALSDTSQFEKRRKMMNEMERKEWAFREQEIEKLQEIRLEVLKELLRKREENQNEVNMKHLNARWSKLQEGKEAKMAKIQRTHVSTIRKLVGKRKNIEGKLERRNIIKDYSDYASQVYGPLSRLGCFPDNNSEDFVVKNYYLNTYEGLVELESCLPDFVTQPQIRAPKPKVITTKAGFLKRAARLDYELAEVHKALLDKKNKVLEVKKPPRFLQRNPIPQPRLPTPTLEMTSNEEEEMEMAVIYLQKLLRGRVVQNMMFEGKEKRLELIQELRTCHALQEDEKLVKKAEKQVTLALQRQRNLHEHKVSLVENHLAGLEGRALADMFDFLSKELVRLQEERRIHAFVMLAERQRRVREAEESGRRQVEKQRLREEDEIFKEVVKVHHSTISSYLEDIILNTEANTAEEQARAEIEKMAEKINDIAYEMESRRTYLQSEEIVAELVYSFLIPEVQKYFVKEKVRNAQRKHILAAHQIIHSYTESMVQKKLTEGEQDEASNAAMLLEKETQNENNS

SEQ ID NO: 21139 - protein, 603 aa, Homo sapiens
MSHAVTIEEPQAQPQVSQTRYRERSRAGSHISSNRAYDFLYDPLFIVSSEKDHTQANIQATLIRSRLRKVPRFKTMFSNLIHYPRYSLYWSKSDPVPPFISREWKGHKEKHREALRQLTTTDASFQMPKEVYEDPEVTGKNRYKYFERPFLPFFQQMPFNVVYAVSKAEPYTFPPTSTKHLSIPSKSTVGTQTDYRDADVQTDPYSAEYVVCQDSIPELLTLATLTWGRGLPAGQAEVEMIERAREKRAWEASLPALSDTSQFEKRRKMMNEMERKEWAFREQEIEKLQEIRLEVLKELLRKREENQNEVNMKHLNARWSKLQEGKEAKMAVIYLQKLLRGRVVQNMMFEGKEKRLELIQELRTCHALQEDEKLVKKAEKQVTLALQRQRNLHEHKVSLVENHLAGLEGRALADMFDFLSKELVRLQEERRIHAFVMLAERQRRVREAEESGRRQVEKQRLREEDEIFKEVVKVHHSTISSYLEDIILNTEANTAEEQARAEIEKMAEKINDIAYEMESRRTYLQSEEIVAELVYSFLIPEVQKYFVKEKVRNAQRKHILAAHQIIHSYTESMVQKKLTEGEQDEASNAAMLLEKETQNENNS

SEQ ID NO: 21140 - protein, 238 aa, Homo sapiens
MSHAVTIEEPQAQPQVSQTRYRERSRAGSHISSNRAYDFLYDPLFIVSSEKDHTQANIQATLIRSRLRKVPRFKTMFSNLIHYPRYSLYWSKSDPVPPFISREWKGHKEKHREALRQLTTTDASFQMPKEVYEDPEVTGKNRYKYFERPFLPFFQQMPFNVVYAVSKAEPYTFPPTSTKHLSIPSKSTVGTQTDYRDADVQTDPYSAEYVVCQDSIPELLTLATLTWGELVNLLTIGR

SEQ ID NO: 21141 - protein, 705 aa, Homo sapiens
MIFCTRKVPRFKTMFSNLIHYPRYSLYWSKSDPVPPFISREWKGHKEKHREALRQLTTTDASFQMPKEVYEDPEVTGKNRYKYFERPFLPFFQQMPFNVVYAVSKAEPYTFPPTSTKHLSIPSKSTVGTQTDYRDADVQTDPYSAEYVVCQDSIPELLTLATLTWGRGLPAGQAEVEMIERAREKRAWEASLPALSDTSQFEKRRKMMNEMERKEWAFREQEIEKLQEIRLEVLKELLRKREENQNEVNMKHLNARWSKLQEGKEAKMAKIQRTHVSTIRKLVGKRKNIEGKLERRNIIKDYSDYASQVYGPLSRLGCFPDNNSEDFVVKNYYLNTYEGLVELESCLPDFVTQPQIRAPKPKVITTKAGFLKRAARLDYELAEVHKALLDKKNKVLEVKKPPRFLQRNPIPQPRLPTPTLEMTSNEEEEMEMAVIYLQKLLRGRVVQNMMFEGKEKRLELIQELRTCHALQEDEKLVKKAEKQVTLALQRQRNLHEHKVSLVENHLAGLEGRALADMFDFLSKELVRLQEERRIHAFVMLAERQRRVREAEESGRRQVEKQRLREEDEIFKEVVKVHHSTISSYLEDIILNTEANTAEEQARAEIEKMAEKINDIAYEMESRRTYLQSEEIVAELVYSFLIPEVQKYFVKEKVRNAQRKHILAAHQIIHSYTESMVQKKLTEGEQDEASNAAMLLEKETQNENNS

SEQ ID NO: 21142 - protein, 641 aa, Homo sapiens
MPKEVYEDPEVTGKNRYKYFERPFLPFFQQMPFNVVYAVSKAEPYTFPPTSTKHLSIPSKSTVGTQTDYRDADVQTDPYSAEYVVCQDSIPELLTLATLTWGRGLPAGQAEVEMIERAREKRAWEASLPALSDTSQFEKRRKMMNEMERKEWAFREQEIEKLQEIRLEVLKELLRKREENQNEVNMKHLNARWSKLQEGKEAKMAKIQRTHVSTIRKLVGKRKNIEGKLERRNIIKDYSDYASQVYGPLSRLGCFPDNNSEDFVVKNYYLNTYEGLVELESCLPDFVTQPQIRAPKPKVITTKAGFLKRAARLDYELAEVHKALLDKKNKVLEVKKPPRFLQRNPIPQPRLPTPTLEMTSNEEEEMEMAVIYLQKLLRGRVVQNMMFEGKEKRLELIQELRTCHALQEDEKLVKKAEKQVTLALQRQRNLHEHKVSLVENHLAGLEGRALADMFDFLSKELVRLQEERRIHAFVMLAERQRRVREAEESGRRQVEKQRLREEDEIFKEVVKVHHSTISSYLEDIILNTEANTAEEQARAEIEKMAEKINDIAYEMESRRTYLQSEEIVAELVYSFLIPEVQKYFVKEKVRNAQRKHILAAHQIIHSYTESMVQKKLTEGEQDEASNAAMLLEKETQNENNS

SEQ ID NO: 21143 - protein, 747 aa, Homo sapiens
MIFCTVRTAADLPLRPSPPRPDPLFIVSSEKDHTQANIQATLIRSRLRKVPRFKTMFSNLIHYPRYSLYWSKSDPVPPFISREWKGHKEKHREALRQLTTTDASFQMPKEVYEDPEVTGKNRYKYFERPFLPFFQQMPFNVVYAVSKAEPYTFPPTSTKHLSIPSKSTVGTQTDYRDADVQTDPYSAEYVVCQDSIPELLTLATLTWGRGLPAGQAEVEMIERAREKRAWEASLPALSDTSQFEKRRKMMNEMERKEWAFREQEIEKLQEIRLEVLKELLRKREENQNEVNMKHLNARWSKLQEGKEAKMAKIQRTHVSTIRKLVGKRKNIEGKLERRNIIKDYSDYASQVYGPLSRLGCFPDNNSEDFVVKNYYLNTYEGLVELESCLPDFVTQPQIRAPKPKVITTKAGFLKRAARLDYELAEVHKALLDKKNKVLEVKKPPRFLQRNPIPQPRLPTPTLEMTSNEEEEMEMAVIYLQKLLRGRVVQNMMFEGKEKRLELIQELRTCHALQEDEKLVKKAEKQVTLALQRQRNLHEHKVSLVENHLAGLEGRALADMFDFLSKELVRLQEERRIHAFVMLAERQRRVREAEESGRRQVEKQRLREEDEIFKEVVKVHHSTISSYLEDIILNTEANTAEEQARAEIEKMAEKINDIAYEMESRRTYLQSEEIVAELVYSFLIPEVQKYFVKEKVRNAQRKHILAAHQIIHSYTESMVQKKLTEGEQDEASNAAMLLEKETQNENNS

SEQ ID NO: 21144 - protein, 31 aa, Homo sapiens
MVQKKLTEGEQDEASNAAMLLEKETQNENNS

SEQ ID NO: 21145 - protein, 213 aa, Homo sapiens
MPDENIFLFVPNLIGYARIVFAIISFYFMPCCPLTASSFYLLSGLLDAFDGHAARALNQGTRFGAMLDMLTDRCSTMCLLVNLALLYPGATLFFQISMSLDVASHWLHLHSSVVRGSESHKMIDLSGNPVLRIYYTSRPALFTLCAGNELFYCLLYLFHFSEGPLVGSVGLFRMGLWVTAPIALLKSLISVIHLITAARNMAALDAADRAKKK

SEQ ID NO: 21146 - protein, 182 aa, Homo sapiens
MLPTAAGFSIWGQVGAAREAPRCQTKISSCSCPTSSVSAAHGPGPNERARGLGGLPDPALSPRVPFQGYARIVFAIISFYFMPCCPLTASSFYLLSGLLDAFDGHAARALNQGTRFGAMLDMLTDRCSTMCLLVNLALLYPGATLFFQISMSLDVASHWLHLHRSAAILGAWATWRHYSGVG

SEQ ID NO: 21147 - protein, 168 aa, Homo sapiens
MPDENIFLFVPNLIGTRFGAMLDMLTDRCSTMCLLVNLALLYPGATLFFQISMSLDVASHWLHLHSSVVRGSESHKMIDLSGNPVLRIYYTSRPALFTLCAGNELFYCLLYLFHFSEGPLVGSVGLFRMGLWVTAPIALLKSLISVIHLITAARNMAALDAADRAKKK

SEQ ID NO: 21148 - protein, 453 aa, Homo sapiens
MWSPEREAEAPAGGDPAGLLPPEWEEDEERMSFLFSAFKRSREVNSTDWDSKMGFWAPLVLSHSRRQGVVRLRLRDLQEAFQRKGSVPLGLATVLQDLLRRGELQRESDFMASVDSSWISWGVGVFLLKPLKWTLSNMLGDNKVPAEEVLVAVELLKEKAEEVYRLYQNSPLSSHPVVALSELSTLCANSCPDERTFYLVLLQLQKEKRVTVLEQNGEKIVKFARGPRAKVSPVNDVDVGVYQLMQSEQLLSRKVESLSQEAERCKEEARRACRAGKKQLALRSLKAKQRTEKRIEALHAKLDTVQGILDRIYASQTDQMVFNAYQAGVGALKLSMKDVTVEKAESLVDQIQELCDTQDEVSQTLAGGVTNGLDFDSEELEKELDILLQDTTKEPLDLPDNPRNRHFTNSVPNPRISDAELEAELEKLSLSEGGLVPSSKSPKRQLEPTLKPL

SEQ ID NO: 21149 - protein, 163 aa, Homo sapiens
MWSPEREAEAPAGGDPAGLLPPEWEEDEERMSFLFSAFKRSREVNSTDWDSKMGFWAPLVLSHSRRQGVVRLRLRDLQEAFQRKGSVPLGLATVLQDLLRKRLRRCIVCIRTRPSPPTPWWPCQSSAPSVLTPAQMRGPSTWCCCSCRRRRGSQSSSRTGRRL

SEQ ID NO: 21150 - protein, 496 aa, Homo sapiens [sequence omitted]

SEQ ID NO: 21151 - protein, 570 aa, Homo sapiens
MPLYGRARDHVTHPSILGTRPGRPMAGPITAAVPEKICNGAFCSCSGAFPLDPNNPSLGPLPSISHLNLRTQIAMDRMKKIKRQLSMTLRGGRGIDKTNGAPEQIGLDESGGGGGSDPGEAPTRAAPGELRSARGPLSSAPEIVHEDLKMGSDGESDQASATSSDEVQSPVRVRMRNHPPRKISTEDINKRLSLPADIRLPEGYLEKLTLNSPIFDKPLSRRLRRVSLSEIGFGKLETYIKLDKLGEGTYATVYKGKSKLTDNLVALKEIRLEHEEGAPCTAIREVSLLKDLKHANIVTLHDIIHTEKSLTLVFEYLDKDLKQYLDDCGNIINMHNVKLFLFQLLRGLAYCHRQKVLHRDLKPQNLLINERGELKLADFGLARAKSIPTKTYSNEVVTLWYRPPDILLGSTDYSTQIDMWGVGCIFYEMATGRPLFPGSTVEEQLHFIFRILGTPTEETWPGILSNEEFKTYNYPKYRAEALLSHAPRLDSDGADLLTKLLQFEGRNRISAEDAMKHPFFLSLGERIHKLPDTTSIFALKEIQLQKEASLRSSSMPDSGRPAFRVVDTEF

SEQ ID NO: 21152 - protein, 502 aa, Homo sapiens
MQSEIAMDRMKKIKRQLSMTLRGGRGIDKTNGAPEQIGLDESGGGGGSDPGEAPTRAAPGELRSARGPLSSAPEIVHEDLKMGSDGESDQASATSSDEVQSPVRVRMRNHPPRKISTEDINKRLSLPADIRLPEGYLEKLTLNSPIFDKPLSRRLRRVSLSEIGFGKLETYIKLDKLGEGTYATVYKGKSKLTDNLVALKEIRLEHEEGAPCTAIREVSLLKDLKHANIVTLHDIIHTEKSLTLVFEYLDKDLKQYLDDCGNIINMHNVKLFLFQLLRGLAYCHRQKVLHRDLKPQNLLINERGELKLADFGLARAKSIPTKTYSNEVVTLWYRPPDILLGSTDYSTQIDMWGVGCIFYEMATGRPLFPGSTVEEQLHFIFRILGTPTEETWPGILSNEEFKTYNYPKYRAEALLSHAPRLDSDGADLLTKLLQFEGRNRISAEDAMKHPFFLSLGERIHKLPDTTSIFALKEIQLQKEASLRSSSMPDSGRPAFRVVDTEF

SEQ ID NO: 21153 - protein, 349 aa, Homo sapiens
MTAASMGPVRVAFVVLLALCSRPAVGQNCSGPCRCPDEPAPRCPAGVSLVLDGCGCCRVCAKQLGELCTERDPCDPHKGLFCHFGSPANRKIGVCTAKDGAPCIFGGTVYRSGESFQSSCKYQCTCLDGAVGCMPLCSMDVRLPSPDCPFPRRVKLPGKCCEEWVCDEPKDQTVVGPALAAYRLEDTFGPDPTMIRANCLVQTTEWSACSKTCGMGISTRVTNDNASCRLEKQSRLCMVRPCEADLEENIKKGKKCIRTPKISKPIKFELSGCTSMKTYRAKFCGVCTDGRCCTPHRTTTLPVEFKCPDGEVMKKNMMFIKTCACHYNCPGDNDIFESLYYRKMYGDMA

SEQ ID NO: 21154 - protein, 322 aa, Homo sapiens
MTAASMGPVRVAFVVLLALCSRPAVGQNCSGPCRCPDEPAPRCPAGVSLVLDGCGCCRVCAKQLGELCTERDPCDPHKGLFCHFGSPANRKIGVCTAKDGAPCIFGGTVYRSGESFQSSCKYQCTCLDGAVGCMPLCSMDVRLPSPDCPFPRRVKLPGKCCEEWVCDEPKDCLVQTTEWSACSKTCGMGISTRVTNDNASCRLEKQSRLCMVRPCEADLEENIKKGKKCIRTPKISKPIKFELSGCTSMKTYRAKFCGVCTDGRCCTPHRTTTLPVEFKCPDGEVMKKNMMFIKTCACHYNCPGDNDIFESLYYRKMYGDMA

SEQ ID NO: 21155 - protein, 2897 aa, Homo sapiens
MTDPMMDFFDDANLFGETLEGLSDDAFVQPGPVSLVDELNLGAEFEPLHIDSLNHVQGTPTHQKMTDFEQLNQFDSIKFHHVNQSFGSPAEHVLSPHSQFNCSPIHPQNQPNGLFPDVSDGSPMWGHQTATTISNQNGSPFHQQGHSHSMHQNKSFVAHHDFALFQANEQQTQCTSLRSQQNRNNLNPGQNSLSQSKNFMNVSGPHRVNVNHPPQMTNASNSQQSISMQQFSQTSNPSAHFHKCSSHQEGNFNGPSPNMTSCSVSNSQQFSSHYSFSSNHISPNSLLQSSAVLASNHTNQTLSDFTGSNSFSPHRGIKQESTQHILNPNTSLNSNNFQILHSSHPQGNYSNSKLSPVHMNFPDPVDSGTQMGHFNDHVETNGFSSLEENLLHQVESQTEPFTGLDPEDLLQEGLLPHFDESTFGQDNSSHILDHDLDRQFTSHLVTRPSDMAQTQLQSQARSWHSSFSNHQHLHDRNHLCLQRQPPSSKKSDGSGTYTKLQNTQVRVMSEKKQRKKVESESKQEKANRIISEAIAKAKERGERNIPRVMSPENFPTASVEGKEEKKGRRMKSKPKDKDSKKTKTCSKLKEKTKIGKLIITLGKKQKRKNESSDEISDAEQMPQHTLKDQDSQKRRSNRQIKRKKYAEDIEGKQSEEEVKGSMKIKKNSAPLPGEQPLQLFVENPSEEDAAIVDKILSSRTVKKEISPGVMIDTEEFFVKYKNYSYLHCEWATEEQLLKDKRIQQKIKRFKLRQAQRAHFFADMEEEPFNPDYVEVDRVLEVSFCEDKDTGEPVIYYLVKWCSLPYEDSTWELKEDVDLAKIEEFEQLQASRPDTRRLDRPPSNIWKKIDQSRDYKNGNQLREYQLEGLNWLLFNWYNRRNCILADEMGLGKTIQSITFLYEILLTGIRGPFLIIAPLSTIANWEREFRTWTDINVVVYHGSLISRQMIQQYEMYFRDSQGRIIRGAYRFQAIITTFEMILGGCGELNAIEWRCVIIDEAHRLKNKNCKLLEGLKLMNLEHKVLLTGTPLQNTVEELFSLLHFLEPLRFPSESTFMQEFGDLKTEEQVQKLQAILKPMMLRRLKEDVEKKLAPKEETIIEVELTNIQKKYYRAILEKNFSFLSKGAGQTNVPNLVNTMMELRKCCNHPYLIKGAEEKILGEFRDTYNPAASDFHLQAMIQSAGKLVLIDKLLPKMKAGGHKVLIFSQMVRCLDILEDYLIHKRYLYERIDGRVRGNLRQAAIDRFSKPDSDRFVFLLCTRAGGLGINLTAADTCIIFDSDWNPQNDLQAQARCHRIGQNKAVKVYRLVTRNSYEREMFDRASLKLGLDKAVLQSMSGRESNVGGIQQLSKKEIEDLLRRGAYGAIMEEEDEGSKFCEEDIDQILLRRTKTITIESEGRGSTFAKASFVASGNRTDISLDDPNFWQKWAKKAEIDIEAISGRNSLVIDTPRIRKQTRPFSATKDELAELSEAESEGDEKPKLRRPCDRSNGYGRTECFRVEKNLLVYGWGRWREILSHGRFKRQLNEHDVEIICRALLAYCLVHYRGDEKIKGFIWDLITPTEDGQTRELQNHLGLSAPVPRGRKGKKVKTQTSSFDIQKAEWLRKYNPEQLLQDEGYKKHIKHHCNKVLLRVRMLYYLKQEVIGNECQKVFDGVDASDIDVWVPEPDHSEVPAEWWDFDADKSLLIGVFKHGYEKYNTIRADPALCFLERVGKPDEKAVAAEQRANDYMDGDVEDPEYKPAPAIFKDDIEDDVSSPGDLVIADGDGQLMEGDKVYWPTQSALTTRLRRLITAYQRTNKNRQIQQIQPTFSVPTSVMQPIYEEATLNPKMAAKIERQQRWTRREEADFYRVVSTFGVVFDPDRGQFDWTKFRAMARLHKKTDDSLEKYLYAFMSMCRRVCRLPSKEELVDPNIFIQPITEERASRTLYRIELLRKVREQALRHPQLFERLKLCHPNPDLPVWWECGPHDRDLLIGAAKHGVSRTDYHILRDPELSFMAAQRNYSQSKMAHSRTSTPLLQQYQVALSASPLTSLPRLLDAKGIILEEMKVKSENLKEEPQSSEEESMSSVETRTLIKSEPVSPKNGVLPQATGDQKSGGKCETDRRMVAARTEPLTPNPASKKPRVHKRGSESSSDSDSDSERSSCSSRSSSSSSSSSCSHSRSGSSSSSSSSCSSASSSSSSSTSSSSSSSSSSSEESDSDEEEAQKRESTTHMKAYDEESVASLSTTQDETQDSFQMNNGTPESAYILQGGYMLAASYWPKDRVMINRLDSICQTVLKGKWPSARRSYDANTVASFYTTKLLDSPGAATEYSDPSVPTPPGAGVKEEHDQSTQMSKVKKHVREKEFTVKIKDEGGLKLTFQKQGLAQKRPFDGEDGALGQQQYLTRLRELQSASETSLVNFPKSIPVSGTSIQPTLGANGVILDNQPIVKKRRGRRKNVEGVDIFFFNRNKPPNHVSLGLTSSQISTGINPALSYTQPQGIPDTESPVPVINLKDGTRLAGDDAPKRKDLEKWLKEHPGYVEDLGAFIPRMQLHEGRPKQKRHRCRNPNKLDVNSLTGEERVQLINRRNARKVGGAFAPPLKDLCRFLKENSEYGVAPEWGDVVKQSGFLPESMYERILTGPVVREEVSRRGRRPKSGIAKATAAAAAASATSVSGNPLLANGLLPGVDLTTLQALQQNLQNLQSLQVTAGLMGMPTGLPSGGEAKNMAAMFPMLLSGMAGLPNLLGMGGLLTKPTESGTEDKKGSDSKESEGKTERTESQSSENGGENSVSSSPSTSSTAALNTAAAANPLALNPLLLSNILYPGMLLTPGLNLHIPTLSQSNTFDVQNKNSDLGSSKSVEVKEEDSRIKDQEDKGGTEPSPLNENSTDEGSEKADASSGSDSTSSSSEDSDSSNED

SEQ ID NO: 21156 - protein, 2881 aa, Homo sapiens
MTDPMMDFFDDANLFGETLEGLSDDAFVQPGPVSLVDELNLGAEFEPLHIDSLNHVQGTPTHQKMTDFEQLNQFDSIKFHHVNQSFGSPAEHVLSPHSQFNCSPIHPQNQPNGLFPDVSDGSPMWGHQTATTISNQNGSPFHQQGHSHSMHQNKSFVAHHDFALFQANEQQTQCTSLRSQQNRNNLNPGQNSLSQSKNFMNVSGPHRVNVNHPPQMTNASNSQQSISMQQFSQTSNPSAHFHKCSSHQEGNFNGPSPNMTSCSVSNSQQFSSHYSFSSNHISPNSLLQSSAVLASNHTNQTLSDFTGSNSFSPHRGIKQESTQHILNPNTSLNSNNFQILHSSHPQGNYSNSKLSPVHMNFPDPVDSGTQMGHFNDHVETNGFSSLEENLLHQVESQTEPFTGLDPEDLLQEGLLPHFDESTFGQDNSSHILDHDLDRQFTSHLVTRPSDMAQTQLQSQARSWHSSFSNHQHLHDRNHLCLQRQPPSSKKSDGSGTYTKLQNTQVRVMSEKKQRKKVESESKQEKANRIISEAIAKAKERGERNIPRVMSPENFPTASVEGKEEKKGRRMKSKPKDKDSKKTKTCSKLKEKTKIGKLIITLGKKQKRKNESSDEISDAEQMPQHTLKDQDSQKRRSNRQIKRKKYAEDIEGKQSEEEVKGSMKIKKNSAPLPGEQPLQLFVENPSEEDAAIVDKILSSRTVKKEISPGVMIDTEEFFVKYKNYSYLHCEWATEEQLLKDKRIQQKIKRFKLRQAQRAHFFADMEEEPFNPDYVEVDRVLEVSFCEDKDTGEPVIYYLVKWCSLPYEDSTWELKEDVDLAKIEEFEQLQASRPDTRRLDRPPSNIWKKIDQSRDYKNGNQLREYQLEGLNWLLFNWYNRRNCILADEMGLGKTIQSITFLYEILLTGIRGPFLIIAPLSTIANWEREFRTWTDINVVVYHGSLISRQMIQQYEMYFRDSQGRIIRGAYRFQAIITTFEMILGGCGELNAIEWRCVIIDEAHRLKNKNCKLLEGLKLMNLEHKVLLTGTPLQNTVEELFSLLHFLEPLRFPSESTFMQEFGDLKTEEQVQKLQAILKPMMLRRLKEDVEKKLAPKEETIIEVELTNIQKKYYRAILEKNFSFLSKGAGQTNVPNLVNTMMELRKCCNHPYLIKGAEEKILGEFRDTYNPAASDFHLQAMIQSAGKLVLIDKLLPKMKAGGHKVLIFSQMVRCLDILEDYLIHKRYLYERIDGRVRGNLRQAAIDRFSKPDSDRFVFLLCTRAGGLGINLTAADTCIIFDSDWNPQNDLQAQARCHRIGQNKAVKVYRLVTRNSYEREMFDRASLKLGLDKAVLQSMSGRESNVGGIQQLSKKEIEDLLRRGAYGAIMEEEDEGSKFCEEDIDQILLRRTKTITIESEGRGSTFAKASFVASGNRTDISLDDPNFWQKWAKKAEIDIEAISGRNSLVIDTPRIRKQTRPFSATKDELAELSEAESEGDEKPKLRRPCDRSNGYGRTECFRVEKNLLVYGWGRWREILSHGRFKRQLNEHDVEIICRALLAYCLVHYRGDEKIKGFIWDLITPTEDGQTRELQNHLGLSAPVPRGRKGKKVKTQTSSFDIQKAEWLRKYNPEQLLQDEGYKKHIKHHCNKVLLRVRMLYYLKQEVIGNECQKVFDGVDASDIDVWVPEPDHSEVPAEWWDFDADKSLLIGVFKHGYEKYNTIRADPALCFLERVGKPDEKAVAAEQRANDYMDGDVEDPEYKPAPAIFKDDIEDDVSSPGDLVIADGDGQLMEGDKVYWPTQSALTTRLRRLITAYQRTNKNRQIQQIQPTFSVPTSVMQPIYEEATLNPKMAAKIERQQRWTRREEADFYRVVSTFGVVFDPDRGQFDWTKFRAMARLHKKTDDSLEKYLYAFMSMCRRVCRLPSKEELVDPNIFIQPITEERASRTLYRIELLRKVREQALRHPQLFERLKLCHPNPDLPVWWECGPHDRDLLIGAAKHGVSRTDYHILRDPELSFMAAQRNYSQSKMAHSRTSTPLLQQYQVALSASPLTSLPRLLDAKGIILEEMKVKSENLKEEPQSSEEESMSSVETRTLIKSEPVSPKNGVLPQATGDQKSGGKCETDRRMVAARTEPLTPNPASKKPRVHKRGSESSSDSDSDSERSSCSSRSSSSSSSSSCSHSRSGSSSSSSSSCSSASSSSSSSTSSSSSSSSSSSEESDSDEEEAQKRESTTHMKAYDEESVASLSTTQDETQDSFQMNNGTPESAYILQGGYMLAASYWPKDRVMINRLDSICQTVLKGKWPSARRSYDANTVASFYTTKLLDSPGAATEYSDPSVPTPPGAGVKEEHDQSTQMSKEGGLKLTFQKQGLAQKRPFDGEDGALGQQQYLTRLRELQSASETSLVNFPKSIPVSGTSIQPTLGANGVILDNQPIVKKRRGRRKNVEGVDIFFFNRNKPPNHVSLGLTSSQISTGINPALSYTQPQGIPDTESPVPVINLKDGTRLAGDDAPKRKDLEKWLKEHPGYVEDLGAFIPRMQLHEGRPKQKRHRCRNPNKLDVNSLTGEERVQLINRRNARKVGGAFAPPLKDLCRFLKENSEYGVAPEWGDVVKQSGFLPESMYERILTGPVVREEVSRRGRRPKSGIAKATAAAAAASATSVSGNPLLANGLLPGVDLTTLQALQQNLQNLQSLQVTAGLMGMPTGLPSGGEAKNMAAMFPMLLSGMAGLPNLLGMGGLLTKPTESGTEDKKGSDSKESEGKTERTESQSSENGGENSVSSSPSTSSTAALNTAAAANPLALNPLLLSNILYPGMLLTPGLNLHIPTLSQSNTFDVQNKNSDLGSSKSVEVKEEDSRIKDQEDKGGTEPSPLNENSTDEGSEKADASSGSDSTSSSSEDSDSSNED

SEQ ID NO: 21157 - protein, 2882 aa, Homo sapiens
MTDPMMDFFDDANLFGETLEGLSDDAFVQPGPVSLVDELNLGAEFEPLHIDSLNHVQGTPTHQKMTDFEQLNQFDSIKFHHVNQSFGSPAEHVLSPHSQFNCSPIHPQNQPNGLFPDVSDGSPMWGHQTATTISNQNGSPFHQQGHSHSMHQNKSFVAHHDFALFQANEQQTQCTSLRSQQNRNNLNPGQNSLSQSKNFMNVSGPHRVNVNHPPQMTNASNSQQSISMQQFSQTSNPSAHFHKCSSHQEGNFNGPSPNMTSCSVSNSQQFSSHYSFSSNHISPNSLLQSSAVLASNHTNQTLSDFTGSNSFSPHRGIKQESTQHILNPNTSLNSNNFQILHSSHPQGNYSNSKLSPVHMNFPDPVDSGTQMGHFNDHVETNGFSSLEENLLHQVESQTEPFTGLDPEDLLQEGLLPHFDESTFGQDNSSHILDHDLDRQFTSHLVTRPSDMAQTQLQSQARSWHSSFSNHQHLHDRNHLCLQRQPPSSKKSDGSGTYTKLQNTQVRVMSEKKQRKKVESESKQEKANRIISEAIAKAKERGERNIPRVMSPENFPTASVEGKEEKKGRRMKSKPKDKDSKKTKTCSKLKEKTKIGKLIITLGKKQKRKNESSDEISDAEQMPQHTLKDQDSQKRRSNRQIKRKKYAEDIEGKQSEEEVKGSMKIKKNSAPLPGEQPLQLFVENPSEEDAAIVDKILSSRTVKKEISPGVMIDTEEFFVKYKNYSYLHCEWATEEQLLKDKRIQQKIKRFKLRQAQRAHFFADMEEEPFNPDYVEVDRVLEVSFCEDKDTGEPVIYYLVKWCSLPYEDSTWELKEDVDLAKIEEFEQLQASRPDTRRLDRPPSNIWKKIDQSRDYKNGNQLREYQLEGLNWLLFNWYNRRNCILADEMGLGKTIQSITFLYEILLTGIRGPFLIIAPLSTIANWEREFRTWTDINVVVYHGSLISRQMIQQYEMYFRDSQGRIIRGAYRFQAIITTFEMILGGCGELNAIEWRCVIIDEAHRLKNKNCKLLEGLKLMNLEHKVLLTGTPLQNTVEELFSLLHFLEPLRFPSESTFMQEFGDLKTEEQVQKLQAILKPMMLRRLKEDVEKKLAPKEETIIEVELTNIQKKYYRAILEKNFSFLSKGAGQTNVPNLVNTMMELRKCCNHPYLIKGAEEKILGEFRDTYNPAASDFHLQAMIQSAGKLVLIDKLLPKMKAGGHKVLIFSQMVRCLDILEDYLIHKRYLYERIDGRVRGNLRQAAIDRFSKPDSDRFVFLLCTRAGGLGINLTAADTCIIFDSDWNPQNDLQAQARCHRIGQNKAVKVYRLVTRNSYEREMFDRASLKLGLDKAVLQSMSGRESNVGGIQQLSKKEIEDLLRRGAYGAIMEEEDEGSKFCEEDIDQILLRRTKTITIESEGRGSTFAKASFVASGNRTDISLDDPNFWQKWAKKAEIDIEAISGRNSLVIDTPRIRKQTRPFSATKDELAELSEAESEGDEKPKLRRPCDRSNGYGRTECFRVEKNLLVYGWGRWREILSHGRFKRQLNEHDVEIICRALLAYCLVHYRGDEKIKGFIWDLITPTEDGQTRELQNHLGLSAPVPRGRKGKKVKTQTSSFDIQKAEWLRKYNPEQLLQDEGYKKHIKHHCNKVLLRVRMLYYLKQEVIGNECQKVFDGVDASDIDVWVPEPDHSEVPAEWWDFDADKSLLIGVFKHGYEKYNTIRADPALCFLERVGKPDEKAVAAEQRANDYMDGDVEDPEYKPAPAIFKDDIEDDVSSPGDLVIADGDGQLMEGDKVYWPTQSALTTRLRRLITAYQRTNKNRQIQQIQPTFSVPTSVMQPIYEEATLNPKMAAKIERQQRWTRREEADFYRVVSTFGVVFDPDRGQFDWTKFRAMARLHKKTDDSLEKYLYAFMSMCRRVCRLPSKEELVDPNIFIQPITEERASRTLYRIELLRKVREQALRHPQLFERLKLCHPNPDLPVWWECGPHDRDLLIGAAKHGVSRTDYHILRDPELSFMAAQRNYSQSKMAHSRTSTPLLQQYQVALSASPLTSLPRLLDAKGIILEEMKVKSENLKEEPQSSEEESMSSVETRTLIKSEPVSPKNGVLPQATGDQKSGGKCETDRRMVAARTEPLTPNPASKKPRVHKRGSESSSDSDSDSERSSCSSRSSSSSSSSSCSHSRSGSSSSSSSSCSSASSSSSSSTSSSSSSSSSSSEESDSDEEEAQKRAESTTHMKAYDEESVASLSTTQDETQDSFQMNNGTPESAYILQGGYMLAASYWPKDRVMINRLDSICQTVLKGKWPSARRSYDANTVASFYTTKLLDSPGAATEYSDPSVPTPPGAGVKEEHDQSTQMSKEGGLKLTFQKQGLAQKRPFDGEDGALGQQQYLTRLRELQSASETSLVNFPKSIPVSGTSIQPTLGANGVILDNQPIVKKRRGRRKNVEGVDIFFFNRNKPPNHVSLGLTSSQISTGINPALSYTQPQGIPDTESPVPVINLKDGTRLAGDDAPKRKDLEKWLKEHPGYVEDLGAFIPRMQLHEGRPKQKRHRCRNPNKLDVNSLTGEERVQLINRRNARKVGGAFAPPLKDLCRFLKENSEYGVAPEWGDVVKQSGFLPESMYERILTGPVVREEVSRRGRRPKSGIAKATAAAAAASATSVSGNPLLANGLLPGVDLTTLQALQQNLQNLQSLQVTAGLMGMPTGLPSGGEAKNMAAMFPMLLSGMAGLPNLLGMGGLLTKPTESGTEDKKGSDSKESEGKTERTESQSSENGGENSVSSSPSTSSTAALNTAAAANPLALNPLLLSNILYPGMLLTPGLNLHIPTLSQSNTFDVQNKNSDLGSSKSVEVKEEDSRIKDQEDKGGTEPSPLNENSTDEGSEKADASSGSDSTSSSSEDSDSSNED

SEQ ID NO: 21158 - protein, 354 aa, Homo sapiens
MQGLLFSTLLLAGLAQFCCRVQGTGPLDTTPEGRPGEVSDAPQRKQFCHWPCKCPQQKPRCPPGVSLVRDGCGCCKICAKQPGEICNEADLCDPHKGLYCDYSVDRPRYETGVCAYLVAVGCEFNQVHYHNGQVFQPNPLFSCLCVSGAIGCTPLFIPKLAGSHCSGAKGGKKSDQSNCSLEPLLQQLSTSYKTMPAYRNLPLIWKKKCLVQATKWTPCSRTCGMGISNRVTNENSNCEMRKEKRLCYIQPCDSNILKTIKIPKGKTCQPTFQLSKAEKFVFSGCSSTQSYKPTFCGICLDKRCCIPNKSKMITIQFDCPNEGSFKWKMLWITSCVCQRNCREPGDIFSELKIL

SEQ ID NO: 21159 - protein, 372 aa, Homo sapiens
MNKRRLLYPSGWLHGPSDMQGLLFSTLLLAGLAQFCCRVQGTGPLDTTPEGRPGEVSDAPQRKQFCHWPCKCPQQKPRCPPGVSLVRDGCGCCKICAKQPGEICNEADLCDPHKGLYCDYSVDRPRYETGVCAYLVAVGCEFNQVHYHNGQVFQPNPLFSCLCVSGAIGCTPLFIPKLAGSHCSGAKGGKKSDQSNCSLEPLLQQLSTSYKTMPAYRNLPLIWKKKCLVQATKWTPCSRTCGMGISNRVTNENSNCEMRKEKRLCYIQPCDSNILKTIKIPKGKTCQPTFQLSKAEKFVFSGCSSTQSYKPTFCGICLDKRCCIPNKSKMITIQFDCPNEGSFKWKMLWITSCVCQRNCREPGDIFSELKIL

SEQ ID NO: 21160 - protein, 339 aa, Homo sapiens
MDETVAEFIKRTILKIPMNELTTILKAWDFLSENQLQTVNFRQRKESVVQHLIHLCEEKRASISDAALLDIIYMQFHQHQKVWEVFQMSKGPGEDVDLFDMKQFKNSFKKILQRALKNVTVSFRETEENAVWIRIAWGTQYTKPNQYKPTYVVYYSQTPYAFTSSSMLRRNTPLLGQALTIASKHHQIVKMDLRSRYLDSLKAIVFKQYNQTFETHNSTTPLQERSLGLDINMDSRIIHENIVEKERVQRITQETFGDYPQPQLEFAQYKLETKFKSGLNGSILAEREEPLRCLIKFSSPHLLEALKSLAPAGIADAPLSPLLTCIPNKRMNYFKIRDK

SEQ ID NO: 21161 - protein, 204 aa, Homo sapiens
MDETVAEFIKRTILKIPMNELTTILKAWDFLSENQLQTVNFRQRKESVVQHLIHLCEEKRASISDAALLDIIYMQFHQHQKVWEVFQMSKGPGEDVDLFDMKQFKNSFKKILQRALKNVTVSFRETEENAVWIRIAWGTQYTKPNQYKPTYVVYYSQTPYAFTSSSMLRRNTPLLGQELEATGKIYLRQEEIILDITEMKKACN

SEQ ID NO: 21162 - protein, 353 aa, Homo sapiens
MDETVAEFIKRTILKIPMNELTTILKAWDFLSENQLQTVNFRQRKESVVQHLIHLCEEKRASISDAALLDIIYMQFHQHQKVWEVFQMSKGPGEDVDLFDMKQFKNSFKKILQRALKNVTVSFRETEENAVWIRIAWGTQYTKPNQYKPTYVVYYSQTPYAFTSSSMLRRNTPLLGQALTIASKHHQIVKMDLRSRYLDSLKAIVFKQYNQTFETHNSTTPLQERSLGLDINMDSRIIHENIVEKERVQRITQETFGDYPQPQLEFAQYKLETKFKSGLNGSILAEREEPLRCLIKFSSPHLLEALKSLAPAALVCRIQKLLCYSGSHSQGTQDPSSWQKDLYLLFVPLYPRC

SEQ ID NO: 21163 - protein, 319 aa, Homo sapiens
MDETVAEFIKRTILKIPMNELTTILKAWDFLSENQLQTVNFRQRKESVVQHLIHLCEEKRASISDAALLDIICEDVDLFDMKQFKNSFKKILQRALKNVTVSFRETEENAVWIRIAWGTQYTKPNQYKPTYVVYYSQTPYAFTSSSMLRRNTPLLGQALTIASKHHQIVKMDLRSRYLDSLKAIVFKQYNQTFETHNSTTPLQERSLGLDINMDSRIIHENIVEKERVQRITQETFGDYPQPQLEFAQYKLETKFKSGLNGSILAEREEPLRCLIKFSSPHLLEALKSLAPAGIADAPLSPLLTCIPNKRMNYFKIRDK

SEQ ID NO: 21164 - protein, 305 aa, Homo sapiens
MDETVAEFIKRTILKIPMNELTTILKAWDFLSENQLQTVNFRQRKESVVQHLIHLCEEKRASISDAALLDIIYMQFHQHQKVWEVFQMSKGPGEDVDLFDMKQFKNSFKKILQRALKNVTVSFRETEENAVWIRIAWGTQYTKPNQYKPTYVVYYSQTPYAFTSSSMLRRNTPLLGQTFETHNSTTPLQERSLGLDINMDSRIIHENIVEKERVQRITQETFGDYPQPQLEFAQYKLETKFKSGLNGSILAEREEPLRCLIKFSSPHLLEALKSLAPAGIADAPLSPLLTCIPNKRMNYFKIRDK

SEQ ID NO: 21165 - protein, 381 aa, Homo sapiens [sequence omitted]

SEQ ID NO: 21166 - protein, 502 aa, Homo sapiens
MDYDFKAKLAAERERVEDLFEYEGCKVGRGTYGHVYKARRKDGKDEKEYALKQIEGTGISMSACREIALLRELKHPNVIALQKVFLSHSDRKVWLLFDYAEHDLWHIIKFHRASKANKKPMQLPRSMVKSLLYQILDGIHYLHANWVLHRDLKPANILVMGEGPERGRVKIADMGFARLFNSPLKPLADLDPVVVTFWYRAPELLLGARHYTKAIDIWAIGCIFAELLTSEPIFHCRQEDIKTSNPFHHDQLDRIFSVMGFPADKDWEDIRKMPEYPTLQKDFRRTTYANSSLIKYMEKHKVKPDSKVFLLLQKLLTMDPTKRITSEQALQDPYFQEDPLPTLDVFAGCQIPYPKREFLNEDDPEEKGDKNQQQQQNQHQQPTAPPQQAAAPPQAPPPQQNSTQTNGTAGGAGAGVGGTGAGLQHSQDSSLNQVPPNKKPRLGPSGANSGGPVMPSDYQHSSSRLNYQSSVQGSSQSQSTLGYSSSSQQSSQYHPSHQAHRY

SEQ ID NO: 21167 - protein, 442 aa, Homo sapiens
MSACREIALLRELKHPNVIALQKVFLSHSDRKVWLLFDYAEHDLWHIIKFHRASKANKKPMQLPRSMVKSLLYQILDGIHYLHANWVLHRDLKPANILVMGEGPERGRVKIADMGFARLFNSPLKPLADLDPVVVTFWYRAPELLLGARHYTKAIDIWAIGCIFAELLTSEPIFHCRQEDIKTSNPFHHDQLDRIFSVMGFPADKDWEDIRKMPEYPTLQKDFRRTTYANSSLIKYMEKHKVKPDSKVFLLLQKLLTMDPTKRITSEQALQDPYFQEDPLPTLDVFAGCQIPYPKREFLNEDDPEEKGDKNQQQQQNQHQQPTAPPQQAAAPPQAPPPQQNSTQTNGTAGGAGAGVGGTGAGLQHSQDSSLNQVPPNKKPRLGPSGANSGGPVMPSDYQHSSSRLNYQSSVQGSSQSQSTLGYSSSSQQSSQYHPSHQAHRY

SEQ ID NO: 21168 - protein, 344 aa, Homo sapiens
MANYTLAPEDEYDVLIEGELESDEAEQCDKYDAQALSAQLVPSLCSAVFVIGVLDNLLVVLILVKYKGLKRVENIYLLNLAVSNLCFLLTLPFWAHAGGDPMCKILIGLYFVGLYSETFFNCLLTVQRYLVFLHKGNFFSARRRVPCGIITSVLAWVTAILATLPEFVVYKPQMEDQKYKCAFSRTPFLPADETFWKHFLTLKMNISVLVLPLFIFTFLYVQMRKTLRFREQRYSLFKLVFAIMVVFLLMWAPYNIAFFLSTFKEHFSLSDCKSSYNLDKSVHITKLIATTHCCINPLLYAFLDGTFSKYLCRCFHLRSNTPLQPRGQSAQGTSREEPDHSTEV

SEQ ID NO: 21169 - protein, 356 aa, Homo sapiens
MIYTRFLKGSLKMANYTLAPEDEYDVLIEGELESDEAEQCDKYDAQALSAQLVPSLCSAVFVIGVLDNLLVVLILVKYKGLKRVENIYLLNLAVSNLCFLLTLPFWAHAGGDPMCKILIGLYFVGLYSETFFNCLLTVQRYLVFLHKGNFFSARRRVPCGIITSVLAWVTAILATLPEFVVYKPQMEDQKYKCAFSRTPFLPADETFWKHFLTLKMNISVLVLPLFIFTFLYVQMRKTLRFREQRYSLFKLVFAIMVVFLLMWAPYNIAFFLSTFKEHFSLSDCKSSYNLDKSVHITKLIATTHCCINPLLYAFLDGTFSKYLCRCFHLRSNTPLQPRGQSAQGTSREEPDHSTEV

SEQ ID NO: 21170 - protein, 2099 aa, Homo sapiens
MATLPSAERRAFALKINRYSSAEIRKQFTLPPNLGQYHRQSISTSGFPSLQLPQFYDPVEPVDFEGLLMTHLNSLDVQLAQELGDFTDDDLDVVFTPKECRTLQPSLPEEGVELDPHVRDCVQTYIREWLIVNRKNQGSPEICGFKKTGSRKDFHKTLPKQTFESETLECSEPAAQAGPRHLNVLCDVSGKGPVTACDFDLRSLQPDKRLENLLQQVSAEDFEKQNEEARRTNRQAELFALYPSVDEEDAVEIRPVPECPKEHLGNRILVKLLTLKFEIEIEPLFASIALYDVKERKKISENFHCDLNSDQFKGFLRAHTPSVAASSQARSAVFSVTYPSSDIYLVVKIEKVLQQGEIGDCAEPYTVIKESDGGKSKEKIEKLKLQAESFCQRLGKYRMPFAWAPISLSSFFNVSTLEREVTDVDSVVGRSSVGERRTLAQSRRLSERALSLEENGVGSNFKTSTLSVSSFFKQEGDRLSDEDLFKFLADYKRSSSLQRRVKSIPGLLRLEISTAPEIINCCLTPEMLPVKPFPENRTRPHKEILEFPTREVYVPHTVYRNLLYVYPQRLNFVNKLASARNITIKIQFMCGEDASNAMPVIFGKSSGPEFLQEVYTAVTYHNKSPDFYEEVKIKLPAKLTVNHHLLFTFYHISCQQKQGASVETLLGYSWLPILLNERLQTGSYCLPVALEKLPPNYSMHSAEKVPLQNPPIKWAEGHKGVFNIEVQAVSSVHTQDNHLEKFFTLCHSLESQVTFPIRVLDQKISEMALEHELKLSIICLNSSRLEPLVLFLHLVLDKLFQLSVQPMVIAGQTANFSQFAFESVVAIANSLHNSKDLSKDQHGRNCLLASYVHYVFRLPEVQRDVPKSGAPTALLDPRSYHTYGRTSAAAVSSKLLQARVMSSSNPDLAGTHSAADEEVKNIMSSKIADRNCSRMSYYCSGSSDAPSSPAAPRPASKKHFHEELALQMVVSTGMVRETVFKYAWFFFELLVKSMAQHVHNMDKRDSFRRTRFSDRFMDDITTIVNVVTSEIAALLVKPQKENEQAEKMNISLAFFLYDLLSLMDRGFVFNLIRHYCSQLSAKLSNLPTLISMRLEFLRILCSHEHYLNLNLFFMNADTAPTSPCPSISSQNSSSCSSFQDQKIASMFDLTSEYRQQHFLTGLLFTELAAALDAEGEGISKVQRKAVSAIHSLLSSHDLDPRCVKPEVKVKIAALYLPLVGIILDALPQLCDFTVADTRRYRTSGSDEEQEGAGAINQNVALAIAGNNFNLKTSGIVLSSLPYKQYNMLNADTTRNLMICFLWIMKNADQSLIRKWIADLPSTQLNRILDLLFICVLCFEYKGKQSSDKVSTQVLQKSRDVKARLEEALLRGEGARGEMMRRRAPGNDRFPGLNENLRWKKEQTHWRQANEKLDKTKAELDQEALISGNLATEAHLIILDMQENIIQASSALDCKDSLLGGVLRVLVNSLNCDQSTTYLTHCFATLRALIAKFGDLLFEEEVEQCFDLCHQVLHHCSSSMDVTRSQACATLYLLMRFSFGATSNFARVKMQVTMSLASLVGRAPDFNEEHLRRSLRTILAYSEEDTAMQMTPFPTQVEELLCNLNSILYDTVKMREFQEDPEMLMDLMYRIAKSYQASPDLRLTWLQNMAEKHTKKKCYTEAAMCLVHAAALVAEYLSMLEDHSYLPVGSVSFQNISSNVLEESVVSEDTLSPDEDGVCAGQYFTESGLVGLLEQAAELFSTGGLYETVNEVYKLVIPILEAHREFRKLTLTHSKLQRAFDSIVNKDHKRMFGTYFRVGFFGSKFGDLDEQEFVYKEPAITKLPEISHRLEAFYGQCFGAEFVEVIKDSTPVDKTKLDPNKAYIQITFVEPYFDEYEMKDRVTYFEKNFNLRRFMYTTPFTLEGRPRGELHEQYRRNTVLTTMHAFPYIKTRISVIQKEEFVLTPIEVAIEDMKKKTLQLAVAINQEPPDAKMLQMVLQGSVGATVNQGPLEVAQVFLAEIPADPKLYRHHNKLRLCFKEFIMRCGEAVEKNKRLITADQREYQQELKKNYNKLKENLRPMIERKIPELYKPIFRVESQKRDSFHRSSFRKCETQLSQGS

SEQ ID NO: 21171 - protein, 2067 aa, Homo sapiens
MATLPSAERRAFALKINRYSSAEIRKQFTLPPNLGQYHRQSISTSGFPSLQLPQFYDPVEPVDFEGLLMTHLNSLDVQLAQELGDFTDDDLDVVFTPKECRTLQPSLPEEGVELDPHVRDCVQTYIREWLIVNRKNQGSPEICGFKKTGSRKDFHKTLPKQTFESETLECSEPAAQAGPRHLNVLCDVSGKGPVTACDFDLRSLQPDKRLENLLQQVSAEDFEKQNEEARRTNRQAELFALYPSVDEEDAVEIRPVPECPKEHLGNRILVKLLTLKFEIEIEPLFASIALYDVKERKKISENFHCDLNSDQFKGFLRAHTPSVAASSQARSAVFSVTYPSSDIYLVVKIEKVLQQGEIGDCAEPYTVIKESDGGKSKEKIEKLKLQAESFCQRLGKYRMPFAWAPISLSSFFNVSTLEREVTDVDSVVGRSSVGERRTLAQSRRLSERALSLEENGVGSNFKTSTLSVSSFFKQEGDRLSDEDLFKFLADYKRSSSLQRRVKSIPGLLRLEISTAPEIINCCLTPEMLPVKPFPENRTRPHKEILEFPTREVYVPHTVYRNLLYVYPQRLNFVNKLASARNITIKIQFMCGEDASNAMPVIFGKSSGPEFLQEVYTAVTYHNKSPDFYEEVKIKLPAKLTVNHHLLFTFYHISCQQKQGASVETLLGYSWLPILLNERLQTGSYCLPVALEKLPPNYSMHSAEKVPLQNPPIKWAEGHKGVFNIEVQAVSSVHTQDNHLEKFFTLCHSLESQVTFPIRVLDQKISEMALEHELKLSIICLNSSRLEPLVLFLHLVLDKLFQLSVQPMVIAGQTANFSQFAFESVVAIANSLHNSKDLSKDQHGRNCLLASYVHYVFRLPEVQRDVPKSGAPTALLDPRSYHTYGRTSAAAVSSKLLQARVMSSSNPDLAGTHSAADEEVKNIMSSKHFHEELALQMVVSTGMVRETVFKYAWFFFELLVKSMAQHVHNMDKRDSFRRTRFSDRFMDDITTIVNVVTSEIAALLVKPQKENEQAEKMNISLAFFLYDLLSLMDRGFVFNLIRHYCSQLSAKLSNLPTLISMRLEFLRILCSHEHYLNLNLFFMNADTAPTSPCPSISSQNSSSCSSFQDQKIASMFDLTSEYRQQHFLTGLLFTELAAALDAEGEGISKVQRKAVSAIHSLLSSHDLDPRCVKPEVKVKIAALYLPLVGIILDALPQLCDFTVADTRRYRTSGSDEEQEGAGAINQNVALAIAGNNFNLKTSGIVLSSLPYKQYNMLNADTTRNLMICFLWIMKNADQSLIRKWIADLPSTQLNRILDLLFICVLCFEYKGKQSSDKVSTQVLQKSRDVKARLEEALLRGEGARGEMMRRRAPGNDRFPGLNENLRWKKEQTHWRQANEKLDKTKAELDQEALISGNLATEAHLIILDMQENIIQASSALDCKDSLLGGVLRVLVNSLNCDQSTTYLTHCFATLRALIAKFGDLLFEEEVEQCFDLCHQVLHHCSSSMDVTRSQACATLYLLMRFSFGATSNFARVKMQVTMSLASLVGRAPDFNEEHLRRSLRTILAYSEEDTAMQMTPFPTQVEELLCNLNSILYDTVKMREFQEDPEMLMDLMYRIAKSYQASPDLRLTWLQNMAEKHTKKKCYTEAAMCLVHAAALVAEYLSMLEDHSYLPVGSVSFQNISSNVLEESVVSEDTLSPDEDGVCAGQYFTESGLVGLLEQAAELFSTGGLYETVNEVYKLVIPILEAHREFRKLTLTHSKLQRAFDSIVNKDHKRMFGTYFRVGFFGSKFGDLDEQEFVYKEPAITKLPEISHRLEAFYGQCFGAEFVEVIKDSTPVDKTKLDPNKAYIQITFVEPYFDEYEMKDRVTYFEKNFNLRRFMYTTPFTLEGRPRGELHEQYRRNTVLTTMHAFPYIKTRISVIQKEEFVLTPIEVAIEDMKKKTLQLAVAINQEPPDAKMLQMVLQGSVGATVNQGPLEVAQVFLAEIPADPKLYRHHNKLRLCFKEFIMRCGEAVEKNKRLITADQREYQQELKKNYNKLKENLRPMIERKIPELYKPIFRVESQKRDSFHRSSFRKCETQLSQGS

SEQ ID NO: 21172 - protein, 2031 aa, Homo sapiens
MTHLNSLDVQLAQELGDFTDDDLDVVFTPKECRTLQPSLPEEGVELDPHVRDCVQTYIREWLIVNRKNQGSPEICGFKKTGSRKDFHKTLPKQTFESETLECSEPAAQAGPRHLNVLCDVSGKGPVTACDFDLRSLQPDKRLENLLQQVSAEDFEKQNEEARRTNRQAELFALYPSVDEEDAVEIRPVPECPKEHLGNRILVKLLTLKFEIEIEPLFASIALYDVKERKKISENFHCDLNSDQFKGFLRAHTPSVAASSQARSAVFSVTYPSSDIYLVVKIEKVLQQGEIGDCAEPYTVIKESDGGKSKEKIEKLKLQAESFCQRLGKYRMPFAWAPISLSSFFNVSTLEREVTDVDSVVGRSSVGERRTLAQSRRLSERALSLEENGVGSNFKTSTLSVSSFFKQEGDRLSDEDLFKFLADYKRSSSLQRRVKSIPGLLRLEISTAPEIINCCLTPEMLPVKPFPENRTRPHKEILEFPTREVYVPHTVYRNLLYVYPQRLNFVNKLASARNITIKIQFMCGEDASNAMPVIFGKSSGPEFLQEVYTAVTYHNKSPDFYEEVKIKLPAKLTVNHHLLFTFYHISCQQKQGASVETLLGYSWLPILLNERLQTGSYCLPVALEKLPPNYSMHSAEKVPLQNPPIKWAEGHKGVFNIEVQAVSSVHTQDNHLEKFFTLCHSLESQVTFPIRVLDQKISEMALEHELKLSIICLNSSRLEPLVLFLHLVLDKLFQLSVQPMVIAGQTANFSQFAFESVVAIANSLHNSKDLSKDQHGRNCLLASYVHYVFRLPEVQRDVPKSGAPTALLDPRSYHTYGRTSAAAVSSKLLQARVMSSSNPDLAGTHSAADEEVKNIMSSKIADRNCSRMSYYCSGSSDAPSSPAAPRPASKKHFHEELALQMVVSTGMVRETVFKYAWFFFELLVKSMAQHVHNMDKRDSFRRTRFSDRFMDDITTIVNVVTSEIAALLVKPQKENEQAEKMNISLAFFLYDLLSLMDRGFVFNLIRHYCSQLSAKLSNLPTLISMRLEFLRILCSHEHYLNLNLFFMNADTAPTSPCPSISSQNSSSCSSFQDQKIASMFDLTSEYRQQHFLTGLLFTELAAALDAEGEGISKVQRKAVSAIHSLLSSHDLDPRCVKPEVKVKIAALYLPLVGIILDALPQLCDFTVADTRRYRTSGSDEEQEGAGAINQNVALAIAGNNFNLKTSGIVLSSLPYKQYNMLNADTTRNLMICFLWIMKNADQSLIRKWIADLPSTQLNRILDLLFICVLCFEYKGKQSSDKVSTQVLQKSRDVKARLEEALLRGEGARGEMMRRRAPGNDRFPGLNENLRWKKEQTHWRQANEKLDKTKAELDQEALISGNLATEAHLIILDMQENIIQASSALDCKDSLLGGVLRVLVNSLNCDQSTTYLTHCFATLRALIAKFGDLLFEEEVEQCFDLCHQVLHHCSSSMDVTRSQACATLYLLMRFSFGATSNFARVKMQVTMSLASLVGRAPDFNEEHLRRSLRTILAYSEEDTAMQMTPFPTQVEELLCNLNSILYDTVKMREFQEDPEMLMDLMYRIAKSYQASPDLRLTWLQNMAEKHTKKKCYTEAAMCLVHAAALVAEYLSMLEDHSYLPVGSVSFQNISSNVLEESVVSEDTLSPDEDGVCAGQYFTESGLVGLLEQAAELFSTGGLYETVNEVYKLVIPILEAHREFRKLTLTHSKLQRAFDSIVNKDHKRMFGTYFRVGFFGSKFGDLDEQEFVYKEPAITKLPEISHRLEAFYGQCFGAEFVEVIKDSTPVDKTKLDPNKAYIQITFVEPYFDEYEMKDRVTYFEKNFNLRRFMYTTPFTLEGRPRGELHEQYRRNTVLTTMHAFPYIKTRISVIQKEEFVLTPIEVAIEDMKKKTLQLAVAINQEPPDAKMLQMVLQGSVGATVNQGPLEVAQVFLAEIPADPKLYRHHNKLRLCFKEFIMRCGEAVEKNKRLITADQREYQQELKKNYNKLKENLRPMIERKIPELYKPIFRVESQKRDSFHRSSFRKCETQLSQGS

SEQ ID NO: 21173 - protein, 1999 aa, Homo sapiens
MTHLNSLDVQLAQELGDFTDDDLDVVFTPKECRTLQPSLPEEGVELDPHVRDCVQTYIREWLIVNRKNQGSPEICGFKKTGSRKDFHKTLPKQTFESETLECSEPAAQAGPRHLNVLCDVSGKGPVTACDFDLRSLQPDKRLENLLQQVSAEDFEKQNEEARRTNRQAELFALYPSVDEEDAVEIRPVPECPKEHLGNRILVKLLTLKFEIEIEPLFASIALYDVKERKKISENFHCDLNSDQFKGFLRAHTPSVAASSQARSAVFSVTYPSSDIYLVVKIEKVLQQGEIGDCAEPYTVIKESDGGKSKEKIEKLKLQAESFCQRLGKYRMPFAWAPISLSSFFNVSTLEREVTDVDSVVGRSSVGERRTLAQSRRLSERALSLEENGVGSNFKTSTLSVSSFFKQEGDRLSDEDLFKFLADYKRSSSLQRRVKSIPGLLRLEISTAPEIINCCLTPEMLPVKPFPENRTRPHKEILEFPTREVYVPHTVYRNLLYVYPQRLNFVNKLASARNITIKIQFMCGEDASNAMPVIFGKSSGPEFLQEVYTAVTYHNKSPDFYEEVKIKLPAKLTVNHHLLFTFYHISCQQKQGASVETLLGYSWLPILLNERLQTGSYCLPVALEKLPPNYSMHSAEKVPLQNPPIKWAEGHKGVFNIEVQAVSSVHTQDNHLEKFFTLCHSLESQVTFPIRVLDQKISEMALEHELKLSIICLNSSRLEPLVLFLHLVLDKLFQLSVQPMVIAGQTANFSQFAFESVVAIANSLHNSKDLSKDQHGRNCLLASYVHYVFRLPEVQRDVPKSGAPTALLDPRSYHTYGRTSAAAVSSKLLQARVMSSSNPDLAGTHSAADEEVKNIMSSKHFHEELALQMVVSTGMVRETVFKYAWFFFELLVKSMAQHVHNMDKRDSFRRTRFSDRFMDDITTIVNVVTSEIAALLVKPQKENEQAEKMNISLAFFLYDLLSLMDRGFVFNLIRHYCSQLSAKLSNLPTLISMRLEFLRILCSHEHYLNLNLFFMNADTAPTSPCPSISSQNSSSCSSFQDQKIASMFDLTSEYRQQHFLTGLLFTELAAALDAEGEGISKVQRKAVSAIHSLLSSHDLDPRCVKPEVKVKIAALYLPLVGIILDALPQLCDFTVADTRRYRTSGSDEEQEGAGAINQNVALAIAGNNFNLKTSGIVLSSLPYKQYNMLNADTTRNLMICFLWIMKNADQSLIRKWIADLPSTQLNRILDLLFICVLCFEYKGKQSSDKVSTQVLQKSRDVKARLEEALLRGEGARGEMMRRRAPGNDRFPGLNENLRWKKEQTHWRQANEKLDKTKAELDQEALISGNLATEAHLIILDMQENIIQASSALDCKDSLLGGVLRVLVNSLNCDQSTTYLTHCFATLRALIAKFGDLLFEEEVEQCFDLCHQVLHHCSSSMDVTRSQACATLYLLMRFSFGATSNFARVKMQVTMSLASLVGRAPDFNEEHLRRSLRTILAYSEEDTAMQMTPFPTQVEELLCNLNSILYDTVKMREFQEDPEMLMDLMYRIAKSYQASPDLRLTWLQNMAEKHTKKKCYTEAAMCLVHAAALVAEYLSMLEDHSYLPVGSVSFQNISSNVLEESVVSEDTLSPDEDGVCAGQYFTESGLVGLLEQAAELFSTGGLYETVNEVYKLVIPILEAHREFRKLTLTHSKLQRAFDSIVNKDHKRMFGTYFRVGFFGSKFGDLDEQEFVYKEPAITKLPEISHRLEAFYGQCFGAEFVEVIKDSTPVDKTKLDPNKAYIQITFVEPYFDEYEMKDRVTYFEKNFNLRRFMYTTPFTLEGRPRGELHEQYRRNTVLTTMHAFPYIKTRISVIQKEEFVLTPIEVAIEDMKKKTLQLAVAINQEPPDAKMLQMVLQGSVGATVNQGPLEVAQVFLAEIPADPKLYRHHNKLRLCFKEFIMRCGEAVEKNKRLITADQREYQQELKKNYNKLKENLRPMIERKIPELYKPIFRVESQKRDSFHRSSFRKCETQLSQGS

SEQ ID NO: 21174 - protein, 107 aa, Homo sapiens
MASGAARWLVLAPVRSGALRSGPSLRKDGDVSAAWSGSGRSLVPSRSVIVTRSGAILPKPVKMSFGLLRVFSIVIPFLYVGTLISKNFAALLEEHDIFVPEDDDDDD

SEQ ID NO: 21175 - protein, 296 aa, Homo sapiens
MEHLKAFDDEINAFLDNMFGPRDSRVRGWFMLDSYLPTFFLTVMYLLSIWLGNKYMKNRPALSLRGILTLYNLGITLLSAYMLAELILSTWEGGYNLQCQDLTSAGEADIRVAKVLWWYYFSKSVEFLDTIFFVLRKKTSQITFLHVYHHASMFNIWWCVLNWIPCGQSFFGPTLNSFIHILMYSYYGLSVFPSMHKYLWWKKYLTQAQLVQFVLTITHTMSAVVKPCGFPFGCLIFQSSYMLTLVILFLNFYVQTYRKKPMKKDMQEPPAGKEVKNGFSKAYFTAANGVMNKKAQ

SEQ ID NO: 21176 - protein, 314 aa, Homo sapiens
MGLLDSEPGSVLNVVSTALNDTVEFYRWTWSIADKRVENWPLMQSPWPTLSISTLYLLFVWLGPKWMKDREPFQMRLVLIIYNFGMVLLNLFIFRELFMGSYNAGYSYICQSVDYSNNVHEVRIAAALWWYFVSKGVEYLDTVFFILRKKNNQVSFLHVYHHCTMFTLWWIGIKWVAGGQAFFGAQLNSFIHVIMYSYYGLTAFGPWIQKYLWWKRYLTMLQLIQFHVTIGHTALSLYTDCPFPKWMHWALIAYAISFIFLFLNFYIRTYKEPKKPKAGKTAMNGISANGVSKSEKQLMIENGKKQKNGKAKGD

SEQ ID NO: 21177 - protein, 371 aa, Homo sapiens
MAATCEISNIFSNYFSAMYSSEDSTLASVPPAATFGADDLVLTLSNPQMSLEGTEKASWLGEQPQFWSKTQVLDWISYQVEKNKYDASAIDFSRCDMDGATLCNCALEELRLVFGPLGDQLHAQLRDLTSSSSDELSWIIELLEKDGMAFQEALDPGPFDQGSPFAQELLDDGQQASPYHPGSCGAGAPSPGSSDVSTAGTGASRSSHSSDSGGSDVDLDPTDGKLFPSDGFRDCKKGDPKHGKRKRGRPRKLSKEYWDCLEGKKSKHAPRGTHLWEFIRDILIHPELNEGLMKWENRHEGVFKFLRSEAVAQLWGQKKKNSNMTYEKLSRAMRYYYKREILERVDGRRLVYKFGKNSSGWKEEEVLQSRN

SEQ ID NO: 21178 - protein, 348 aa, Homo sapiens
MAATCEISNIFSNYFSAMYSSEDSTLASVPPAATFGADDLVLTLSNPQMSLEGTEKASWLGEQPQFWSKTQVLDWISYQVEKNKYDASAIDFSRCDMDGATLCNCALEELRLVFGPLGDQLHAQLRDLTSSSSDELSWIIELLEKDGMAFQEALDPGPFDQGSPFAQELLDDVSTAGTGASRSSHSSDSGGSDVDLDPTDGKLFPSDGFRDCKKGDPKHGKRKRGRPRKLSKEYWDCLEGKKSKHAPRGTHLWEFIRDILIHPELNEGLMKWENRHEGVFKFLRSEAVAQLWGQKKKNSNMTYEKLSRAMRYYYKREILERVDGRRLVYKFGKNSSGWKEEEVLQSRN

SEQ ID NO: 21179 - protein, 369 aa, Homo sapiens
MAQGWAGFSEEELRRLKQTKDPFEPQRRLPAKKSRQQLQREKALVEQSQKLGLQDGSTSLLPEQLLSAPKQRVNVQKPPFSSPTLPSHFTLTSPVGDGQPQGIESQPKELGLENSHDGHNNVEILPPKPDCKLEKKKVELQEKSRWEVLQQEQRLMEEKNKRKKALLAKAIAERSKRTQAETMKLKRIQKELQALDDMVSADIGILRNRIDQASLDYSYARKRFDRAEAEYIAAKLDIQRKTEIKEQLTEHLCTIIQQNELRKAKKLEELMQQLDVEADEETLELEVEVERLLHEQEVESRRPVVRLERPFQPAEESVTLEFAKENRKCQEQAVSPKVDDQCGNSSSIPFLSPNCPNQEGNDISAALAT

SEQ ID NO: 21180 - protein, 221 aa, Homo sapiens
MAQGWAGFSEEELRRLKQTKDPFEPQRRLPAKKSRQQLQREKALVEQSQKLGLQDGSTSLLPEQLLSAPKQRVNVQKPPFSSPTLPSHFTLTSPVGDGQPQGIESQPKELGLENSHDGHNNVEILPPKPDCKLEKKKVELQEKSRWEVLQQEQRLMEEKNKRKKALLAKAIAERSKRTQAETMKLKRIQKELQALDDMVSADIGILRNRIDQASLDYSYAR

SEQ ID NO: 21181 - protein, 970 aa, Homo sapiens
MDAAEPGLPPGPEGRKRYSDIFRSLDNLEISLGNVTLEMLAGDPLLSEDPEPDKTPTATVTNEASCWSGPSPEGPVPLTGEELDLRLIRTKGGVDAALEYAKTWSRYAKELLAWTEKRASYELEFAKSTMKIAEAGKVSIQQQSHMPLQYIYTLFLEHDLSLGTLAMETVAQQKRDYYQPLAAKRTEIEKWRKEFKEQWMKEQKRMNEAVQALRRAQLQYVQRSEDLRARSQGSPEDSAPQASPGPSKQQERRRRSREEAQAKAQEAEALYQACVREANARQQDLEIAKQRIVSHVRKLVFQGDEVLRRVTLSLFGLRGAQAERGPRAFAALAECCAPFEPGQRYQEFVRALRPEAPPPPPPAFSFQEFLPSLNSSPLDIRKKLSGPLPPRLDENSAEPGPWEDPGTGWRWQGTPGPTPGSDVDSVGGGSESRSLDSPTSSPGAGTRQLVKASSTGTESSDDFEERDPDLGDGLENGLGSPFGKWTLSSAAQTHQLRRLRGPAKCRECEAFMVSGTECEECFLTCHKRCLETLLILCGHRRLPARTPLFGVDFLQLPRDFPEEVPFVVTKCTAEIEHRALDVQGIYRVSGSRVRVERLCQAFENGRALVELSGNSPHDVSSVLKRFLQELTEPVIPFHLYDAFISLAKTLHADPGDDPGTPSPSPEVIRSLKTLLVQLPDSNYNTLRHLVAHLFRVAARFMENKMSANNLGIVFGPTLLRPPDGPRAASAIPVTCLLDSGHQAQLVEFLIVHYEQIFGMDELPQATEPPPQDSSPAPGPLTTSSQPPPPHLDPDSQPPVLASDPGPDPQHHSTLEQHPTATPTEIPTPQSDQREDVAEDTKDGGGEVSSQGPEDSLLGTQSRGHFSRQPVKYPRGGVRPVTHQLSSLALVASKLCEETPITSVPRGSLRGRGPSPAAASPEGSPLRRTPLPKHFEITQETARLLSKLDSEAVPRATCCPDVQPEEAEDHL

SEQ ID NO: 21182 - protein, 944 aa, Homo sapiens
MDAAEPGLPPGPEGRKRYSDIFRSLDNLEISLGNVTLEMLAGDPLLSEDPEPDKTPTATVTNEASCWSGPSPEGPVPLTGEELDLRLIRTKGGVDAALEYAKTWSRYAKELLAWTEKRASYELEFAKSTMKIAEAGKVSIQQQSHMPLQYIYTLFLEHDLSLGTLAMETVAQQKRDYYQPLAAKRTEIEKWRKEFKEQWMKEQKRMNEAVQALRRAQLQYVQRSEDLRARSQGSPEDSAPQASPGPSKQQERRRRSREEAQAKAQEAEALYQACVREANARQQDLEIAKQRIVSHVRKLVFQGDEVLRRVTLSLFGLRGAQAERGPRAFAALAECCAPFEPGQRYQEFVRALRPEAPPPPPPAFSFQEFLPSLNSSPLDIRKKLSGPLPPRLDENSAEPGPWEDPGTGWRWQGTPGPTPGSDVDSVGGGSESRSLDSPTSSPDLGDGLENGLGSPFGKWTLSSAAQTHQLRRLRGPAKCRECEAFMVSGTECEECFLTCHKRCLETLLILCGHRRLPARTPLFGVDFLQLPRDFPEEVPFVVTKCTAEIEHRALDVQGIYRVSGSRVRVERLCQAFENGRALVELSGNSPHDVSSVLKRFLQELTEPVIPFHLYDAFISLAKTLHADPGDDPGTPSPSPEVIRSLKTLLVQLPDSNYNTLRHLVAHLFRVAARFMENKMSANNLGIVFGPTLLRPPDGPRAASAIPVTCLLDSGHQAQLVEFLIVHYEQIFGMDELPQATEPPPQDSSPAPGPLTTSSQPPPPHLDPDSQPPVLASDPGPDPQHHSTLEQHPTATPTEIPTPQSDQREDVAEDTKDGGGEVSSQGPEDSLLGTQSRGHFSRQPVKYPRGGVRPVTHQLSSLALVASKLCEETPITSVPRGSLRGRGPSPAAASPEGSPLRRTPLPKHFEITQETARLLSKLDSEAVPRATCCPDVQPEEAEDHL

SEQ ID NO: 21183 - protein, 440 aa, Homo sapiens
MGLGVSAEQPAGGAEGFHLHGVQENSPAQQAGLEPYFDFIITIGHSRLNKENDTLKALLKANVEKPVKLEVFNMKTMRVREVEVVPSNMWGGQGLLGASVRFCSFRRASEQVWHVLDVEPSSPAALAGLRPYTDYVVGSDQILQESEDFFTLIESHEGKPLKLMVYNSKSDSCREVTVTPNAAWGGEGSLGCGIGYGYLHRIPTQPPSYHKKPPGTPPPSALPLGAPPPDALPPGPTPEDSPSLETGSRQSDYMEALLQAPGSSMEDPLPGPGSPSHSAPDPDGLPHFMETPLQPPPPVQRVMDPGFLDVSGISLLDNSNASVWPSLPSSTELTTTAVSTSGPEDICSSSSSHERGGEATWSGSEFEVSFLDSPGAQAQADHLPQLTLPDSLTSAASPEDGLSAELLEAQAEEEPASTEGLDTGTEAEGLDSQAQISTTE

SEQ ID NO: 21184 - protein, 215 aa, Homo sapiens
MGLGVSAEQPAGGAEGFHLHGVQENSPAQQAGLEPYFDFIITIGHSRLNKENDTLKALLKANVEKPVKLEVFNMKTMRVREVEVVPSNMWGGQGLLGASVRFCSFRRASEQVWHVLDVEPSSPAALAGLRPYTDYVVGSDQILQESEDFFTLIESHEGKPLKLMVYNSKSDSCRESGMWHWLWVSTPDPNSAPQLPQEATWHPTTFCSTTWCPTT

SEQ ID NO: 21185 - protein, 246 aa, Homo sapiens
MKTMRVREVEVVPSNMWGGQGLLGASVRFCSFRRASEQVWHVLDVEPSSPAALAGLRPYTDYVVGSDQILQESEDFFTLIESHEGKPLKLMVYNSKSDSCREVTVTPNAAWGGEGSLGCGIGYGYLHRIPTQPPSYHKKPPGTPPPSALPLGAPPPDALPPGPTPEDSPSLETGSRQSDYMEALLQAPGSSMEDPLPGPGSPSHSAPDPDGLPHFMETPLQPPPPVQRVMDPAMPVCGPACPLPQN

SEQ ID NO: 21186 - protein, 158 aa, Homo sapiens
MLLFALLLAMELPLVAASATMRAQWTYSLRCHDCAVINDFNCPNIRVCPYHIRRCMTISIRINSRELLVYKNCTNNCTFVYAAEQPPEAPGKIFKTNSFYWVCCCNSMVCNAGGPTNLERDMLPDEVTEEELPEGTVRLGVSKLLLSFASIIVSNILP

SEQ ID NO: 21187 - protein, 452 aa, Homo sapiens
MGSSQSVEIPGGGTEGYHVLRVQENSPGHRAGLEPFFDFIVSINGSRLNKDNDTLKDLLKANVEKPVKMLIYSSKTLELRETSVTPSNLWGGQGLLGVSIRFCSFDGANENVWHVLEVESNSPAALAGLRPHSDYIIGADTVMNESEDLFSLIETHEAKPLKLYVYNTDTDNCREVIITPNSAWGGEGSLGCGIGYGYLHRIPTRPFEEGKKISLPGQMAGTPITPLKDGFTEVQLSSVNPPSLSPPGTTGIEQSLTGLSISSTPPAVSSVLSTGVPTVPLLPPQVNQSLTSVPPMNPATTLPGLMPLPAGLPNLPNLNLNLPAPHIMPGVGLPELVNPGLPPLPSMPPRNLPGIAPLPLPSEFLPSFPLVPESSSAASSGELLSSLPPTSNAPSDPATTTAKADAASSLTVDVTPPTAKAPTTVEDRVGDSTPVSEKPVSAAVDANASESP

SEQ ID NO: 21188 - protein, 384 aa, Homo sapiens
MLIYSSKTLELRETSVTPSNLWGGQGLLGVSIRFCSFDGANENVWHVLEVESNSPAALAGLRPHSDYIIGADTVMNESEDLFSLIETHEAKPLKLYVYNTDTDNCREVIITPNSAWGGEGSLGCGIGYGYLHRIPTRPFEEGKKISLPGQMAGTPITPLKDGFTEVQLSSVNPPSLSPPGTTGIEQSLTGLSISSTPPAVSSVLSTGVPTVPLLPPQVNQSLTSVPPMNPATTLPGLMPLPAGLPNLPNLNLNLPAPHIMPGVGLPELVNPGLPPLPSMPPRNLPGIAPLPLPSEFLPSFPLVPESSSAASSGELLSSLPPTSNAPSDPATTTAKADAASSLTVDVTPPTAKAPTTVEDRVGDSTPVSEKPVSAAVDANASESP

SEQ ID NO: 21189 - protein, 464 aa, Homo sapiens
MREGSSTLSEIRKLKPGIMVCTCNPSYSNQETEVQENSPGHRAGLEPFFDFIVSINGSRLNKDNDTLKDLLKANVEKPVKMLIYSSKTLELRETSVTPSNLWGGQGLLGVSIRFCSFDGANENVWHVLEVESNSPAALAGLRPHSDYIIGADTVMNESEDLFSLIETHEAKPLKLYVYNTDTDNCREVIITPNSAWGGEGSLGCGIGYGYLHRIPTRPFEEGKKISLPGQMAGTPITPLKDGFTEVQLSSVNPPSLSPPGTTGIEQSLTGLSISSTPPAVSSVLSTGVPTVPLLPPQVNQSLTSVPPMNPATTLPGLMPLPAGLPNLPNLNLNLPAPHIMPGVGLPELVNPGLPPLPSMPPRNLPGIAPLPLPSEFLPSFPLVPESSSAASSGELLSSLPPTSNAPSDPATTTAKADAASSLTVDVTPPTAKAPTTVEDRVGDSTPVSEKPVSAAVDANASESP

SEQ ID NO: 21190 - protein, 675 aa, Homo sapiens
MLRATAPCWFPPGYPEAKKVAEEAALEASRHLGGEQSQAGAPEGSKMLRATAPCWFRPGYPEAKKVAKEAAPEASRHLGAEQSPAGAPEGSKMLRATAPCWFPPGYPEAKKVAEEAALEAPEFPLPSHQPAQSFGLWVPQMHKQASAFVDIQAEPQNRGPAVPPAWPKMVTESCYFPAQRGSACRLPAAPRLTERPSGVRISAPRKRKTIAHSSSPCLVTGYTDAKRTRVASSSQRSRGSKVGRQPGKTRNRSGMACKTTATTSSKRIVRRASLPSLSLKKPIILRSSGCQVPTVLRRGYLQLFTEECLKFCASKQEAEEKALNEEKVAYDCSPNKNRYLNVVLNTLKRLKGLTPSSMPGLSRAALYSRLQEFLLTQDQLKENGYPFPHPERPGGAVLFTGQGKGPGDSSCRVCCRCGTEYLVSSSGRCVRDQLCYYHWGRVRSSQVAGGRVSQYTCCAAAPGSVGCQVAKQHVRDGRKESLDGFVETFKKELSRDAYPGIYALDCEMCYTTHGLELTRVTVVDADMRVVYDTFVKPDNEIVDYNTRFSGVTEADVAKTSITLPQVQAILLSFFSAQTILIGHSLESDLLALKLIHSTVVDTAVLFPHYLGFPYKRSLRNLAADYLAQIIQDSQDGHNSSEDASACLQLVMWKVRQRAQIQPRHRSASPAALACP

SEQ ID NO: 21191 - protein, 420 aa, Homo sapiens
MLKAVILIGGPQKGTRFRPLSFEVPKPLFPVAGVPMIQHHIEACAQVPGMQEILLIGFYQPDEPLTQFLEAAQQEFNLPVRYLQEFAPLGTGGGLYHFRDQILAGSPEAFFVLNADVCSDFPLSAMLEAHRRQRHPFLLLGTTANRTQSLNYGCIVENPQTHEVLHYVEKPSTFISDIINCGIYLFSPEALKPLRDVFQRNQQDGQLEDSPGLWPGAGTIRLEQDVFSALAGQGQIYVHLTDGIWSQIKSAGSALYASRLYLSRYQDTHPERLAKHTPGGPWIRGNVYIHPTAKVAPSAVLGPNVSIGKGVTVGEGVRLRESIVLHGATLQEHTCVLHSIVGWGSTVGRWARVEGTPSDPNPNDPRARMDSESLFKDGKLLPAITILGCRVRIPAEVLILNSIVLPHKELSRSFTNQIIL

SEQ ID NO: 21192 - protein, 473 aa, Homo sapiens
MLKAVILIGGPQKGTRFRPLSFEVPKPLFPVAGVPMIQHHIEACAQVPGMQEILLIGFYQPDEPLTQFLEAAQQEFNLPVRYLQEFAPLGTGGGLYHFRDQILAGSPEAFFVLNADVCSDFPLSAMLEAHRRQRHPFLLLGTTANRTQSLNYGCIVENPQTHEVLHYVEKPSTFISDIINCGIYLFSPEALKPLRDVFQRNQQDGQLEDSPGLWPGAGTIRLEQDVFSALAGQGQIYVHLTDGIWSQIKSAGSALYASRLYLSRYQDTHPERLAKHTPGGPWIRGTQPAPIPNLWLPPQPSEPGFLTSSPELKPQSLPLPDQIRFGIFAPRASLLLLGNVYIHPTAKVAPSAVLGPNVSIGKGVTVGEGVRLRESIVLHGATLQEHTCVLHSIVGWGSTVGRWARVEGTPSDPNPNDPRARMDSESLFKDGKLLPAITILGCRVRIPAEVLILNSIVLPHKELSRSFTNQIIL

SEQ ID NO: 21193 - protein, 128 aa, Homo sapiens
MWSTRSPNSTAWPLSLEPDPGMASASTTMHTTTIAEPDPGMSGWPDGRMETSTPTIMDIVVIAGVIAAVAIVLVSLLFVMLRYMYRHKGTYHTNEAKGTEFAESADAALQGDPALQDAGDSSRKEYFI

SEQ ID NO: 21194 - protein, 107 aa, Homo sapiens
MASASTTMHTTTIAEPDPGMSGWPDGRMETSTPTIMDIVVIAGVIAAVAIVLVSLLFVMLRYMYRHKGTYHTNEAKGTEFAESADAALQGDPALQDAGDSSRKEYFI

SEQ ID NO: 21195 - protein, 109 aa, Homo sapiens
MWSTRSPNSTAWPLSLEPDPGMSGWPDGRMETSTPTIMDIVVIAGVIAAVAIVLVSLLFVMLRYMYRHKGTYHTNEAKGTEFAESADAALQGDPALQDAGDSSRKEYFI

SEQ ID NO: 21196 - protein, 250 aa, Homo sapiens
MAAGTSSYWEDLRKQARQLENELDLKLVSFSKLCTSYSHSSTRDGRRDRYSSDTTPLLNGSSQDRMFETMAIEIEQLLARLTGVNDKMAEYTNSAGVPSLNAALMHTLQRHRDILQDYTHEFHKTKANFMAIRERENLMGSVRKDIESYKSGSGVNNRRTELFLKEHDHLRNSDRLIEETISIAMATKENMTSQRGMLKSIHSKMNTLANRFPAVNSLIQRINLRKRRDSLILGGVIGICTILLLLYAFH

SEQ ID NO: 21197 - protein, 185 aa, Homo sapiens
MFETMAIEIEQLLARLTGVNDKMAEYTNSAGVPSLNAALMHTLQRHRDILQDYTHEFHKTKANFMAIRERENLMGSVRKDIESYKSGSGVNNRRTELFLKEHDHLRNSDRLIEETISIAMATKENMTSQRGMLKSIHSKMNTLANRFPAVNSLIQRINLRKRRDSLILGGVIGICTILLLLYAFH

SEQ ID NO: 21198 - protein, 360 aa, Homo sapiens
MKALILVGGYGTRLRPLTLSTPKPLVDFCNKPILLHQVEALAAAGVDHVILAVSYMSQVLEKEMKAQEQRLGIRISMSHEEEPLGTAGPLALARDLLSETADPFFVLNSDVICDFPFQAMVQFHRHHGQEGSILVTKVEEPSKYGVVVCEADTGRIHRFVEKPQVFVSNKINAGMYILSPAVLQRIQLQPTSIEKEVFPIMAKEGQLYAMELQGFWMDIGQPKDFLTGMCLFLQSLRQKQPERLCSGPGIVGNVLVDPSARIGQNCSIGPNVSLGPGVVVEDGVCIRRCTVLRDARIRSHSWLESCIVGWRCRVGQWVRMENVTVLGEDVIVNDELYLNGASVLPHKSIGESVPEPRIIM

SEQ ID NO: 21199 - protein, 387 aa, Homo sapiens
MKALILVGGYGTRLRPLTLSTPKPLVDFCNKPILLHQVEALAAAGVDHVILAVSYMSQVLEKEMKAQEQRLGIRISMSHEEEPLGTAGPLALARDLLSETADPFFVLNSDVICDFPFQAMVQFHRHHGQEGSILVTKVEEPSKYGVVVCEADTGRIHRFVEKPQVFVSNKINAGMYILSPAVLQRIQLQPTSIEKEVFPIMAKEGQLYAMELQGFWMDIGQPKDFLTGMCLFLQSLRQKQPERLCSGPGIVGNVLVDPSARIGQNCSIGPNVSLGPGVVVEDGVCIRRCTVLRDARIRSHSWLESCIVGWRCRVGQWVSLWAGLGGERGGECACLPDKAYPLLEVRMENVTVLGEDVIVNDELYLNGASVLPHKSIGESVPEPRIIM

SEQ ID NO: 21200 - protein, 457 aa, Homo sapiens
MYSFNTLRLYLWETIVFFSLAASKEAEAARSAPKPMSPSDFLDKLMGRTSGYDARIRPNFKGPPVNVSCNIFINSFGSIAETTMDYRVNIFLRQQWNDPRLAYNEYPDDSLDLDPSMLDSIWKPDLFFANEKGAHFHEITTDNKLLRISRNGNVLYSIRITLTLACPMDLKNFPMDVQTCIMQLESFGYTMNDLIFEWQEQGAVQVADGLTLPQFILKEEKDLRYCTKHYNTGKFTCIEARFHLERQMGYYLIQMYIPSLLIVILSWISFWINMDAAPARVGLGITTVLTMTTQSSGSRASLPKVSYVKAIDIWMAVCLLFVFSALLEYAAVNFVSRQHKELLRFRRKRRHHKSPMLNLFQEDEAGEGRFNFSAYGMGPACLQAKDGISVKGANNSNTTNPPPAPSKSPEEMRKLFIQRAKKIDKISRIGFPMAFLIFNMFYWIIYKIVRREDVHNQ

SEQ ID NO: 21201 - protein, 449 aa, Homo sapiens
MYSFNTLRLYLWETIVFFSLAASKEAEAARSAPKPMSPSDFLDKLMGRTSGYDARIRPNFKGPPVNVSCNIFINSFGSIAETTMDYRVNIFLRQQWNDPRLAYNEYPDDSLDLDPSMLDSIWKPDLFFANEKGAHFHEITTDNKLLRISRNGNVLYSIRITLTLACPMDLKNFPMDVQTCIMQLESFGYTMNDLIFEWQEQGAVQVADGLTLPQFILKEEKDLRYCTKHYNTGKFTCIEARFHLERQMGYYLIQMYIPSLLIVILSWISFWINMDAAPARVGLGITTVLTMTTQSSGSRASLPKVSYVKAIDIWMAVCLLFVFSALLEYAAVNFVSRQHKELLRFRRKRRHHKEDEAGEGRFNFSAYGMGPACLQAKDGISVKGANNSNTTNPPPAPSKSPEEMRKLFIQRAKKIDKISRIGFPMAFLIFNMFYWIIYKIVRREDVHNQ

SEQ ID NO: 21202 - protein, 345 aa, Homo sapiens
MPRIDADLKLDFKDVLLRPKRSSLKSRAEVDLERTFTFRNSKQTYSGIPIIVANMDTVGTFEMAAVMSQHSMFTAIHKHYSLDDWKLFATNHPECLQNVAVSSGSGQNDLEKMTSILEAVPQVKFICLDVANGYSEHFVEFVKLVRAKFPEHTIMAGNVVTGEMVEELILSGADIIKVGVGPGSVCTTRTKTGVGYPQLSAVIECADSAHGLKGHIISDGGCTCPGDVAKAFGAGADFVMLGGMFSGHTECAGEVFERNGRKLKLFYGMSSDTAMNKHAGGVAEYRASEGKTVEVPYKGDVENTILDILGGLRSTCTYVGAAKLKELSRRATFIRVTQQHNTVFS

SEQ ID NO: 21203 - protein, 212 aa, Homo sapiens
MDPLFQQTHKQVHEIQSCMGRLETADKQSVHIVENEIQASIDQIFSRLERLEILSSKEPPNKRQNARLRVDQLKYDVQHLQTALRNFQHRRHAREQQERQREELLSRTFTTNDSDTTIPMDESLQFNSSLQKVHNGMDDLILDGHNILDGLRTQRLTLKGTQKKILDIANMLGLSNTVMRLIEKRAFQDKYFMIGGMLLTCVVMFLVVQYLT

SEQ ID NO: 21204 - protein, 213 aa, Homo sapiens
MDPLFQQTHKQVHEIQSCMGRLETADKQSVHIVENEIQASIDQIFSRLERLEILSSKEPPNKRQNARLRVDQLKYDVQHLQTALRNFQHRRHAREQQERQREELLSRTFTTNDSDTTIPMDESLQFNSSLQKVHNGMDDLILDGHNILDGLRTQRLTLKGTQKKILDIANMLGLSNTVMRLIEKRAFQDKYFMIGTQGSCQTAHFGGRSAGSS

SEQ ID NO: 21205 - protein, 195 aa, Homo sapiens
MDPLFQQTHKQVHEIQSCMGRLETADKQSVHIVENEIQASIDQIFSRLERLEILSSKEPPNKRQNARLRVDQLKYDVQHLQTALRNFQHRRHAREQQERQREELLSRTFTTNDSDTTIPMDESLQFNSSLQKVHNGMDDLILDGHNILDGLRTQRLTLKVGSLLGDREKASCFSLIQQFSNCVYILITCPQIVIF

SEQ ID NO: 21206 - protein, 296 aa, Homo sapiens
MMLPLQGAQMLQMLEKSLRKSLPASLKVYGTVFHINHGNPFNLKAVVDKWPDFNTVVVCPQEQDMTDDLDHYTNTYQIYSKDPQNCQEFLGSPELINWKQHLQIQSSQPSLNEAIQNLAAIKSFKVKQTQRILYMAAETAKELTPFLLKSKILSPNGGKPKAINQEMFKLSSMDVTHAHLVNKFWHFGGNERSQRFIERCIQTFPTCCLLGPEGTPVCWDLMDQTGEMRMAGTLPEYRLHGLVTYVIYSHAQKLGKLGFPVYSHVDYSNEAMQKMSYTLQHVPIPRSWNQWNCVPL

SEQ ID NO: 21207 - protein, 163 aa, Homo sapiens
MMLPLQGAQMLQMLEKSLRKSLPASLKVYGTVFHINHGNPFNLKAVVDKWPDFNTVVVCPQEQDMTDDLDHYTNTYQIYSKDPQNCQEFLGSPELINWKQHLQIQSSQPSLNEAIQNLAAIKSFKVKQTQRILYMAAETAKELTPFLLKSKILSPNGGKPKAM

SEQ ID NO: 21208 - protein, 348 aa, Homo sapiens
MPHIDNDVKLDFKDVLLRPKRSTLKSRSEVDLTRSFSFRNSKQTYSGVPIIAANMDTVGTFEMAKVLCKFSLFTAVHKHYSLVQWQEFAGQNPDCLEHLAASSGTGSSDFEQLEQILEAIPQVKYICLDVANGYSEHFVEFVKDVRKRFPQHTIMAGNVVTGEMVEELILSGADIIKVGIGPGSVCTTRKKTGVGYPQLSAVMECADAAHGLKGHIISDGGCSCPGDVAKAFGAGADFVMLGGMLAGHSESGGELIERDGKKYKLFYGMSSEMAMKKYAGGVAEYRASEGKTVEVPFKGDVEHTIRDILGGIRSTCTYVGAAKLKELSRRTTFIRVTQQVNPIFSEAC

SEQ ID NO: 21209 - protein, 366 aa, Homo sapiens
MTSCLPALRFIATPRLSAMPHIDNDVKLDFKDVLLRPKRSTLKSRSEVDLTRSFSFRNSKQTYSGVPIIAANMDTVGTFEMAKVLCKFSLFTAVHKHYSLVQWQEFAGQNPDCLEHLAASSGTGSSDFEQLEQILEAIPQVKYICLDVANGYSEHFVEFVKDVRKRFPQHTIMAGNVVTGEMVEELILSGADIIKVGIGPGSVCTTRKKTGVGYPQLSAVMECADAAHGLKGHIISDGGCSCPGDVAKAFGAGADFVMLGGMLAGHSESGGELIERDGKKYKLFYGMSSEMAMKKYAGGVAEYRASEGKTVEVPFKGDVEHTIRDILGGIRSTCTYVGAAKLKELSRRTTFIRVTQQVNPIFSEAC

SEQ ID NO: 21210 - protein, 320 aa, Homo sapiens
MPHIDNDVKLDFKDVLLRPKRSTLKSRSEVDLTRSFSFRNSKQTYSGVPIIAANMDTVGTFEMAKVLCKHLAASSGTGSSDFEQLEQILEAIPQVKYICLDVANGYSEHFVEFVKDVRKRFPQHTIMAGNVVTGEMVEELILSGADIIKVGIGPGSVCTTRKKTGVGYPQLSAVMECADAAHGLKGHIISDGGCSCPGDVAKAFGAGADFVMLGGMLAGHSESGGELIERDGKKYKLFYGMSSEMAMKKYAGGVAEYRASEGKTVEVPFKGDVEHTIRDILGGIRSTCTYVGAAKLKELSRRTTFIRVTQQVNPIFSEAC

SEQ ID NO: 21211 - protein, 452 aa, Homo sapiens [sequence omitted]

SEQ ID NO: 21212 - protein, 452 aa, Homo sapiens
MNRQLVNILTALFAFFLETNHFRTAFCKDHDSRSGKQPSQTLSPSDFLDKLMGRTSGYDARIRPNFKGPPVNVTCNIFINSFGSIAETTMDYRVNIFLRQQWNDSRLAYSEYPDDSLDLDPSMLDSIWKPDLFFANEKGANFHDVTTDNKLLRISKNGKVLYSIRLTLTLSCPMDLKNFPMDVQTCTMQLESFGYTMNDLIFEWLSDGPVQVAEGLTLPQFILKEEKELGYCTKHYNTGKFTCIEVKFHLERQMGYYLIQMYIPSLLIVILSWVSFWINMDAAPARVALGITTVLTMTTQSSGSRASLPKVSYVKAIDIWMAVCLLFVFAALLEYAAVNFVSRQHKEFLRLRRRQKRQNKEEDVTRESRFNFSGYGMGHCLQVKDGTAVKATPANPLPQPPKDGDAIKKKFVDRAKRIDTISRAAFPLAFLIFNIFYWITYKIIRHEDVHKK

SEQ ID NO: 21213 - protein, 363 aa, Homo sapiens
MDYRVNIFLRQQWNDSRLAYSEYPDDSLDLDPSMLDSIWKPDLFFANEKGANFHDVTTDNKLLRISKNGKVLYSIRLTLTLSCPMDLKNFPMDVQTCTMQLESFGYTMNDLIFEWLSDGPVQVAEGLTLPQFILKEEKELGYCTKHYNTGKFTCIEVKFHLERQMGYYLIQMYIPSLLIVILSWVSFWINMDAAPARVALGITTVLTMTTQSSGSRASLPKVSYVKAIDIWMAVCLLFVFAALLEYAAVNFVSRQHKEFLRLRRRQKRQNKEEDVTRESRFNFSGYGMGHCLQVKDGTAVKATPANPLPQPPKDGDAIKKKFVDRAKRIDTISRAAFPLAFLIFNIFYWITYKIIRHEDVHKK

SEQ ID NO: 21214 - protein, 132 aa, Homo sapiens
MISITEWQKIGVGITGFGIFFILFGTLLYFDSVLLAFGNLLFLTGLSLIIGLRKTFWFFFQRHKLKGTSFLLGGVVIVLLRWPLLGMFLETYGFFSLFKGFFPVAFGFLGNVCNIPFLGALFRRLQGTSSMV

SEQ ID NO: 21215 - protein, 464 aa, Homo sapiens
MAHVRHFRTLVSGFYFWEAALLLSLVATKETDSARSRSAPMSPSDFLDKLMGRTSGYDARIRPNFKGPPVNVTCNIFINSFGSIAETTMDYRVNIFLRQKWNDPRLAYSEYPDDSLDLDPSMLDSIWKPDLFFANEKGANFHEVTTDNKLLRIFKNGNVLYSIRLTLTLSCPMDLKNFPMDVQTCIMQLESFGYTMNDLIFEWQDEAPVQVAEGLTLPQFLLKEEKDLRYCTKHYNTGKFTCIEVRFHLERQMGYYLIQMYIPSLLIVILSWVSFWINMDAAPARVALGITTVLTMTTQSSGSRASLPKVSYVKAIDIWMAVCLLFVFSALLEYAAVNFVSRQHKELLRFRRKRKNKTEAFALEKFYRFSDMDDEVRESRFSFTAYGMGPCLQAKDGMTPKGPNHPVQVMPKSPDEMRKVFIDRAKKIDTISRACFPLAFLIFNIFYWVIYKILRHEDIHQQQD

SEQ ID NO: 21216 - protein, 449 aa, Homo sapiens
MAHVRHFRTLVSGFYFWEAALLLSLVATKETDSARSRSAPMSPSDFLDKLMGRTSGYDARIRPNFKGPPVNVTCNIFINSFGSIAETTMDYRVNIFLRQKWNDPRLAYSEYPDDSLDLDPSMLDSIWKPDLFFANEKGANFHEVTTDNKLLRIFKNGNVLYSIRLTLTLSCPMDLKNFPMDVQTCIMQLESFGYTMNDLIFEWQDEAPVQVAEGLTLPQFLLKEEKDLRYCTKHYNTGKFTCIEVRFHLERQMGYYLIQMYIPSLLIVILSWVSFWINMDAAPARVALGITTVLTMTTQSSGSRASLPKVSYVKAIDIWMAVCLLFVFSALLEYAAVNFVSRQHKELLRFRRKRKNKDDEVRESRFSFTAYGMGPCLQAKDGMTPKGPNHPVQVMPKSPDEMRKVFIDRAKKIDTISRACFPLAFLIFNIFYWVIYKILRHEDIHQQQD

SEQ ID NO: 21217 - protein, 138 aa, Homo sapiens
MISLTDTQKIGMGLTGFGVFFLFFGMILFFDKALLAIGNVLFVAGLAFVIGLERTFRFFFQKHKMKATGFFLGGVFVVLIGWPLIGMIFEIYGFFLLFRGFFPVVVGFIRRVPVLGSLLNLPGIRSFVDKVGESNNMV

SEQ ID NO: 21218 - protein, 497 aa, Homo sapiens
MKFLLTTAFLILISLWVEEAYSKEKSSKKGKGKKKQYLCPSQQSAEDLARVPANSTSNILNRLLVSYDPRIRPNFKGIPVDVVVNIFINSFGSIQETTMDYRVNIFLRQKWNDPRLKLPSDFRGSDALTVDPTMYKCLWKPDLFFANEKSANFHDVTQENILLFIFRDGDVLVSMRLSITLSCPLDLTLFPMDTQRCKMQLESFGYTTDDLRFIWQSGDPVQLEKIALPQFDIKKEDIEYGNCTKYYKGTGYYTCVEVIFTLRRQVGFYMMGVYAPTLLIVVLSWLSFWINPDASAARVPLGIFSVLSLASECTTLAAELPKVSYVKALDVWLIACLLFGFASLVEYAVVQVMLNNPKRVEAEKARIAKAEQADGKGGNVAKKNTVNGTGTPVHISTLQVGETRCKKVCTSKSDLRSNDFSIVGSLPRDFELSNYDCYGKPIEVNNGLGKSQAKNNKKPPPAKPVIPTAAKRIDLYARALFPFCFLFFNVIYWSIYL

SEQ ID NO: 21219 - protein, 303 aa, Homo sapiens
MKFLLTTAFLILISLWVEEAYSKEKSSKKGKGKKKQYLCPSQQSAEDLARVPANSTSNILNRLLVSYDPRIRPNFKGIPVDVVVNIFINSFGSIQETTMDYRVNIFLRQKWNDPRLKLPSDFRGSDALTVDPTMYKCLWKPDLFFANEKSANFHDVTQENILLFIFRDGDVLVSMRLSITLSCPLDLTLFPMDTQRCKMQLESFGYTTDDLRFIWQSGDPVQLEKIALPQFDIKKEDIEYGNCTKYYKGTGYYTCVEVIFTLRRQVGFYMMGVYAPTLLIVVLSWLSFWINPDASAARVPLGW

SEQ ID NO: 21220 - protein, 508 aa, Homo sapiens
MTSTCTNSTRESNSSHTCMPLSKMPISLAHGIIRSTVLVIFLAASFVGNIVLALVLQRKPQLLQVTNRFIFNLLVTDLLQISLVAPWVVATSVPLFWPLNSHFCTALVSLTHLFAFASVNTIVVVSVDRYLSIIHPLSYPSKMTQRRGYLLLYGTWIVAILQSTPPLYGWGQAAFDERNALCSMIWGASPSYTILSVVSFIVIPLIVMIACYSVVFCAARRQHALLYNVKRHSLEVRVKDCVENEDEEGAEKKEEFQDESEFRRQHEGEVKAKEGRMEAKDGSLKAKEGSTGTSESSVEARGSEEVRESSTVASDGSMEGKEGSTKVEENSMKADKGRTEVNQCSIDLGEDDMEFGEDDINFSEDDVEAVNIPESLPPSRRNSNSNPPLPRCYQCKAAKVIFIIIFSYVLSLGPYCFLAVLAVWVDVETQVPQWVITIIIWLFFLQCCIHPYVYGYMHKTIKKEIQDMLKKFFCKEKPPKEDSHPDLPGTEGGTEGKIVPSYDSATFP

SEQ ID NO: 21221 - protein, 78 aa, Homo sapiens
MYGKIIFVLLLSGIVSISASSTTGVAMHTSTSSSVTKSYISSQTNGITLINWWAMARVIFEVMLVVVGMIILISYCIR

SEQ ID NO: 21222 - protein, 600 aa, Homo sapiens
MAALAPVGSPASRGPRLAAGLRLLPMLGLLQLLAEPGLGRVHHLALKDDVRHKVHLNTFGFFKDGYMVVNVSSLSLNEPEDKDVTIGFSLDRTKNDGFSSYLDEDVNYCILKKQSVSVTLLILDISRSEVRVKSPPEAGTQLPKIIFSRDEKVLGQSQEPNVNPASAGNQTQKTQDGGKSKRSTVDSKAMGEKSFSVHNNGGAVSFQFFFNISTDDQEGLYSLYFHKCLGKELPSDKFTFSLDIEITEKNPDSYLSAGEIPLPKLYISMAFFFFLSGTIWIHILRKRRNDVFKIHWLMAALPFTKSLSLVFHAIDYHYISSQGFPIEGWAVVYYITHLLKGALLFITIALIGTGWAFIKHILSDKDKKIFMIVIPLQVLANVAYIIIESTEEGTTEYGLWKDSLFLVDLLCCGAILFPVVWSIRHLQEASATDGKGDSMGPLQQRANLRAGSRIESHHFAQADLELLASSCPPASVSQRAGITAAINLAKLKLFRHYYVLIVCYIYFTRIIAFLLKLAVPFQWKWLYQLLDETATLVFFVLTGYKFRPASDNPYLQLSQEEEDLEMESVVTTSGVMESMKKVKKVTNGSVEPQGEWEGAV

SEQ ID NO: 21223 - protein, 552 aa, Homo sapiens
MAALAPVGSPASRGPRLAAGLRLLPMLGLLQLLAEPGLGRVHHLALKDDVRHKVHLNTFGFFKDGYMVVNVSSLSLNEPEDKDVTIGFSLDRTKNDGFSSYLDEDVNYCILKKQSVSVTLLILDISRSEVRVKSPPEAGTQLPKIIFSRDEKVLGQSQEPNVNPASAGNQTQKTQDGGKSKRSTVDSKAMGEKSFSVHNNGGAVSFQFFFNISTDDQEGLYSLYFHKCLGKELPSDKFTFSLDIEITEKNPDSYLSAGEIPLPKLYISMAFFFFLSGTIWIHILRKRRNDVFKIHWLMAALPFTKSLSLVFHAIDYHYISSQGFPIEGWAVVYYITHLLKGALLFITIALIGTGWAFIKHILSDKDKKIFMIVIPLQVLANVAYIIIESTEEGTTEYGLWKDSLFLVDLLCCGAILFPVVWSIRHLQEASATDGKAAINLAKLKLFRHYYVLIVCYIYFTRIIAFLLKLAVPFQWKWLYQLLDETATLVFFVLTGYKFRPASDNPYLQLSQEEEDLEMESVVTTSGVMESMKKVKKVTNGSVEPQGEWEGAV

SEQ ID NO: 21224 - protein, 300 aa, Homo sapiens
MAALAPVGSPASRGPRLAAGLRLLPMLGLLQLLAEPGLGRVHHLALKDDVRHKVHLNTFGFFKDGYMVVNVSSLSLNEPEDKDVTIGFSLDRTKNDGFSSYLDEDVNYCILKKQSVSVTLLILDISRSEVRVKSPPEAGTQLPKIIFSRDEKVLGQSQEPNVNPASAGNQTQKTQDGGKSKRSTVDSKAMGEKSFSVHNNGGAVSFQFFFNISTDDQEGLYSLYFHKCLGKELPSDKFTFSLDIEITEKNPDSYLSAGEIPLPKLYISMAFFFFLSGTIWIHILRKRRNDVFKIHWLGFH

SEQ ID NO: 21225 - protein, 543 aa, Homo sapiens
MAVSERRGLGRGSPAEWGQRLLLVLLLGGCSGRIHQLALTGEKRADIQLNSFGFYTNGSLEVELSVLRLGLREAEEKSLLVGFSLSRVRSGRVRSYSTRDFQDCPLQKNSSSFLVLFLINTKDLQVQVRKYGEQKTLFIFPGLLPEAPSKPGLPKPQATVPRKVDGGGTSAASKPKSTPAVIQGPSGKDKDLVLGLSHLNNSYNFSFHVVIGSQAEEGQYSLNFHNCNNSVPGKEHPFDITVMIREKNPDGFLSAAEMPLFKLYMVMSACFLAAGIFWVSILCRNTYSVFKIHWLMAALAFTKSISLLFHSINYYFINSQGHPIEGLAVMYYIAHLLKGALLFITIALIGSGWAFIKYVLSDKEKKVFGIVIPMQVLANVAYIIIESREEGASDYVLWKEILFLVDLICCGAILFPVVWSIRHLQDASGTDGKVAVNLAKLKLFRHYYVMVICYVYFTRIIAILLQVAVPFQWQWLYQLLVEGSTLAFFVLTGYKFQPTGNNPYLQLPQEDEEDVQMEQVMTDSGFREGLSKVNKTASGRELL

SEQ ID NO: 21226 - protein, 669 aa, Homo sapiens
MMRLRGSGMLRDLLLRSPAGVSATLRRAQPLVTLCRRPRGGGRPAAGPAAAARLHPWWGGGGWPAEPLARGLSSSPSEILQELGKGSTHPQPGVSPPAAPAAPGPKDGPGETDAFGNSEGKELVASGENKIKQGLLPSLEDLLFYTIAEGQEKIPVHKFITALKSTGLRTSDPRLKECMDMLRLTLQTTSDGVMLDKDLFKKCVQSNIVLLTQAFRRKFVIPDFMSFTSHIDELYESAKKQSGGKVADYIPQLAKFSPDLWGVSVCTVDGQRHSTGDTKVPFCLQSCVKPLKYAIAVNDLGTEYVHRYVGKEPSGLRFNKLFLNEDDKPHNPMVNAGAIVVTSLIKQGVNNAEKFDYVMQFLNKMAGNEYVGFSNATFQSERESGDRNFAIGYYLKEKKCFPEGTDMVGILDFYFQLCSIEVTCESASVMAATLANGGFCPITGERVLSPEAVRNTLSLMHSCGMYDFSGQFAFHVGLPAKSGVAGGILLVVPNVMGMMCWSPPLDKMGNSVKGIHFCHDLVSLCNFHNYDNLRHFAKKLDPRREGGDQRVKSVINLLFAAYTGDVSALRRFALSAMDMEQRDYDSRTALHVAAAEGHVEVVKFLLEACKVNPFPKDRWNNTPMDEALHFGHHDVFKILQEYQVQYTPQGDSDNGKENQTVHKNLDGLL

SEQ ID NO: 21227 - protein, 169 aa, Homo sapiens
MMRLRGSGMLRDLLLRSPAGVSATLRRAQPLVTLCRRPRGGGRPAAGPAAAARLHPWWGGGGWPAEPLARGLSSSPSEILQELGKGSTHPQPGVSPPAAPAAPGPKDGPGETDAFGNSEGKELVASGENKIKQGLLPSLEDLLFYTIAEGQEKIPVHKFITVSFYIFLS

SEQ ID NO: 21228 - protein, 598 aa, Homo sapiens
MMRLRGSGMLRDLLLRSPAGVSATLRRAQPLVTLCRRPRGGGRPAAGPAAAARLHPWWGGGGWPAEPLARGLSSSPSEILQELGKGSTHPQPGVSPPAAPAAPGPKDGPGETDAFGNSEGKELVASGENKIKQGLLPSLEDLLFYTIAEGQEKIPVHKFITALKSTGLRTSDPRLKECMDMLRLTLQTTSDGVMLDKDLFKKCVQSNIVLLTQAFRRKFVIPDFMSFTSHIDELYESAKKQSGGKVADYIPQLAKFSPDLWGVSVCTVDGQRHSTGDTKVPFCLQSCVKPLKYAIAVNDLGTEYVHRYVGKEPSGLRFNKLFLNEDDKPHNPMVNAGAIVVTSLIKQGVNNAEKFDYVMQFLNKMAGNEYVGFSNATFQSERESGDRNFAIGYYLKEKKCFPEGTDMVGILDFYFQLCSIEVTCESASVMAATLANGGFCPITGERVLSPEAVRNTLSLMHSCGMYDFSGQFAFHVGLPAKSGVAGGILLVVPNVMGMMCWSPPLDKMGNSVKGIHFCHDLVSLCNFHNYDNLRHFAKKLDPRREGGDQRHSFGPLDYESLQQELALKETVWKKVSPESNEDISTTVVYRMESLGEKS

SEQ ID NO: 21229 - protein, 335 aa, Homo sapiens
MESSFSFGVILAVLASLIIATNTLVAVAVLLLIHKNDGVSLCFTLNLAVADTLIGVAISGLLTDQLSSPSRPTQKTLCSLRMAFVTSSAAASVLTVMLITFDRYLAIKQPFRYLKIMSGFVAGACIAGLWLVSYLIGFLPLGIPMFQQTAYKGQCSFFAVFHPHFVLTLSCVGFFPAMLLFVFFYCDMLKIASMHSQQIRKMEHAGAMAGGYRSPRTPSDFKALRTVSVLIGSFALSWTPFLITGIVQVACQECHLYLVLERYLWLLGVGNSLLNPLIYAYWQKEVRLQLYHMALGVKKVLTSFLLFLSARNCGPERPRESSCHIVTISSSEFDG

SEQ ID NO: 21230 - protein, 602 aa, Homo sapiens
MRSMKALQKALSRAGSHCGRGGWGHPSRSPLLGGGVRHHLSEAAAQGRETPHSHQPQHQDHDSSESGMLSRLGDLLFYTIAEGQERIPIHKFTTALKATGLQTSDPRLRDCMSEMHRVVQESSSGGLLDRDLFRKCVSSNIVLLTQAFRKKFVIPDFEEFTGHVDRIFEDVKELTGGKVAAYIPQLAKSNPDLWGVSLCTVDGQRHSVGHTKIPFCLQSCVKPLTYAISISTLGTDYVHKFVGKEPSGLRYNKLSLNEEGIPHNPMVNAGAIVVSSLIKMDCNKAEKFDFVLQYLNKMAGNEYMGFSNATFQSEKETGDRNYAIGYYLKEKKCFPKGVDMMAALDLYFQLCSVEVTCESGSVMAATLANGGICPITGESVLSAEAVRNTLSLMHSCGMYDFSGQFAFHVGLPAKSAVSGAILLVVPNVMGMMCLSPPLDKLGNSHRGTSFCQKLVSLFNFHNYDNLRHCARKLDPRREGAEIRNKTVVNLLFAAYSGDVSALRRFALSAMDMEQKDYDSRTALHVAAAEGHIEVVKFLIEACKVNPFAKDRWGNIPLDDAVQFNHLEVVKLLQDYQDSYTLSETQAEAAAEALSKENLESMV

SEQ ID NO: 21231 - protein, 209 aa, Homo sapiens
MRSMKALQKALSRAGSHCGRGGWGHPSRSPLLGGGVRHHLSEAAAQGRETPHSHQPQHQDHDSSESGMLSRLGDLLFYTIAEGQERIPIHKFTTALKATGLQTSDPRLRDCMSEMHRVVQESSSGGLLDRDLFRKHSERSLSFLILRSSRAMWIASLRMSKSSLEAKWQPTSLSWPSQTQTCGVSPCALWMVNGTLWATQRSPSACSPV

SEQ ID NO: 21232 - protein, 380 aa, Homo sapiens
MCPMLLKNGYNGNATPVTTTAPWASLGLSAKTCNNVSFEESRIVLVVVYSAVCTLGVPANCLTAWLALLQVLQGNVLAVYLLCLALCELLYTGTLPLWVIYIRNQHRWTLGLLACKVTAYIFFCNIYVSILFLCCISCDRFVAVVYALESRGRRRRRTAILISACIFILVGIVHYPVFQTEDKETCFDMLQMDSRIAGYYYARFTVGFAIPLSIIAFTNHRIFRSIKQSMGLSAAQKAKVKHSAIAVVVIFLVCFAPYHLVLLVKAAAFSYYRGDRNAMCGLEERLYTASVVFLCLSTVNGVADPIIYVLATDHSRQEVSRIHKGWKEWSMKTDVTRLTHSRDTEELQSPVALADHYTFSRPVHPPGSPCPAKRLIEESC

SEQ ID NO: 21233 - protein, 192 aa, Homo sapiens
MLQMDSRIAGYYYARFTVGFAIPLSIIAFTNHRIFRSIKQSMGLSAAQKAKVKHSAIAVVVIFLVCFAPYHLVLLVKAAAFSYYRGDRNAMCGLEERLYTASVVFLCLSTVNGVADPIIYVLATDHSRQEVSRIHKGWKEWSMKTDVTRLTHSRDTEELQSPVALADHYTFSRPVHPPGSPCPAKRLIEESC

SEQ ID NO: 21234 - protein, 371 aa, Homo sapiens
MPGNATPVTTTAPWASLGLSAKTCNNVSFEESRIVLVVVYSAVCTLGVPANCLTAWLALLQVLQGNVLAVYLLCLALCELLYTGTLPLWVIYIRNQHRWTLGLLACKVTAYIFFCNIYVSILFLCCISCDRFVAVVYALESRGRRRRRTAILISACIFILVGIVHYPVFQTEDKETCFDMLQMDSRIAGYYYARFTVGFAIPLSIIAFTNHRIFRSIKQSMGLSAAQKAKVKHSAIAVVVIFLVCFAPYHLVLLVKAAAFSYYRGDRNAMCGLEERLYTASVVFLCLSTVNGVADPIIYVLATDHSRQEVSRIHKGWKEWSMKTDVTRLTHSRDTEELQSPVALADHYTFSRPVHPPGSPCPAKRLIEESC

SEQ ID NO: 21235 - protein, 494 aa, Homo sapiens
MEEPQPPRPPASMALLGSQHSGAPSAAGPPGGTSSAATAAVLSFSTVATAALGNLSDASGGGTAAAPGGGGLGGSGAAREAGAAVRRPLGPEAAPLLSHGAAVAAQALVLLLIFLLSSLGNCAVMGVIVKHRQLRTVTNAFILSLSLSDLLTALLCLPAAFLDLFTPPGGSAPAAAAGPWRGFCAASRFFSSCFGIVSTLSVALISLDRYCAIVRPPREKIGRRRALQLLAGAWLTALGFSLPWELLGAPRELAAAQSFHGCLYRTSPDPAQLGAAFSVGLVVACYLLPFLLMCFCHYHICKTVRLSDVRVRPVNTYARVLRFFSEVRTATTVLIMIVFVICCWGPYCFLVLLAAARQAQTMQAPSLLSVVAVWLTWANGAINPVIYAIRNPNISMLLGRNREEGYRTRNVDAFLPSQGPGLQARSRSRLRNRYANRLGACNRMSSSNPASGVAGDVAMWARKNPVVLFCREGPPEPVTAVTKQPKSEAGDTSL

SEQ ID NO: 21236 - protein, 353 aa, Homo sapiens
MEHTHAHLAANSSLSWWSPGSACGLGFVPVVYYSLLLCLGLPANILTVIILSQLVARRQKSSYNYLLALAAADILVLFFIVFVDFLLEDFILNMQMPQVPDKIIEVLEFSSIHTSIWITVPLTIDRYIAVCHPLKYHTVSYPARTRKVIVSVYITCFLTSIPYYWWPNIWTEDYISTSVHHVLIWIHCFTVYLVPCSIFFILNSIIVYKLRRKSNFRLRGYSTGKTTAILFTITSIFATLWAPRIIMILYHLYGAPIQNRWLVHIMSDIANMLALLNTAINFFLYCFISKRFRTMAAATLKAFFKCQKQPVQFYTNHNFSITSSPWISPANSHCIKMLVYQYDKNGKPIKVSP

SEQ ID NO: 21237 - protein, 424 aa, Homo sapiens
MAAVATCGSVAASTGSAVATASKSNVTSFQRRGPRASVTNDSGPRLVSIAGTRPSVRNGQLLVSTGLPALDQLLGGGLAVGTVLLIEEDKYNIYSPLLFKYFLAEGIVNGHTLLVASAKEDPANILQELPAPLLDDKCKKEFDEDVYNHKTPESNIKMKIAWRYQLLPKMEIGPVSSSRFGHYYDASKRMPQELIEASNWHGFFLPEKISSTLKVEPCSLTPGYTKLLQFIQNIIYEEGFDGSNPQKKQRNILRIGIQNLGSPLWGDDICCAENGGNSHSLTKFLYVLRGLLRTSLSACIITMPTHLIQNKAIIARVTTLSDVVVGLESFIGSERETNPLYKDYHGLIHIRQIPRLNNLICDESDVKDLAFKLKRKLFTIERLHLPPDLSDTVSRSSKMDLAESAKRLGPGCGMMAGGKKHLDF

SEQ ID NO: 21238 - protein, 535 aa, Homo sapiens
MAAVATCGSVAASTGSAVATASKSNVTSFQRRGPRASVTNDSGPRLVSIAGTRPSVRNGQLLVSTGLPALDQLLGGGLAVGTVLLIEEDKYNIYSPLLFKYFLAEGIVNGHTLLVASAKEDPANILQELPAPLLDDKCKKEFDEDVYNHKTPESNIKMKIAWRYQLLPKMEIGPVSSSRFGHYYDASKRMPQELIEASNWHGFFLPEKISSTLKVEPCSLTPGYTKLLQFIQNIIYEEGFDGSNPQKKQRNILRIGIQNLGSPLWGDDICCAENGGNSHSLTKFLYVLRGLLRTSLSACIITMPTHLIQNKAIIARVTTLSDVVVGLESFIGSERETNPLYKDYHGLIHIRQIPRLNNLICDESDVKDLAFKLKRKLFTIEAGVQWHDLGSRRPRLLGSGGSPASASLVAGITGAHHHAQLIFVFLVEMGFHHVGQAGLELLTSGDSSASASQSAGIAGMSYRARPRALYFKENKSKVGARQLLETREEHLSSRLLILTQAERLCMGRRFFTAFHIFNELPCKGDCICLQTCQTQ

SEQ ID NO: 21239 - protein, 476 aa, Homo sapiens
MAAVATCGSVAASTGSAVATASKSNVTSFQRRGPRASVTNDSGPRLVSIAGTRPSVRNGQLLVSTGLPALDQLLGGGLAVGTVLLIEEDKYNIYSPLLFKYFLAEGIVNGHTLLVASAKEDPANILQELPAPLLDDKCKKEFDEDVYNHKTPESNIKMKIAWRYQLLPKMEQIGPVSSSRFGHYYDASKRMPQELIEASNWHGFFLPEKISSTLKVEPCSLTPGYTKLLQFIQNIIYEEGFDGSNPQKKQRNILRIGIQNLGSPLWGDDICCAENGGNSHSLTKFLYVLRGLLRTSLSACIITMPTHLIQNKAIIARVTTLSDVVVGLESFIGSERETNPLYKDYHGLIHIRQIPRLNNLICDESDVKDLAFKLKRKLFTIEWVQDNYLRQERNIYPPGFSYLLKQKDSAWGEGSLQHSTFLMSFLAKATAFASRLVRHSEPLKQNGSGRIRQAAGPRLWHDGRRQEAPGLLGIPP

SEQ ID NO: 21240 - protein, 305 aa, Homo sapiens
MPGHNTSRNSSCDPIVTPHLISLYFIVLIGGLVGVISILFLLVKMNTRSVTTMAVINLVVVHSVFLLTVPFRLTYLIKKTWMFGLPFCKFVSAMLHIHMYLTFLFYVVILVTRYLIFFKCKDKVEFYRKLHAVAASAGMWTLVIVIVVPLVVSRYGIHEEYNEEHCFKFHKELAYTYVKIINYMIVIFVIAVAVILLVFQVFIIMLMVQKLRHSLLSHQEFWAQLKNLFFIGVILVCFLPYQFFRIYYLNVVTHSNACNSKVAFYNEIFLSVTAISCYDLLLFVFGGSHWFKQKIIGLWNCVLCR

SEQ ID NO: 21241 - protein, 404 aa, Homo sapiens
MASPRLGTFCCPTRDAATQLVLSFQPRAFHALCLGSGGLRLALGLLQLLPGRRPAGPGSPATSPPASVRILRAAAACDLLGCLGMVIRSTVWLGFPNFVDSVSDMNHTEIWPAAFCVGSAMWIQLLYSACFWWLFCYAVDAYLVIRRSAGLSTILLYHIMAWGLATLLCVEGAAMLYYPSVSRCERGLDHAIPHYVTMYLPLLLVLVANPILFQKTVTAVASLLKGRQGIYTENERRMGAVIKIRFFKIMLVLIICWLSNIINESLLFYLEMQTDINGGSLKPVRTAAKTTWFIMGILNPAQGFLLSLAFYGWTGCSLGFQSPRKEIQWESLTTSAAEGAHPSPLMPHENPASGKVSQVGGQTSDEALSMLSEGSDASTIEIHTASESCNKNEGDPALPTHGDL

SEQ ID NO: 21242 - protein, 914 aa, Homo sapiens
MSRFFTTGSDSESESSLSGEELVTKPVGGNYGKQPLLLSEDEEDTKRVVRSAKDKRFEELTNLIRTIRNAMKIRDVTKCLEEFELLGKAYGKAKSIVDKEGVPRFYIRILADLEDYLNELWEDKEGKKKMNKNNAKALSTLRQKIRKYNRDFESHITSYKQNPEQSADEDAEKNEEDSEGSSDEDEDEDGVSAATFLKKKSEAPSGESRKFLKKMDDEDEDSEDSEDDEDWDTGSTSSDSDSEEEEGKQTALASRFLKKAPTTDEDKKAAEKKREDKAKKKHDRKSKRLDEEEEEDNEGGEWERVRGGVPLVKEKPKMFAKGTEITHAVVIKKLNEILQARGKKGTDRAAQIELLQLLVQIAAENNLGEGVIVKIKFNIIASLYDYNPNLATYMKPEMWGKCLDCINELMDILFANPNIFVGENILEESENLHNADQPLRVRGCILTLVERMDEEFTKIMQNTDPHSQEYVEHLKDEAQVCAIIERVQRYLEEKGTTEEVCRIYLLRILHTYYKFDYKAHQRQLTPPEGSSKSEQDQAENEGEDSAVLMERLCKYIYAKDRTDRIRTCAILCHIYHHALHSRWYQARDLMLMSHLQDNIQHADPPVQILYNRTMVQLGICAFRQGLTKDAHNALLDIQSSGRAKELLGQGLLLRSLQERNQEQEKVERRRQVPFHLHINLELLECVYLVSAMLLEIPYMAAHESDARRRMISKQFHHQLRVGERQPLLGPPESMREHVVAASKAMKMGDWKTCHSFIINEKMNGKVWDLFPEADKVRTMLVRKIQEESLRTYLFTYSSVYDSISMETLSDMFELDLPTVHSIISKMIINEELMASLDQPTQTVVMHRTEPTAQQNLALQLAEKLGSLVENNERVFDHKQGTYGGYFRDQKDGYRKNEGYMRRGGYRQQQSQTAY

SEQ ID NO: 21243 - protein, 815 aa, Homo sapiens
MEDGFSSYSSLYDTSSLLQFCNDDSASAASSMEVTDRIASLEQRVQMQEDDIQLLKSALADVVRRLNITEEQQAVLNRKGPTKARPLMQTLPLRTTVNNGTVLPKKPTGSLPSPSGVRKETAVPATKSNIKRTSSSERVSPGGRRESNGDSRGNRNRTGSTSSSSSGKKNSESKPKEPVFSAEEGYVKMFLRGRPVTMYMPKDQVDSYSLEAKVELPTKRLKLEWVYGYRGRDCRNNLYLLPTGETVYFIASVVVLYNVEEQLQRHYAGHNDDVKCLAVHPDRITIATGQVAGTSKDGKQLPPHVRIWDSVTLNTLHVIGIGFFDRAVTCIAFSKSNGGTNLCAVDDSNDHVLSVWDWQKEEKLADVKCSNEAVFAADFHPTDTNIIVTCGKSHLYFWTLEGSSLNKKQGLFEKQEKPKFVLCVTFSENGDTITGDSSGNILVWGKGTNRISYAVQGAHEGGIFALCMLRDGTLVSGGGKDRKLISWSGNYQKLRKTEIPEQFGPIRTVAEGKGDVILIGTTRNFVLQGTLSGDFTPITQGHTDELWGLAIHASKSQFLTCGHDKHATLWDAVGHRPVWDKIIEDPAQSSGFHPSGSVVAVGTLTGRWFVFDTETKDLVTVHTDGNEQLSVMRYSPDGNFLAIGSHDNCIYIYGVSDNGRKYTRVGKCSGHSSFITHLDWSVNSQFLVSNSGDYEILYWVPSACKQVVSVETTRDIEWATYTCTLGFHVFGVWPEGSDGTDINAVCRAHEKKLLSTGDDFGKVHLFSYPCSQFRAPSHIYGGHSSHVTNVDFLCEDSHLISTGGKDTSIMQWRVI

SEQ ID NO: 21244 - protein, 834 aa, Homo sapiens
MEDGFSSYSSLYDTSSLLQFCNDDSASAASSMEVTDRIASLEQRVQMQEDDIQLLKSALADVVRRLNITEEQQAVLNRKGPTKARPLMQTLPLRTTVNNGTVLPKKPTGSLPSPSGVRKETAVPATKRLNRSVSLLNACKLNRSTPSNIKRTSSSERVSPGGRRESNGDSRGNRNRTGSTSSSSSGKKNSESKPKEPVFSAEEGYVKMFLRGRPVTMYMPKDQVDSYSLEAKVELPTKRLKLEWVYGYRGRDCRNNLYLLPTGETVYFIASVVVLYNVEEQLQRHYAGHNDDVKCLAVHPDRITIATGQVAGTSKDGKQLPPHVRIWDSVTLNTLHVIGIGFFDRAVTCIAFSKSNGGTNLCAVDDSNDHVLSVWDWQKEEKLADVKCSNEAVFAADFHPTDTNIIVTCGKSHLYFWTLEGSSLNKKQGLFEKQEKPKFVLCVTFSENGDTITGDSSGNILVWGKGTNRISYAVQGAHEGGIFALCMLRDGTLVSGGGKDRKLISWSGNYQKLRKTEIPEQFGPIRTVAEGKGDVILIGTTRNFVLQGTLSGDFTPITQGHTDELWGLAIHASKSQFLTCGHDKHATLWDAVGHRPVWDKIIEDPAQSSGFHPSGSVVAVGTLTGRWFVFDTETKDLVTVHTDGNEQLSVMRYSPDGNFLAIGSHDNCIYIYGVSDNGRKYTRVGKCSGHSSFITHLDWSVNSQFLVSNSGDYEILYWVPSACKQVVSVETTRDIEWATYTCTLGFHVFGVWPEGSDGTDINAVCRAHEKKLLSTGDDFGKVHLFSYPCSQFRAPSHIYGGHSSHVTNVDFLCEDSHLISTGGKDTSIMQWRVI

SEQ ID NO: 21245 - protein, 535 aa, Homo sapiens
MFSWLGTDDRRRKDPEVFQTVSEGLKKLYKSKLLPLEEHYRFHEFHSPALEDADFDNKPMVLLVGQYSTGKTTFIRYLLEQDFPGMRIGPEPTTDSFIAVMQGDMEGIIPGNALVVDPKKPFRKLNAFGNAFLNRFVCAQLPNPVLESISVIDTPGILSGEKQRISRGYDFAAVLEWFAERVDRIILLFDAHKLDISDEFSEVIKALKNHEDKMRVVLNKADQIETQQLMRVYGALMWSLGKIVNTPEVIRVYIGSFWSHPLLIPDNRKLFEAEEQDLFRDIQSLPRNAALRKLNDLIKRARLAKVHAYIISSLKKEMPSVFGKDNKKKELVNNLAEIYGRIEREHQISPGDFPNLKRMQDQLQAQDFSKFQPLKSKLLEVVDDMLAHDIAQLMVLVRQEESQRPIQMVKGGAFEGTLHGPFGHGYGEGAGEGIDDAEWVVARDKPMYDEIFYTLSPVDGKITGANAKKEMVRSKLPNSVLGKIWKLADIDKDGMLDDDEFALANHLIKVKLEGHELPNELPAHLLPPSKRKVAE

SEQ ID NO: 21246 - protein, 175 aa, Homo sapiens
MFSWLGTDDRRRKDPEVFQTVSEGLKKLYKSKLLPLEEHYRFHEFHSPALEDADFDNKPMVLLVGQYSTGKTTFIRYLLEQDFPGMRIGPEPTTDSFIAVMQGDMEGIIPGNALVVDPKKPFRKLNAFGNAFLNRFVCAQLPNPVLESISVIDTPGILSGEKQRISRGPAAGPGL

SEQ ID NO: 21247 - protein, 106 aa, Homo sapiens
MAQEFVNCKIQPGKVVVFIKPTCPYCRRAQEILSQLPIKQGLLEFVDITATNHTNEIQDYLQQLTGARTVPRVFIGKDCIGGCSDLVSLQQSGELLTRLKQIGALQ

SEQ ID NO: 21248 - protein, 1969 aa, Homo sapiens
MAARSAPSCHLRLEWVYGYRGHQCRNNLYYTAAKEIVYFVAGVGVVYSPREHRQKFYRGHSDDIISLALHPERVLVATGQVGKEPYICIWDSYTVQTISVLKDVHTHGIACLAFDLDGQRLVSVGLDSKNAVCVWDWKRGKMLSMAPGHTDRIFDISWDLYQPNKLVSCGVKHIKFWSLCGNALTPKRGVFGKTGDLQTILCLACARDELTYSGALNGDIYVWKGINLIRTIQGAHAAGIFSMNACEEGFATGGRDGCIRLWDLTFKPITVIDLRETDQGYKGLSVRSVCWRGDHILVGTQDSEIFEIVVQERNKPFLIMQGHCEGELWALAVHPTKPLAVTGSDDRSVRIWSLVDHALIARCNMEEPIRCAAVNADGIHLALGMKDGSFTVLRVRDMTEVVHIKDRKEAIHELKYSPDGTYLAVGCNDSSVDIYGVAQRYKKVGECLGSLSFITHLDWSSDSRYLQTNDGNGKRLFYRMPGGKEVTSTEEIKGVHWASWTCVSGLEVNGIWPKYSDINDINSVDGNYIGQVLVTADDYGIIKLFRYPCLRKGAKFRKYIGHSAHVTNVRWSHDYQWVISIGGADHSVFQWKFIPERKLKDAVHIAPQESLADSHSDESDSDLSDVPELDSEIEQETQLTYRRQVYKEDLPQLKEQCKEKQKSATSKRRERAPGNSIRLHFVHGYRGYDCRSNLFYTQIGEIVYHVAAVGVIYNRQQNTQRFYLGHDDDILCLTIHPLKDYVATGQVGRDPSIHIWDTETIKPLSILKGHHQYGVSAVDFSADGKRLASVGIDDSHTVVLWDWKKGEKLSIARGSKDKIFVVKMNPYVPDKLITAGIKHMKFWRKAGGGLIGRKGYIGTLGKNDTMMCAVYGWTEEMAFSGTSTGDVCIWRDIFLVKTVKAHDGPVFSMHALEKGFVTGGKDGIVALWDDSFERCLKTYAIKRAALAPGSKGLLLEDNPSIRAISLGHGHILVGTKNGEILEVDKSGPITLLVQGHMEGEVWGLATHPYLPICATVSDDKTLRIWDLSPSHCMLAVRKLKKGGRCCCFSPDGKALAVGLNDGSFLMANADTLEDLVSFHHRKDMISDIRFSPGSGKYLAVASHDSFIDIYNVMSSKRVGICKGATSYITHIDWDIRGKLLQVNTGAKEQLFFEAPRGKKQTIPSVEVEKIAWASWTSVLGLCCEGIWPVIGEVTDVTASCLTSDKMVLATGDDLGFVKLFRYPTKGKFGKFKRYVAHSTHVTNVRWTYDDSMLVTLGGTDMSLMVWTNEMEGYREKRPCDSEESDIDSEEDGGYDSDVTRENEISYTIRALSTNIRPMLGIKPHLQQKEPSIDERPPVSRAPPQPEKLQTNNVGKKKRPIEDLVLELIFGYRGRDCRNNVHYLNDGDDIIYHTASVGILHNVATGSQSFYQEHNDDILCLTVNQHPKFINIVATGQVGDSADMSATAPSIHIWDAMNKQTLSILRCYHSKGVCSVSFSATGKLLLSVGLDPEHTITIWRWQEGAKIASRAGHNQRIFVAEFRPDSDTQFVSVGVKHVKFWTLAGRALLSKKGLLSTLEDARMQTMLAIAFGANNLTFTGTISGDVCVWKDHILCRIVARAHNGPVFAMYTTLRDGLIVTGGKERPSKEGGAVKLWDQELRRCRAFRLETGQATDCVRSVCRGKGKILVGTRNAEIIEVGEKNAACNILVNGHVDGPIWGLATHPSRDFFLSAAEDGTVRLWDIADKKMLNKVNLGHAARTVCYSPEGDMVAIGMKNGEFIILLVSSLKIWGKKRDRRCAIHDIRFSPDSRYLAVGSSENSVDFYDLTLGPTLNRISYCKDIPSFVIQMDFSADSSYLQVSSGCYKRHVYEVPSGKHLMDHAAIDRITWATWTSILGDEVLGIWSRHAEKADVNCACVSHSGISLVTGDDFGMVKLFDFPCPEKFAKHKRFLGHSPHVTNIRFTSGDRHVVSAGGDDCSLFVWKCVHTPH

SEQ ID NO: 21249 - protein, 1144 aa, Homo sapiens
MAARSAPSCHLRLEWVYGYRGHQCRNNLYYTAAKEIVYFVAGVGVVYSPREHRQKFYRGHSDDIISLALHPERVLVATGQVGKEPYICIWDSYTVQTISVLKDVHTHGIACLAFDLDGQRLVSVGLDSKNAVCVWDWKRGKMLSMAPGHTDRIFDISWDLYQPNKLVSCGVKHIKFWSLCGNALTPKRGVFGKTGDLQTILCLACARDELTYSGALNGDIYVWKGINLIRTIQGAHAAGIFSMNACEEGFATGGRDGCIRLWDLTFKPITVIDLRETDQGYKGLSVRSVCWRGDHILVGTQDSEIFEIVVQERNKPFLIMQGHCEGELWALAVHPTKPLAVTGSDDRSVRIWSLVDHALIARCNMEEPIRCAAVNADGIHLALGMKDGSFTVLRVRDMTEVVHIKDRKEAIHELKYSPDGTYLAVGCNDSSVDIYGVAQRYKKVGECLGSLSFITHLDWSSDSRYLQTNDGNGKRLFYRMPGGKEVTSTEEIKGVHWASWTCVSGLEVNGIWPKYSDINDINSVDGNYIGQVLVTADDYGIIKLFRYPCLRKGAKFRKYIGHSAHVTNVRWSHDYQWVISIGGADHSVFQWKFIPERKLKDAVHIAPQESLADSHSDESDSDLSDVPELDSEIEQETQLTYRRQVYKEDLPQLKEQCKEKQKSATSKRRERAPGNSIRLHFVHGYRGYDCRSNLFYTQIGEIVYHVAAVGVIYNRQQNTQRFYLGHDDDILCLTIHPLKDYVATGQVGRDPSIHIWDTETIKPLSILKGHHQYGVSAVDFSADGKRLASVGIDDSHTVVLWDWKKGEKLSIARGSKDKIFVVKMNPYVPDKLITAGIKHMKFWRKAGGGLIGRKGYIGTLGKNDTMMCAVYGWTEEMAFSGTSTGDVCIWRDIFLVKTVKAHDGPVFSMHALEKGFVTGGKDGIVALWDDSFERCLKTYAIKRAALAPGSKGLLLEDNPSIRAISLGHGHILVGTKNGEILEVDKSGPITLLVQGHMEGEVWGLATHPYLPICATVSDDKTLRIWDLSPSHCMLAVRKLKKGGRCCCFSPDGKALAVGLNDGSFLMANADTLEDLVSFHHRKDMISDIRFSPGSGKYLAVASHDSFIDIYNVMSSKRVGICKGATSYITHIDWDIRAFTGQHWC

SEQ ID NO: 21250 - protein, 622 aa, Homo sapiens
MAARSAPSCHLRLEWVYGYRGHQCRNNLYYTAAKEIVYFVAGVGVVYSPREHRQKFYRGHSDDIISLALHPERVLVATGQVGKEPYICIWDSYTVQTISVLKDVHTHGIACLAFDLDGQRLVSVGLDSKNAVCVWDWKRGKMLSMAPGHTDRIFDISWDLYQPNKLVSCGVKHIKFWSLCGNALTPKRGVFGKTGDLQTILCLACARDELTYSGALNGDIYVWKGINLIRTIQGAHAAGIFSMNACEEGFATGGRDGCIRLWDLTFKPITVIDLRETDQGYKGLSVRSVCWRGDHILVGTQDSEIFEIVVQERNKPFLIMQGHCEGELWALAVHPTKPLAVTGSDDRSVRIWSLVDHALIARCNMEEPIRCAAVNADGIHLALGMKDGSFTVLRVRDMTEVVHIKDRKEAIHELKYSPDGTYLAVGCNDSSVDIYGVAQRYKKVGECLGSLSFITHLDWSSDSRYLQTNDGNGKRLFYRMPGGKEVTSTEEIKGVHWASWTCVSGLEVNGIWPKYSDINDINSVDGNYIGQVLVTADDYGIIKLFRYPCLRKGAKFRKYIGHSAHVTNVRWSHDYQWVISIGGADHSVFQWKFIPERKLKDAVHIAPQGYIHLYLHRHLNLM

SEQ ID NO: 21251 - protein, 1977 aa, Homo sapiens
MAARSAPSCHLRLEWVYGYRGHQCRNNLYYTAAKEIVYFVAGVGVVYSPREHRQKFYRGHSDDIISLALHPERVLVATGQVGKEPYICIWDSYTVQTISVLKDVHTHGIACLAFDLDGQRLVSVGLDSKNAVCVWDWKRGKMLSMAPGHTDRIFDISWDLYQPNKLVSCGVKHIKFWSLCGNALTPKRGVFGKTGDLQTILCLACARDELTYSGALNGDIYVWKGINLIRTIQGAHAAGIFSMNACEEGFATGGRDGCIRLWDLTFKPITVIDLRETDQGYKGLSVRSVCWRGDHILVGTQDSEIFEIVVQERNKPFLIMQGHCEGELWALAVHPTKPLAVTGSDDRSVRIWSLVDHALIARCNMEEPIRCAAVNADGIHLALGMKDGSFTVLRVRDMTEVVHIKDRKEAIHELKYSPDGTYLAVGCNDSSVDIYGVAQRYKKVGECLGSLSFITHLDWSSDSRYLQTNDGNGKRLFYRMPGGKEVTSTEEIKGVHWASWTCVSGLEVNGIWPKYSDINDINSVDGNYIGQVLVTADDYGIIKLFRYPCLRKGAKFRKYIGHSAHVTNVRWSHDYQWVISIGGADHSVFQWKFIPERKLKDAVHIAPQESLADSHSDESDSDLSDVPELDSEIEQETQLTYRRQVYKEDLPQLKEQCKEKQKSATSKRRERAPGNSIRLHFVHGYRGYDCRSNLFYTQIGEIVYHVAAVGVIYNRQQNTQRFYLGHDDDILCLTIHPLKDYVATGQVGRDPSIHIWDTETIKPLSILKGHHQYGVSAVDFSADGKRLASVGIDDSHTVVLWDWKKGEKLSIARGSKDKIFVVKMNPYVPDKLITAGIKHMKFWRKAGGGLIGRKGYIGTLGKNDTMMCAVYGWTEEMAFSGTSTGDVCIWRDIFLVKTVKAHDGPVFSMHALEKGFVTGGKDGIVALWDDSFERCLKTYAIKRAALAPGSKGLLLEDNPSIRAISLGHGHILVGTKNGEILEVDKSGPITLLVQGHMEGEVWGLATHPYLPICATVSDDKTLRIWDLSPSHCMLAVRKLKKGGRCCCFSPDGKALAVGLNDGSFLMANADTLEDLVSFHHRKDMISDIRFSPGSGKYLAVASHDSFIDIYNVMSSKRVGICKGATSYITHIDWDIRGKLLQVNTGAKEQLFFEAPRGKKQTIPSVEVEKIAWASWTSVLGLCCEGIWPVIGEVTDVTASCLTSDKMVLATGDDLGFVKLFRYPTKGKFGKFKRYVAHSTHVTNVRWTYDDSMLVTLGGTDMSLMVWTNEMEGYREKRPCDSEESDIDSEEDGGYDSDVTRENEISYTIRALSTNIRPMLGIKPHLQQKEPSIDERQGVVRGSRPPVSRAPPQPEKLQTNNVGKKKRPIEDLVLELIFGYRGRDCRNNVHYLNDGDDIIYHTASVGILHNVATGSQSFYQEHNDDILCLTVNQHPKFINIVATGQVGDSADMSATAPSIHIWDAMNKQTLSILRCYHSKGVCSVSFSATGKLLLSVGLDPEHTITIWRWQEGAKIASRAGHNQRIFVAEFRPDSDTQFVSVGVKHVKFWTLAGRALLSKKGLLSTLEDARMQTMLAIAFGANNLTFTGTISGDVCVWKDHILCRIVARAHNGPVFAMYTTLRDGLIVTGGKERPSKEGGAVKLWDQELRRCRAFRLETGQATDCVRSVCRGKGKILVGTRNAEIIEVGEKNAACNILVNGHVDGPIWGLATHPSRDFFLSAAEDGTVRLWDIADKKMLNKVNLGHAARTVCYSPEGDMVAIGMKNGEFIILLVSSLKIWGKKRDRRCAIHDIRFSPDSRYLAVGSSENSVDFYDLTLGPTLNRISYCKDIPSFVIQMDFSADSSYLQVSSGCYKRHVYEVPSGKHLMDHAAIDRITWATWTSILGDEVLGIWSRHAEKADVNCACVSHSGISLVTGDDFGMVKLFDFPCPEKFAKHKRFLGHSPHVTNIRFTSGDRHVVSAGGDDCSLFVWKCVHTPH

SEQ ID NO: 21252 - protein, 1210 aa, Homo sapiens
MAAAAGAAAAAAAEGEAPAEMGALLLEKETRGATERVHGSLGDTPRSEETLPKATPDSLEPAGPSSPASVTVTVGDEGADTPVGATPLIGDESENLEGDGDLRGGRILLGHATKSFPSSPSKGGSCPSRAKMSMTGAGKSPPSVQSLAMRLLSMPGAQGAAAAGSEPPPATTSPEGQPKVHRARKTMSKPGNGQPPVPEKRPPEIQHFRMSDDVHSLGKVTSDLAKRRKLNSGGGLSEELGSARRSGEVTLTKGDPGSLEEWETVVGDDFSLYYDSYSVDERVDSDSKSEVEALTEQLSEEEEEEEEEEEEEEEEEEEEEEEEDEESGNQSDRSGSSGRRKAKKKWRKDSPWVKPSRKRRKREPPRAKEPRGVNGVGSSGPSEYMEVPLGSLELPSEGTLSPNHAGVSNDTSSLETERGFEELPLCSCRMEAPKIDRISERAGHKCMATESVDGELSGCNAAILKRETMRPSSRVALMVLCETHRARMVKHHCCPGCGYFCTAGTFLECHPDFRVAHRFHKACVSQLNGMVFCPHCGEDASEAQEVTIPRGDGVTPPAGTAAPAPPPLSQDVPGRADTSQPSARMRGHGEPRRPPCDPLADTIDSSGPSLTLPNGGCLSAVGLPLGPGREALEKALVIQESERRKKLRFHPRQLYLSVKQGELQKVILMLLDNLDPNFQSDQQSKRTPLHAAAQKGSVEICHVLLQAGANINAVDKQQRTPLMEAVVNNHLEVARYMVQRGGCVYSKEEDGSTCLHHAAKIGNLEMVSLLLSTGQVDVNAQDSGGWTPIIWAAEHKHIEVIRMLLTRGADVTLTDNEENICLHWASFTGSAAIAEVLLNARCDLHAVNYHGDTPLHIAARESYHDCVLLFLSRGANPELRNKEGDTAWDLTPERSDVWFALQLNRKLRLGVGNRAIRTEKIICRDVARGYENVPIPCVNGVDGEPCPEDYKYISENCETSTMNIDRNITHLQHCTCVDDCSSSNCLCGQLSIRCWYDKDGRLLQEFNKIEPPLIFECNQACSCWRNCKNRVVQSGIKVRLQLYRTAKMGWGVRALQTIPQGTFICEYVGELISDAEADVREDDSYLFDLDNKDGEVYCIDARYYGNISRFINHLCDPNIIPVRVFMLHQDLRFPRIAFFSSRDIRTGEELGFDYGDRFWDIKSKYFTCQCGSEKCKHSAEAIALEQSRLARLDPHPELLPELGSLPPVNT

SEQ ID NO: 21253 - protein, 1176 aa, Homo sapiens
MAAAAGAAAAAAAEGEAPAEMGALLLEKETRGATERVHGSLGDTPRSEETLPKATPDSLEPAGPSSPASVTVTVGDEGADTPVGATPLIGDESENLEGDGDLRGGRILLGHATKSFPSSPSKGGSCPSRAKMSMTGAGKSPPSVQSLAMRLLSMPGAQGAAAAGSEPPPATTSPEGQPKVHRARKTMSKPGNGQPPVPEKRPPEIQHFRMSDDVHSLGKVTSDLAKRRKLNSGGGLSEELGSARRSGEVTLTKGDPGSLEEWETVVGDDFSLYYDSYSVDERVDSDSKSEVEALTEQLSEEEEEEEEEEEEEEEEEEEEEEEEDEESGNQSDRSGSSGRRKAKKKWRKDSPWVKPSRKRRKREPPRAKEPRGVSNDTSSLETERGFEELPLCSCRMEAPKIDRISERAGHKCMATESVDGELSGCNAAILKRETMRPSSRVALMVLCETHRARMVKHHCCPGCGYFCTAGTFLECHPDFRVAHRFHKACVSQLNGMVFCPHCGEDASEAQEVTIPRGDGVTPPAGTAAPAPPPLSQDVPGRADTSQPSARMRGHGEPRRPPCDPLADTIDSSGPSLTLPNGGCLSAVGLPLGPGREALEKALVIQESERRKKLRFHPRQLYLSVKQGELQKVILMLLDNLDPNFQSDQQSKRTPLHAAAQKGSVEICHVLLQAGANINAVDKQQRTPLMEAVVNNHLEVARYMVQRGGCVYSKEEDGSTCLHHAAKIGNLEMVSLLLSTGQVDVNAQDSGGWTPIIWAAEHKHIEVIRMLLTRGADVTLTDNEENICLHWASFTGSAAIAEVLLNARCDLHAVNYHGDTPLHIAARESYHDCVLLFLSRGANPELRNKEGDTAWDLTPERSDVWFALQLNRKLRLGVGNRAIRTEKIICRDVARGYENVPIPCVNGVDGEPCPEDYKYISENCETSTMNIDRNITHLQHCTCVDDCSSSNCLCGQLSIRCWYDKDGRLLQEFNKIEPPLIFECNQACSCWRNCKNRVVQSGIKVRLQLYRTAKMGWGVRALQTIPQGTFICEYVGELISDAEADVREDDSYLFDLDNKDGEVYCIDARYYGNISRFINHLCDPNIIPVRVFMLHQDLRFPRIAFFSSRDIRTGEELGFDYGDRFWDIKSKYFTCQCGSEKCKHSAEAIALEQSRLARLDPHPELLPELGSLPPVNT

SEQ ID NO: 21254 - protein, 202 aa, Homo sapiens
MAAAAGAAAAAAAEGEAPAEMGALLLEKETRGATERVHGSLGDTPRSEETLPKATPDSLEPAGPSSPASVTVTVGDEGADTPVGATPLIGDESENLEGDGDLRGGRILLGHATKSFPSSPSKGGSCPSRAKMSMTGAGKSPPSVQSLAMRLLSMPGAQGAAAAGSEPPPATTSPEGQPKVHRARKTMSKPGNGQVSGMGEMG

SEQ ID NO: 21255 - protein, 976 aa, Homo sapiens
MELQAARACFALLWGCALAAAAAAQGKEVVLLDFAAAGGELGWLTHPYGKGWDLMQNIMNDMPIYMYSVCNVMSGDQDNWLRTNWVYRGEAERIFIELKFTVRDCNSFPGGASSCKETFNLYYAESDLDYGTNFQKRLFTKIDTIAPDEITVSSDFEARHVKLNVEERSVGPLTRKGFYLAFQDIGACVALLSVRVYYKKCPELLQGLAHFPETIAGSDAPSLATVAGTCVDHAVVPPGGEEPRMHCAVDGEWLVPIGQCLCQAGYEKVEDACQACSPGFFKFEASESPCLECPEHTLPSPEGATSCECEEGFFRAPQDPASMPCTRPPSAPHYLTAVGMGAKVELRWTPPQDSGGREDIVYSVTCEQCWPESGECGPCEASVRYSEPPHGLTRTSVTVSDLEPHMNYTFTVEARNGVSGLVTSRSFRTASVSINQTEPPKVRLEGRSTTSLSVSWSIPPPQQSRVWKYEVTYRKKGDSNSYNVRRTEGFSVTLDDLAPDTTYLVQVQALTQEGQGAGSKVHEFQTLSPEGSGNLAVIGGVAVGVVLLLVLAGVGFFIHRRRKNQRARQSPEDVYFSKSEQLKPLKTYVDPHTYEDPNQAVLKFTTEIHPSCVTRQKVIGAGEFGEVYKGMLKTSSGKKEVPVAIKTLKAGYTEKQRVDFLGEAGIMGQFSHHNIIRLEGVISKYKPMMIITEYMENGALDKFLREKDGEFSVLQLVGMLRGIAAGMKYLANMNYVHRDLAARNILVNSNLVCKVSDFGLSRVLEDDPEATYTTSGGKIPIRWTAPEAISYRKFTSASDVWSFGIVMWEVMTYGERPYWELSNHEVMKAINDGFRLPTPMDCPSAIYQLMMQCWQQERARRPKFADIVSILDKLIRAPDSLKTLADFDPRVSIRLPSTSGSEGVPFRTVSEWLESIKMQQYTEHFMAAGYTAIEKVVQMTNDDIKRIGVRLPGHQKRIAYSLLGLKDQVNTVGIPI

SEQ ID NO: 21256 - protein, 497 aa, Homo sapiens
MELQAARACFALLWGCALAAAAAAQGKEVVLLDFAAAGGELGWLTHPYGKGWDLMQNIMNDMPIYMYSVCNVMSGDQDNWLRTNWVYRGEAERIFIELKFTVRDCNSFPGGASSCKETFNLYYAESDLDYGTNFQKRLFTKIDTIAPDEITVSSDFEARHVKLNVEERSVGPLTRKGFYLAFQDIGACVALLSVRVYYKKCPELLQGLAHFPETIAGSDAPSLATVAGTCVDHAVVPPGGEEPRMHCAVDGEWLVPIGQCLCQAGYEKVEDACQACSPGFFKFEASESPCLECPEHTLPSPEGATSCECEEGFFRAPQDPASMPCTRPPSAPHYLTAVGMGAKVELRWTPPQDSGGREDIVYSVTCEQCWPESGECGPCEASVRYSEPPHGLTRTSVTVSDLEPHMNYTFTVEARNGVSGLVTSRSFRTASVSINQTEPPKVRLEGRSTTSLSVSWSIPPPQQSRVWKYEVTYRKKVTPRGAGLALAGPTAGDRLVT

SEQ ID NO: 21257 - protein, 94 aa, Homo sapiens
MPVIAGGILAALLLLIVVVLCLYFKIHNALKAAKEPEAVAVKNHNPDKVWWAKNSQAKTIATESCPALQCCEGYRMCASFDSLPPCCCDINEGL

SEQ ID NO: 21258 - protein, 1255 aa, Homo sapiens [sequence omitted]

SEQ ID NO: 21259 - protein, 645 aa, Homo sapiens
MPIWKFPDEEGACQPCPINCTHSCVDLDDKGCPAEQRASPLTSIISAVVGILLVVVLGVVFGILIKRRQQKIRKYTMRRLLQETELVEPLTPSGAMPNQAQMRILKETELRKVKVLGSGAFGTVYKGIWIPDGENVKIPVAIKVLRENTSPKANKEILDEAYVMAGVGSPYVSRLLGICLTSTVQLVTQLMPYGCLLDHVRENRGRLGSQDLLNWCMQIAKGMSYLEDVRLVHRDLAARNVLVKSPNHVKITDFGLARLLDIDETEYHADGGKVPIKWMALESILRRRFTHQSDVWSYGVTVWELMTFGAKPYDGIPAREIPDLLEKGERLPQPPICTIDVYMIMVKCWMIDSECRPRFRELVSEFSRMARDPQRFVVIQNEDLGPASPLDSTFYRSLLEDDDMGDLVDAEEYLVPQQGFFCPDPAPGAGGMVHHRHRSSSTRSGGGDLTLGLEPSEEEAPRSPLAPSEGAGSDVFDGDLGMGAAKGLQSLPTHDPSPLQRYSEDPTVPLPSETDGYVAPLTCSPQPEYVNQPDVRPQPPSPREGPLPAARPAGATLERPKTLSPGKNGVVKDVFAFGGAVENPEYLTPQGGAAPQPHPPPAFSPAFDNLYYWDQDPPERGAPPSTFKGTPTAENPEYLGLDVPV

SEQ ID NO: 21260 - protein, 569 aa, Homo sapiens
MRRLLQETELVEPLTPSGAMPNQAQMRILKETELRKVKVLGSGAFGTVYKGIWIPDGENVKIPVAIKVLRENTSPKANKEILDEAYVMAGVGSPYVSRLLGICLTSTVQLVTQLMPYGCLLDHVRENRGRLGSQDLLNWCMQIAKGMSYLEDVRLVHRDLAARNVLVKSPNHVKITDFGLARLLDIDETEYHADGGKVPIKWMALESILRRRFTHQSDVWSYGVTVWELMTFGAKPYDGIPAREIPDLLEKGERLPQPPICTIDVYMIMVKCWMIDSECRPRFRELVSEFSRMARDPQRFVVIQNEDLGPASPLDSTFYRSLLEDDDMGDLVDAEEYLVPQQGFFCPDPAPGAGGMVHHRHRSSSTRSGGGDLTLGLEPSEEEAPRSPLAPSEGAGSDVFDGDLGMGAAKGLQSLPTHDPSPLQRYSEDPTVPLPSETDGYVAPLTCSPQPEYVNQPDVRPQPPSPREGPLPAARPAGATLERPKTLSPGKNGVVKDVFAFGGAVENPEYLTPQGGAAPQPHPPPAFSPAFDNLYYWDQDPPERGAPPSTFKGTPTAENPEYLGLDVPV

SEQ ID NO: 21261 - protein, 1240 aa, Homo sapiens
MPRGSWKPQVCTGTDMKLRLPASPETHLDMLRHLYQGCQVVQGNLELTYLPTNASLSFLQDIQEVQGYVLIAHNQVRQVPLQRLRIVRGTQLFEDNYALAVLDNGDPLNNTTPVTGASPGGLRELQLRSLTEILKGGVLIQRNPQLCYQDTILWKDIFHKNNQLALTLIDTNRSRACHPCSPMCKGSRCWGESSEDCQSLTRTVCAGGCARCKGPLPTDCCHEQCAAGCTGPKHSDCLACLHFNHSGICELHCPALVTYNTDTFESMPNPEGRYTFGASCVTACPYNYLSTDVGSCTLVCPLHNQEVTAEDGTQRCEKCSKPCARVCYGLGMEHLREVRAVTSANIQEFAGCKKIFGSLAFLPESFDGDPASNTAPLQPEQLQVFETLEEITGYLYISAWPDSLPDLSVFQNLQVIRGRILHNGAYSLTLQGLGISWLGLRSLRELGSGLALIHHNTHLCFVHTVPWDQLFRNPHQALLHTANRPEDECVGEGLACHQLCARGHCWGPGPTQCVNCSQFLRGQECVEECRVLQGLPREYVNARHCLPCHPECQPQNGSVTCFGPEADQCVACAHYKDPPFCVARCPSGVKPDLSYMPIWKFPDEEGACQPCPINCTHSCVDLDDKGCPAEQRASPLTSIISAVVGILLVVVLGVVFGILIKRRQQKIRKYTMRRLLQETELVEPLTPSGAMPNQAQMRILKETELRKVKVLGSGAFGTVYKGIWIPDGENVKIPVAIKVLRENTSPKANKEILDEAYVMAGVGSPYVSRLLGICLTSTVQLVTQLMPYGCLLDHVRENRGRLGSQDLLNWCMQIAKGMSYLEDVRLVHRDLAARNVLVKSPNHVKITDFGLARLLDIDETEYHADGGKVPIKWMALESILRRRFTHQSDVWSYGVTVWELMTFGAKPYDGIPAREIPDLLEKGERLPQPPICTIDVYMIMVKCWMIDSECRPRFRELVSEFSRMARDPQRFVVIQNEDLGPASPLDSTFYRSLLEDDDMGDLVDAEEYLVPQQGFFCPDPAPGAGGMVHHRHRSSSTRSGGGDLTLGLEPSEEEAPRSPLAPSEGAGSDVFDGDLGMGAAKGLQSLPTHDPSPLQRYSEDPTVPLPSETDGYVAPLTCSPQPEYVNQPDVRPQPPSPREGPLPAARPAGATLERPKTLSPGKNGVVKDVFAFGGAVENPEYLTPQGGAAPQPHPPPAFSPAFDNLYYWDQDPPERGAPPSTFKGTPTAENPEYLGLDVPV

SEQ ID NO: 21262 - protein, 1225 aa, Homo sapiens
MKLRLPASPETHLDMLRHLYQGCQVVQGNLELTYLPTNASLSFLQDIQEVQGYVLIAHNQVRQVPLQRLRIVRGTQLFEDNYALAVLDNGDPLNNTTPVTGASPGGLRELQLRSLTEILKGGVLIQRNPQLCYQDTILWKDIFHKNNQLALTLIDTNRSRACHPCSPMCKGSRCWGESSEDCQSLTRTVCAGGCARCKGPLPTDCCHEQCAAGCTGPKHSDCLACLHFNHSGICELHCPALVTYNTDTFESMPNPEGRYTFGASCVTACPYNYLSTDVGSCTLVCPLHNQEVTAEDGTQRCEKCSKPCARVCYGLGMEHLREVRAVTSANIQEFAGCKKIFGSLAFLPESFDGDPASNTAPLQPEQLQVFETLEEITGYLYISAWPDSLPDLSVFQNLQVIRGRILHNGAYSLTLQGLGISWLGLRSLRELGSGLALIHHNTHLCFVHTVPWDQLFRNPHQALLHTANRPEDECVGEGLACHQLCARGHCWGPGPTQCVNCSQFLRGQECVEECRVLQGLPREYVNARHCLPCHPECQPQNGSVTCFGPEADQCVACAHYKDPPFCVARCPSGVKPDLSYMPIWKFPDEEGACQPCPINCTHSCVDLDDKGCPAEQRASPLTSIISAVVGILLVVVLGVVFGILIKRRQQKIRKYTMRRLLQETELVEPLTPSGAMPNQAQMRILKETELRKVKVLGSGAFGTVYKGIWIPDGENVKIPVAIKVLRENTSPKANKEILDEAYVMAGVGSPYVSRLLGICLTSTVQLVTQLMPYGCLLDHVRENRGRLGSQDLLNWCMQIAKGMSYLEDVRLVHRDLAARNVLVKSPNHVKITDFGLARLLDIDETEYHADGGKVPIKWMALESILRRRFTHQSDVWSYGVTVWELMTFGAKPYDGIPAREIPDLLEKGERLPQPPICTIDVYMIMVKCWMIDSECRPRFRELVSEFSRMARDPQRFVVIQNEDLGPASPLDSTFYRSLLEDDDMGDLVDAEEYLVPQQGFFCPDPAPGAGGMVHHRHRSSSTRSGGGDLTLGLEPSEEEAPRSPLAPSEGAGSDVFDGDLGMGAAKGLQSLPTHDPSPLQRYSEDPTVPLPSETDGYVAPLTCSPQPEYVNQPDVRPQPPSPREGPLPAARPAGATLERPKTLSPGKNGVVKDVFAFGGAVENPEYLTPQGGAAPQPHPPPAFSPAFDNLYYWDQDPPERGAPPSTFKGTPTAENPEYLGLDVPV

SEQ ID NO: 21263 - protein, 888 aa, Homo sapiens
MELAALCRWGLLLALLPPGAASTQVCTGTDMKLRLPASPETHLDMLRHLYQGCQVVQGNLELTYLPTNASLSFLQDIQEVQGYVLIAHNQVRQVPLQRLRIVRGTQLFEDNYALAVLDNGDPLNNTTPVTGASPGGLRELQLRSLTEILKGGVLIQRNPQLCYQDTILWKDIFHKNNQLALTLIDTNRSRACHPCSPMCKGSRCWGESSEDCQSLTRTVCAGGCARCKGPLPTDCCHEQCAAGCTGPKHSDCLACLHFNHSGICELHCPALVTYNTDTFESMPNPEGRYTFGASCVTACPYNYLSTDVGSCTLVCPLHNQEVTAEDGTQRCEKCSKPCARVCYGLGMEHLREVRAVTSANIQEFAGCKKIFGSLAFLPESFDGDPASNTAPLQPEQLQVFETLEEITGYLYISAWPDSLPDLSVFQNLQVIRGRILHNGAYSLTLQGLGISWLGLRSLRELGSGLALIHHNTHLCFVHTVPWDQLFRNPHQALLHTANRPEDECVGEGLACHQLCARGHCWGPGPTQCVNCSQFLRGQECVEECRVLQGLPREYVNARHCLPCHPECQPQNGSVTCFGPEADQCVACAHYKDPPFCVARCPSGVKPDLSYMPIWKFPDEEGACQPCPINCTHSPLTSIISAVVGILLVVVLGVVFGILIKRRQQKIRKYTMRRLLQETELVEPLTPSGAMPNQAQMRILKETELRKVKVLGSGAFGTVYKGIWIPDGENVKIPVAIKVLRENTSPKANKEILDETISNLFSNFAPRGPSACCEPTCWCHSGKGQDSLPREEWGRQRRFCLWGCRGEPRVLDTPGRSCPSAPPSSCLQPSLRQPLLLGPGPTRAGGSTQHLQRDTYGREPRVPGSGRASVNQKAKSAEALMCPQGAGKA

SEQ ID NO: 21264 - protein, 1342 aa, Homo sapiens
MRANDALQVLGLLFSLARGSEVGNSQAVCPGTLNGLSVTGDAENQYQTLYKLYERCEVVMGNLEIVLTGHNADLSFLQWIREVTGYVLVAMNEFSTLPLPNLRVVRGTQVYDGKFAIFVMLNYNTNSSHALRQLRLTQLTEILSGGVYIEKNDKLCHMDTIDWRDIVRDRDAEIVVKDNGRSCPPCHEVCKGRCWGPGSEDCQTLTKTICAPQCNGHCFGPNPNQCCHDECAGGCSGPQDTDCFACRHFNDSGACVPRCPQPLVYNKLTFQLEPNPHTKYQYGGVCVASCPHNFVVDQTSCVRACPPDKMEVDKNGLKMCEPCGGLCPKACEGTGSGSRFQTVDSSNIDGFVNCTKILGNLDFLITGLNGDPWHKIPALDPEKLNVFRTVREITGYLNIQSWPPHMHNFSVFSNLTTIGGRSLYNRGFSLLIMKNLNVTSLGFRSLKEISAGRIYISANRQLCYHHSLNWTKVLRGPTEERLDIKHNRPRRDCVAEGKVCDPLCSSGGCWGPGPGQCLSCRNYSRGGVCVTHCNFLNGEPREFAHEAECFSCHPECQPMEGTATCNGSGSDTCAQCAHFRDGPHCVSSCPHGVLGAKGPIYKYPDVQNECRPCHENCTQGCKGPELQDCLGQTLVLIGKTHLTMALTVIAGLVVIFMMLGGTFLYWRGRRIQNKRAMRRYLERGESIEPLDPSEKANKVLARIFKETELRKLKVLGSGVFGTVHKGVWIPEGESIKIPVCIKVIEDKSGRQSFQAVTDHMLAIGSLDHAHIVRLLGLCPGSSLQLVTQYLPLGSLLDHVRQHRGALGPQLLLNWGVQIAKGMYYLEEHGMVHRNLAARNVLLKSPSQVQVADFGVADLLPPDDKQLLYSEAKTPIKWMALESIHFGKYTHQSDVWSYGVTVWELMTFGAEPYAGLRLAEVPDLLEKGERLAQPQICTIDVYMVMVKCWMIDENIRPTFKELANEFTRMARDPPRYLVIKRESGPGIAPGPEPHGLTNKKLEEVELEPELDLDLDLEAEEDNLATTTLGSALSLPVGTLNRPRGSQSLLSPSSGYMPMNQGNLGESCQESAVSGSSERCPRPVSLHPMPRGCLASESSEGHVTGSEAELQEKVSMCRSRSRSRSPRPRGDSAYHSQRHSLLTPVTPLSPPGLEEEDVNGYVMPDTHLKGTPSSREGTLSSVGLSSVLGTEEEDEDEEYEYMNRRRRHSPPHPPRPSSLEELGYEYMDVGSDLSASLGSTQSCPLHPVPIMPTAGTTPDEDYEYMNRQRDGGGPGGDYAAMGACPASEQGYEEMRAFQGPGHQAPHVHYARLKTLRSLEATDSAFDNPDYWHSRLFPKANAQRT

SEQ ID NO: 21265 - protein, 183 aa, Homo sapiens
MRANDALQVLGLLFSLARGSEVGNSQAVCPGTLNGLSVTGDAENQYQTLYKLYERCEVVMGNLEIVLTGHNADLSFLQWIREVTGYVLVAMNEFSTLPLPNLRVVRGTQVYDGKFAIFVMLNYNTNSSHALRQLRLTQLTGQFPMVPSGLTPQPAQDWYLLDDDPRLLTLSASSKVPVTLAAV

SEQ ID NO: 21266 - protein, 331 aa, Homo sapiens
MRANDALQVLGLLFSLARGSEVGNSQAVCPGTLNGLSVTGDAENQYQTLYKLYERCEVVMGNLEIVLTGHNADLSFLQWIREVTGYVLVAMNEFSTLPLPNLRVVRGTQVYDGKFAIFVMLNYNTNSSHALRQLRLTQLTEILSGGVYIEKNDKLCHMDTIDWRDIVRDRDAEIVVKDNGRSCPPCHEVCKGRCWGPGSEDCQTLTKTICAPQCNGHCFGPNPNQCCHDECAGGCSGPQDTDCFACRHFNDSGACVPRCPQPLVYNKLTFQLEPNPHTKYQYGGVCVASCPHNFVVDQTSCVRACPPDKMEVDKNGLKMCEPCGGLCPKAF

SEQ ID NO: 21267 - protein, 1283 aa, Homo sapiens
MGNLEIVLTGHNADLSFLQWIREVTGYVLVAMNEFSTLPLPNLRVVRGTQVYDGKFAIFVMLNYNTNSSHALRQLRLTQLTEILSGGVYIEKNDKLCHMDTIDWRDIVRDRDAEIVVKDNGRSCPPCHEVCKGRCWGPGSEDCQTLTKTICAPQCNGHCFGPNPNQCCHDECAGGCSGPQDTDCFACRHFNDSGACVPRCPQPLVYNKLTFQLEPNPHTKYQYGGVCVASCPHNFVVDQTSCVRACPPDKMEVDKNGLKMCEPCGGLCPKACEGTGSGSRFQTVDSSNIDGFVNCTKILGNLDFLITGLNGDPWHKIPALDPEKLNVFRTVREITGYLNIQSWPPHMHNFSVFSNLTTIGGRSLYNRGFSLLIMKNLNVTSLGFRSLKEISAGRIYISANRQLCYHHSLNWTKVLRGPTEERLDIKHNRPRRDCVAEGKVCDPLCSSGGCWGPGPGQCLSCRNYSRGGVCVTHCNFLNGEPREFAHEAECFSCHPECQPMEGTATCNGSGSDTCAQCAHFRDGPHCVSSCPHGVLGAKGPIYKYPDVQNECRPCHENCTQGCKGPELQDCLGQTLVLIGKTHLTMALTVIAGLVVIFMMLGGTFLYWRGRRIQNKRAMRRYLERGESIEPLDPSEKANKVLARIFKETELRKLKVLGSGVFGTVHKGVWIPEGESIKIPVCIKVIEDKSGRQSFQAVTDHMLAIGSLDHAHIVRLLGLCPGSSLQLVTQYLPLGSLLDHVRQHRGALGPQLLLNWGVQIAKGMYYLEEHGMVHRNLAARNVLLKSPSQVQVADFGVADLLPPDDKQLLYSEAKTPIKWMALESIHFGKYTHQSDVWSYGVTVWELMTFGAEPYAGLRLAEVPDLLEKGERLAQPQICTIDVYMVMVKCWMIDENIRPTFKELANEFTRMARDPPRYLVIKRESGPGIAPGPEPHGLTNKKLEEVELEPELDLDLDLEAEEDNLATTTLGSALSLPVGTLNRPRGSQSLLSPSSGYMPMNQGNLGESCQESAVSGSSERCPRPVSLHPMPRGCLASESSEGHVTGSEAELQEKVSMCRSRSRSRSPRPRGDSAYHSQRHSLLTPVTPLSPPGLEEEDVNGYVMPDTHLKGTPSSREGTLSSVGLSSVLGTEEEDEDEEYEYMNRRRRHSPPHPPRPSSLEELGYEYMDVGSDLSASLGSTQSCPLHPVPIMPTAGTTPDEDYEYMNRQRDGGGPGGDYAAMGACPASEQGYEEMRAFQGPGHQAPHVHYARLKTLRSLEATDSAFDNPDYWHSRLFPKANAQRT

SEQ ID NO: 21268 - protein, 699 aa, Homo sapiens
MALTVIAGLVVIFMMLGGTFLYWRGRRIQNKRAMRRYLERGESIEPLDPSEKANKVLARIFKETELRKLKVLGSGVFGTVHKGVWIPEGESIKIPVCIKVIEDKSGRQSFQAVTDHMLAIGSLDHAHIVRLLGLCPGSSLQLVTQYLPLGSLLDHVRQHRGALGPQLLLNWGVQIAKGMYYLEEHGMVHRNLAARNVLLKSPSQVQVADFGVADLLPPDDKQLLYSEAKTPIKWMALESIHFGKYTHQSDVWSYGVTVWELMTFGAEPYAGLRLAEVPDLLEKGERLAQPQICTIDVYMVMVKCWMIDENIRPTFKELANEFTRMARDPPRYLVIKRESGPGIAPGPEPHGLTNKKLEEVELEPELDLDLDLEAEEDNLATTTLGSALSLPVGTLNRPRGSQSLLSPSSGYMPMNQGNLGESCQESAVSGSSERCPRPVSLHPMPRGCLASESSEGHVTGSEAELQEKVSMCRSRSRSRSPRPRGDSAYHSQRHSLLTPVTPLSPPGLEEEDVNGYVMPDTHLKGTPSSREGTLSSVGLSSVLGTEEEDEDEEYEYMNRRRRHSPPHPPRPSSLEELGYEYMDVGSDLSASLGSTQSCPLHPVPIMPTAGTTPDEDYEYMNRQRDGGGPGGDYAAMGACPASEQGYEEMRAFQGPGHQAPHVHYARLKTLRSLEATDSAFDNPDYWHSRLFPKANAQRT

SEQ ID NO: 21269 - protein, 159 aa, Homo sapiens
MRAVPLPAPLLPLLLLALLAAPAARASRAESVSAPWPEPERESRPPPGPGPGNTTRFGSGAAGGSGSSSSNSSGDALVTRISILLRDLPTLKAAVIVAFAFTTLLIACLLLRVFRSGKRLKKTRKYDIITTPAERVEMAPLNEEDDEDEDSTVFDIKYR

SEQ ID NO: 21270 - protein, 339 aa, Homo sapiens
MAQYKGAASEAGRAMHLMKKREKQREQMEQMKQRIAEENIMKSNIDKKFSAHYDAVEAELKSSTVGLVTLNDMKAKQEALVKEREKQLAKKEQSKELQMKLEKLREKERKKEAKRKISSLSFTLEEEEEGGEEEEEAAMYEEEMEREEITTKKRKLGKNPDVDTSFLPDRDREEEENRLREELRQEWEAKQEKIKSEEIEITFSYWDGSGHRRTVKMRKGNTMQQFLQKALEILRKDFSELRSAGVEQLMYIKEDLIIPHHHSFYDFIVTKARGKSGPLFNFDVHDDVRLLSDATVEKDESHAGKVVLRSWYEKNKHIFPASRWEPYDPEKKWDKYTIR

SEQ ID NO: 21271 - protein, 679 aa, Homo sapiens
MWPRLPGAGLAPQLRRQDQRLHFTGQMSHGLQMAGPQETVLALPLREGVQAAATVPILLYNLEDGLSDHPLDQGPRCPARRPCSPASAPAPTSPKKPKIQAPGETFPTDWSPPPVEFLNPRVLQASREAPAQRWVGVVGPQGLRRLAGELPEELEQEHLDLDPKRGLALPEKLFWNTSGLSQQAAAPEFSWGGSGSYFNNLDYLLQEKREQALEQERERLLLQECLNLNSLDLDEEEVPLTPEHRMLVEKYSVSLQTIPPVHPGETVFLPRCHPLPCILDSSLLKPRSHLEGLFLSSPPAQQLSFLRSGLLNILYLHMPDCPVSLLQWLFQLLTWPPETSLGAFGLLWDLIVDGIFLQPDEDKHLWCPSLQEVREAFHSLGAHSPALYPLGPFWHGGRVLPGEAGLNENEEQDAPQEIALDISLGHIYKFLALCAQAQPGAYTDENLMGLIELLCRTSLDVGLRLLPKVDLQQLLLLLLENIREWPGKLQELCCTLSWVSDHHHNLLALVQFFPDMTSRSRRLRSQLSLVVIARMLGQQEMLPLWQEKTQLSSLSRLLGLMRPSSLRQYLDSVPLPPCQEQQPKASAELDHKACYLCHSLLMLAGVVVSCQDITPDQWGELQLLCMQLDRHISTQIRESPQAMHRTMLKDLATQTYIRWQELLTHCQPQAQYFSPWKDI

SEQ ID NO: 21272 - protein, 119 aa, Homo sapiens
MRPSSLRQYLDSVPLPPCQEQQPKASAELDHKACYLCHSLLMLAGVVVSCQDITPDQWGELQLLCMQLDRHISTQIRESPQAMHRTMLKDLATQTYIRWQELLTHCQPQAQYFSPWKDI

SEQ ID NO: 21273 - protein, 138 aa, Homo sapiens
MKMMVVLLMLSSLSRLLGLMRPSSLRQYLDSVPLPPCQEQQPKASAELDHKACYLCHSLLMLAGVVVSCQDITPDQWGELQLLCMQLDRHISTQIRESPQAMHRTMLKDLATQTYIRWQELLTHCQPQAQYFSPWKDI

SEQ ID NO: 21274 - protein, 372 aa, Homo sapiens
MAPAPPPAASFSPSEVQRRLAAGACWVRRGARLYDLSSFVRHHPGGEQLLRARAGQDISADLDGPPHRHSANARRWLEQYYVGELRGEQQGSMENEPVALEETQKTDPAMEPRFKVVDWDKDLVDWRKPLLWQVGHLGEKYDEWVHQPVTRPIRLFHSDLIEGLSKTVWYSVPIIWVPLVLYLSWSYYRTFAQGNVRLFTSFTTEYTVAVPKSMFPGLFMLGTFLWSLIEYLIHRFLFHMKPPSDSYYLIMLHFVMHGQHHKAPFDGSRLVFPPVPASLVIGVFYLCMQLILPEAVGGTVFAGGLLGYVLYDMTHYYLHFGSPHKGSYLYSLKAHHVKHHFAHQKSGFGISTKLWDYCFHTLTPEKPHLKTQ

SEQ ID NO: 21275 - protein, 159 aa, Homo sapiens
MFPGLFMLGTFLWSLIEYLIHRFLFHMKPPSDSYYLIMLHFVMHGQHHKAPFDGSRLVFPPVPASLVIGVFYLCMQLILPEAVGGTVFAGGLLGYVLYDMTHYYLHFGSPHKGSYLYSLKAHHVKHHFAHQKSGFGISTKLWDYCFHTLTPEKPHLKTQ

SEQ ID NO: 21276 - protein, 826 aa, Homo sapiens
MARLCRRVPCTLLLGLAVVLLKARLVPAAARAELSRSDLSLIQQQQQQQQQQQQQQKQLEEAEEERTEVPGATSTLTVPVSVFMLKVQVNDIISRQYLSQAVVEVFVNYTKTNSTVTKSNGAVLIKVPYKLGLSLTIIAYKDGYVLTPLPWKTRRMPIYSSVTLSLFPQSQANIWLFEDTVLITGKLADAKSQPSVQFSKALIKLPDNHHISNVTGYLTVLQQFLKVDNFLHTTGITLNKPGFENIELTPLAAICVKIYSGGKELKVNGSIQVSLPLLRLNDISAGDRIPAWTFDMNTGAWVNHGRGMVKEHNNHLIWTYDAPHLGYWIAAPLPGTRGSGINEDSKDITAYHTVFLTAILGGTIVIVIGFFAVLLCYCRDKCGTPQKRERNITKLEVLKRDQTTSTTHINHISTVKVALKAEDKSQLFNAKNSSYSPQKKEPSKAETEERVSMVKTRDDFKIYNEDVSFLSVNQNNYSRNPTQSLEPNVGSKQPKHINNNLSSSLGDAQDEKRYLTGNEEAYGRSHIPEQLMHIYSQPIAILQTSDLFSTPEQLHTAKSATLPRKGQLVYGQLMEPVNRENFTQTLPKMPIHSHAQPPDAREEDIILEGQQSLPSQASDWSRYSSSLLESVSVPGTLNEAVVMTPFSSELQGISEQTLLELSKGKPSPHPRAWFVSLDGKPVAQVRHSFIDLKKGKRTQSNDTSLDSGVDMNELHSSRKLEREKTFIKSMHQPKILYLEDLDLSSSESGTTVCSPEDPALRHILDGGSGVIMEHPGEESPGRKSTVEDFEANTSPTKRRGRPPLAKRDSKTNIWKKREERPLIPIN

SEQ ID NO: 21277 - protein, 427 aa, Homo sapiens
MARLCRRVPCTLLLGLAVVLLKARLVPAAARAELSRSDLSLIQQQQQQQQQQQQQQKQLEEAEEERTEVPGATSTLTVPVSVFMLKVQVNDIISRQYLSQAVVEVFVNYTKTNSTVTKSNGAVLIKVPYKLGLSLTIIAYKDGYVLTPLPWKTRRMPIYSSVTLSLFPQSQANIWLFEDTVLITGKLADAKSQPSVQFSKALIKLPDNHHISNVTGYLTVLQQFLKVDNFLHTTGITLNKPGFENIELTPLAAICVKIYSGGKELKVNGSIQVSLPLLRLNDISAGDRIPAWTFDMNTGAWVNHGRGMVKEHNNHLIWTYDAPHLGYWIAAPLPGTRGSGINEDSKDITAYHTVFLTAILGGTIVIVIGFFAVLLCYCRDKCGTPQKRERNITKLEVLKRDQTTSTTHINHIRNRRKSFHGKNSGRF

SEQ ID NO: 21278 - protein, 144 aa, Homo sapiens
MYSEIQRERADIGGLMARPEYREWNPELIKPKKLLNPVKASRSHQELHRELLMNHRRGLGVDSKPELQRVLEHRRRNQLIKKKKEELEAKRLQCPFEQELLRRQQRLNQLEKPPEKEEDHAPEFIKVRENLRRIATLTSEEREL

SEQ ID NO: 21279 - protein, 135 aa, Homo sapiens
MYSEIQRERADIGGLMARPEYREWNPELIKPKKLLNPVKASRSHQELHRELLMNHRRGLGVDSKPELQRVLEHRRRNQLIKKKKEELEAKRLQCPFEQELLRRQQRLNQVGDGHPAGTTHPPGLSSREELCCGHS

SEQ ID NO: 21280 - protein, 172 aa, Homo sapiens
MAQRLGEWARGPSDATGLYRAVLLRSAAMYSEIQRERADIGGLMARPEYREWNPELIKPKKLLNPVKASRSHQELHRELLMNHRRGLGVDSKPELQRVLEHRRRNQLIKKKKEELEAKRLQCPFEQELLRRQQRLNQLEKPPEKEEDHAPEFIKVRENLRRIATLTSEEREL

SEQ ID NO: 21281 - protein, 175 aa, Homo sapiens
MGAAQGKKKTYSPQARFHSENEKQRRNGSAAMYSEIQRERADIGGLMARPEYREWNPELIKPKKLLNPVKASRSHQELHRELLMNHRRGLGVDSKPELQRVLEHRRRNQLIKKKKEELEAKRLQCPFEQELLRRQQRLNQLEKPPEKEEDHAPEFIKVRENLRRIATLTSEEREL

SEQ ID NO: 21282 - protein, 333 aa, Homo sapiens
MFRAAAPGQLRRAASLLRFQSTLVIAEHANDSLAPITLNTITAATRLGGEVSCLVAGTKCDKVAQDLCKVAGIAKVLVAQHDVYKGLLPEELTPLILATQKQFNYTHICAGASAFGKNLLPRVAAKLEVAPISDIIAIKSPDTFVRTIYAGNALCTVKCDEKVKVFSVRGTSFDAAATSGGSASSEKASSTSPVEISEWLDQKLTKSDRPELTGAKVVVSGGRGLKSGENFKLLYDLADQLHAAVGASRAAVDAGFVPNDMQVGQTGKIVAPELYIAVGISGAIQHLAGMKDSKTIVAINKDPEAPIFQVADYGIVADLFKVVPEMTEILKKK

SEQ ID NO: 21283 - protein, 284 aa, Homo sapiens
MFRAAAPGQLRRAVAQDLCKVAGIAKVLVAQHDVYKGLLPEELTPLILATQKQFNYTHICAGASAFGKNLLPRVAAKLEVAPISDIIAIKSPDTFVRTIYAGNALCTVKCDEKVKVFSVRGTSFDAAATSGGSASSEKASSTSPVEISEWLDQKLTKSDRPELTGAKVVVSGGRGLKSGENFKLLYDLADQLHAAVGASRAAVDAGFVPNDMQVGQTGKIVAPELYIAVGISGAIQHLAGMKDSKTIVAINKDPEAPIFQVADYGIVADLFKVVPEMTEILKKK

SEQ ID NO: 21284 - protein, 397 aa, Homo sapiens
  MOD_RES (387)..(387): Selenocysteine
MAGYEYVSPEQLAGFDKYKYSAVDTNPLSLYVMHPFWNTIVKVFPTWLAPNLITFSGFLLVVFNFLLMAYFDPDFYASAPGHKHVPDWVWIVVGILNFVAYTLDGVDGKQARRTNSSTPLGELFDHGLDSWSCVYFVVTVYSIFGRGSTGVSVFVLYLLLWVVLFSFILSHWEKYNTGILFLPWGYDISQVTISFVYIVTAVVGVEAWYEPFLFNFLYRDLFTAMIIGCALCVTLPMSLLNFFRSYKNNTLKLNSVYEAMVPLFSPCLLFILSTAWILWSPSDILELHPRVFYFMVGTAFANSTCQLIVCQMSSTRCPTLNWLLVPLFLVVLVVNLGVASYVESILLYTLTTAFTLAHIHYGVRVVKQLSSHFQIYPFSLRKPNSDXLGMEEKNIGL

SEQ ID NO: 21285 - protein, 794 aa, Homo sapiens
MASPTLSPDSSSQEALSAPTCSPTSDSENLSPDELELLAKLEEQNRLLEADSKSMRSMNGSRRNSGSSLVSSSSASSNLSHLEEDTWILWGRIANEWEEWRRRKEKLLKELIRKGIPHHFRAIVWQLLCSATDMPVKNQYSELLKMSSPCEKLIRRDIARTYPEHEFFKGQDSLGQEVLFNVMKAYSLVDREVGYCQGSAFIVGLLLMQMPEEEAFCVFVRLMQEYRLRELFKPSMAELGLCIYQFEYMLQEQLPDLNTHFRSQSFHTSMYASSWFLTLFLTTFPLPVATRVFDIFMYEGLEIVFRVGLALLQVNQAELMQLDMEGMSQYFQRVIPHQFDSCPDKLVLKAYQVKYNPKKMKRLEKEYAAMKSKEMEEQIEIKRLRTENRLLKQRIETLEKGQVTRAQEAEENYVIKRELAVVRQQCSSAAEDLQKAQSTIRQLQEQQENPRLTEDFVSHLETELEQSRLRETETLGALREMQDKVLDMEKRNSSLPDENNVAQLQEELKALKVREGQAVASTRELKLQLQELSDTWQAHLARGGRWKESPRKLVVGELQDELMSVRLREAQALAEGRELRQRVVELETQDHIHRNLLNRVEAERAALQEKLQYLAAQNKGLQTQLSESRRKQAEAECKSKEEVMAVRLREADSMAAVAEMRQRIAELEIQREEGRIQGQLNHSDSSQYIRELKDQIEELKAEVRLLKGPPPFEDPLAFDGLSLARHLDEDSLPSSDEELLGVGVGAALQDALYPLSPRDARFFRRLERPAKDSEGSSDSDADELAAPYSQGLDN

SEQ ID NO: 21286 - protein, 805 aa, Homo sapiens
MASPTLSPDSSSQEALSAPTCSPTSDSENLSPDELELLAKLEEQNRLLEADSKSMRSMNGSRRNSGSSLVSSSSASSNLSHLEEDTWILWGRIANEWEEWRRRKEKLLKELIRKGIPHHFRAIVWQLLCSATDMPVKNQYSELLKMSSPCEKLIRRDIARTYPEHEFFKGQDSLGQEVLFNVMKAYSLVDREVGYCQGSAFIVGLLLMQMPEEEAFCVFVRLMQEYRLRELFKPSMAELGLCIYQFEYMLQEQLPDLNTHFRSQSFHTSMYASSWFLTLFLTTFPLPVATRVFDIFMYEGLEIVFRVGLALLQVNQAELMQLDMEGMSQYFQRVIPHQFDSCPDKLVLKAYQVKYNPKKMKRLEKEYAAMKSKEMEEQIEIKRLRTENRLLKQRIETLEKESAALADRLIQGQVTRAQEAEENYVIKRELAVVRQQCSSAAEDLQKAQSTIRQLQEQQENPRLTEDFVSHLETELEQSRLRETETLGALREMQDKVLDMEKRNSSLPDENNVAQLQEELKALKVREGQAVASTRELKLQLQELSDTWQAHLARGGRWKESPRKLVVGELQDELMSVRLREAQALAEGRELRQRVVELETQDHIHRNLLNRVEAERAALQEKLQYLAAQNKGLQTQLSESRRKQAEAECKSKEEVMAVRLREADSMAAVAEMRQRIAELEIQREEGRIQGQLNHSDSSQYIRELKDQIEELKAEVRLLKGPPPFEDPLAFDGLSLARHLDEDSLPSSDEELLGVGVGAALQDALYPLSPRDARFFRRLERPAKDSEGSSDSDADELAAPYSQGLDN

SEQ ID NO: 21287 - protein, 475 aa, Homo sapiens
MEMASSAGSWLSGCLIPLVFLRLSVHVSGHAGDAGKFHVALLGGTAELLCPLSLWPGTVPKEVRWLRSPFPQRSQAVHIFRDGKDQDEDLMPEYKGRTVLVRDAQEGSVTLQILDVRLEDQGSYRCLIQVGNLSKEDTVILQVAAPSVGSLSPSAVALAVILPVLVLLIMVCLCLIWKQRRAKEKLLYEHVTEVDNLLSDHAKEKGKLHKAVKKLRSELKLKRAAANSGWRRARLHFVAVTLDPDTAHPKLILSEDQRCVRLGDRRQPVPDNPQRFDFVVSILGSEYFTTGCHYWEVYVGDKTKWILGVCSESVSRKGKVTASPANGHWLLRQSRGNEYEALTSPQTSFRLKEPPRCVGIFLDYEAGVISFYNVTNKSHIFTFTHNFSGPLRPFFEPCLHDGGKNTAPLVICSELHKSEESIVPRPEGKGHANGDVSLKVNSSLLPPKAPELKDIILSLPPDLGPALQELKAPSF

SEQ ID NO: 21288 - protein, 836 aa, Homo sapiens
MSKLSFRARALDASKPLPVFRCEDLPDLHEYASINRAVPQMPTGMEKEEESEHHLQRAISAQQVYGEKRDNMVIPVPEAESNIAYYESIYPGEFKMPKQLIHIQPFSLDAEQPDYDLDSEDEVFVNKLKKKMDICPLQFEEMIDRLEKGSGQQPVSLQEAKLLLKEDDELIREVYEYWIKKRKNCRGPSLIPSVKQEKRDGSSTNDPYVAFRRRTEKMQTRKNRKNDEASYEKMLKLRRDLSRAVTILEMIKRREKSKRELLHLTLEIMEKRYNLGDYNGEIMSEVMAQRQPMKPTYAIPIIPITNSSQFKHQEAMDVKEFKVNKQDKADLIRPKRKYEKKPKVLPSSAAATPQQTSPAALPVFNAKDLNQYDFPSSDEEPLSQVLSGSSEAEEDNDPDGPFAFRRKAGCQYYAPHLDQTGNWPWTSPKDGGLGDVRYRYCLTTLTVPQRCIGFARRRVGRGGRVLLDRAHSDYDSVFHHLDLEMLSSPQHSPVNQFANTSETNTSDKSFSKDLSQILVNIKSCRWRHFRPRTPSLHDSDNDELSCRKLYRSINRTGTAQPGTQTCSTSTQSKSSSGSAHFAFTAEQYQQHQQQLALMQKQQLAQIQQQQANSNSSTNTSQNLASNQQKSGFRLNIQGLERTLQGFVSKTLDSASAQFAASALVTSEQLMGFKMKDDVVLGIGVNGVLPASGVYKGLHLSSTTPTALVHTSPSTAGSALLQPSNITQTSSSHSALSHQVTAANSATTQVLIGNNIRLTVPSSVATVNSIAPINARHIPRTLSAVPSSALKLAAAANCQVSKVPSSSSVDSVPRENHESEKPALNNIADNTVAMEVT

SEQ ID NO: 21289 - protein, 813 aa, Homo sapiens
MSKLSFRARALDASKPLPVFRCEDLPDLHEYASINRAVPQMPTGMEKEEESEHHLQRAISAQQVYGEKRDNMVIPVPEAESNIAYYESIYPGEFKMPKQLIHIQPFSLDAEQPDYDLDSEDEVFVNKLKKKMDICPLQFEEMIDRLEKGSGQQPVSLQEAKLLLKEDDELIREVYEYWIKKRKNCRGPSLIPSVKQEKRDGSSTNDPYVAFRRRTEKMQTRKNRKNDEASYEKMLKLRRDLSRAVTILEMIKRREKSKRELLHLTLEIMEKRYNLGDYNGEIMSEVMAQRQPMKPTYAIPIIPITNSSQFKHQEAMDVKEFKVNKQDKADLIRPKRKYEKKPKVLPSSAAATPQQTSPAALPVFNAKDLNQYDFPSSDEEPLSQVLSGSSEAEEDNDPDGPFAFRRKAGCQYYAPHLDQTGNWPWTSPKDGGLGDVRYRYCLTTLTVPQRCIGFARRRVGRGGRVLLDRAHSDYDSVFHHLDLEMLSSPQHSPVNQFANTSETNTSDKSFSKDLSQILVNIKSCRWRHFRPRTPSLHDSDNDELSCRKLYRSINRTGTAQPGTQTCSTSTQSKSSSGSAHFAFTAEQYQQHQQQLALMQKQQLAQIQQQQANSNSSTNTSQGFVSKTLDSASAQFAASALVTSEQLMGFKMKDDVVLGIGVNGVLPASGVYKGLHLSSTTPTALVHTSPSTAGSALLQPSNITQTSSSHSALSHQVTAANSATTQVLIGNNIRLTVPSSVATVNSIAPINARHIPRTLSAVPSSALKLAAAANCQVSKVPSSSSVDSVPRENHESEKPALNNIADNTVAMEVT

SEQ ID NO: 21290 - protein, 763 aa, Homo sapiens
MEHHLQRAISAQQVYGEKRDNMVIPVPEAESNIAYYESIYPGEFKMPKQLIHIQPFSLDAEQPDYDLDSEDEVFVNKLKKKMDICPLQFEEMIDRLEKGSGQQPVSLQEAKLLLKEDDELIREVYEYWIKKRKNCRGPSLIPSVKQEKRDGSSTNDPYVAFRRRTEKMQTRKNRKNDEASYEKMLKLRRDLSRAVTILEMIKRREKSKRELLHLTLEIMEKRYNLGDYNGEIMSEVMAQRQPMKPTYAIPIIPITNSSQFKHQEAMDVKEFKVNKQDKADLIRPKRKYEKKPKVLPSSAAATPQQTSPAALPVFNAKDLNQYDFPSSDEEPLSQVLSGSSEAEEDNDPDGPFAFRRKAGCQYYAPHLDQTGNWPWTSPKDGGLGDVRYRYCLTTLTVPQRCIGFARRRVGRGGRVLLDRAHSDYDSVFHHLDLEMLSSPQHSPVNQFANTSETNTSDKSFSKDLSQILVNIKSCRWRHFRPRTPSLHDSDNDELSCRKLYRSINRTGTAQPGTQTCSTSTQSKSSSGSAHFAFTAEQYQQHQQQLALMQKQQLAQIQQQQANSNSSTNTSQGFVSKTLDSASAQFAASALVTSEQLMGFKMKDDVVLGIGVNGVLPASGVYKGLHLSSTTPTALVHTSPSTAGSALLQPSNITQTSSSHSALSHQVTAANSATTQVLIGNNIRLTVPSSVATVNSIAPINARHIPRTLSAVPSSALKLAAAANCQVSKVPSSSSVDSVPRENHESEKPALNNIADNTVAMEVT

SEQ ID NO: 21291 - protein, 235 aa, Homo sapiens
MEEETHTDAKIRAENGTGSSPRGPGCSLRHFACEQNLLSRPDGSASFLQGDTSVLAGVYGPAEVKVSKEIFNKATLEVILRPKIGLPGVAEKSRERLIRNTCEAVVLGTLHPRTSITVVLQVVSDAGSLLACCLNAACMALVDAGVPMRALFCGVACALDSDGTLVLDPTSKQEKEARAVLTFALDSVERKLLMSSTKGLYSDTELQQCLAAAQAASQHVFRFYRESLQRRYSKS

SEQ ID NO: 21292 - protein, 222 aa, Homo sapiens
MTLFSDSARLHPGEINSLVAHTKPVWWSLHTDAHEIWCRDSDRGTSLGRSIPCPPALCSVRKIHLRPQVLRPTSPRNISPISNPVSGLFLLCSPTSLTIPQPLSPFNLGATLQSLPSLNFNSFHSLVETKETCFIREPKTPAPVTDWEGSLPLVFNHCRDASLISRFRPRRDACLGPSPLAASPAFLGQGQVPLNPFSFTLSGKSRFSGAGASTPQPLLLHP

SEQ ID NO: 21293 - protein, 807 aa, Homo sapiens
MSKLSFRARALDAAKPLPIYRGKDMPDLNDCVSINRAVPQMPTGMEKEEESEHHLQRAISAQQVFREKKESMVIPVPEAESNVNYYNRLYKGEFKQPKQFIHIQPFNLDNEQPDYDMDSEDETLLNRLNRKMEIKPLQFEIMIDRLEKASSNQLVTLQEAKLLLNEDDYLIKAVYDYWVRKRKNCRGPSLIPQIKQEKRDGSTNNDPYVAFRRRTEKMQTRKNRKNDEASYEKMLKLRREFSRAITILEMIKRREKTKRELLHLTLEVVEKRYHLGDYGGEILNEVKISRSEKELYATPATLHNGNHHKVQECKTKHPHHLSLKEEASDVVRQKKKYPKKPKAEALITSQQPTPETLPVINKSDIKQYDFHSSDEDEFPQVLSPVSEPEEENDPDGPCAFRRRAGCQYYAPRLDQANHSCENSELADLDKLRYRHCLTTLTVPRRCIGFARRRIGRGGRVIMDRISTEHDPVLKQIDPEMLNSFSSSSQTIDFSSNFSRTNASSKHCENRLSLSEILSNIRSCRLQCFQPRLLNLQDSDSEECTSRKPGQTVNNKRVSAASVALLNTSKNGISVTGGITEEQFQTHQQQLVQMQRQQLAQLQQKQQSQHSSQQTHPKAQGSSTSDCMSKTLDSASAHFAASAVVSAPVPSRSEVAKEQNTGHNNINGVVQPSGTSKTLYSTNMALSSSPGISAVQLVRTVGHTTTNHLIPALCTSSPQTLPMNNSCLTNAVHLNNVSVVSPVNVHINTRTSAPSPTALKLATVAASMDRVPKVTPSSAISSIARENHEPERLGLNGIAETTVAMEVT

SEQ ID NO: 21294 - protein, 439 aa, Homo sapiens
MKETPLSNCERRFLLRAIEEKKRLDGRQTYDYRNIRISFGTDYGCCIVELGKTRVLGQVSCELVSPKLNRATEGILFFNLELSQMAAPAFEPGRQSDLLVKLNRLMERCLRNSKCIDTESLCVVAGEKVWQIRVDLHLLNHDGNIIDAASIAAIVALCHFRRPDVSVQGDEVTLYTPEERDPVPLSIHHMPICVSFAFFQQGTYLLVDPNEREERVMDGLLVIAMNKHREICTIQSSGGIMLLKDQVLRCSKIAGVKVAEITELILKALENDQKVRKEGGKFGFAESIANQRITAFKMEKAPIDTSDVEEKAEEIIAEAEPPSEVVSTPVLWTPGTAQIGEGVENSWGDLEDSEKEDDEGGGDQAIILDGIKMDTGVEVSDIGSQDAPIILSDSEEEEMIILEPDKNPKKIRTQTTSAKQEKAPSKKPVKRRKKKRAAN

SEQ ID NO: 21295 - protein, 456 aa, Homo sapiens
MKETPLSNCERRFLLRAIEEKKRLDGRQTYDYRNIRISFGTDYGCCIVELGKTRVLGQVSCELVSPKLNRATEGILFFNLELSQMAAPAFEPGRQSDLLVKLNRLMERCLRNSKCIDTESLCVVAGEKVWQIRVDLHLLNHDGNIIDAASIAAIVALCHFRRPDVSVQGDEVTLYTPEERDPVPLSIHHMPICVSFAFFQQGTYLLVDPNEREERVMDGLLVIAMNKHREICTIQSSGGIMLLKDQVLRCSKIAGVKVAEITELILKALENDQKVRKEGGKFGFAESIANQRITAFKMEKAPIDTSDVEEKAEEIIAEAEPPSEVVSTPVLWTPGTAQIGEGVENSWGDLEDSEKEDDEGGGDQAIILDGIKMDTGVEVSDIGSQELGFHHVGQTGLEFLTSDAPIILSDSEEEEMIILEPDKNPKKIRTQTTSAKQEKAPSKKPVKRRKKKRAAN

SEQ ID NO: 21296 - protein, 355 aa, Homo sapiens
MAAPAFEPGRQSDLLVKLNRLMERCLRNSKCIDTESLCVVAGEKVWQIRVDLHLLNHDGNIIDAASIAAIVALCHFRRPDVSVQGDEVTLYTPEERDPVPLSIHHMPICVSFAFFQQGTYLLVDPNEREERVMDGLLVIAMNKHREICTIQSSGGIMLLKDQVLRCSKIAGVKVAEITELILKALENDQKVRKEGGKFGFAESIANQRITAFKMEKAPIDTSDVEEKAEEIIAEAEPPSEVVSTPVLWTPGTAQIGEGVENSWGDLEDSEKEDDEGGGDQAIILDGIKMDTGVEVSDIGSQDAPIILSDSEEEEMIILEPDKNPKKIRTQTTSAKQEKAPSKKPVKRRKKKRAAN

SEQ ID NO: 21297 - protein, 372 aa, Homo sapiens
MAAPAFEPGRQSDLLVKLNRLMERCLRNSKCIDTESLCVVAGEKVWQIRVDLHLLNHDGNIIDAASIAAIVALCHFRRPDVSVQGDEVTLYTPEERDPVPLSIHHMPICVSFAFFQQGTYLLVDPNEREERVMDGLLVIAMNKHREICTIQSSGGIMLLKDQVLRCSKIAGVKVAEITELILKALENDQKVRKEGGKFGFAESIANQRITAFKMEKAPIDTSDVEEKAEEIIAEAEPPSEVVSTPVLWTPGTAQIGEGVENSWGDLEDSEKEDDEGGGDQAIILDGIKMDTGVEVSDIGSQELGFHHVGQTGLEFLTSDAPIILSDSEEEEMIILEPDKNPKKIRTQTTSAKQEKAPSKKPVKRRKKKRAAN

SEQ ID NO: 21298 - protein, 495 aa, Homo sapiens
MGLSRKEQVFLALLGASGVSGLTALILLLVEATSVLLPTDIKFGIVFDAGSSHTSLFLYQWLANKENGTGVVSQALACQVEGPGISSYTSNAAQAGESLQGCLEEALVLIPEAQHRKTPTFLGATAGMRLLSRKNSSQARDIFAAVTQVLGRSPVDFWGAELLAGQAEGAFGWITVNYGLGTLVKYSFTGEWIQPPEEMLVGALDMGGASTQITFVPGGPILDKSTQADFRLYGSDYSVYTHSYLCFGRDQMLSRLLVGLVQSRPAALLRHPCYLSGYQTTLALGPLYESPCVHATPPLSLPQNLTVEGTGNPGACVSAIRELFNFSSCQGQEDCAFDGVYQPPLRGQFYAFSNFYYTFHFLNLTSRQPLSTVNATIWEFCQRPWKLVEASYPGQDRWLRDYCASGLYILTLLHEGYGFSEETWPSLEFRKQAGGVDIGWTLGYMLNLTGMIPADAPAQWRAESYGVWVAKVVFMVLALVAVVGAALVQLFWLQD

SEQ ID NO: 21299 - protein, 458 aa, Homo sapiens
MGLSRKEQVFLALLGASGVSGLTALILLLVEATSVLLPTDIKFGIVFDAGSSHTSLFLYQWLANKENGTGVVSQALACQVEGPGISSYTSNAAQAGESLQGCLEEALVLIPEAQHRKTPTFLGATAGMRLLSRKNSSQARDIFAAVTQVLGRSPVDFWGAELLAGQAEGAFGWITVNYGLGTLVKYSFTGEWIQPPEEMLVGALDMGGASTQITFVPGGPILDKSTQADFRLYGSDYSVYTHSYLCFGRDQMLSRLLVGLVQSRPAALLRHPCYLSGYQTTLALGPLYESPCVHATPPLSLPQNLTVEGTGNPGACVSAIRELFNFSSCQGQEDCAFDGVYQPPLRGQFYVEASYPGQDRWLRDYCASGLYILTLLHEGYGFSEETWPSLEFRKQAGGVDIGWTLGYMLNLTGMIPADAPAQWRAESYGVWVAKVVFMVLALVAVVGAALVQLFWLQD

SEQ ID NO: 21300 - protein, 510 aa, Homo sapiens
MEDTKESNVKTFCSKNILAILGFSSIIAVIALLAVGLTQNKALPENVKYGIVLDAGSSHTSLYIYKWPAEKENDTGVVHQVEECRVKGPGISKFVQKVNEIGIYLTDCMERAREVIPRSQHQETPVYLGATAGMRLLRMESEELADRVLDVVERSLSNYPFDFQGARIITGQEEGAYGWITINYLLGKFSQKTRWFSIVPYETNNQETFGALDLGGASTQVTFVPQNQTIESPDNALQFRLYGKDYNVYTHSFLCYGKDQALWQKLAKDIQVASNEILRDPCFHPGYKKVVNVSDLYKTPCTKRFEMTLPFQQFEIQGIGNYQQCHQSILELFNTSYCPYSQCAFNGIFLPPLQGDFGAFSAFYFVMKFLNLTSEKVSQEKVTEMMKKFCAQPWEEIKTSYAGVKEKYLSEYCFSGTYILSLLLQGYHFTADSWEHIHFIGKIQGSDAGWTLGYMLNLTNMIPAEQPLSTPLSHSTYVFLMVLFSLVLFTVAIIGLLIFHKPSYFWKDMV

SEQ ID NO: 21301 - protein, 517 aa, Homo sapiens
MKGTKDLTSQQKESNVKTFCSKNILAILGFSSIIAVIALLAVGLTQNKALPENVKYGIVLDAGSSHTSLYIYKWPAEKENDTGVVHQVEECRVKGPGISKFVQKVNEIGIYLTDCMERAREVIPRSQHQETPVYLGATAGMRLLRMESEELADRVLDVVERSLSNYPFDFQGARIITGQEEGAYGWITINYLLGKFSQKTRWFSIVPYETNNQETFGALDLGGASTQVTFVPQNQTIESPDNALQFRLYGKDYNVYTHSFLCYGKDQALWQKLAKDIQVASNEILRDPCFHPGYKKVVNVSDLYKTPCTKRFEMTLPFQQFEIQGIGNYQQCHQSILELFNTSYCPYSQCAFNGIFLPPLQGDFGAFSAFYFVMKFLNLTSEKVSQEKVTEMMKKFCAQPWEEIKTSYAGVKEKYLSEYCFSGTYILSLLLQGYHFTADSWEHIHFIGKIQGSDAGWTLGYMLNLTNMIPAEQPLSTPLSHSTYVFLMVLFSLVLFTVAIIGLLIFHKPSYFWKDMV

SEQ ID NO: 21302 - protein, 306 aa, Homo sapiens
MKGTKDLTSQQKESNVKTFCSKNILAILGFSSIIAVIALLAVGLTQNKALPENVKYGIVLDAGSSHTSLYIYKWPAEKENDTGVVHQVEECRVKGPGISKFVQKVNEIGIYLTDCMERAREVIPRSQHQETPVYLGATAGMRLLRMESEELADRVLDVVERSLSNYPFDFQGARIITGQEEGAYGWITINYLLGKFSQKTRWFSIVPYETNNQETFGALDLGGASTQVTFVPQNQTIESPDNALQFRLYGKDYNVYTHSFLCYGKDQALWQKLAKDIQASITQSRPAPFTSAPPAPTSCCFLFQIQ

SEQ ID NO: 21303 - protein, 372 aa, Homo sapiens
MESEELADRVLDVVERSLSNYPFDFQGARIITGQEEGAYGWITINYLLGKFSQKTRWFSIVPYETNNQETFGALDLGGASTQVTFVPQNQTIESPDNALQFRLYGKDYNVYTHSFLCYGKDQALWQKLAKDIQVASNEILRDPCFHPGYKKVVNVSDLYKTPCTKRFEMTLPFQQFEIQGIGNYQQCHQSILELFNTSYCPYSQCAFNGIFLPPLQGDFGAFSAFYFVMKFLNLTSEKVSQEKVTEMMKKFCAQPWEEIKTSYAGVKEKYLSEYCFSGTYILSLLLQGYHFTADSWEHIHFIGKIQGSDAGWTLGYMLNLTNMIPAEQPLSTPLSHSTYVFLMVLFSLVLFTVAIIGLLIFHKPSYFWKDMV

SEQ ID NO: 21304 - protein, 402 aa, Homo sapiens
MERAREVIPRSQHQETPVYLGATAGMRLLRMESEELADRVLDVVERSLSNYPFDFQGARIITGQEEGAYGWITINYLLGKFSQKTRWFSIVPYETNNQETFGALDLGGASTQVTFVPQNQTIESPDNALQFRLYGKDYNVYTHSFLCYGKDQALWQKLAKDIQVASNEILRDPCFHPGYKKVVNVSDLYKTPCTKRFEMTLPFQQFEIQGIGNYQQCHQSILELFNTSYCPYSQCAFNGIFLPPLQGDFGAFSAFYFVMKFLNLTSEKVSQEKVTEMMKKFCAQPWEEIKTSYAGVKEKYLSEYCFSGTYILSLLLQGYHFTADSWEHIHFIGKIQGSDAGWTLGYMLNLTNMIPAEQPLSTPLSHSTYVFLMVLFSLVLFTVAIIGLLIFHKPSYFWKDMV

SEQ ID NO: 21305 - protein, 522 aa, Homo sapiens
MGREELFLTFSFSSGFQESNVKTFCSKNILAILGFSSIIAVIALLAVGLTQNKALPENVKYGIVLDAGSSHTSLYIYKWPAEKENDTGVVHQVEECRVKGPGISKFVQKVNEIGIYLTDCMERAREVIPRSQHQETPVYLGATAGMRLLRMESEELADRVLDVVERSLSNYPFDFQGARIITGQEEGAYGWITINYLLGKFSQKTRWFSIVPYETNNQETFGALDLGGASTQVTFVPQNQTIESPDNALQFRLYGKDYNVYTHSFLCYGKDQALWQKLAKDIQVASNEILRDPCFHPGYKKVVNVSDLYKTPCTKRFEMTLPFQQFEIQGIGNYQQCHQSILELFNTSYCPYSQCAFNGIFLPPLQGDFGAFSAFYFVMKFLNLTSEKVSQEKVTEMMKKFCAQPWEEIKTSYAGVKEKYLSEYCFSGTYILSLLLQGYHFTADSWEHIHFIGKIQGSDAGWTLGYMLNLTNMIPAEQPLSTPLSHSTYVFLMVLFSLVLFTVAIIGLLIFHKPSYFWKDMV

SEQ ID NO: 21306 - protein, 284 aa, Homo sapiens
MTDVPATFTQAECNGDKPPENGQQTITKISEELTDVDSPLPHYRVEPSLEGALTKGSQEERRKLQGNMLLNSSMEDKMLKENPEEKLFIVHKAITDLSLQETSADEMTFREGHQWEKIPLSGSNQEIRRQKERITEQPLKEEEDEDRKNKGHQAAEIEWLGFRKPSQADMLHSKHDEEQKVWDEEIDDDDDDNCNNDEDEVRVIEFKKKHEEVSQFKEEGDASEDSPLSSASSQAVTPDEQPTLGKKSDISRNAYSRYNTISYRKIRKGNTKQRIDEFESMMHL

SEQ ID NO: 21307 - protein, 297 aa, Homo sapiens
MKTLSPDRIQPHIMTDVPATFTQAECNGDKPPENGQQTITKISEELTDVDSPLPHYRVEPSLEGALTKGSQEERRKLQGNMLLNSSMEDKMLKENPEEKLFIVHKAITDLSLQETSADEMTFREGHQWEKIPLSGSNQEIRRQKERITEQPLKEEEDEDRKNKGHQAAEIEWLGFRKPSQADMLHSKHDEEQKVWDEEIDDDDDDNCNNDEDEVRVIEFKKKHEEVSQFKEEGDASEDSPLSSASSQAVTPDEQPTLGKKSDISRNAYSRYNTISYRKIRKGNTKQRIDEFESMMHL

SEQ ID NO: 21308 - protein, 723 aa, Homo sapiens
MSTATGPEAAPKPSAKSIYEQRKRYSTVVMADVSQYPVNHLVTFCLGEDDGVHTVEDASRKLAVMDSQGRVWAQEMLLRVSPDHVTLLDPASKEELESYPLGAIVRCDAVMPPGRSRSLLLLVCQEPERAQPDVHFFQGLRLGAELIREDIQGALHNYRSGRGERRAAALRATQEELQRDRSPAAETPPLQRRPSVRAVISTVERGAGRGRPQAKPIPEAEEAQRPEPVGTSSNADSASPDLGPRGPDLAVLQAEREVDILNHVFDDVESFVSRLQKSAEAARVLEHRERGRRSRRRAAGEGLLTLRAKPPSEAEYTDVLQKIKYAFSLLARLRGNIADPSSPELLHFLFGPLQMIVNTSGGPEFASSVRRPHLTSDAVALLRDNVTPRENELWTSLGDSWTRPGLELSPEEGPPYRPEFFSGWEPPVTDPQSRAWEDPVEKQLQHERRRRQQSAPQVAVNGHRDLEPESEPQLESETAGKWVLCNYDFQARNSSELSVKQRDVLEVLDDSRKWWKVRDPAGQEGYVPYNILTPYPGPRLHHSQSPARSLNSTPPPPPAPAPAPPPALARPRWDRPRWDSCDSLNGLDPSEKEKFSQMLIVNEELQARLAQGRSGPSRAVPGPRAPEPQLSPGSDASEVRAWLQAKGFSSGTVDALGVLTGAQLFSLQKEELRAVSPEEGARVYSQVTVQRSLLEDKEKVSELEAVMEKQKKKVEGEVEMEVI

SEQ ID NO: 21309 - protein, 596 aa, Homo sapiens
MNRTWPRRIWGSSQDEAELIREDIQGALHNYRSGRGERRAAALRATQEELQRDRSPAAETPPLQRRPSVRAVISTVERGAGRGRPQAKPIPEAEEAQRPEPVGTSSNADSASPDLGPRGPDLAVLQAEREVDILNHVFDDVESFVSRLQKSAEAARVLEHRERGRRSRRRAAGEGLLTLRAKPPSEAEYTDVLQKIKYAFSLLARLRGNIADPSSPELLHFLFGPLQMIVNTSGGPEFASSVRRPHLTSDAVALLRDNVTPRENELWTSLGDSWTRPGLELSPEEGPPYRPEFFSGWEPPVTDPQSRAWEDPVEKQLQHERRRRQQSAPQVAVNGHRDLEPESEPQLESETAGKWVLCNYDFQARNSSELSVKQRDVLEVLDDSRKWWKVRDPAGQEGYVPYNILTPYPGPRLHHSQSPARSLNSTPPPPPAPAPAPPPALARPRWDRPRWDSCDSLNGLDPSEKEKFSQMLIVNEELQARLAQGRSGPSRAVPGPRAPEPQLSPGSDASEVRAWLQAKGFSSGTVDALGVLTGAQLFSLQKEELRAVSPEEGARVYSQVTVQRSLLEDKEKVSELEAVMEKQKKKVEGEVEMEVI

SEQ ID NO: 21310 - protein, 551 aa, Homo sapiens
MGRKAIVLAIANTSLAFPLCQHLVTFCLGEDDGVHTVEDASRKLAVMDSQGRVWAQEMLLRVSPDHVTLLDPASKEELESYPLGAIVRCDAVMPPGRSRSLLLLVCQEPERAQPDVHFFQGLRLGAELIREDIQGALHNYRSGRGERRAAALRATQEELQRDRSPAAETPPLQRRPSVRAVISTVERGAGRGRPQAKPIPEAEEAQRPEPVGTSSNADSASPDLGPRGPDLAVLQAEREVDILNHVFDDVESFVSRLQKSAEAARVLEHRERGRRSRRRAAGEGLLTLRAKPPSEAEYTDVLQKIKYAFSLLARLRGNIADPSSPELLHFLFGPLQMIVNTSGGPEFASSVRRPHLTSDAVALLRDNVTPRENELWTSLGDSWTRPGLELSPEEGPPYRPEFFSGWEPPVTDPQSRAWEDPVEKQLQHERRRRQVTQATQQGRGWEVRGRGRSAWPRLTRLSYFLQQSAPQVAVNGHRDLEPESEPQLESETAGKWVLCNYDFQARNSSELSVKQRDVLEVLEDKEKVSELEAVMEKQKKKVEGEVEMEVI

SEQ ID NO: 21311 - protein, 502 aa, Homo sapiens
MSPLSPGSPLPPLARADLTAILTGCPPLSACLVLAPRPHRRARLLPSEGLLTLRAKPPSEAEYTDVLQKIKYAFSLLARLRGNIADPSSPELLHFLFGPLQMIVNTSGGPEFASSVRRPHLTSDAVALLRDNVTPRENELWTSLGDSWTRPGLELSPEEGPPYRPEFFSGWEPPVTDPQSRAWEDPVEKQLQHERRRRQVTQATQQGRGWEVRGRGRSAWPRLTRLSYFLQQSAPQVAVNGHRDLEPESEPQLESETAGKWVLCNYDFQARNSSELSVKQRDVLEVLDDSRKWWKVRDPAGQEGYVPYNILTPYPGPRLHHSQSPARSLNSTPPPPPAPAPAPPPALARPRWDRPRWDSCDSLNGLDPSEKEKFSQMLIVNEELQARLAQGRSGPSRAVPGPRAPEPQLSPGSDASEVRAWLQAKGFSSGTVDALGVLTGAQLFSLQKEELRAVSPEEGARVYSQVTVQRSLLEDKEKVSELEAVMEKQKKKVEGEVEMEVI

SEQ ID NO: 21312 - protein, 132 aa, Homo sapiens
MGAGVGVAGCTRGHRNWVPSQLPPREIKAGVSLAVVTEFAWVLAPRPKRATASALGTESPRFLDRPDFFDYPDSDQARLLAVAQFIGEKPIVFINSGSSPGLFHHILVGLLVVAFFFLLFQFCTHINFQKGA

SEQ ID NO: 21313 - protein, 110 aa, Homo sapiens
MRLWPWVLVWVWLAALGAIETAPRPKRATASALGTESPRFLDRPDFFDYPDSDQARLLAVAQFIGEKPIVFINSGSSPGLFHHILVGLLVVAFFFLLFQFCTHINFQKGA

SEQ ID NO: 21314 - protein, 363 aa, Homo sapiens
MQLGRSGRRSQKQKHEVDEVYFTLTRVDRSCPYLTVPGPPGAESGAPVRLGLRQRAVSSSRNPNSAGRTPNSYLTQAPVWRRSAPAQPPAPQTRHFPGRGADPALGSLPAAGLSGLCARTTGGTAQPPGARDSGASPGAQPQRHRPGCRGPPGSPVIRGPPRCREPGTAHGAQTPPPTRPNWPRRQPSRGSCALSSRQYGERPPAPPWTQPSVPRRGAATWGQEKAEYATPLGTQEARRASGGRGGVDHGDQGLSPCCGDGGARGRRRLPTFWPSGLLRLRLDSLGALPPEPSRAGRGRLFGLSVVLLKRNAGGEATPREGGPRRRWLRESCSPLPARHSRRRASWVSRWMEGAPPRMPSLPL

SEQ ID NO: 21315 - protein, 330 aa, Homo sapiens
MLPDWKSSLILMAYIIIFLTGLPANLLALRAFVGRIRQPQPAPVHILLLSLTLADLLLLLLLPFKIIEAASNFRWYLPKVVCALTSFGFYSSIYCSTWLLAGISIERYLGVAFPVQYKLSRRPLYGVIAALVAWVMSFGHCTIVIIVQYLNTTEQVRSGNEITCYENFTDNQLDVVLPVRLELCLVLFFIPMAVTIFCYWRFVWIMLSQPLVGAQRRRRAVGLAVVTLLNFLVCFGPYNVSHLVGYHQRKSPWWRSIAVVFSSLNASLDPLLFYFSSSVVRRAFGRGLQVLRNQGSSLLGRRGKDTAEGTNEDRGVGQGEGMPSSDFTTE

SEQ ID NO: 21316 - protein, 1419 aa, Homo sapiens
MEGTHCTLQLHKPITELCYISFCLPKGEVRGFSYKGTVTLDRSNKGFHNCYQVREESDIISLSQEPDEHPGDIFFKQTPTKDILTELYKLTTERERLLTNLLSSDHILGITMGNQEGKLQELSVSLAPEDDCFQSAGDWQGELPVGPLNKRSTHGNKKPRRSSGRRESFGALPQKRTKRKGRGGRESAPLMGKDKICSSHSLPLSRTRPNLWVLEEKGNLLPNGALACSLQRRESCPPDIPKTPDTDLGFGSFETAFKDTGLGREVLPPDCSSTEAGGDGIRRPPSGLEHQQTGLSESHQDPEKHPEAEKDEMEKPAKRTCKQKPVSKVVAKVQDLSSQVQRVVKTHSKGKETIAIRPAAHAEFVPKADLLTLPGAEAGAHGSRRQGKERQGDRSSQSPAGETASISSVSASAEGAVNKVPLKVIESEKLDEAPEGKRLGFPVHTSVPHTRPETRNKRRAGLPLGGHKSLFLDLPHKVGPDSSQPRGDKKKPSPPAPAALGKVFNNSASQSSTHKQTSPVPSPLSPRLPSPQQHHRILRLPALPGEREAALNDSPCRKSRVFSGCVSADTLEPPSSAKVTETKGASPAFLRAGQPRLVPGETLEKSLGPGKTTAEPQHQSPPGISSEGFPWDGFNEQTPKDLPNRDGGAWVLGYRAGPACPFLLHEEREKSNRSELYLDLHPDHSLTEQDDRTPGRLQAVWPPPKTKDTEEKVGLKYTEAEYQAAILHLKREHKEEIENLQAQFELRAFHIRGEHAMITARLEETIENLKHELEHRWRGGCEERKDVCISTDDDCPPKTFRNVCVQTDRETFLKPCESESKTTRSNQLVPKKLNISSLSQLSPPNDHKDIHAALQPMEGMASNQQKALPPPPASIPPPPPLPSGLGSLSPAPPMPPVSAGPPLPPPPPPPPPLPPPSSAGPPPPPPPPPLPNSPAPPNPGGPPPAPPPPGLAPPPPPGLFFGLGSSSSQCPRKPAIEPSCPMKPLYWTRIQISDRSQNATPTLWDSLEEPDIRDPSEFEYLFSKDTTQQKKKPLSETYEKKNKVKKIIKLLDGKRSQTVGILISSLHLEMKDIQQAIFNVDDSVVDLETLAALYENRAQEDELVKIRKYYETSKEEELKLLDKPEQFLHELAQIPNFAERAQCIIFRSVFSEGITSLHRKVEIITRASKDLLHVKSVKDILALILAFGNYMNGGNRTRGQADGYSLEILPKLKDVKSRDNGINLVDYVVKYYLRYYDQEAGTEKSVFPLPEPQDFFLASQVKFEDLIKDLRKLKRQLEASEKQMVVVCKESPKEYLQPFKDKLEEFFQKAKKEHKMEESHLENAQKSFETTVRYFGMKPKSGEKEITPSYVFMVWYEFCSDFKTIWKRESKNISKERLKMAQESVSKLTSEKKVETKKINPTASLKERLRQKEASVTTN

SEQ ID NO: 21317 - protein, 662 aa, Homo sapiens
MEGTHCTLQLHKPITELCYISFCLPKGEVRGFSYKGTVTLDRSNKGFHNCYQVREESDIISLSQEPDEHPGDIFFKQTPTKDILTELYKLTTERERLLTNLLSSDHILGITMGNQEGKLQELSVSLAPEDDCFQSAGDWQGELPVGPLNKRSTHGNKKPRRSSGRRESFGALPQKRTKRKGRGGRESAPLMGKDKICSSHSLPLSRTRPNLWVLEEKGNLLPNGALACSLQRRESCPPDIPKTPDTDLGFGSFETAFKDTGLGREVLPPDCSSTEAGGDGIRRPPSGLEHQQTGLSESHQDPEKHPEAEKDEMEKPAKRTCKQKPVSKVVAKVQDLSSQVQRVVKTHSKGKETIAIRPAAHAEFVPKADLLTLPGAEAGAHGSRRQGKERQGDRSSQSPAGETASISSVSASAEGAVNKVPLKVIESEKLDEAPEGKRLGFPVHTSVPHTRPETRNKRRAGLPLGGHKSLFLDLPHKVGPDSSQPRGDKKKPSPPAPAALGKVFNNSASQSSTHKQTSPVPSPLSPRLPSPQQHHRILRLPALPGEREAALNDSPCRKSRVFSGCVSADTLEPPSSAKVTETKGASPAFLRAGQPRLVPGETLEKSLGPGKTTAEPQHQSPPAFHWDLQQHFQEPVIRTVSISCASNLIKEEAGKGKESRSG

SEQ ID NO: 21318 - protein, 503 aa, Homo sapiens
MENVDNSLDGSDVSEPAKPEAGLEVAQSILSKFSMKSLFGFTSKLESVNPEEEDAVLKAFHSLDVNPTSQQDDSSNGLDPQEAGSRVSPDLGNDEKIASVETESEGSQRKEAGTSLLAQELLPLSTLKGTKDDVICVRGTLVHTTSDSDSDDGGQEPEEGSSTNGPKSPSGVLSEPSQESKENPGGFRENTVTGEMNGAELCAEDPQRIPPEMSSKLEAGNGGLQTERRPSQDQVGEEGSQDLPAVTNQNSSVGITESASSKKEVSGEKSFQLPAFFSGLRVLKKGATAEGGETITEIKPKDGDLALLKLTQPVQKSLVQAGLQTVKSEKKATDPKATPTLLEQLSLLLNIDMPKTEPKGADPESPRREEMGCNADQESQSGPGVPQTQGGEVKPKSPETALEAFKALFIRPPRKGTTADTSELEALKRKMRHEKESLRAVFERSNSKPADGPSDSKSPDHSLTEQDDRTPGRLQAVWPPPKTKDTEEKVGLKYTEAGNVKGS

SEQ ID NO: 21319 - protein, 1196 aa, Homo sapiens
MENVDNSLDGSDVSEPAKPEAGLEVAQSILSKFSMKSLFGFTSKLESVNPEEEDAVLKAFHSLDVNPTSQQDDSSNGLDPQEAGSRVSPDLGNDEKIASVETESEGSQRKEAGTSLLAQELLPLSTLKGTKDDVICVRGTLVHTTSDSDSDDGGQEPEEGSSTNGPKSPSGVLSEPSQESKENPGGFRENTVTGEMNGAELCAEDPQRIPPEMSSKLEAGNGGLQTERRPSQDQVGEEGSQDLPAVTNQNSSVGITESASSKKEVSGEKSFQLPAFFSGLRVLKKGATAEGGETITEIKPKDGDLALLKLTQPVQKSLVQAGLQTVKSEKKATDPKATPTLLEQLSLLLNIDMPKTEPKGADPESPRREEMGCNADQESQSGPGVPQTQGGEVKPKSPETALEAFKALFIRPPRKGTTADTSELEALKRKMRHEKESLRAVFERSNSKPADGPSDSKSPDHSLTEQDDRTPGRLQAVWPPPKTKDTEEKVGLKYTEAEYQAAILHLKREHKEEIENLQAQFELRAFHIRGEHAMITARLEETIENLKHELEHRWRGGCEERKDVCISTDDDCPPKTFRNVCVQTDRETFLKPCESESKTTRSNQLVPKKLNISSLSQLSPPNDHKDIHAALQPMEGMASNQQKALPPPPASIPPPPPLPSGLGSLSPAPPMPPVSAGPPLPPPPPPPPPLPPPSSAGPPPPPPPPPLPNSPAPPNPGGPPPAPPPPGLAPPPPPGLFFGLGSSSSQCPRKPAIEPSCPMKPLYWTRIQISDRSQNATPTLWDSLEEPDIRDPSEFEYLFSKDTTQQKKKPLSETYEKKNKVKKIIKLLDGKRSQTVGILISSLHLEMKDIQQAIFNVDDSVVDLETLAALYENRAQEDELVKIRKYYETSKEEELKLLDKPEQFLHELAQIPNFAERAQCIIFRSVFSEGITSLHRKVEIITRASKDLLHVKSVKDILALILAFGNYMNGGNRTRGQADGYSLEILPKLKDVKSRDNGINLVDYVVKYYLRYYDQEAGTEKSVFPLPEPQDFFLASQVKFEDLIKDLRKLKRQLEASEKQMVVVCKESPKEYLQPFKDKLEEFFQKAKKEHKMEESHLENAQKSFETTVRYFGMKPKSGEKEITPSYVFMVWYEFCSDFKTIWKRESKNISKERLKMAQESVSKLTSEKKVETKKINPTASLKERLRQKEASVTTN

SEQ ID NO: 21320 - protein, 961 aa, Homo sapiens
MHGHRAPGGAGPSEPEHPATNPPGAAPPACADSDPGASEPGLLARRGSGSALGGPLDPQFVGPSDTSLGAAPGHRVLPCGPSPQHHRALRFSYHLEGSQPRPGLHQGNRILVKSLSLDPGQSLEPHPEGPQRLRSDPGPPTETPSQRPSPLKRAPGPKPQVPPKPSYLQMPRMPPPLEPIPPPPSRPLPADPRVAKGLAPRAEASPSSAAVSSLIEKFEREPVIVASDRPVPGPSPGPPEPVMLPQPTSQPPVPQLPEGEASRCLFLLAPGPRDGEKVPNRDSGIDSISSPSNSEETCFVSDDGPPSHSLCPGPPALASVPVALADPHRPGSQEVDSDLEEEDDEEEEEEKDREIPVPLMERQESVELTVQQKVFHIANELLQTEKAYVSRLHLLDQVFCARLLEEARNRSSFPADVVHGIFSNICSIYCFHQQFLLPELEKRMEEWDRYPRIGDILQKLAPFLKMYGEYVKNFDRAVELVNTWTERSTQFKVIIHEVQKEEACGNLTLQHHMLEPVQRIPRYELLLKDYLLKLPHGSPDSKDAQKSLELIATAAEHSNAAIRKMERMHKLLKVYELLGGEEDIVSPTKELIKEGHILKLSAKNGTTQDRYLILFNDRLLYCVPRLRLLGQKFSVRARIDVDGMELKESSNLNLPRTFLVSGKQRSLELQARTEEEKKDWVQAINSTLLKHEQTLETFKLLNSTNREDEDTPPNSPNVDLGKRAPTPIREKEVTMCMRCQEPFNSITKRRHHCKACGHVVCGKCSEFRARLVYDNNRSNRVCTDCYVALHGVPGSSPACSQHTPQRRRSILEKQASVAAENSVICSFLHYMEKGGKGWHKAWFVVPENEPLVLYIYGAPQDVKAQRSLPLIGFEVGPPEAGERPDRRHVFKITQSHLSWYFSPETEELQRRWMAVLGRAGRGDTFCPGPTLSEDREMEEAPVAALGATAEPPESPQTRDKT

SEQ ID NO: 21321 - protein, 292 aa, Homo sapiens
MERGPVVGAGLGAGARIQALLGCLLKVLLWVASALLYFGSEQAARLLGSPCLRRLYHAWLAAVVIFGPLLQFHVNPRTIFASHGNFFNIKFVNSAWGWTCTFLGGFVLLVVFLATRRVAVTARHLSRLVVGAAVWRGAGRAFLLIEDLTGSCFEPLPQGLLLHELPDRRSCLAAGHQWRGYTVSSHTFLLTFCCLLMAEEAAVFAKYLAHGLPAGAPLRLVFLLNVLLLGLWNFLLLCTVIYFHQYTHKVVGAAVGTFAWYLTYGSWYHQPWSPGSPGHGLFPRPHSSRKHN

SEQ ID NO: 21322 - protein, 96 aa, Homo sapiens
MAEEAAVFAKYLAHGLPAGAPLRLVFLLNVLLLGLWNFLLLCTVIYFHQYTHKVVGAAVGTFAWYLTYGSWYHQPWSPGSPGHGLFPRPHSSRKHN

SEQ ID NO: 21323 - protein, 725 aa, Homo sapiens
MESGRGSSTPPGPIAALGMPDTGPGSSSLGKLQALPVGPRAHCGDPVSLAAAGDGSPDIGPTGELSGSLKIPNRDSGIDSPSSSVAGENFPCEEGLEAGPSPTVLGAHAEMALDSQVPKVTPQEEADSDVGEEPDSENTPQKADKDAGLAQHSGPQKLLHIAQELLHTEETYVKRLHLLDQVFCTRLTDAGIPPEVIMGIFSNISSIHRFHGQFLLPELKTRITEEWDTNPRLGDILQKLAPFLKMYGEYVKNFDRAVGLVSTWTQRSPLFKDVVHSIQKQEVCGNLTLQHHMLEPVQRVPRYELLLKDYLKRLPQDAPDRKDAERSLELISTAANHSNAAIRKVEKMHKLLEVYEQLGGEEDIVNPANELIKEGQIQKLSAKNGTPQDRHLFLFNSMILYCVPKLRLMGQKFSVREKMDISGLQVQDIVKPNTAHTFIITGRKRSLELQTRTEEEKKEWIQIIQATIEKHKQNSETFKAFGGAFSQDEDPSLSPDMPITSTSPVEPVVTTEGSSGAAGLEPRKLSSKTRRDKEKQSCKSCGETFNSITKRRHHCKLCGAVICGKCSEFKAENSRQSRVCRDCFLTQPVAPESTEKTPTADPQPSLLCGPLRLSESGETWSEVWAAIPMSDPQVLHLQGGSQDGRLPRTIPLPSCKLSVPDPEERLDSGHVWKLQWAKQSWYLSASSAELQQQWLETLSTAAHGDTAQDSPGALQLQVPMGAAAP

SEQ ID NO: 21324 - protein, 634 aa, Homo sapiens
MESGRGSSTPPGPIAALGMPDTGPGSSSLGKLQALPVGPRAHCGDPVSLAAAGDGSPDIGPTGELSGSLKIPNRDSGIDSPSSSVAGENFPCEEGLEAGPSPTVLGAHAEMALDSQVPKVTPQEEADSDVGEEPDSENTPQKADKDAGLAQHSGPQKLLHIAQELLHTEETYVKRLHLLDQVFCTRLTDAGIPPEVIMGIFSNISSIHRFHGQFLLPELKTRITEEWDTNPRLGDILQKLAPFLKMYGEYVKNFDRAVGLVSTWTQRSPLFKDVVHSIQKQEVCGNLTLQHHMLEPVQRVPRYELLLKDYLKRLPQDAPDRKDAERSLELISTAANHSNAAIRKVEKMHKLLEVYEQLGGEEDIVNPANELIKEGQIQKLSAKNGTPQDRHLFLFNSMILYCVPKLRLMGQKFSVREKMDISGLQVQDIVKPNTAHTFIITGRKRSLELQTRTEEEKKEWIQIIQATIEKHKQNSETFKAFGGAFSQDEDPSLSPDMPITSTSPVEPVVTTEGSSGAAGLEPRKLSSKTRRDKEKQSCKSCGETFNSITKRRHHCKLCGAVICGKCSEFKAENSRQSRVCRDCFLTQPVAPESTEVGAPSSCSPPGGAAEPPDTCSCAPAAPAASAFGVSLGPG

SEQ ID NO: 21325 - protein, 724 aa, Homo sapiens
MESGRGSSTPPGPIAALGMPDTGPGSSSLGKLQALPVGPRAHCGDPVSLAAAGDGSPDIGPTGELSGSLKIPNRDSGIDSPSSSVAGENFPCEEGLEAGPSPTVLGAHAEMALDSQVPKVTPQEEADSDVGEEPDSENTPQKADKDAGLAQHSGPQKLLHIAQELLHTEETYVKRLHLLDQVFCTRLTDAGIPPEVIMGIFSNISSIHRFHGQFLLPELKTRITEEWDTNPRLGDILQKLAPFLKMYGEYVKNFDRAVGLVSTWTQRSPLFKDVVHSIQKQEVCGNLTLQHHMLEPVQRVPRYELLLKDYLKRLPQDAPDRKDAERSLELISTAANHSNAAIRKVEKMHKLLEVYEQLGGEEDIVNPANELIKEGQIQKLSAKNGTPQDRHLFLFNSMILYCVPKLRLMGQKFSVREKMDISGLQVQDIVKPNTAHTFIITGRKRSLELQTRTEEEKKEWIQIIQATIEKHKQNSETFKAFGGAFSQDEDPSLSPDMPITSTSPVEPVVTTEGSSGAAGLEPRKLSSKTRRDKEKQSCKSCGETFNSITKRRHHCKLCGAVICGKCSEFKAENSRQSRVCRDCFLTQPVAPESTETPTADPQPSLLCGPLRLSESGETWSEVWAAIPMSDPQVLHLQGGSQDGRLPRTIPLPSCKLSVPDPEERLDSGHVWKLQWAKQSWYLSASSAELQQQWLETLSTAAHGDTAQDSPGALQLQVPMGAAAP

SEQ ID NO: 21326 - protein, 532 aa, Homo sapiens
MAKRVAIVGAGVSGLASIKCCLEEGLEPTCFERSDDLGGLWRFTEHVEEGRASLYKSVVSNSCKEMSCYSDFPFPEDYPNYVPNSQFLEYLKMYANHFDLLKHIQFKTKVCSVTKCSDSAVSGQWEVVTMHEEKQESAIFDAVMVCTGFLTNPYLPLDSFPGINAFKGQYFHSRQYKHPDIFKDKRVLVIGMGNSGTDIAVEASHLAEKVFLSTTGGGWVISRIFDSGYPWDMVFMTRFQNMLRNSLPTPIVTWLMERKINNWLNHANYGLIPEDRTQLKEFVLNDELPGRIITGKVFIRPSIKEVKENSVIFNNTSKEEPIDIIVFATGYTFAFPFLDESVVKVEDGQASLYKYIFPAHLQKPTLAIIGLIKPLGSMIPTGETQARWAVRVLKGVNKLPPPSVMIEEINARKENKPSWFGLCYCKALQSDYITYIDELLTYINAKPNLFSMLLTDPHLALTVFFGPCSPYQFRLTGPGKWEGARNAIMTQWDRTFKVIKARVVQESPSPFESFLKVFSFLALLVAIFLIFL

SEQ ID NO: 21327 - protein, 469 aa, Homo sapiens
MAKRVAIVGAGVSGLASIKCCLEEGLEPTCFERSDDLGGLWRFTTKVCSVTKCSDSAVSGQWEVVTMHEEKQESAIFDAVMVCTGFLTNPYLPLDSFPGINAFKGQYFHSRQYKHPDIFKDKRVLVIGMGNSGTDIAVEASHLAEKVFLSTTGGGWVISRIFDSGYPWDMVFMTRFQNMLRNSLPTPIVTWLMERKINNWLNHANYGLIPEDRTQLKEFVLNDELPGRIITGKVFIRPSIKEVKENSVIFNNTSKEEPIDIIVFATGYTFAFPFLDESVVKVEDGQASLYKYIFPAHLQKPTLAIIGLIKPLGSMIPTGETQARWAVRVLKGVNKLPPPSVMIEEINARKENKPSWFGLCYCKALQSDYITYIDELLTYINAKPNLFSMLLTDPHLALTVFFGPCSPYQFRLTGPGKWEGARNAIMTQWDRTFKVIKARVVQESPSPFESFLKVFSFLALLVAIFLIFL

SEQ ID NO: 21328 - protein, 1028 aa, Homo sapiens
MGNLESAEGVPGEPPSVPLLLPPGKMPMPEPCELEERFALVLSSMNLPPDKARLLRQYDNEKKWDLICDQERFQVKNPPHTYIQKLQSFLDPSVTRKKFRRRVQESTKVLRELEISLRTNHIGWVREFLNDENKGLDVLVDYLSFAQCSVMFDFEGLESGDDGAFDKLRSWSRSIEDLQPPSALSAPFTNSLARSARQSVLRYSTLPGRRALKNSRLVSQKDDVHVCILCLRAIMNYQYGFNLVMSHPHAVNEIALSLNNKNPRTKALVLELLAAVCLVRGGHEIILAAFDNFKEVCKELHRFEKLMEYFRNEDSNIDFMVACMQFINIVVHSVEDMNFRVHLQYEFTKLGLEEFLQKSRHTESEKLQVQIQAYLDNVFDVGGLLEDAETKNVALEKVEELEEHVSHLTEKLLDLENENMMRVAELEKQLLQREKELESIKETYENTSHQVHTLRRLIKEKEEAFQRRCHLEPNVRGLESVDSEALARVGPAELSEGMPPSDLDLLAPAPPPEEVLPLPPPPAPPLPPPPPPLPDKCPPAPPLPGAAPSVVLTVGLSAIRIKKPIKTKFRLPVFNWTALKPNQISGTVFSELDDEKILEDLDLDKFEELFKTKAQGPALDLICSKNKTAQKAASKVTLLEANRAKNLAITLRKAGRSAEEICRAIHTFDLQTLPVDFVECLMRFLPTEAEVKLLRQYERERQPLEELAAEDRFMLLFSKVERLTQRMAGMAFLGNFQDNLQMLTPQLNAIIAASASVKSSQKLKQMLEIILALGNYMNSSKRGAVYGFKLQSLDLLLDTKSTDRKMTLLHFIALTVKEKYPDLANFWHELHFVEKAAAVSLENVLLDVKELGRGMELIRRECSIHDNSVLRNFLSTNEGKLDKLQRDAKTAEEAYNAVVRYFGESPKTTPPSVFFPVFVRFIRSYKEAEQENEARKKQEEVMREKQLAQEAKKLDAKTPSQRNKWQQQELIAELRRRQAKEHRPVYEGKDGTIEDIITVLKSVPFTARTAKRGSRFFCDAAHHDESNC

SEQ ID NO: 21329 - protein, 976 aa, Homo sapiens
MGNLESAEGVPGEPPSVPLLLPPGKMPMPEPCELEERFALVLSSMNLPPDKARLLRQYDNEKKWDLICDQERFQVKNPPHTYIQKLQSFLDPSVTRKKFRRRVQESTKVLRELEISLRTNHIGWVREFLNDENKGLDVLVDYLSFAQCSVMYSTLPGRRALKNSRLVSQKDDVHVCILCLRAIMNYQYGFNLVMSHPHAVNEIALSLNNKNPRTKALVLELLAAVCLVRGGHEIILAAFDNFKEVCKELHRFEKLMEYFRNEDSNIDFMVACMQFINIVVHSVEDMNFRVHLQYEFTKLGLEEFLQKSRHTESEKLQVQIQAYLDNVFDVGGLLEDAETKNVALEKVEELEEHVSHLTEKLLDLENENMMRVAELEKQLLQREKELESIKETYENTSHQVHTLRRLIKEKEEAFQRRCHLEPNVRGLESVDSEALARVGPAELSEGMPPSDLDLLAPAPPPEEVLPLPPPPAPPLPPPPPPLPDKCPPAPPLPGAAPSVVLTVGLSAIRIKKPIKTKFRLPVFNWTALKPNQISGTVFSELDDEKILEDLDLDKFEELFKTKAQGPALDLICSKNKTAQKAASKVTLLEANRAKNLAITLRKAGRSAEEICRAIHTFDLQTLPVDFVECLMRFLPTEAEVKLLRQYERERQPLEELAAEDRFMLLFSKVERLTQRMAGMAFLGNFQDNLQMLTPQLNAIIAASASVKSSQKLKQMLEIILALGNYMNSSKRGAVYGFKLQSLDLLLDTKSTDRKMTLLHFIALTVKEKYPDLANFWHELHFVEKAAAVSLENVLLDVKELGRGMELIRRECSIHDNSVLRNFLSTNEGKLDKLQRDAKTAEEAYNAVVRYFGESPKTTPPSVFFPVFVRFIRSYKEAEQENEARKKQEEVMREKQLAQEAKKLDAKTPSQRNKWQQQELIAELRRRQAKEHRPVYEGKDGTIEDIITGLHCQPMVVRHQARSAAPPSGPPRAPGPH

SEQ ID NO: 21330 - protein, 1027 aa, Homo sapiens
MGNLESAEGVPGEPPSVPLLLPPGKMPMPEPCELEERFALVLSSMNLPPDKARLLRQYDNEKKWDLICDQERFQVKNPPHTYIQKLQSFLDPSVTRKKFRRRVQESTKVLRELEISLRTNHIGWVREFLNDENKGLDVLVDYLSFAQCSVMFDFEGLESGDDGAFDKLRSWSRSIEDLQPPSALSAPFTNSLARSARQSVLRYSTLPGRRALKNSRLVSQKDDVHVCILCLRAIMNYQYGFNLVMSHPHAVNEIALSLNNKNPRTKALVLELLAAVCLVRGGHEIILAAFDNFKEVCKELHRFEKLMEYFRNEDSNIDFMVACMQFINIVVHSVEDMNFRVHLQYEFTKLGLEEFLQKSRHTESEKLQVQIQAYLDNVFDVGGLLEDAETKNVALEKVEELEEHVSHLTEKLLDLENENMMRVAELEKQLLQREKELESIKETYENTSHQVHTLRRLIKEKEEAFQRRCHLEPNVRGLESVDSEALARVGPAELSEGMPPSDLDLLAPAPPPEEVLPLPPPPAPPLPPPPPPLPDKCPPAPPLPGAAPSVVLTVGLSAIRIKKPIKTKFRLPVFNWTALKPNQISGTVFSELDDEKILEDLDLDKFEELFKTKAQGPALDLICSKNKTAQKAASKVTLLEANRAKNLAITLRKAGRSAEEICRAIHTFDLQTLPVDFVECLMRFLPTEAEVKLLRQYERERQPLEELAAEDRFMLLFSKVERLTQRMAGMAFLGNFQDNLQMLTPQLNAIIAASASVKSSQKLKQMLEIILALGNYMNSSKRGAVYGFKLQSLDLLLDTKSTDRKMTLLHFIALTVKEKYPDLANFWHELHFVEKAAAVSLENVLLDVKELGRGMELIRRECSIHDNSVLRNFLSTNEGKLDKLQRDAKTAEEAYNAVVRYFGESPKTTPPSVFFPVFVRFIRSYKEAEQENEARKKQEEVMREKQLAQEAKKLDAKTPSQRNKWQQQELIAELRRRQAKEHRPVYEGKDGTIEDIITGLHCQPMVVRHQARSAAPPSGPPRAPGPH

SEQ ID NO: 21331 - protein, 243 aa, Homo sapiens
MAAAIASSLIRQKRQARESNSDRVSASKRRSSPSKDGRSLCERHVLGVFSKVRFCSGRKRPVRRRPEPQLKGIVTRLFSQQGYFLQMHPDGTIDGTKDENSDYTLFNLIPVGLRVVAIQGVKASLYVAMNGEGYLYSSDVFTPECKFKESVFENYYVIYSSTLYRQQESGRAWFLGLNKEGQIMKGNRVKKTKPSSHFVPKPIEVCMYREPSLHEIGEKQGRSRKSSGTPTMNGGKVVNQDST

SEQ ID NO: 21332 - protein, 181 aa, Homo sapiens
MESKEPQLKGIVTRLFSQQGYFLQMHPDGTIDGTKDENSDYTLFNLIPVGLRVVAIQGVKASLYVAMNGEGYLYSSDVFTPECKFKESVFENYYVIYSSTLYRQQESGRAWFLGLNKEGQIMKGNRVKKTKPSSHFVPKPIEVCMYREPSLHEIGEKQGRSRKSSGTPTMNGGKVVNQDST

SEQ ID NO: 21333 - protein, 539 aa, Homo sapiens
MSKRVGIIGAGVSGLAAIWCCLEEGLEPTCFERSDDVGGLWKFSDHTEEGRASIYQSVFTNSSKEMMCFPDFPYPDDYPNYIHHSKLQEYIKTYAQKKDLLRYIQFETLVSGIKKCPSFLVTGQWVVVTEKDGKQESTIFDAVMICSGHHVYPNLPTDSFPGLDQFRGNYLHSRDYKNPEAFKGKRVLVIGLGNSGSDIAVELSRLATQVIISTRSASWVMSRVWDDGYPWDMMYVTRFASFLRNVLPSFISDWLYVQKMNTWFKHENYGLMPLNGSLRKEPVFNDELPSRILCGTLSIKPSVKEFTETSAVFEDGTMFEAIDSVIFATGYDYSYPFLDETIMKSRNNEVTLFKGIFPPLMEKPTLAVIGLVQSLGAAIPTADLQAWWAAKVFANSCTLPTTNEMMDDTDEKMGKKLKCMFSSFFMFGQSQTLQTDYITYVDELGSFIGAKPNIPWLFLTDPRLALEVYFGPCSPYQFRLMGPGKWDGARNAILTQWNRTVKPTRTRVVSEVQRPHPFYNLLKMLSFPLLLLAVTLTFY

SEQ ID NO: 21334 - protein, 558 aa, Homo sapiens
MAKKVAVIGAGVSGLSSIKCCVDEDLEPTCFERSDDIGGLWKFTESSKDGMTRVYKSLVTNVCKEMSCYSDFPFHEDYPNFMNHEKFWDYLQEFAEHFDLLKYIQFKTTVCSITKRPDFSETGQWDVVTETEGKQNRAVFDAVMVCTGHFLNPHLPLEAFPGIHKFKGQILHSQEYKIPEGFQGKRVLVIGLGNTGGDIAVELSRTAAQVLLSTRTGTWVLGRSSDWGYPYNMMVTRRCCSFIAQVLPSRFLNWIQERKLNKRFNHEDYGLSITKGKKAKFIVNDELPNCILCGAITMKTSVIEFTETSAVFEDGTVEENIDVVIFTTGYTFSFPFFEEPLKSLCTKKIFLYKQVFPLNLERATLAIIGLIGLKGSILSGTELQARWVTRVFKGLCKIPPSQKLMMEATEKEQLIKRGVFKDTSKDKFDYIAYMDDIAACIGTKPSIPLLFLKDPRLAWEVFFGPCTPYQYRLMGPGKWDGARNAILTQWDRTLKPLKTRIVPDSSKPASMSHYLKAWGAPVLLASLLLICKSSLFLKLVRDKLQDRMSPYLVSLWRG

SEQ ID NO: 21335 - protein, 225 aa, Homo sapiens
MAALASSLIRQKREVREPGGSRPVSAQRRVCPRGTKSLCQKQLLILLSKVRLCGGRPARPDRGPEPQLKGIVTKLFCRQGFYLQANPDGSIQGTPEDTSSFTHFNLIPVGLRVVTIQSAKLGHYMAMNAEGLLYSSPHFTAECRFKECVFENYYVLYASALYRQRRSGRAWYLGLDKEGQVMKGNRVKKTKAAAHFLPKLLEVAMYQEPSLHSVPEASPSSPPAP

SEQ ID NO: 21336 - protein, 508 aa, Homo sapiens
MLLWSLLVIFDAVTEQADSLTLVAPSSVFEGDSIVLKCQGEQNWKIQKMAYHKDNKELSVFKKFSDFLIQSAVLSDSGNYFCSTKGQLFLWDKTSNIVKIKVQELFQRPVLTASSFQPIEGGPVSLKCETRLSPQRLDVQLQFCFFRENQVLGSGWSSSPELQISAVWSEDTGSYWCKAETVTHRIRKQSLQSQIHVQRIPISNVSLEIRAPGGQVTEGQKLILLCSVAGGTGNVTFSWYREATGTSMGKKTQRSLSAELEIPAVKESDAGKYYCRADNGHVPIQSKVVNIPVRIPVSRPVLTLRSPGAQAAVGDLLELHCEALRGSPPILYQFYHEDVTLGNSSAPSGGGASFNLSLTAEHSGNYSCEANNGLGAQCSEAVPVSISGPDGYRRDLMTAGVLWGLFGVLGFTGVALLLYALFHKISGESSATNEPRGASRPNPQEFTYSSPTPDMEELQPVYVNVGSVDVDVVYSQVWSMQQPESSANIRTLLENKDSQVIYSSVKKS

SEQ ID NO: 21337 - protein, 255 aa, Homo sapiens
MWEWKICNSHGARPFAEPAGWEFVNLLRHHKSFLIAPLCLSVPVSRPVLTLRSPGAQAAVGDLLELHCEALRGSPPILYQFYHEDVTLGNSSAPSGGGASFNLSLTAEHSGNYSCEANNGLGAQCSEAVPVSISGPDGYRRDLMTAGVLWGLFGVLGFTGVALLLYALFHKISGESSATNEPRGASRPNPQEFTYSSPTPDMEELQPVYVNVGSVDVDVVYSQVWSMQQPESSANIRTLLENKDSQVIYSSVKKS

SEQ ID NO: 21338 - protein, 192 aa, Homo sapiens
MWEWKICNSHGARPFAEPAGWEFVNLLRHHKSFLIAPLCLSVPVSRPVLTLRSPGAQAAVGDLLELHCEALRGSPPILYQFYHEDVTLGNSSAPSGGGASFNLSLTAEHSGNYSCEANNGLGAQCSEAVPVSISGPDGYRRDLMTAGVLWGLFGVLGFTGVALLLYALFHKISGCIYHLDSPYFAMTFPLLI

SEQ ID NO: 21339 - protein, 144 aa, Homo sapiens
MWEWKICNSHGARPFAEPAGWEFVNLLRHHKSFLIAPLCLSVPVSRPVLTLRSPGAQAAVGDLLELHCEALRGSPPILYQFYHEDVTLGNSSAPSGGGASFNLSLTAEHSGNYSCEANNGLGAQCSEAVPVSISGGWVLPGYRV

SEQ ID NO: 21340 - protein, 202 aa, Homo sapiens
MLLWSLLVIFDAVTEQADSLTLVAPSSVFEGDSIVLKCQGEQNWKIQKMAYHKDNKELSVFKKFSDFLIQSAVLSDSGNYFCSTKGQLFLWDKTSNIVKIKVQGPDGYRRDLMTAGVLWGLFGVLGFTGVALLLYALFHKISGESSATNEPRGASRPNPQEFTYSSPTPDMEELQPVYVNANIRTLLENKDSQVIYSSVKKS

SEQ ID NO: 21341 - protein, 211 aa, Homo sapiens
MAPLAEVGGFLGGLEGLGQQVGSHFLLPPAGERPPLLGERRSAAERSARGGPGAAQLAHLHGILRRRQLYCRTGFHLQILPDGSVQGTRQDHSLFGILEFISVAVGLVSIRGVDSGLYLGMNDKGELYGSEKLTSECIFREQFEENWYNTYSSNIYKHGDTGRRYFVALNKDGTPRDGARSKRHQKFTHFLPRPVDPERVPELYKDLLMYT

SEQ ID NO: 21342 - protein, 426 aa, Homo sapiens
MWPLTALLLLVPSSGQAATLEKPILSLHPPWTTIFKGERVTLKCDGYHPLLLELQPISTLWYLGHLLLPSHKKSIEVQTPGVYRCQTRGAPVSDPIHLSVSNDWLILQVPYAPVFEGEPLVLRCRGWYDKVVYKLHYYHDGQAVRYFHSSANYTVLQARASDSGRYQCSGTMRIPVESAPMFSAKVAVTVQELFRAPVLRVMGPREARGAALGGVVLRCDTRLHPQKRDTPLQFAFYKYSRAVRRFDWGAEYTVPEPEVEELESYWCEAATATRSVRKRSPWLQLPGPGSPLDPASTTAPAPWAAALAPGNRPLSFRKPPVSRSVPLVTSVRNTTSTGLQFPASGAPTAGPPACAPPTPLEQSAGALKPDVDLLLREMQLLKGLLSRVVLELKEPQALRELRGTPETPTSHFAVSPGTPETTPVES

SEQ ID NO: 21343 - protein, 275 aa, Homo sapiens
MWPLTALLLLVPSSGQAATLEKPILSLHPPWTTIFKGERVTLKCDGYHPLLLELQPISTLWYLGHLLLPSHKKSIEVQTPGVYRCQTRGAPVSDPIHLSVSNDWLILQVPYAPVFEGEPLVLRCRGWYDKVVYKLHYYHDGQAVRYFHSSANYTVLQARASDSGRYQCSGTMRIPVESAPMFSAKVAVTVQEARHAAAVRVLQVQPRGAPLRLGRRVHSPGARGRGARIVLVRGGYRHPQCPETQSVAAAPGAGFSPGPGLHHRPSSMGRSLGSW

SEQ ID NO: 21344 - protein, 268 aa, Homo sapiens
MWPLTALLLLATLEKPILSLHPPWTTIFKGERVTLKCDGYHPLLLELQPISTLWYLGHLLLPSHKKSIEVQTPGVYRCQTRGAPVSDPIHLSVSNDWLILQVPYAPVFEGEPLVLRCRGWYDKVVYKLHYYHDGQAVRYFHSSANYTVLQARASDSGRYQCSGTMRIPVESAPMFSAKVAVTVQEARHAAAVRVLQVQPRGAPLRLGRRVHSPGARGRGARIVLVRGGYRHPQCPETQSVAAAPGAGFSPGPGLHHRPSSMGRSLGSW

SEQ ID NO: 21345 - protein, 318 aa, Homo sapiens
MWPLTALLLLVPSSGQAATLEKPILSLHPPWTTIFKGERVTLKCDGYHPLLLELQPISTLWYLGHLLLPSHKKSIEVQTPGVYRCQTRGAPVSDPIHLSVSNDWLILQVPYAPVFEGEPLVLRCRGWYDKVVYKLHYYHDGQAVRYFHSSANYTVLQARASDSGRYQCSGTMRIPVESAPMFSAKVAVTVQAARCAASTGAPSTQSRSPRSRSSNRTGARRLPPPAVSGNAVRGCSSRGRVLPWTRPPPPPQLHGPQPWLLVIGRFPSESPRCPDRSRWSPPSGTPPPPGCSSRRAAPRLRGHPPALRRRPWNNRLEP

SEQ ID NO: 21346 - protein, 311 aa, Homo sapiens
MWPLTALLLLATLEKPILSLHPPWTTIFKGERVTLKCDGYHPLLLELQPISTLWYLGHLLLPSHKKSIEVQTPGVYRCQTRGAPVSDPIHLSVSNDWLILQVPYAPVFEGEPLVLRCRGWYDKVVYKLHYYHDGQAVRYFHSSANYTVLQARASDSGRYQCSGTMRIPVESAPMFSAKVAVTVQAARCAASTGAPSTQSRSPRSRSSNRTGARRLPPPAVSGNAVRGCSSRGRVLPWTRPPPPPQLHGPQPWLLVIGRFPSESPRCPDRSRWSPPSGTPPPPGCSSRRAAPRLRGHPPALRRRPWNNRLEP

SEQ ID NO: 21347 - protein, 464 aa, Homo sapiens
MEIRLPDLALKRIFSFLDLFGLLQVSQVNKHWNRIADSDYLWRSLSLQRWDCSNFTNQHLGTHTWKQFFLHQRRKELRLALAQPHNFIYKVTKNIAFETELAYLSGNRLTVDEQEKSIICSVSPKQELCAWDVQEGTMIWSSPVQEFHFSNLVTLPQMHLAITMDRKKTIKVWNCQDRDALAVLPMPQPCYCMEAYLTKDGPFLMVGDAAGDIYTFTLPGLRDVSKVTAFQYGIVLLHCSPDKKWVFACGTYSRTLPQVFLTESLLRPSEGSVPLSTFLPHKLCASACWTPKVKNRITLMSQSSTGKKTEFITFDLTTKKTGGQTVIQAYEIASFQVAAHLKCPIWMGASDGYMIVFTSGPYLLLFSITGFLLQRFEDHQAAINNFWVDPCYVLTTSENSVHVYMWEEGGRHPYLRSCCHLENTWHDHTTDSCISSVMCDNASIVLRVRKVSDSSILVMYSLNT

SEQ ID NO: 21348 - protein, 394 aa, Homo sapiens
MEIRLPDLALKRIFSFLDLFGLLQVSQVNKHWNRIADSDYLWRSLSLQRWDCSNFTNQHLGTHTWKQFFLHQRRKELRLALAQPHNFIYKVTKNIAFETELAYLSGNRLTVDEQEKSIICSVSPKQELCAWDVQEVGDAAGDIYTFTLPGLRDVSKVTAFQYGIVLLHCSPDKKWVFACGTYSRTLPQVFLTESLLRPSEGSVPLSTFLPHKLCASACWTPKVKNRITLMSQSSTGKKTEFITFDLTTKKTGGQTVIQAYEIASFQVAAHLKCPIWMGASDGYMIVFTSGPYLLLFSITGFLLQRFEDHQAAINNFWVDPCYVLTTSENSVHVYMWEEGGRHPYLRSCCHLENTWHDHTTDSCISSVMCDNASIVLRVRKVSDSSILVMYSLNT

SEQ ID NO: 21349 - protein, 445 aa, Homo sapiens
MSPTHQIQDPKHWNRIADSDYLWRSLSLQRWDCSNFTNQHLGTHTWKQFFLHQRRKELRLALAQPHNFIYKVTKNIAFETELAYLSGNRLTVDEQEKSIICSVSPKQELCAWDVQEGTMIWSSPVQEFHFSNLVTLPQMHLAITMDRKKTIKVWNCQDRDALAVLPMPQPCYCMEAYLTKDGPFLMVGDAAGDIYTFTLPGLRDVSKVTAFQYGIVLLHCSPDKKWVFACGTYSRTLPQVFLTESLLRPSEGSVPLSTFLPHKLCASACWTPKVKNRITLMSQSSTGKKTEFITFDLTTKKTGGQTVIQAYEIASFQVAAHLKCPIWMGASDGYMIVFTSGPYLLLFSITGFLLQRFEDHQAAINNFWVDPCYVLTTSENSVHVYMWEEGGRHPYLRSCCHLENTWHDHTTDSCISSVMCDNASIVLRVRKVSDSSILVMYSLNT

SEQ ID NO: 21350 - protein, 268 aa, Homo sapiens
MSLSFLLLLFFSHLILSAWAHGEKRLAPKGQPGPAATDRNPRGSSSRQSSSSAMSSSSASSSPAASLGSQGSGLEQSSFQWSPSGRRTGSLYCRVGIGFHLQIYPDGKVNGSHEANMLSVLEIFAVSQGIVGIRGVFSNKFLAMSKKGKLHASAKFTDDCKFRERFQENSYNTYASAIHRTEKTGREWYVALNKRGKAKRGCSPRVKPQHISTHFLPRFKQSEQPELSFTVTVPEKKKPPSPIKPKIPLSAPRKNTNSVKYRLKFRFG

SEQ ID NO: 21351 - protein, 123 aa, Homo sapiens
MSLSFLLLLFFSHLILSAWAHGEKRLAPKGQPGPAATDRNPRGSSSRQSSSSAMSSSSASSSPAASLGSQGSGLEQSSFQWSPSGRRTGSLYCRVGIGFHLQIYPDGKVNGSHEANMLSQVHR

SEQ ID NO: 21352 - protein, 201 aa, Homo sapiens
MTLRPSLLPLHLLLLLLLSAAVCRAEAGLETESPVRTLQVETLVEPPEPCAEPAAFGDTLHIHYTGSLVDGRIIDTSLTRDPLVIELGQKQVIPGLEQSLLDMCVGEKRRAIIPSHLAYGKRGFPPSVPADAVVQYDVELIALIRANYWLKLVKGILPLVGMAMVPALLGLIGYHLYRKANRPKVSKKKLKEEKRNKSKKK

SEQ ID NO: 21353 - protein, 146 aa, Homo sapiens
MTLRPSLLPLHLLLLLLLSAAVCRAEAGLETESPVRTLQVETLVEPPEPCAEPAAFGDTLHIHYTGSLVDGRIIDTSLTRDPLVIELGQKQVIPGLEQSLLDMCVGEKRRAIIPSHLAYGKRGFPPSVPGTKDNLMRPPGMTSSSQ

SEQ ID NO: 21354 - protein, 1052 aa, Homo sapiens
MENLESRLKNAPYFRCEKGTDSIPLCRKCETCVLAWKIFSTKEWFCRINDISQRRFLVGILKQLNSLYLLHYFQNILQTTQGKDFIYNRSRINLSKKEGKVVKSSLNQMLDKTVEQKMKEILYWFANSTQWTKANYTLLLLQMCNPKLLLTAANVIRVLFLREENNISGLNQDITDVCFSPEKDHSSKSATSQVYWTAKTQHTSLPLSKAPENEHLLGAASNPEEPWRNSLRCISEMNRLFSGKGDITKPGYDPCNLLVDLDDIRDLSSGFSKYRDFIRYLPIHLSKYILRMLDRHTLNKCASVSQHWAAMAQQVKMDLSAHGFIQNQITFLQGSYTRGIDPNYANKVSIPVPKMVDDGKSMRVKHPKWKLRTKNEYNLWTAYQNEETQQVLIEERNVFCGTYNVRILSDTWDQNRVIHYSGGDLIAVSSNRKIHLLDIIQVKAIPVEFRGHAGSVRALFLCEEENFLLSGSYDLSIRYWDLKSGVCTRIFGGHQGTITCMDLCKNRLVSGGRDCQVKVWDVDTGKCLKTFRHKDPILATRINDTYIVSSCERGLVKVWHIAMAQLVKTLSGHEGAVKCLFFDQWHLLSGSTDGLVMAWSMVGKYERCLMAFKHPKEVLDVSLLFLRVISACADGKIRIYNFLNGNCMKVLKANGRGDPVLSFFIQGNRMVVNTESNVLMFQFEHIKWQYAVEKTKQKKNKEKEEEKEENSLMEILSKCNIQVHSPRESVSSKQTVIQELLPGKPPKSRVLLKPAKFSSAVLIEELQSQGKSKSPRRDADDVEKAQKQGQLETPGKLPSHPKKKSWKIPMSPDQFLLTVSALQHAHNSGEFAYPCRPQTEITDVWGPSISYPRKVLNFKGKSIQRAVDRLRLSNPPIDVKRTSIPLEIQKLQPNLKISLHSPRVQSTIPQPMIIRSRFSGSLKGGDQVTSSIERAVCSTGPLTSMQVIKPNRMLAPQVGTATLSLKKERPRIYTALDPFRVNTEFVLLTVKEEKEHQEAKMKEYQARESTGVVDPGKVSKAAWIRKIKGLPIDNFTKQGKTAAPELGQNVFI

SEQ ID NO: 21355 - protein, 1061 aa, Homo sapiens
MENLESRLKNAPYFRCEKGTDSIPLCRKCETCVLAWKIFSTKEWFCRINDISQRRFLVGILKQLNSLYLLHYFQNILQTTQGKDFIYNRSRINLSKKEGKVVKSSLNQMLDKTVEQKMKEILYWFANSTQWTKANYTLLLLQMCNPKLLLTAANVIRVLFLREENNISGLNQDITDVCFSPEKDHSSKSATSQVYWTAKTQHTSLPLSKAPENEHLLGAASNPEEPWRNSLRCISEMNRLFSGKGDITKPGYDPCNLLVDLDDIRDLSSGFSKYRDFIRYLPIHLSKYILSMLGCMRGFPRHLPSWPSSGVSGSIFFFPGMLDRHTLNKCASVSQHWAAMAQQVKMDLSAHGFIQNQITFLQGSYTRGIDPNYANKVSIPVPKMVDDGKSMRVKHPKWKLRTKNEYNLWTAYQNEETQQVLIEERNVFCGTYNVRILSDTWDQNRVIHYSGGDLIAVSSNRKIHLLDIIQVKAIPVEFRGHAGSVRALFLCEEENFLLSGSYDLSIRYWDLKSGVCTRIFGGHQGTITCMDLCKNRLVSGGRDCQVKVWDVDTGKCLKTFRHKDPILATRINDTYIVSSCERGLVKVWHIAMAQLVKTLSGHEGAVKCLFFDQWHLLSGSTDGLVMAWSMVGKYERCLMAFKHPKEVLDVSLLFLRVISACADGKIRIYNFLNGNCMKVLKANGRGDPVLSFFIQGNRMVVNTESNVLMFQFEHIKWQYAVEKTKQKKNKEKEEEKEENSLMEILSKCNIQVHSPRESVSSKQTVIQELLPGKPPKSRVLLKPAKFSSDDVEKAQKQGQLETPGKLPSHPKKKSWKIPMSPDQFLLTVSALQHAHNSGEFAYPCRPQTEITDVWGPSISYPRKVLNFKGKSIQRAVDRLRLSNPPIDVKRTSIPLEIQKLQPNLKISLHSPRVQSTIPQPMIIRSRFSGSLKGGDQVTSSIERAVCSTGPLTSMQVIKPNRMLAPQVGTATLSLKKERPRIYTALDPFRVNTEFVLLTVKEEKEHQEAKMKEYQARESTGVVDPGKVSKAAWIRKIKGLPIDNFTKQGKTAAPELGQNVFI

SEQ ID NO: 21356 - protein, 999 aa, Homo sapiens
MENLESRLKNAPYFRCEKGTDSIPLCRKCETCVLAWKIFSTKEWFCRINDISQRRFLVGILKQLNSLYLLHYFQNILQTTQGKDFIYNRSRINLSKKEGKVVKSSLNQMLDKTVEQKMKEILYWFANSTQWTKANYTLLLLQMCNPKLLLTAANVIRVLFLREENNISGLNQDITDVCFSPEKDHSSKSATSQVYWTAKTQHTSLPLSKAPENEHLLGAASNPEEPWRNSLRCISEMNRLFSGKGDITKPGYDPCNLLVDLDDIRDLSSGFSKYRDFIRYLPIHLSKYILRMLDRHTLNKCASVSQHWAAMAQQVKMDLSAHGFIQNQITFLQGSYTRGIDPNYANKVSIPVPKMVDDGKSMRVKHPKWKLRTKNEYNLWTAYQNEETQQVLIEERNVFCGTYNVRILSDTWDQNRVIHYSGGDLIAVSSNRKIHLLDIIQVKAIPVEFRGHAGSVRALFLCEEENFLLSGSYDLSIRYWDLKSGVCTRIFGGHQGTITCMDLCKNRLVSGGRDCQVKVWDVDTGKCLKTFRHKDPILATRINDTYIVSSCERGLVKVWHIAMAQLVKTLSGHEGAVKCLFFDQWHLLSGSTDGLVMAWSMVGKYERCLMAFKHPKMVVNTESNVLMFQFEHIKWQYAVEKTKQKKNKEKEEEKEENSLMEILSKCNIQVHSPRESVSSKQTVIQELLPGKPPKSRVLLKPAKFSSAVLIEELQSQGKSKSPRRDADDVEKAQKQGQLETPGKLPSHPKKKSWKIPMSPDQFLLTVSALQHAHNSGEFAYPCRPQTEITDVWGPSISYPRKVLNFKGKSIQRAVDRLRLSNPPIDVKRTSIPLEIQKLQPNLKISLHSPRVQSTIPQPMIIRSRFSGSLKGGDQVTSSIERAVCSTGPLTSMQVIKPNRMLAPQVGTATLSLKKERPRIYTALDPFRVNTEFVLLTVKEEKEHQEAKMKEYQARESTGVVDPGKVSKAAWIRKIKGLPIDNFTKQGKTAAPELGQNVFI

SEQ ID NO: 21357 - protein, 1051 aa, Homo sapiens
MENLESRLKNAPYFRCEKGTDSIPLCRKCETCVLAWKIFSTKEWFCRINDISQRRFLVGILKQLNSLYLLHYFQNILQTTQGKDFIYNRSRINLSKKEGKVVKSSLNQMLDKTVEQKMKEILYWFANSTQWTKANYTLLLLQMCNPKLLLTAANVIRVLFLREENNISGLNQDITDVCFSPEKDHSSKSATSQVYWTAKTQHTSLPLSKAPENEHLLGAASNPEEPWRNSLRCISEMNRLFSGKGDITKPGYDPCNLLVDLDDIRDLSSGFSKYRDFIRYLPIHLSKYILRMLDRHTLNKCASVSQHWAAMAQQVKMDLSAHGFIQNQITFLQGSYTRGIDPNYANKVSIPVPKMVDDGKSMRVKHPKWKLRTKNEYNLWTAYQNEETQQVLIEERNVFCGTYNVRILSDTWDQNRVIHYSGGDLIAVSSNRKIHLLDIIQVKAIPVEFRGHAGSVRALFLCEEENFLLSGSYDLSIRYWDLKSGVCTRIFGGHQGTITCMDLCKNRLVSGGRDCQVKVWDVDTGKCLKTFRHKDPILATRINDTYIVSSCERGLVKVWHIAMAQLVKTLSGHEGAVKCLFFDQWHLLSGSTDGLVMAWSMVGKYERCLMAFKHPKEVLDVSLLFLRVISACADGKIRIYNFLNGNCMKVLKANGRGDPVLSFFIQGNRMVVNTESNVLMFQFEHIKWQYAVEKTKQKKNKEKEEEKEENSLMEILSKCNIQVHSPRESVSSKQTVIQELLPGKPPKSRVLLKPAKFSSAVLIEELQSQGKSKSPRRDDDVEKAQKQGQLETPGKLPSHPKKKSWKIPMSPDQFLLTVSALQHAHNSGEFAYPCRPQTEITDVWGPSISYPRKVLNFKGKSIQRAVDRLRLSNPPIDVKRTSIPLEIQKLQPNLKISLHSPRVQSTIPQPMIIRSRFSGSLKGGDQVTSSIERAVCSTGPLTSMQVIKPNRMLAPQVGTATLSLKKERPRIYTALDPFRVNTEFVLLTVKEEKEHQEAKMKEYQARESTGVVDPGKVSKAAWIRKIKGLPIDNFTKQGKTAAPELGQNVFI

SEQ ID NO: 21358 - protein, 368 aa, Homo sapiens
MAAAAEERMAEEGGGGQGDGGSSLASGSTQRQPPPPAPQHPQPGSQALPAPALAPDQLPQNNTLVALPIVAIENILSFMSYDEISQLRLVCKRMDLVCQRMLNQGFLKVERYHNLCQKQVKAQLPRRESERRNHSLARHADILAAVETRLSLLNMTFMKYVDSNLCCFIPGKVIDEIYRVLRYVNSTRAPQRAHEVLQELRDISSMAMEYFDEKIVPILKRKLPGSDVSGRLMGSPPVPGPSAALTTMQLFSKQNPSRQEVTKLQQQVKTNGAGVTVLRREISELRTKVQEQQKQLQDQDQKLLEQTQIIGEQNARLAELERKLREVMESAVGNSSGSGQNEESPRKRKKATEAIDSLRKSKRLRNRK

SEQ ID NO: 21359 - protein, 179 aa, Homo sapiens
MAAAAEERMAEEGGGGQGDGGSSLASGSTQRQPPPPAPQHPQPGSQALPAPALAPDQLPQNNTLVALPIVAIENILSFMSYDEISQLRLVCKRMDLVCQRMLNQGFLKVERYHNLCQKQVKAQLPRRESERRNHSLARHADILAAVETRLSLLNMTFMKYVDSNLCCFIPGKFQDRLQP

SEQ ID NO: 21360 - protein, 188 aa, Homo sapiens
MASWLPETLFETVGQGPPPSKDYYQLLVTRSQVIFRWWKISLRSEYRSTKPGEAKETHEDFLENSHLQGQTALIFGARILDYVINLCKGKFDFLERLSDDLLLTIISYLDLEDIARLCQTSHRFAKLCMSDKLWEQIVQSTCDTITPDVRALAEDTGWRQLFFTNKLQLQRQLRKRKQKYGNLREKQP

SEQ ID NO: 21361 - protein, 157 aa, Homo sapiens
MVIFRWWKISLRSEYRSTKPGEAKETHEDFLENSHLQGQTALIFGARILDYVINLCKGKFDFLERLSDDLLLTIISYLDLEDIARLCQTSHRFAKLCMSDKLWEQIVQSTCDTITPDVRALAEDTGWRQLFFTNKLQLQRQLRKRKQKYGNLREKQP

SEQ ID NO: 21362 - protein, 175 aa, Homo sapiens
MSQSVLAGGGIPEPHLGCPGTYRSIVRINGSALSPHPGLRGHEPALSPLPGLGGHWACSEPSPWTQEGSGPALSPHPGLWGQWACSEPSSWTRGQRACSEPSPWTCLLCSVHAMEEVVKEVVGHAKETGEKAIAEAIKKAQESGDKKMKEVTETVTNTVTNAITHAAESLGKLGQ

SEQ ID NO: 21363 - protein, 709 aa, Homo sapiens
MGKARRSPPGHHRHCEGCFNRHCHIPVEPNTSCLVISCHLLCGATFHMCKEAEHQLLCPLEQVPCLNSEYGCPLSMSRHKLAKHLQVCPASVVCCSMEWNRWPNVDSETTLHENIMKETPSEECLDTALALQDQKVLFRSLKMVELFPETREATEEEPTMNGETSVEEMGGAVGGVDIGLVPHGLSATNGEMAELSQEEREVLAKTKEGMDLVKFGQWENIFSKEHAASALTNSSASCESKNKNDSEKEQISSGHNMVEGEGAPKKKEPQENQKQQDVRTAMETTGLAPWQDGVLERLKTAVDAKDYNMYLVHNGRMLIHFGQMPACTPKERDFVYGKLEAQEVKTVYTFKVPVSYCGKRARLGDAMLSCKPSEHKAVDTSDLGITVEDLPKSDLIKTTLQCALERELKGHVISESRSIDGLFMDFATQTYNFEPEQFSSGTVLADLTAATPGGLHVELHSECVTRRHNKSSSAFTFTCNKFFRRDEFPLHFKNVHTDIQSCLNGWFQHRCPLAYLGCTFVQNHFRPPGQKAKVIYSQELKTFAIKPEVAPELSEGRKNNHLLGHGGKSQNSLTSLPLEILKYIAGFLDSVSLAQLSQVSVLMRNICATLLQERGMVLLQWKKKRYSHGGTSWRVHREIWQFSSLFSKIKSWEFNEVTSMSEHLKSCPFNIVEHKTDPILLTSMCQPREQARESLVSTFRIRPRGRYVS

SEQ ID NO: 21364 - protein, 442 aa, Homo sapiens
MDEESELIQPQDQSCWAFLPDLCLCRVFWWLGDRDRSRAALVCRKWNQMMYSAELWRYRTITFSGRPSRVHASEVESAVWYVKKFGRYLEHLEVKFMNPYNAVLTKKFQVTMRGLLSCLSKSNNRLKSLSIQYLELDRLVWRNSIRSSFISSLSFFLKKMGKRLDYLNLKGARLTVEQGCQILDSLSYMRNENVISELNIEDYFSHHLAVYNSPQFKKTMSTFHNLVSLNLNYNCISDELLENLCENASTLRTINIKCHVHDPHGQVIWGMSWAKLARQATNLKVNFFFERIMKYERLARILLQEIPIRSISLRSCYFSDPDCSMRPTLIDLLPTFRHTLQKLTCEFNNNHESLDEELHLLIISCRKLFYFKIWAFLDVSFVERILKSQKERQCALRVFKARIYTNRYETNEEDKTLQEIYRKYRKLIESELSYFVIVYSVM

SEQ ID NO: 21365 - protein, 89 aa, Homo sapiens
MLGGLGKLAAEGLAHRTEKATEGAIHAVEEVVKEVVGHAKETGEKAIAEAIKKAQESGDKKMKEITETVTNTVTNAITHAAESLDKLGQ

SEQ ID NO: 21366 - protein, 452 aa, Homo sapiens
MASRINTNFTLIPNQKLRRSNRQTSCYSKTLGSGFQPISTFGNFKALPLEIFQIILKYLSVKDISMLSMVSKTVSQHIINYISTSSGSKRLLLQDFHNLELPDRRQDSAILEHYRSLGLLFKRCTLLLPTKERLKYIHKILTEVSCFKFNGCAAPMQCLGLTCYGMFLQTLTAGWDELECHRVYNFLCELTNLCRKIQMAVCSKPGSAQKLELRIRLFCRNVLLDHWTHRSDSAFWLTRILKPWPMVNQARLLYIIFGPISPQDGQVVWQEMIEEPTDEFSLKGLADAIKLLYDASTKEWTADDVISLVDELSVVPREWLLENNARLLMLSGNNICFSFMASKAVNGRTIELARLVVFLALVCEKELYCMDWTVKMMQKVCKVFSTPVERKNFLQNVANAFACVIMEMLQSIMSGDRDEDDRSFLNLFHLVHAQANFHKEVLYLTMNTPLST

SEQ ID NO: 21367 - protein, 309 aa, Homo sapiens
MEQLLRAELRTATLRAFGGPGAGCISEGRAYDTDAGPVFVKVNRRTQARQMFEGEVASLEALRSTGLVRVPRPMKVIDLPGGGAAFVMEHLKMKSLSSQASKLGEQMADLHLYNQKLREKLKEEENTVGRRGEGAEPQYVDKFGFHTVTCCGFIPQVNEWQDDWPTFFARHRLQAQLDLIEKDYADREARELWSRLQVKIPDLFCGLEIVPALLHGDLWSGNVAEDDVGPIIYDPASFYGHSEFELAIALMFGGFPRSFFTAYHRKIPKAPGFDQRLLLYQLFNYLNHWNHFGREYRSPSLGTMRRLLK

SEQ ID NO: 21368 - protein, 603 aa, Homo sapiens
MDRGSLLPFQLWCPRPFGTYSQNQPRPPSAALKPSACPEPGGGAEPDHGPAHSENTPPALATEVPASQPAPLLSAAAAGDEGRVLLDTWYVIKPGNTKEKVAFFVAHQCGGGSRASSMKVKGHWGSDSSKAKRRRRCLDPTKAPPDPGGREGPPAAEEGPASAGEDVDLLSVAEMVALVEQRAALALQSYPRPTTPAPVVFVSAEQGGPAKGVGSERRSGGGDCSRVAEAVAHFEAQRDSPPTKGLRKEERPGPGPGEVRIAFRISNGREPRAPDSGLPSGGGGRPGCAYPGSPGPGARAKDKITCDLYQLISPSRDALPSNVEFLLARADEASEGDSPAPARPEDTPPAPPPPPARDCGASGFHVDVVVTGVVDECIFFGKDGTKNVKEETVCLTVSPEEPPPPGQLFFLQNRGPDGPPEPPPADSPATAPGPDDAEGTADTSLCRLYRHVSHDFLEIRFKIQRLLEPRQYMLLLPEHVLVKIFSFLPTRALAALKCTCHHFKGIIEAFGVRATDSRWSRDPLYRDDPCKQCRKRYEKGDVSLCRWHPKPYHHDLPYGRSYWMCCRRADRETPGCRLGLHDNNWVLPCNGPGGGRAGREEGR

SEQ ID NO: 21369 - protein, 319 aa, Homo sapiens
MGQGLWRVVRNQQLQQEGYSEQGYLTREQSRRMAASNISNTNHRKQVQGGIDIYHLLKARKSKEQEGFINLEMLPPELSFTILSYLNATDLCLASCVWQDLANDELLWQGLCKSTWGHCSIYNKNPPLGFSFRKLYMQLDEGSLTFNANPDEGVNYFMSKGILDDSPKEIAKFIFCTRTLNWKKLRIYLDERRDVLDDLVTLHNFRNQFLPNALREFFRHIHAPEERGEYLETLITKFSHRFCACNPDLMRELGLSPDAVYVLCYSLILLSIDLTSPHVKNKMSKREFIRNTRRAAQNISEDFVGHLYDNIYLIGHVAA

SEQ ID NO: 21370 - protein, 278 aa, Homo sapiens
MGQGLWRVVRNQQLQQEGYSEQGYLTREQSRRMAASNISNTNHRKQVQGGIDIYHLLKDLANDELLWQGLCKSTWGHCSIYNKNPPLGFSFRKLYMQLDEGSLTFNANPDEGVNYFMSKGILDDSPKEIAKFIFCTRTLNWKKLRIYLDERRDVLDDLVTLHNFRNQFLPNALREFFRHIHAPEERGEYLETLITKFSHRFCACNPDLMRELGLSPDAVYVLCYSLILLSIDLTSPHVKNKMSKREFIRNTRRAAQNISEDFVGHLYDNIYLIGHVAA

SEQ ID NO: 21371 - protein, 529 aa, Homo sapiens
MGCVFCKKLEPVATAKEDAGLEGDFRSYGAADHYGPDPTKARPASSFAHIPNYSNFSSQAINPGFLDSGTIRGVSGIGVTLFIALYDYEARTEDDLTFTKGEKFHILNNTEGDWWEARSLSSGKTGCIPSNYVAPVDSIQAEEWYFGKIGRKDAERQLLSPGNPQGAFLIRESETTKGAYSLSIRDWDQTRGDHVKHYKIRKLDMGGYYITTRVQFNSVQELVQHYMEVNDGLCNLLIAPCTIMKPQTLGLAKDAWEISRSSITLERRLGTGCFGDVWLGTWNGSTKVAVKTLKPGTMSPKAFLEEAQVMKLLRHDKLVQLYAVVSEEPIYIVTEFMCHGSLLDFLKNPEGQDLRLPQLVDMAAQVAEGMAYMERMNYIHRDLRAANILVGERLACKIADFGLARLIKDDEYNPCQGSKFPIKWTAPEAALFGRFTIKSDVWSFGILLTELITKGRIPYPGMNKREVLEQVEQGYHMPCPPGCPASLYEAMEQTWRLDPEERPTFEYLQSFLEDYFTSAEPQYQPGDQT

SEQ ID NO: 21372 - protein, 907 aa, Homo sapiens
MPTAAAPIISSVQKLVLYETRARYFLVGSNNAETKYRVLKIDRTEPKDLVIIDDRHVYTQQEVRELLGRLDLGNRTKMGQKGSSGLFRAVSAFGVVGFVRFLEGYYIVLITKRRKMADIGGHAIYKVEDTNMIYIPNDSVRVTHPDEARYLRIFQNVDLSSNFYFSYSYDLSHSLQYNLTVLRMPLEMLKSEMTQNRQESFDIFEDEGLITQGGSGVFGICSEPYMKYVWNGELLDIIKSTVHRDWLLYIIHGFCGQSKLLIYGRPVYVTLIARRSSKFAGTRFLKRGANCEGDVANEVETEQILCDASVMSFTAGSYSSYVQVRGSVPLYWSQDISTMMPKPPITLDQADPFAHVAALHFDQMFQRFGSPIIILNLVKEREKRKHERILSEELVAAVTYLNQFLPPEHTIVYIPWDMAKYTKSKLCNVLDRLNVIAESVVKKTGFFVNRPDSYCSILRPDEKWNELGGCVIPTGRLQTGILRTNCVDCLDRTNTAQFMVGKCALAYQLYSLGLIDKPNLQFDTDAVRLFEELYEDHGDTLSLQYGGSQLVHRVKTYRKIAPWTQHSKDIMQTLSRYYSNAFSDADRQDSINLFLGVFHPTEGKPHLWELPTDFYLHHKNTMRLLPTRRSYTYWWTPEVIKHLPLPYDEVICAVNLKKLIVKKFHKYEEEIDIHNEFFRPYELSSFDDTFCLAMTSSARDFMPKTVGIDPSPFTVRKPDETGKSVLGNKSNREEAVLQRKTAASAPPPPSEEAVSSSSEDDSGTDREEEGSVSQRSTPVKMTDAGDSAKVTENVVQPMKELYGINLSDGLSEEDFSIYSRFVQLGQSQHKQDKNSQQPCSRCSDGVIKLTPISAFSQDNIYEVQPPRVDRKSTEIFQAHIQASQGIMQPLGKEDSSMYREYIRNRYL

SEQ ID NO: 21373 - protein, 412 aa, Homo sapiens
MAAAAGEEEEEEEAARESAARPAAGPALWRLPEELLLLICSYLDMRALGRLAQVCRWLRRFTSCDLLWRRIARASLNSGFTRLGTDLMTSVPVKERVKVSQNWRLGRCREGILLKWRCSQMPWMQLEDDSLYISQANFILAYQFRPDGASLNRRPLGVFAGHDEDVCHFVLANSHIVSAGGDGKIGIHKIHSTFTVKYSAHEQEVNCVDCKGGIIVSGSRDRTAKVWPLASGRLGQCLHTIQTEDRVWSIAISPLLSSFVTGTACCGHFSPLRIWDLNSGQLMTHLGSDFPPGAGVLDVMYESPFTLLSCGYDTYVRYWDLRTSVRKCVMEWEEPHDSTLYCLQTDGNHLLATGSSYYGVVRLWDRRQRACLHAFPLTSTPLSSPVYCLRLTTKHLYAALSYNLHVLDFQNP

SEQ ID NO: 21374 - protein, 225 aa, Homo sapiens
MVTRDRAENRDGPKMLKPLVEKRRRDRINRSLEELRLLLLERTRDQNLRNPKLEKAEILEFAVGYLRERSRVEPPGVPRSPVQDAEALASCYLSGFRECLLRLAAFAHDASPAARAQLFSALHGYLRPKPPRPKPVDPRPPAPRPSLDPAAPALGPALHQRPPVHQGHPSPRCAWSPSLCSPRAGDSGAPAPLTGLLPPPPPPHRQDGAPKAPLPPPPAFWRPWP

SEQ ID NO: 21375 - protein, 230 aa, Homo sapiens
MVTRDRAENRDGPKMLKPLVEKRRRDRINRSLEELRLLLLERTRDQNLRNPKLEKAEILEFAVGYLRERSRVEPPAAAAPGVPRSPVQDAEALASCYLSGFRECLLRLAAFAHDASPAARAQLFSALHGYLRPKPPRPKPVDPRPPAPRPSLDPAAPALGPALHQRPPVHQGHPSPRCAWSPSLCSPRAGDSGAPAPLTGLLPPPPPPHRQDGAPKAPLPPPPAFWRPWP

SEQ ID NO: 21376 - protein, 1412 aa, Homo sapiens
MKAYLKSAEGFFVLNKSTTIGRHENSDLVLQSPDIDNHHALIEYNEAECSFVLQDFNSRNGTFVNECHIQNVAVKLIPGDILRFGSAGLTYELVIENPPPVSFPWMRGPAPWPGPQPPRATQQPNQAPPPSHIPFHQGVQPAPMQRSWSQAFPRPTVVLPASHRRPVSANKEMFSFVVDDARKPPVIKQVWTNAMKLSEKSVAEGIPGAVPPAEIYVEEDLAQQDKDEIILLLGKEVSRLSDYEIESKYKDVIIANLQNEVAELSQKVSETTTSRQNEKEISQKCQVLDEDIDAKQKEIQSLKSQISALQKGYSKVLCQTLSERNSEITSLKNEGENLKRDNAITSGMVSSLQKDILAKDEQVQQLKEEVSHLKSQNKDKDHQLEALGSRCSVLKEELKQEDAHRELREAQEKELKLCKTQIQDMEKEMKKLRAELRKSCTEQSVISRTLREKSKVEEKLQEDSRRKLLQLQEMGNRESVIKINLERAVGQLEHFRSQVIKATYGRAKPFRDKPVTDQQLIEKITQVTEDNINFQQKKWTLQKETQLSNSKQEETTENIEKLRTSLDSCQACMKISCCSHDLKKEVDLLQHLQVSPPVSGLQKVVLDVLRHALSWLEEVEQLLRDLGILPSSPNKDQVQQFSGNSAVFTAGKAAGASGREGEAERGEARARGEAQSQNQATDGREGGKALEEYITQERNRAKETLEEERKRMQELESLLAQQKKALAKSITQEKNRVKEALEEEQTRVQELEERLARQKEVLESSIAHEKRKAKEALESEKRKVQDLENHLTQQKEISESNIAYEKRKAKEAMEKEKKKVQDLENRLTKQKEELELKEQKEDVLNNKLSDALAMVEETQKTKATESLKAESLALKLNETLAELETTKTKMIMVEERLILQQKMVKALQDEQESQRHGFEEEIMEYKEQIKQHAQTIVSLEEKLQKVTQHHKKIEGEIATLKDNDPAPKEERPQDPLVAPMTESSAKDMAYEHLIDDLLAAQKEILSQQEVIMKLRKDLTEAHSRMSDLRGELNEKQKMELEQNVVLVQQQSKELSVLKEKMAQMSSLVEKKDRELKALEEALRASQEKHRLQLNTEKEQKPRKKTQTCDTSVQIEPVHTEAFSSSQEQQSFSDLGVRCKGSRHEEVIQRQKKALSELRARIKELEKARSPDHKDHQNESFLDLKNLRMENNVQKILLDAKPDLPTLSRIEILAPQNGLCNARFGSAMEKSGKMDVAEALELSEKLYLDMSKTLGSLMNIKNMSGHVSMKYLSRQEREKVNQLRQRDLDLVFDKITQLKNQLGRKEELLRGYEKDVEQLRRSKVSIEMYQSQVAKLEDDIYKEAEEKALLKEALERMEHQLCQEKRINRAIRQQKVGTRKASLKMDQEREMLRKETSSKSSQSLLHSKPSGKY

SEQ ID NO: 21377 - protein, 1453 aa, Homo sapiens
MKAYLKSAEGFFVLNKSTTIGRHENSDLVLQSPDIDNHHALIEYNEAECSFVLQDFNSRNGTFVNECHIQNVAVKLIPGDILRFGSAGLTYELVIENPPPVSFPWMRGPAPWPGPQPPRATQQPNQAPPPSHIPFHQGVQPAPMQRSWSQAFPRPTVVLPASHRRPVSANKEMFSFVVDDARKPPVIKQVWTNAMKLSEKSVAEGIPGAVPPAEIYVEEDLAQQDKDEIILLLGKEVSRLSDYEIESKYKDVIIANLQNEVAELSQKVSETTTSRQNEKEISQKCQVLDEDIDAKQKEIQSLKSQISALQKGYSKVLCQTLSERNSEITSLKNEGENLKRDNAITSGMVSSLQKDILAKDEQVQQLKEEVSHLKSQNKDKDHQLEALGSRCSVLKEELKQEDAHRELREAQEKELKLCKTQIQDMEKEMKKLRAELRKSCTEQSVISRTLREKSKVEEKLQEDSRRKLLQLQEMGNRESVIKINLERAVGQLEHFRSQVIKATYGRAKPFRDKPVTDQQLIEKITQVTEDNINFQQKKWTLQKETQLSNSKQEETTENIEKLRTSLDSCQACMKISCCSHDLKKEVDLLQHLQVSPPVSGLQKVVLDVLRHALSWLEEVEQLLRDLGILPSSPNKDQVQQFSGNSAVFTAGKAAGASGREGEAERGEARARGEAQSQNQATDGREGGKALEEYITQERNRAKETLEEERKRMQELESLLAQQKKALAKSITQEKNRVKEALEEEQTRVQELEERLARQKEVLESSIAHEKRKAKEALESEKRKVQDLENHLTQQKEISESNIAYEKRKAKEAMEKEKKKVQDLENRLTKQKEELELKEQKEDVLNNKLSDALAMVEETQKTKATESLKAESLALKLNETLAELETTKTKMIMVEERLILQQKMVKALQDEQESQRHGFEEEIMEYKEQIKQHAQTIVSLEEKLQKVTQHHKKIEGEIATLKDNDPAPKEERPQDPLVAPMTESSAKDMAYEHLIDDLLAAQKEILSQQEVIMKLRKDLTEAHSRMSDLRGELNEKQKMELEQNVVLVQQQSKELSVLKEKMAQMSSLVEKKDRELKALEEALRASQEKHRLQLNTEKEQKPRKKTQTCDTSVQIEPVHTEAFSSSQEQQSFSDLGVRCKGSRHEEVIQRQKKALSELRARIKELEKARSPDHKDHQNESFLDLKNLRMENNVQKILLDAKPDLPTLSRIEILAPQNGLCNARFGSAMEKSGKMDVAEALELSEKLYLDMSKTLGSLMNIKNMSGHVSMKYLSRQEREKVNQLRQRDLDLVFDKITQLKNQLGRKEELLRGYEKDVEQLRRSKVSIEMYQSQVAKLEDDIYKEAEEKALLKEALERMEHQLCQEKRINRAIRQQKMRKLRLRELRGAQVHTAAGKDSWDLTPDPSDPGSPAVCRVGRKCRGARTEKRKRIDTLQLCLQRERQAGPAPPACSLNG

SEQ ID NO: 21378 - protein, 1376 aa, Homo sapiens
MKAYLKSAEGFFVLNKSTTIGRHENSDLVLQSPDIDNHHALIEYNEAECSFVLQDFNSRNGTFVNECHIQNVAVKLIPGDILRFGSAGLTYELVIENPPPVSFPWMRGPAPWPGPQPPRATQQPNQAPPPSHIPFHQGVQPAPMQRSWSQAFPRPTVVLPASHRRPVSANKEMFSFVVDDARKPPVIKQVWTNAMKLSEKSVAEGIPGAVPPAEIYVEEDLAQQDKDEIILLLGKEVSRLSDYEIESKYKDVIIANLQNEVAELSQKVSETTTSRQNEKEISQKCQVLDEDIDAKQKEIQSLKSQISALQKGYSKVLCQTLSERNSEITSLKNEGENLKRDNAITSGMVSSLQKDILAKDEQVQQLKEEVSHLKSQNKDKDHQLEALGSRCSVLKEELKQEDAHRELREAQEKELKLCKTQIQDMEKEMKKLRAELRKSCTEQSVISRTLREKSKVEEKLQEDSRRKLLQLQEMGNRESVIKINLERAVGQLEHFRSQVIKATYGRAKPFRDKPVTDQQLIEKITQVTEDNINFQQKKWTLQKETQLSNSKQEETTENIEKLRTSLDSCQACMKISCCSHDLKKEVDLLQHLQVSPPVSGLQKVVLDVLRHALSWLEEVEQLLRDLGILPSSPNKDQVQQFSGNSAVFTAGKAAGASGREGEAERGEARARGEAQSQNQATDGREGGKALEEYITQERNRAKETLEEERKRMQELESLLAQQKKALAKSITQEKNRVKEALEEEQTRVQELEERLARQKEISESNIAYEKRKAKEAMEKEKKKVQDLENRLTKQKEELELKEQKEDVLNNKLSDALAMVEETQKTKATESLKAESLALKLNETLAELETTKTKMIMVEERLILQQKMVKALQDEQESQRHGFEEEIMEYKEQIKQHAQTIVSLEEKLQKVTQHHKKIEGEIATLKDNDPAPKEERPQDPLVAPMTESSAKDMAYEHLIDDLLAAQKEILSQQEVIMKLRKDLTEAHSRMSDLRGELNEKQKMELEQNVVLVQQQSKELSVLKEKMAQMSSLVEKKDRELKALEEALRASQEKHRLQLNTEKEQKPRKKTQTCDTSVQIEPVHTEAFSSSQEQQSFSDLGVRCKGSRHEEVIQRQKKALSELRARIKELEKARSPDHKDHQNESFLDLKNLRMENNVQKILLDAKPDLPTLSRIEILAPQNGLCNARFGSAMEKSGKMDVAEALELSEKLYLDMSKTLGSLMNIKNMSGHVSMKYLSRQEREKVNQLRQRDLDLVFDKITQLKNQLGRKEELLRGYEKDVEQLRRSKVSIEMYQSQVAKLEDDIYKEAEEKALLKEALERMEHQLCQEKRINRAIRQQKVGTRKASLKMDQEREMLRKETSSKSSQSLLHSKPSGKY

SEQ ID NO: 21379 - protein, 321 aa, Homo sapiens
MEEGQYSEIEELPRRRCCRRGTQIVLLGLVTAALWAGLLTLLLLWHWDTTQSLKQLEERAARNVSQVSKNLESHHGDQMAQKSQSTQISQELEELRAEQQRLKSQDLELSWNLNGLQADLSSFKSQELNERNEASDLLERLREEVTKLRMELQVSSGFVCNTCPEKWINFQRKCYYFGKGTKQWVHARYACDDMEGQLVSIHSPEEQDFLTKHASHTGSWIGLRNLDLKGEFIWVDGSHVDYSNWAPGEPTSRSQGEDCVMMRGSGRWNDAFCDRKLGAWVCDRLATCTPPASEGSAESMGPDSRPDPDGRLPTPSAPLHS

SEQ ID NO: 21380 - protein, 1143 aa, Homo sapiens
MHVMNCVSLVSDKENGNIATAPGFMIGQTPPPAPPPPPPPPPPSPPCSCSREECPSSPPPPPPPPLPGEPPIPPPPPGLPPTTHMNGYSHLGKKKRMRSFFWKTIPEEQVRGKTNIWTLAARQEHHYQIDTKTIEELFGQQEDTTKSSLPRRGRTLNSSFREAREEITILDAKRSMNIGIFLKQFKKSPRSIVEDIHQGKSEHYGSETLREFLKFLPESEEVKKLKAFSGDVSKLSLADSFLYGLIQVPNYSLRIEAMVLKKEFLPSCSSLYTDITVLRTAIKELMSCEELHSILHLVLQAGNIMNAGGYAGNAVGFKLSSLLKLADTKANKPGMNLLHFVAQEAQKKDTILLNFSEKLHHVQKTARLSLENTEAELHLLFVRTKSLKENIQRDGELCQQMEDFLQFAIEKLRELECWKQELQDEAYTLIDFFCEDKKTMKLDECFQIFRDFCTKFNKAVKDNHDREAQELRQLQRLKEQEQKQRSWATGELGAFGRSSSENDVELLTKKGAEGLLPFLHPRPISPSSPSYRPPNTRRSRLSLGPSADRELLTFLESSTGSPEEPNKFHSLPRSSPRQARPTIACLEPAEVRHQDSSFAHKPQASGGQEEAPNPPSAQAHQLAAAQPENHASAFPRARRQGVSVLRKRYSEPVSLGSAQSPPLSPLALGIKEHELVTGLAQFNLQGSQGMEETSQLTLSDFSPMELESVGHRGPQSLSASSSSLTPMGRDALGSLSPALEDGKAAPDEPGSAALGSVGSSDPENKDPRPLFCISDTTDCSLTLDCSEGTDSRPRGGDPEEGGEGDGSMSSGVGEMGDSQVSSNPTSSPPGEAPAPVSVDSEPSCKGGLPRDKPTKRKDVVAPKRGSLKEASPGASKPGSARRSQGAVAKSVRTLTASENESMRKVMPITKSSRGAGWRRPELSSRGPSQNPPSSTDTVWSRQNSVRRASTGAEEQRLPRGSSGSSSTRPGRDVPLQPRGSFKKPSAKPLRNLPRQKPEENKTCRAHSEGPESPKEEPKTPSVPSVPHELPRVPSFARNTVASSSRSMRTDLPPVAKAPGITRTVSQRQLRVKGDPEDAAPKDSSTLRRASSARAPKKRPESAEGPSANTEAPLKARGAGERASLRRKDSSRTTLGRILNPLRK

SEQ ID NO: 21381 - protein, 67 aa, Homo sapiens
MRKPQAGTGEAARDPSLRPARTVLVGDQDEYTAAENKSPRGTLCPTGEQRIHAREDACIFSRLFSEK

SEQ ID NO: 21382 - protein, 224 aa, Homo sapiens
MRVSGVLRLLALIFAIVTTWMFIRSYMSFSMKTIRLPRWLAASPTKEIQVKKYKCGLIKPCPANYFAFKICSGAANVVGPTMCFEDRMIMSPVKNNVGRGLNIALVNGTTGAVLGQKAFDMYSGDVMHLVKFLKEIPGGALVLVASYDDPGTKMNDESRKLFSDLGSSYAKQLGFRDSWVFIGAKDLRGKSPFEQFLKNSPDTNKYEGWPELLEMEGCMPPKPF

SEQ ID NO: 21383 - protein, 166 aa, Homo sapiens
MAAYPESCVDTTVLDFVADLSLASPRRPLLCDFAPGVSLGDPALALREGRPRRMARFEEGDPEEEECEVDQGDGEEEEEEERGRGVSLLGRPKRKRVITYAQRQAANIRERKRMFNLNEAFDQLRRKVPTFAYEKRLSRIETLRLAIVYISFMTELLESCEKKESG

SEQ ID NO: 21384 - protein, 1315 aa, Homo sapiens
MSGPTDETAGDLPVKDTGLNLFGMGGLQETSTTRTMKSRQAVSRVSREELEDRFLRLHDENILLKQHARKQEDKIKRMATKLIRLVNDKKRYERVGGGPKRLGRDVEMEEMIEQLQEKVHELEKQNETLKNRLISAKQQLQTQGYRQTPYNNVQSRINTGRRKANENAGLQECPRKGIKFQDADVAETPHPMFTKYGNSLLEEARGEIRNLENVIQSQRGQIEELEHLAEILKTQLRRKENEIELSLLQLREQQATDQRSNIRDNVEMIKLHKQLVEKSNALSAMEGKFIQLQEKQRTLRISHDALMANGDELNMQLKEQRLKCCSLEKQLHSMKFSERRIEELQDRINDLEKERELLKENYDKLYDSAFSAAHEEQWKLKEQQLKVQIAQLETALKSDLTDKTEILDRLKTERDQNEKLVQENRELQLQYLEQKQQLDELKKRIKLYNQENDINADELSEALLLIKAQKEQKNGDLSFLVKVDSEINKDLERSMRELQATHAETVQELEKTRNMLIMQHKINKDYQMEVEAVTRKMENLQQDYELKVEQYVHLLDIRAARIHKLEAQLKDIAYGTKQYKFKPEIMPDDSVDEFDETIHLERGENLFEIHINKVTFSSEVLQASGDKEPVTFCTYAFYDFELQTTPVVRGLHPEYNFTSQYLVHVNDLFLQYIQKNTITLEVHQAYSTEYETIAACQLKFHEILEKSGRIFCTASLIGTKGDIPNFGTVEYWFRLRVPMDQAIRLYRERAKALGYITSNFKGPEHMQSLSQQAPKTAQLSSTDSTDGNLNELHITIRCCNHLQSRASHLQPHPYVVYKFFDFADHDTAIIPSSNDPQFDDHMYFPVPMNMDLDRYLKSESLSFYVFDDSDTQENIYIGKVNVPLISLAHDRCISGIFELTDHQKHPAGTIHVILKWKFAYLPPSGSITTEDLGNFIRSEEPEVVQRLPPASSVSTLVLAPRPKPRQRLTPVDKKVSFVDIMPHQSDETSPPPEDRKEISPEVEHIPEIEINMLTVPHVPKVSQEGSVDEVKENTEKMQQGKDDVSLLSEGQLAEQSLASSEDETEITEDLEPEVEEDMSASDSDDCIIPGPISKNIKQSLALSPGLGCSSAISAHCNFRLPGSSDFPASASQVDGITGACHHTQPSEKIRIEIIALSLNDSQVTMDDTIQRLFVECRFYSLPAEETPVSLPKPKSGQWVYYNYSNVIYVDKENNKAKRDILKAILQKQEMPNRSLRFTVVSDPPEDEQDLECEDIGVAHVDLADMFQEGRDLIEQNIDVFDARADGEGIGKLRVTVEALHALQSVYKQYRDDLEA

SEQ ID NO: 21385 - protein, 1235 aa, Homo sapiens
MSGPTDETAGDLPVKDTGLNLFGMGGLQETSTTRTMKSRQAVSRVSREELEDRFLRLHDENILLKQHARKQEDKIKRMATKLIRLVNDKKRYERVGGGPKRLGRDVEMEEMIEQLQEKVHELEKQNETLKNRLISAKQQLQTQGYRQTPYNNVQSRINTGRRKANENAGLQECPRKGIKFQDADVAETPHPMFTKYGNSLLEEARGEIRNLENVIQSQRGQIEELEHLAEILKTQLRRKENEIELSLLQLREQQATDQRSNIRDNVEMIKLHKQLVEKSNALSAMEGKFIQLQEKQRTLRISHDALMANGDELNMQLKEQRLKCCSLEKQLHSMKFSERRIEELQDRINDLEKERELLKENYDKLYDSAFSAAHEEQWKLKEQQLKVQIAQLETALKSDLTDKTEILDRLKTERDQNEKLVQENRELQLQYLEQKQQLDELKKRIKLYNQENDINADELSEALLLIKAQKEQKNGDLSFLVKVDSEINKDLERSMRELQATHAETVQELEKTRNMLIMQHKINKDYQMEVEAVTRKMENLQQDYELKVEQYVHLLDIRAARIHKLEAQLKDIAYGTKQYKFKPEIMPDDSVDEFDETIHLERGENLFEIHINKVTFSSEVLQASGDKEPVTFCTYAFYDFELQTTPVVRGLHPEYNFTSQYLVHVNDLFLQYIQKNTITLEVHQAYSTEYETIAACQLKFHEILEKSGRIFCTASLIGTKGDIPNFGTVEYWFRLRVPMDQAIRLYRERAKALGYITSNFKGPEHMQSLSQQAPKTAQLSSTDSTDGNLNELHITIRCCNHLQSRASHLQPHPYVVYKFFDFADHDTAIIPSSNDPQFDDHMYFPVPMNMDLDRYLKSESLSFYVFDDSDTQENIYIGKVNVPLISLAHDRCISGIFELTDHQKHPAGTIHVILKWKFAYLPPSGSITTEDLGNFIRSEEPEVVQRLPPASSVSTLVLAPRPKPRQRLTPVDKKVSFVDIMPHQSDVSQEGSVDEVKENTEKMQQGKDDVSLLSEGQLAEQSLASSEDETEITEDLEPEVEEDMSASDSDDCIIPGPISKNIKQPSEKIRIEIIALSLNDSQVTMDDTIQRLFVECRFYSLPAEETPVSLPKPKSGQWVYYNYSNVIYVDKENNKAKRDILKAILQKQEMPNRSLRFTVVSDPPEDEQDLECEDIGVAHVDLADMFQEGRDLIEQNIDVFDARADGEGIGKLRVTVEALHALQSVYKQYRDDLEA

SEQ ID NO: 21386 - protein, 574 aa, Homo sapiens
MSLPSPSPSRELCPPDPAFAPLSSWPGSGPAGGSTRSGHVLYSGWLRKSPPEKKLRLFAWRKRWFILRRGQTSSDPDVLEYYKNDGSKKPLRTINLNLCEQLDVDVTLNFNKKEIQKGYMFDIKTSERTFYLVAETREDMNEWVQSICQICGFRQEESTGFLGNISSASHGLCSSPAEPSCSHQHLPQEQEPTSEPPVSHCVPPTWPIPAPPGCLRSHQHASQRAEHARSASFSQGSEAPFIMRRNTAMQNLAQHSGYSVDGVSGHIHGFHSLSKPSQHNAEFRGSTHRIPWSLASHGHTRGSLTGSEADNEASSGKYTQHGGGNASRPAESMHEGVCSFLPGRTLVGLSDSIASEGSCVPMNPGSPTLPAVKQAGDDSQGVCIPVGSCLVRFDLLGSPLTELSMHQDLSQGHEVQLPPVNRSLKPNQKANPTPPNLRNNRVINELSFKPPVTEPWSGTSHTFDSSSSQHPISTQSITNTDSEDSGERYLFPNPASAFPVSGGTSSSAPPRSTGNIHYAALDFQPSKPSIGSVTSGKKVDYVQVDLEKTQALQKTMHEQMCLRQSSEPPRGAKL

SEQ ID NO: 21387 - protein, 465 aa, Homo sapiens
MPYFTRLILFLFCLMVLVESRKPKRKRWTGQVEMPKPSHLYKKNLDVTKIRKGKPQQLLRVDEHDFSMRPAFGGPAIPVGVDVQVESLDSISEVDMDFTMTLYLRHYWKDERLAFSSASNKSMTFDGRLVKKIWVPDVFFVHSKRSFTHDTTTDNIMLRVFPDGHVLYSMRITVTAMCNMDFSHFPLDSQTCSLELESYAYTDEDLMLYWKNGDESLKTDEKISLSQFLIQKFHTTSRLAFYSSTGWYNRLYINFTLRRHIFFFLLQTYFPATLMVMLSWVSFWIDRRAVPARVSLGITTVLTMTTIITGVNASMPRVSYVKAVDIYLWVSFVFVFLSVLEYAAVNYLTTVQERKERKLREKFPCMCGMLHSKTMMLDGSYSESEANSLAGYPRSHILTEEERQDKIVVHLGLSGEANAARKKGLLKGQTGFRIFQNTHAIDKYSRLIFPASYIFFNLIYWSVFS

SEQ ID NO: 21388 - protein, 490 aa, Homo sapiens
MVKPGGICSATGYWKAAFCLTDVHKMPYFTRLILFLFCLMVLVESRKPKRKRWTGQVEMPKPSHLYKKNLDVTKIRKGKPQQLLRVDEHDFSMRPAFGGPAIPVGVDVQVESLDSISEVDMDFTMTLYLRHYWKDERLAFSSASNKSMTFDGRLVKKIWVPDVFFVHSKRSFTHDTTTDNIMLRVFPDGHVLYSMRITVTAMCNMDFSHFPLDSQTCSLELESYAYTDEDLMLYWKNGDESLKTDEKISLSQFLIQKFHTTSRLAFYSSTGWYNRLYINFTLRRHIFFFLLQTYFPATLMVMLSWVSFWIDRRAVPARVSLGITTVLTMTTIITGVNASMPRVSYVKAVDIYLWVSFVFVFLSVLEYAAVNYLTTVQERKERKLREKFPCMCGMLHSKTMMLDGSYSESEANSLAGYPRSHILTEEERQDKIVVHLGLSGEANAARKKGLLKGQTGFRIFQNTHAIDKYSRLIFPASYIFFNLIYWSVFS

SEQ ID NO: 21389 - protein, 553 aa, Homo sapiens
MAAPKTAAVGPLVGAVVQGTNSTRFLVFNSKTAELLSHHKVELTQEFPKEGWVEQDPKEILQSVYECIARTCEKLDELNIDISNIKAVGVSNQRETTVIWDKLTGEPLYNAVVWLDLRTQTTVEDLSKKIPGNSNFVKSKTGLPLSTYFSAVKLRWMLDNVRNVQKAVEEGRALFGTIDSWLIWSLTGGVNGGVHCTDVTNASRTMLFNIHSLEWDKELCDFFEIPMDLLPNVFSSSEIYGLIKTGALEGVPISGCLGDQCAALVGQMCFQEGQAKNTYGTGCFLLCNTGRKCVFSEHGLLTTVAYKLGREKPAYYALEGSVAIAGAVIRWLRDNLGIIETSGDIERLAKEVGTSYGCYFVPAFSGLYAPYWEPSARGILCGLTQFTNKCHIAFAALEAVCFQTREILEAMNRDCGIPLRHLQVDGGMTNNKVLMQLQADILHIPVIKPFMPETTALGAAMAAGAAEGVSVWSLEPQALSVLRMERFEPQIQATESEIRYATWKKAVMKSMGWVTSQSPEGGDPSIFSSLPLGFFIVSSMVMLIGARYISGVP

SEQ ID NO: 21390 - protein, 2422 aa, Homo sapiens
MATGEHTPDDPLLRGKRRQDLQEMLREVGLDVEYWLPKLQEHLGVTCAQALQHLDKNNLKKLKSQTQHPWEKLLNLSHSKSLSALLQESQVERAKRKQKQAEQALQELRDLLTEGKQRQEEAVRTREAELRQAMDIPEEYWPSPEEPLRELMENLQRQLNLMKWTLCHRQNLPDRDVVRWASGGLALQGIYKASHQRGLTEKREELLSVPKEFLLLGPQQGTQMKTKEFTSPQAEFMFTQMVEKLGFRLTTSAKDGNWGFSLEAGLDHSKHPESKETQQSSSENSYFCSTKFSYIPLASCHFPIDQLQLSKPAVQELKCIEELLSQTTNPDRFSLLRHRIINFFHRFGSHVNQGPLHLGGIYWWKAISEGYCTEQLAEVRQQSAEALDIFIRDSYSGFGVKVAAGVNVSDSHSKTATQTKTSQNLQTKVQLSVAQTGGPPEADGLVQWKAGLIASNQTWCVIDRGLQLVPVWDIILSSHRSNFKDPLQVANFLKDSYTALTSITAQIQNGEELLSAGKEARVFLEDVKSWEVSDPEEQLKKLINFMKMLSQKLKSYDTWINICLTDSLQNFLVNTINFCKKSSIYKTKCIKSHLRSLLDPHIYRVTNFPQAHFIMQWIFQSDSEQEQVNISQFSQLIEILKETQNNLMEVKVKSESPETVEEAQRKSTYEVSLALSCFLNYLQKTEQTDTQLLLLSIAAAAGYHVINNTFQSLLGCDELSFLLDEMQTAQNKYQELKNICSYRAQAFLVLTGLTATVGDTAISSEEKTQRMSLMRHHMGQSLSKEVAHVLTKPGADHDWENLEKDLRLLINGDYEEVTISSLQMEEVSKQSLFYGKKQPHEPHDNENNKWEMIKNGAFLDLLQHLGLEHYYPKKLSKANFHLIYKTSVYNTQPSSEQELPFYFLQKLLMMDYELRYLVFKDDRNTEHQVHPNASDQEDEAFDPYENFFEDSDSPTKSSSTEPSPHIHPVDIQMTIFHCADNFARQYILAKLSTCQFALPLLVPNPCTSQIEFSLWSLRQITRSWQEARKSPKGKNYYKNQQMCCVSTSIVSFVRVGNGLSASKSQIMNCLLSKRKHDVFFHRHCTGSRKDCLLMGGMVEICWFCPGGEDEDRFDNCVTFTNLHGDAKEHEQQLSFLKEVSTVIVVLMSASDDNEGNRKIVRNLWQSSRPLICLLDDKEATMTNISGQRMRMGIKNRNEAELTEELTTTIRHLLELSDTALSLEDCSQIAHQQGFLIDEDQRDCKEAKEKAQALMAFLGKMKLSQIKEKLLPLQGQLWHHWCKKDKELYHLREKGNQSIEQHKSEIETDKQIIRHEQLARALPLNDLMQSVLQFLQEHSEIHTKLYFLQWLSVFLDKLTAGHLEELHEKQKYWWSLVQTVKQKAPNSHSLICLQSEIEAISTEISDCTLGIEQLIREVGQIYEALEEASSIKKIFFSLPQIAADLMISGVPIELMDGDAAYVPLTWVAAVFDKVSEKLGDKRLFVLSILGLQSSGKSTVLNALFGLQFTVSAGKCTQGAYMQLLKVEETFTEELGFDFVLAVDTEGLRAPEHSNKSKDRDNELVTFVIGLANLTLINIFGENPSEMQDILQIVVQAFLRMKQVKIFPSCLFVHQNVGEATATDQTMDGRRRLEQKLDEMAAIAAEQEQCLDVTCFSDVIRFDVNTHVYYFAHLWDGNPPMAPPNPRYSHNVQQLKSRILMTATQESRGNIMKISDVKSRVQDLWRGLMNENFIFSFRNTQEVMAMNKLETMYNHWTWELRSHVLGLQNQLINQIQNGKIQTLEASTFEVLVTEKYEVVKQELEKYFNEGPCSKILIQCKANFENKLIVLKEKLISDSKRQANELISFKNQSQERLNKKKTDYEKELLEKSRKLALTVKGKELSEEELHEKFNQLWKKWVCDVSTTLPQVTEPDIDLDSENILWEYFKNKTNVVGLLTNSAEKFQINYDKHIKVNKKYNHIPMTLTVFEKEFINMTTDYIVSRFNKIINNMWKQQCGYNPNYFHEILKTIEEEVKSASTQKRYTFTNTFIIDLCVCLFQRARENFKEMHRAFKRANDPVNYLESKKDDFFTSFKISCQGATSIKTFVDVLWYKLTPAVSTTIWEDMTFKIAGDMRATCPAFNGNRTNLEKHILFSLAEEENFDNYWEYLHNSKSFFRSYIKNHIKRYCSDNGGEKMKTFFEKSLIDIKNTILSAIHESTSVAKDKSSTASEWLDLFCDCLGCNLIFPRRDLISIEHQEIKHTEFLKEAMSAALDLTMKKIEQNYSSKPIEAMVSKIEKMLSEHLCGCWKQCPSCGAICTNTIPTHEGDHSVPFHRPQAVNGEEWYETDDFVIDCCTSLVASDCLLVLRDGRNFPFKNYRQAGGDYAMWSITPDTSIQLYWKWFVSHFRSNLEEKYQKKFAGKGKIPNAWAKITKQDVLEDLKKQ

SEQ ID NO: 21391 - protein, 351 aa, Homo sapiens
MSLVCLTDFQAHAREQLSKSTRDFIEGGADDSITRDDNIAAFKRIRLRPRYLRDVSEVDTRTTIQGEEISAPICIAPTGFHCLVWPDGEMSTARAAQAAGICYITSTFASCSLEDIVIAAPEGLRWFQLYVHPDLQLNKQLIQRVESLGFKALVITLDTPVCGNRRHDIRNQLRRNLTLTDLQSPKKGNAIPYFQMTPISTSLCWNDLSWFQSITRLPIILKGILTKEDAELAVKHNVQGIIVSNHGGRQLDEVLASIDALTEVVAAVKGKIEVYLDGGVRTGNDVLKALALGAKCIFLGRPILWGLACKGEHGVKEVLNILTNEFHTSMALTGCRSVAEINRNLVQFSRL

SEQ ID NO: 21392 - protein, 364 aa, Homo sapiens
MEDKMWSECEGPEMSLVCLTDFQAHAREQLSKSTRDFIEGGADDSITRDDNIAAFKRIRLRPRYLRDVSEVDTRTTIQGEEISAPICIAPTGFHCLVWPDGEMSTARAAQAAGICYITSTFASCSLEDIVIAAPEGLRWFQLYVHPDLQLNKQLIQRVESLGFKALVITLDTPVCGNRRHDIRNQLRRNLTLTDLQSPKKGNAIPYFQMTPISTSLCWNDLSWFQSITRLPIILKGILTKEDAELAVKHNVQGIIVSNHGGRQLDEVLASIDALTEVVAAVKGKIEVYLDGGVRTGNDVLKALALGAKCIFLGRPILWGLACKGEHGVKEVLNILTNEFHTSMALTGCRSVAEINRNLVQFSRL

SEQ ID NO: 21393 - protein, 444 aa, Homo sapiens
MSLMVVSMACVGLFLVQRAGPHMGGQDKPFLSAWPSAVVPRGGHVTLRCHYRHRFNNFMLYKEDRIHIPIFHGRIFQESFNMSPVTTAHAGNYTCRGSHPHSPTGWSAPSNPVVIMVTGNHRKPSLLAHPGPLVKSGERVILQCWSDIMFEHFFLHKEGISKDPSRLVGQIHDGVSKANFSIGPMMLALAGTYRCYGSVTHTPYQLSAPSDPLDIVVTGPYEKPSLSAQPGPKVQAGESVTLSCSSRSSYDMYHLSREGGAHERRLPAVRKVNRTFQADFPLGPATHGGTYRCFGSFRHSPYEWSDPSDPLLVSVTGNPSSSWPSPTEPSSKSGNPRHLHILIGTSVVIILFILLLFFLLHLWCSNKKNAAVMDQEPAGNRTANSEDSDEQDPEEVTYAQLDHCVFTQRKITRPSQRPKTPPTDTILYTELPNAKPRSKVVSCP

SEQ ID NO: 21394 - protein, 349 aa, Homo sapiens
MSLMVVSMACVGLFLVQRAGPHMGNHRKPSLLAHPGPLVKSGERVILQCWSDIMFEHFFLHKEGISKDPSRLVGQIHDGVSKANFSIGPMMLALAGTYRCYGSVTHTPYQLSAPSDPLDIVVTGPYEKPSLSAQPGPKVQAGESVTLSCSSRSSYDMYHLSREGGAHERRLPAVRKVNRTFQADFPLGPATHGGTYRCFGSFRHSPYEWSDPSDPLLVSVTGNPSSSWPSPTEPSSKSGNPRHLHILIGTSVVIILFILLLFFLLHLWCSNKKNAAVMDQEPAGNRTANSEDSDEQDPEEVTYAQLDHCVFTQRKITRPSQRPKTPPTDTILYTELPNAKPRSKVVSCP

SEQ ID NO: 21395 - protein, 492 aa, Homo sapiens
MWRGLWTLAAQAARGPRRLCTRRSSGAPAPGSGATIFALSSGQGRCGIAVIRTSGPASGHALRILTAPRDLPLARHASLRLLSDPRSGEPLDRALVLWFPGPQSFTGEDCVEFHVHGGPAVVSGVLQALGSVPGLRPAEAGEFTRRAFANGKLNLTEVEGLADLIHAETEAQRRQALRQLDGELGHLCRGWAETLTKALAHVEAYIDFGEDDNLEEGVLEQADIEVRALQVALGAHLRDARRGQRLRSGVHVVVTGPPNAGKSSLVNLLSRKPVSIVSPEPGTTRDVLETPVDLAGFPVLLSDTAGLREGVGPVEQEGVRRARERLEQADLILAMLDASDLASPSSCNFLATVVASVGAQSPSDSSQRLLLVLNKSDLLSPEGPGPGPDLPPHLLLSCLTGEGLDGLLEALRKELAAVCGDPSTDPPLLTRARHQHHLQGCLDALGHYKQSKDLALAAEALRVARGHLTRLTGGGGTEEILDIIFQDFCVGK

SEQ ID NO: 21396 - protein, 524 aa, Homo sapiens
MWRGLWTLAAQAARGPRRLCTRRSSGAPAPGSGATIFALSSGQGRCGIAVIRTSGPASGHALRILTAPRDLPLARHASLRLLSDPRSGEPLDRALVLWFPGPQSFTGEDCVEFHVHGGPAVVSGVLQALGSVPGLRPAEAGEFTRRAFANGKLNLTEVEGLADLIHAETEAQRRQALRQLDGELGHLCRGWAETLTKALAHVEAYIDFGEDDNLEEGVLEQGGSTWWWGRKTPHISPQRLPSLSLSACLLSPTADIEVRALQVALGAHLRDARRGQRLRSGVHVVVTGPPNAGKSSLVNLLSRKPVSIVSPEPGTTRDVLETPVDLAGFPVLLSDTAGLREGVGPVEQEGVRRARERLEQADLILAMLDASDLASPSSCNFLATVVASVGAQSPSDSSQRLLLVLNKSDLLSPEGPGPGPDLPPHLLLSCLTGEGLDGLLEALRKELAAVCGDPSTDPPLLTRARHQHHLQGCLDALGHYKQSKDLALAAEALRVARGHLTRLTGGGGTEEILDIIFQDFCVGK

SEQ ID NO: 21397 - protein, 471 aa, Homo sapiens
MWRGLWTLAAQAARGPRRLCTRRSSGAPAPGSGATIFALSSGQGRCGIAVIRTSGPASGHALRILTAPRDLPLARHASLRLLSDPRSGEPLDRALVLWFPGPQSFTGEDCVEFHVHGGPAVVSGVLQALGSVPGLRPAEAGEFTRRAFANGKLNLTEVEGLADLIHAETEAQRRQALRQLDGELGHLCRGWAETLTKALAHVEAYIDFGEDDNLEEGVLEQADIEVRALQVALGAHLRDARRGQRLRSGVHVVVTGPPNAGKSSLVNLLSRKPVSIVSPEPGTTRDVLETPVDLAGFPVLLSDTAGLREGVGPVEQEGVRRARESCNFLATVVASVGAQSPSDSSQRLLLVLNKSDLLSPEGPGPGPDLPPHLLLSCLTGEGLDGLLEALRKELAAVCGDPSTDPPLLTRARHQHHLQGCLDALGHYKQSKDLALAAEALRVARGHLTRLTGGGGTEEILDIIFQDFCVGK

SEQ ID NO: 21398 - protein, 514 aa, Homo sapiens
MVHSPTCPHPCFLLVPASEPQFPHLQTPDPGDAVWNVRWALCTRRSSGAPAPGSGATIFALSSGQGRCGIAVIRTSGPASGHALRILTAPRDLPLARHASLRLLSDPRSGEPLDRALVLWFPGPQSFTGEDCVEFHVHGGPAVVSGVLQALGSVPGLRPAEAGEFTRRAFANGKLNLTEVEGLADLIHAETEAQRRQALRQLDGELGHLCRGWAETLTKALAHVEAYIDFGEDDNLEEGVLEQADIEVRALQVALGAHLRDARRGQRLRSGVHVVVTGPPNAGKSSLVNLLSRKPVSIVSPEPGTTRDVLETPVDLAGFPVLLSDTAGLREGVGPVEQEGVRRARERLEQADLILAMLDASDLASPSSCNFLATVVASVGAQSPSDSSQRLLLVLNKSDLLSPEGPGPGPDLPPHLLLSCLTGEGLDGLLEALRKELAAVCGDPSTDPPLLTRARHQHHLQGCLDALGHYKQSKDLALAAEALRVARGHLTRLTGGGGTEEILDIIFQDFCVGK

SEQ ID NO: 21399 - protein, 291 aa, Homo sapiens
MSALNWKPFVYGGLASITAECGTFPIDLTKTRLQIQGQTNDAKFKEIRYRGMLHALVRIGREEGLKALYSGIAPAMLRQASYGTIKIGTYQSLKRLFIERPEDETLPINVICGILSGVISSTIANPTDVLKIRMQAQSNTIQGGMIGNFMNIYQQEGTRGLWKGVSLTAQRAAIVVGVELPVYDITKKHLILSGLMGDTVYTHFLSSFTCGLAGALASNPVDVVRTRMMNQRVLRDGRCSGYTGTLDCLLQTWKNEGFFALYKGFWPNWLRLGPWNIIFFVTYEQLKKLDL

SEQ ID NO: 21400 - protein, 240 aa, Homo sapiens
MLHALVRIGREEGLKALYSGIAPAMLRQASYGTIKIGTYQSLKRLFIERPEDETLPINVICGILSGVISSTIANPTDVLKIRMQAQSNTIQGGMIGNFMNIYQQEGTRGLWKGVSLTAQRAAIVVGVELPVYDITKKHLILSGLMGDTVYTHFLSSFTCGLAGALASNPVDVVRTRMMNQRVLRDGRCSGYTGTLDCLLQTWKNEGFFALYKGFWPNWLRLGPWNIIFFVTYEQLKKLDL

SEQ ID NO: 21401 - protein, 387 aa, Homo sapiens
MVHCSCVLFRKYGNFIDKLRLFTRGGSGGMGYPRLGGEGGKGGDVWVVAQNRMTLKQLKDRYPRKRFVAGVGANSKISALKGSKGKDCEIPVPVGISVTDENGKIIGELNKENDRILVAQGGLGGKLLTNFLPLKGQKRIIHLDLKLIADVGLVGFPNAGKSSLLSCVSHAKPAIADYAFTTLKPELGKIMYSDFKQISVADLPGLIEGAHMNKGMGHKFLKHIERTRQLLFVVDISGFQLSSHTQYRTAFETIILLTKELELYKEELQTKPALLAVNKMDLPDAQDKFHELMSQLQNPKDFLHLFEKNMIPERTVEFQHIIPISAVTGEGIEELKNCIRKSLDEQANQENDALHKKQLLNLWISDTMSSTEPPSKHAVTTSKMDII

SEQ ID NO: 21402 - protein, 308 aa, Homo sapiens
MVHCSCVLFRKYGNFIDKLRLFTRGGSGGMGYPRLGGEGGKGGDVWVVAQNRMTLKQLKDRYPRKRFVAGVGANSKFPNAGKSSLLSCVSHAKPAIADYAFTTLKPELGKIMYSDFKQISVADLPGLIEGAHMNKGMGHKFLKHIERTRQLLFVVDISGFQLSSHTQYRTAFETIILLTKELELYKEELQTKPALLAVNKMDLPDAQDKFHELMSQLQNPKDFLHLFEKNMIPERTVEFQHIIPISAVTGEGIEELKNCIRKSLDEQANQENDALHKKQLLNLWISDTMSSTEPPSKHAVTTSKMDII

SEQ ID NO: 21403 - protein, 116 aa, Homo sapiens
MVHCSCVLFRKYGNFIDKLRLFTRGGSGGMGYPRLGGEGGKGGDVWVVAQNRMTLKQLKDRYPRKRFVAGVGANSKISALKGSKGKDCEIPVPVGISVTDENGKIIDSQMLENPLC

SEQ ID NO: 21404 - protein, 144 aa, Homo sapiens
MAVQSKAFCAGGLAPGWKLLVQGHADSGEDRFETNFLLETGDIAFHIKPRFSSATVVGNAFQYGRWGPEQVSSIFPLAPGEPFEIEVSWDAEHFHVYAPEHKVLQFPCRQRPLGATTRVRVLSDHCLAQVELAKRGLSWGDRGY

SEQ ID NO: 21405 - protein, 623 aa, Homo sapiens
MATEHVNGNGTEEPMDTTSAVIHSENFQTLLDAGLPQKVAEKLDEIYVAGLVAHSDLDERAIEALKEFNEDGALAVLQQFKDSDLSHVQNKSAFLCGVMKTYRQREKQGTKVADSSKGPDEAKIKALLERTGYTLDVTTGQRKYGGPPPDSVYSGQQPSVGTEIFVGKIPRDLFEDELVPLFEKAGPIWDLRLMMDPLTGLNRGYAFVTFCTKEAAQEAVKLYNNHEIRSGKHIGVCISVANNRLFVGSIPKSKTKEQILEEFSKVTEGLTDVILYHQPDDKKKNRGFCFLEYEDHKTAAQARRRLMSGKVKVWGNVGTVEWADPIEDPDPEVMAKVKVLFVRNLANTVTEEILEKAFSQFGKLERVKKLKDYAFIHFDERDGAVKAMEEMNGKDLEGENIEIVFAKPPDQKRKERKAQRQAAKNQMYDDYYYYGPPHMPPPTRGRGRGGRGGYGYPPDYYGYEDYYDYYGYDYHNYRGGYEDPYYGYEDFQVGARGRGGRGARGAAPSRGRGAAPPRGRAGYSQRGGPGSARGVRGARGGAQQQRGRGVRGARGGRGGNVGGKRKADGYNQPDSKRRQTNNQNWGSQPIAQQPLQGGDHSGNYGYKSENQEFYQDTFGQQWK

SEQ ID NO: 21406 - protein, 588 aa, Homo sapiens
MATEHVNGNGTEEPMDTTSAVIHSENFQTLLDAGLPQKVAEKLDEIYVAGLVAHSDLDERAIEALKEFNEDGALAVLQQFKDSDLSHVQNKSAFLCGVMKTYRQREKQGTKVADSSKGPDEAKIKALLERTGYTLDVTTGQRKYGGPPPDSVYSGQQPSVGTEIFVGKIPRDLFEDELVPLFEKAGPIWDLRLMMDPLTGLNRGYAFVTFCTKEAAQEAVKLYNNHEIRSGKHIGVCISVANNRLFVGSIPKSKTKEQILEEFSKVTEGLTDVILYHQPDDKKKNRGFCFLEYEDHKTAAQVKVLFVRNLANTVTEEILEKAFSQFGKLERVKKLKDYAFIHFDERDGAVKAMEEMNGKDLEGENIEIVFAKPPDQKRKERKAQRQAAKNQMYDDYYYYGPPHMPPPTRGRGRGGRGGYGYPPDYYGYEDYYDYYGYDYHNYRGGYEDPYYGYEDFQVGARGRGGRGARGAAPSRGRGAAPPRGRAGYSQRGGPGSARGVRGARGGAQQQRGRGVRGARGGRGGNVGGKRKADGYNQPDSKRRQTNNQNWGSQPIAQQPLQGGDHSGNYGYKSENQEFYQDTFGQQWK

SEQ ID NO: 21407 - protein, 562 aa, Homo sapiens
MATEHVNGNGTEEPMDTTSAVIHSENFQTLLDAGLPQKVAEKLDEIYVAGLVAHSDLDERAIEALKEFNEDGALAVLQQFKDSDLSHVQNKSAFLCGVMKTYRQREKQGTKVADSSKGPDEAKIKALLERTGYTLDVTTGQRKYGGPPPDSVYSGQQPSVGTEIFVGKIPRDLFEDELVPLFEKAGPIWDLRLMMDPLTGLNRGYAFVTFCTKEAAQEAVKLYNNHEIRSGKHIGVCISVANNRLFVGSIPKSKTKEQILEEFSKVTEGLTDVILYHQPDDKKKNRGFCFLEYEDHKTAAQARRRLMSGKVKVWGNVGTVEWADPIEDPDPEVMAKVKVLFVRNLANTVTEEILEKAFSQFGKLERVKKLKDYAFIHFDERDGAVKAMEEMNGKDLEGENIEIVFAKPPDQKRKERKAQRQAAKNQMYDDYYYYGPPHMPPPTRGRGRGGRGGYGYPPDYYGYEDYYDYYGYDYHNYRGGYEDPYYGYEDFQVGARGRGGRGARGAAPSRGRGAAPPRGRAGYSQRGGPGSARGVRGARGGAQQQRGRGQGKGVEAGPDLLQ

SEQ ID NO: 21408 - protein, 527 aa, Homo sapiens
MATEHVNGNGTEEPMDTTSAVIHSENFQTLLDAGLPQKVAEKLDEIYVAGLVAHSDLDERAIEALKEFNEDGALAVLQQFKDSDLSHVQNKSAFLCGVMKTYRQREKQGTKVADSSKGPDEAKIKALLERTGYTLDVTTGQRKYGGPPPDSVYSGQQPSVGTEIFVGKIPRDLFEDELVPLFEKAGPIWDLRLMMDPLTGLNRGYAFVTFCTKEAAQEAVKLYNNHEIRSGKHIGVCISVANNRLFVGSIPKSKTKEQILEEFSKVTEGLTDVILYHQPDDKKKNRGFCFLEYEDHKTAAQVKVLFVRNLANTVTEEILEKAFSQFGKLERVKKLKDYAFIHFDERDGAVKAMEEMNGKDLEGENIEIVFAKPPDQKRKERKAQRQAAKNQMYDDYYYYGPPHMPPPTRGRGRGGRGGYGYPPDYYGYEDYYDYYGYDYHNYRGGYEDPYYGYEDFQVGARGRGGRGARGAAPSRGRGAAPPRGRAGYSQRGGPGSARGVRGARGGAQQQRGRGQGKGVEAGPDLLQ

SEQ ID NO: 21409 - protein, 410 aa, Homo sapiens
MEDHLQIPFIQIFVGKIPRDLFEDELVPLFEKAGPIWDLRLMMDPLTGLNRGYAFVTFCTKEAAQEAVKLYNNHEIRSGKHIGVCISVANNRLFVGSIPKSKTKEQILEEFSKVTEGLTDVILYHQPDDKKKNRGFCFLEYEDHKTAAQARRRLMSGKVKVWGNVGTVEWADPIEDPDPEVMAKVKVLFVRNLANTVTEEILEKAFSQFGKLERVKKLKDYAFIHFDERDGAVKAMEEMNGKDLEGENIEIVFAKPPDQKRKERKAQRQAAKNQMYDDYYYYGPPHMPPPTRGRGRGGRGGYGYPPDYYGYEDYYDYYGYDYHNYRGGYEDPYYGYEDFQVGARGRGGRGARGAAPSRGRGAAPPRGRAGYSQRGGPGSARGVRGARGGAQQQRGRGQGKGVEAGPDLLQ

SEQ ID NO: 21410 - protein, 542 aa, Homo sapiens
MDLGWDRSRGPRRSTSSVRVRELSWQGLHNPCPQSKGPGSQRDRLGEQLVEEYLSPARLQALARVDDLRLVRTLEMCVDTREGSLGNFGVHLPNLDQLKLNGSHLGSLRDLGTSLGHLQVLWLARCGLADLDGIASLPALKELYASYNNISDLSPLCLLEQLEVLDLEGNSVEDLGQVRYLQLCPRLAMLTLEGNLVCLQPAPGPTNKVPRGYNYRAEVRKLIPQLQVLDEVPAAHTGPPAPPRLSQDWLAVKEAIKKGNGLPPLDCPRGAPIRRLDPELSLPETQSRASRPWPFSLLVRGGPLPEGLLSEDLAPEDNTSSLTHGAGQVLCGNPTKGLRERRHQCQAREPPEQLPQHRPGDPAASTSTPEPDPADSSDFLALAGLRAWREHGVRPLPYRHPESQQEGAVAPWGPRRVPEEQVHQAEPKTPSSPPSLASEPSGTSSQHLVPSPPKHPRPRDSGSSSPRWSTDLQSRGRRLRVLGSWGPGLGDGVAAVPVLRALEVASRLSPRAQGCPGPKPAPDAAARPPRAAELSHPSPVPT

SEQ ID NO: 21411 - protein, 194 aa, Homo sapiens
MPPPAKEGGRKGPRERSGKSAPGTAQGEERAKGAPATEPPKPGWALTPQGLAAMLPAQRHRHLLFGDLLEDVGAAASTFPCGSVEPGYRMPDPRPWTQSLELPAERQNRLLGVLKAAEARGRVRALRLRYTRMRAEEIALLIQRQKSARAAIRLELFLPPQLKPARIPDPLDRQERRRVETILEENVDGTIFPR

SEQ ID NO: 21412 - protein, 240 aa, Homo sapiens
MPPPAKEGGRKGPRERSGKSAPGTAQGEERAKGAPATEPPKPGWALTPQGLAAMLPAQRHRHLLFGDLLEDVGAAASTFPCGSVEPGYRMPDPRPWTQSLELPAERQNRLLGVLKAAEARGRVRALRLRYTRMRAEEIALLIQRQKSARAAIRLELFLPPQLKPARIPDPLDRQEVQTSPGRGGERGGALPASAHAGPQPLSPAAEARGDHPGGERGWHHLPAVTATESVRRAPASHIKL

SEQ ID NO: 21413 - protein, 467 aa, Homo sapiens
MLIFWTITLFLLGAAKGKEVCYEDLGCFSDTEPWGGTAIRPLKILPWSPEKIGTRFLLYTNENPNNFQILLLSDPSTIEASNFQMDRKTRFIIHGFIDKGDESWVTDMCKKLFEVEEVNCICVDWKKGSQATYTQAANNVRVVGAQVAQMLDILLTEYSYPPSKVHLIGHSLGAHVAGEAGSKTPGLSRITGLDPVEASFESTPEEVRLDPSDADFVDVIHTDAAPLIPFLGFGTNQQMGHLDFFPNGGESMPGCKKNALSQIVDLDGIWAGTRDFVACNHLRSYKYYLESILNPDGFAAYPCTSYKSFESDKCFPCPDQGCPQMGHYADKFAGRTSEEQQKFFLNTGEASNFARWRYGVSITLSGRTATGQIKVALFGNKGNTHQYSIFRGILKPGSTHSYEFDAKLDVGTIEKVKFLWNNNVINPTLPKVGATKITVQKGEEKTVYNFCSEDTVREDTLLTLTPC

SEQ ID NO: 21414 - protein, 186 aa, Homo sapiens
MLIFWTITLFLLGAAKGKEVCYEDLGCFSDTEPWGGTAIRPLKILPWSPEKIGTRFLLYTNENPNNFQILLLSDPSTIEASNFQMDRKTRFIIHGFIDKGDESWVTDMCKVGASSDPCGQLRPTLLLTSLHHFMHSRNLYILGNFMQLKCFSSQKLKCLSMFPHYICTLKQPHLLLEKYSYYLISG

SEQ ID NO: 21415 - protein, 117 aa, Homo sapiens
MLIFWTITLFLLGAAKGKEVCYEDLGCFSDTEPWGGTAIRPLKILPWSPEKIGTRFLLYTNENPNNFQILLLSDPSTIEASNFQMDRKTRFIIHGFIDKGDESWVTDMCKPGASPRA

SEQ ID NO: 21416 - protein, 24 aa, Homo sapiens
MATRGFSCLLLVISEIDLSVKRWV

SEQ ID NO: 21417 - protein, 316 aa, Homo sapiens
MSAEVETSEGVDESEKKNSGALEKENQMRMADLSELLKEGTKEAHDRAENTQFVKDFLKGNIKKELFKLATTALYFTYSALEEEMERNKDHPAFAPLYFPMELHRKEALTKDMEYFFGENWEEQVQCPKAAQKYVERIHYIGQNEPELLVAHAYTRYMGDLSGGQVLKKVAQRALKLPSTGEGTQFYLFENVDNAQQFKQLYRARMNALDLNMKTKERIVEEANKAFEYNMQIFNELDQAGSTLARETLEDGFPVHDGKGDMRKCPFYAAEQDKGALEGSSCPFRTAMAVLRKPSLQFILAAGVALAAGLLAWYYM

SEQ ID NO: 21418 - protein, 287 aa, Homo sapiens
MADLSELLKEGTKEAHDRAENTQFVKDFLKGNIKKELFKLATTALYFTYSALEEEMERNKDHPAFAPLYFPMELHRKEALTKDMEYFFGENWEEQVQCPKAAQKYVERIHYIGQNEPELLVAHAYTRYMGDLSGGQVLKKVAQRALKLPSTGEGTQFYLFENVDNAQQFKQLYRARMNALDLNMKTKERIVEEANKAFEYNMQIFNELDQAGSTLARETLEDGFPVHDGKGDMRKCPFYAAEQDKGALEGSSCPFRTAMAVLRKPSLQFILAAGVALAAGLLAWYYM

SEQ ID NO: 21419 - protein, 611 aa, Homo sapiens
MPEIVDTCSLASPASVCRTKHLHLRCSVDFTRRTLTGTAALTVQSQEDNLRSLVLDTKDLTIEKVVINGQEVKYALGERQSYKGSPMEISLPIALSKNQEIVIEISFETSPKSSALQWLTPEQTSGKEHPYLFSQCQAIHCRAILPCQDTPSVKLTYTAEVSVPKELVALMSAIRDGETPDPEDPSRKIYKFIQKVPIPCYLIALVVGALESRQIGPRTLVWSEKEQVEKSAYEFSETESMLKIAEDLGGPYVWGQYDLLVLPPSFPYGGMENPCLTFVTPTLLAGDKSLSNVIAHEISHSWTGNLVTNKTWDHFWLNEGHTVYLERHICGRLFGEKFRHFNALGGWGELQNSVKTFGETHPFTKLVVDLTDIDPDVAYSSVPYEKGFALLFYLEQLLGGPEIFLGFLKAYVEKFSYKSITTDDWKDFLYSYFKDKVDVLNQVDWNAWLYSPGLPPIKPNYDMTLTNACIALSQRWITAKEDDLNSFNATDLKDLSSHQLNEFLAQTLQRAPLPLGHIKRMQEVYNFNAINNSEIRFRWLRLCIQSKWEDAIPLALKMATEQGRMKFTRPLFKDLAAFDKSHDQAVRTYQEHKASMHPVTAMLVGKDLKVD

SEQ ID NO: 21420 - protein, 532 aa, Homo sapiens
MPEIVDTCSLASPASVCRTKHLHLRCSVDFTRRTLTGTAALTVQSQEDNLRSLVLDTKDLTIEKVVINGQEVKYALGERQSYKGSPMEISLPIALSKNQEIVIEISFETSPKSSALQWLTPEQTSGKEHPYLFSQCQAIHCRAILPCQDTPSVKLTYTAEVSVPKELVALMSAIRDGETPDPEDPSRKIYKFIQKVPIPCYLIALVVGALESRQIGPRTLVWSEKEQVEKSAYEFSETESMLKIAEDLGGPYVWGQYDLLVLPPSFPYGGMENPCLTFVTPTLLAGDKSLSNVIAHEISHSWTGNLVTNKTWDHFWLNEGHTVYLERHICGRLFGEKFRHFNALGGWGELQNSVKTFGETHPFTKLVVDLTDIDPDVAYSSVPYEKGFALLFYLEQLLGGPEIFLGFLKAYVEKFSYKSITTDDWKDFLYSYFKDKVDVLNQVDWNAWLYSPGLPPIKPNYDMTLTNACIALSQRWITAKEDDLNSFNATDLKDLSSHQLNEFLAQTLQRMAAALHSIQVGGRNSFGAKDGN

SEQ ID NO: 21421 - protein, 508 aa, Homo sapiens
MLPQRNLSKRQVPTMHIPVKTRRLLAALKVLDTKDLTIEKVVINGQEVKYALGERQSYKGSPMEISLPIALSKNQEIVIEISFETSPKSSALQWLTPEQTSGKEHPYLFSQCQAIHCRAILPCQDTPSVKLTYTAEVSVPKELVALMSAIRDGETPDPEDPSRKIYKFIQKVPIPCYLIALVVGALESRQIGPRTLVWSEKEQVEKSAYEFSETESMLKIAEDLGGPYVWGQYDLLVLPPSFPYGGMENPCLTFVTPTLLAGDKSLSNVIAHEISHSWTGNLVTNKTWDHFWLNEGHTVYLERHICGRLFGEKFRHFNALGGWGELQNSVKTFGETHPFTKLVVDLTDIDPDVAYSSVPYEKGFALLFYLEQLLGGPEIFLGFLKAYVEKFSYKSITTDDWKDFLYSYFKDKVDVLNQVDWNAWLYSPGLPPIKPNYDMTLTNACIALSQRWITAKEDDLNSFNATDLKDLSSHQLNEFLAQTLQRMAAALHSIQVGGRNSFGAKDGN

SEQ ID NO: 21422 - protein, 587 aa, Homo sapiens
MLPQRNLSKRQVPTMHIPVKTRRLLAALKVLDTKDLTIEKVVINGQEVKYALGERQSYKGSPMEISLPIALSKNQEIVIEISFETSPKSSALQWLTPEQTSGKEHPYLFSQCQAIHCRAILPCQDTPSVKLTYTAEVSVPKELVALMSAIRDGETPDPEDPSRKIYKFIQKVPIPCYLIALVVGALESRQIGPRTLVWSEKEQVEKSAYEFSETESMLKIAEDLGGPYVWGQYDLLVLPPSFPYGGMENPCLTFVTPTLLAGDKSLSNVIAHEISHSWTGNLVTNKTWDHFWLNEGHTVYLERHICGRLFGEKFRHFNALGGWGELQNSVKTFGETHPFTKLVVDLTDIDPDVAYSSVPYEKGFALLFYLEQLLGGPEIFLGFLKAYVEKFSYKSITTDDWKDFLYSYFKDKVDVLNQVDWNAWLYSPGLPPIKPNYDMTLTNACIALSQRWITAKEDDLNSFNATDLKDLSSHQLNEFLAQTLQRAPLPLGHIKRMQEVYNFNAINNSEIRFRWLRLCIQSKWEDAIPLALKMATEQGRMKFTRPLFKDLAAFDKSHDQAVRTYQEHKASMHPVTAMLVGKDLKVD

SEQ ID NO: 21423 - protein, 1093 aa, Homo sapiens
MARPVRGGLGAPRRSPCLLLLWLLLLRLEPVTAAAGPRAPCAAACTCAGDSLDCGGRGLAALPGDLPSWTRSLNLSYNKLSEIDPAGFEDLPNLQEVYLNNNELTAVPSLGAASSHVVSLFLQHNKIRSVEGSQLKAYLSLEVLDLSLNNITEVRNTCFPHGPPIKELNLAGNRIGTLELGAFDGLSRSLLTLRLSKNRITQLPVRAFKLPRLTQLDLNRNRIRLIEGLTFQGLNSLEVLKLQRNNISKLTDGAFWGLSKMHVLHLEYNSLVEVNSGSLYGLTALHQLHLSNNSIARIHRKGWSFCQKLHELVLSFNNLTRLDEESLAELSSLSVLRLSHNSISHIAEGAFKGLRSLRVLDLDHNEISGTIEDTSGAFSGLDSLSKLTLFGNKIKSVAKRAFSGLEGLEHLNLGGNAIRSVQFDAFVKMKNLKELHISSDSFLCDCQLKWLPPWLIGRMLQAFVTATCAHPESLKGQSIFSVPPESFVCDDFLKPQIITQPETTMAMVGKDIRFTCSAASSSSSPMTFAWKKDNEVLTNADMENFVHVHAQDGEVMEYTTILHLRQVTFGHEGRYQCVITNHFGSTYSHKARLTVNVLPSFTKTPHDITIRTTTMARLECAATGHPNPQIAWQKDGGTDFPAARERRMHVMPDDDVFFITDVKIDDAGVYSCTAQNSAGSISANATLTVLETPSLVVPLEDRVVSVGETVALQCKATGNPPPRITWFKGDRPLSLTERHHLTPDNQLLVVQNVVAEDAGRYTCEMSNTLGTERAHSQLSVLPAAGCRKDGTTVGIFTIAVVSSIVLTSLVWVCIIYQTRKKSEEYSVTNTDETVVPPDVPSYLSSQGTLSDRQETVVRTEGGPQANGHIESNGVCPRDASHFPEPDTHSVACRQPKLCAGSAYHKEPWKAMEKAEGTPGPHKMEHGGRVVCSDCNTEVDCYSRGQAFHPQPVSRDSAQPSAPNGPEPGGSDQEHSPHHQCSRTAAGSCPECQGSLYPSNHDRMLTAVKKKPMASLDGKGDSSWTLARLYHPDSTELQPASSLTSGSPERAEAQYLLVSNGHLPKACDASPESTPLTGQLPGKQRVPLLLAPKS

SEQ ID NO: 21424 - protein, 1070 aa, Homo sapiens
MARPVRGGLGAPRRSPCLLLLWLLLLRLEPVTAAAGPRAPCAAACTCAGDSLDCGGRGLAALPGDLPSWTRSLNLSYNKLSEIDPAGFEDLPNLQEVYLNNNELTAVPSLGAASSHVVSLFLQHNKIRSVEGSQLKAYLSLEVLDLSLNNITEVRNTCFPHGPPIKELNLAGNRIGTLELGAFDGLSRSLLTLRLSKNRITQLPVRAFKLPRLTQLDLNRNRIRLIEGLTFQGLNSLEVLKLQRNNISKLTDGAFWGLSKMHVLHLEYNSLVEVNSGSLYGLTALHQLHLSNNSIARIHRKGWSFCQKLHELVLSFNNLTRLDEESLAELSSLSVLRLSHNSISHIAEGAFKGLRSLRVLDLDHNEISGTIEDTSGAFSGLDSLSKLLLLEPSQSAGCSSPSQPHMSAGGRTLFGNKIKSVAKRAFSGLEGLEHLNLGGNAIRSVQFDAFVKMKNLKELHISSDSFLCDCQLKWLPPWLIGRMLQAFVTATCAHPESLKGQSIFSVPPESFVCDDFLKPQIITQPETTMAMVGKDIRFTCSAASSSSSPMTFAWKKDNEVLTNADMENFVHVHAQDGEVMEYTTILHLRQVTFGHEGRYQCVITNHFGSTYSHKARLTVNVLPSFTKTPHDITIRTTTMARLECAATGHPNPQIAWQKDGGTDFPAAQTPSLVVPLEDRVVSVGETVALQCKATGNPPPRITWFKGDRPLSLTERHHLTPDNQLLVVQNVVAEDAGRYTCEMSNTLGTERAHSQLSVLPAAGCRKDGTTVGIFTIAVVSSIVLTSLVWVCIIYQTRKKSEEYSVTNTDETVVPPDVPSYLSSQGTLSDRQETVVRTEGGPQANGHIESNGVCPRDASHFPEPDTHSVACRQPKLCAGSAYHKEPWKAMEKAEGTPGPHKMEHGGRVVCSDCNTEVDCYSRGQAFHPQPVSRDSAQPSAPNGPEPGGSDQEHSPHHQCSRTAAGSCPECQGSLYPSNHDRMLTAVKKKPMASLDGKGDSSWTLARLYHPDSTELQPASSLTSGSPERAEAQYLLVSNGHLPKACDASPESTPLTGQLPGKQRVPLLLAPKS

SEQ ID NO: 21425 - protein, 365 aa, Homo sapiens
MAVMAPRTLLLLLSGALALTQTWAGSHSMRYFFTSVSRPGRGEPRFIAVGYVDDTQFVRFDSDAASQRMEPRAPWIEQEGPEYWDQETRNVKAQSQTDRVDLGTLRGYYNQSEAGSHTIQIMYGCDVGSDGRFLRGYRQDAYDGKDYIALNEDLRSWTAADMAAQITKRKWEAAHEAEQLRAYLDGTCVEWLRRYLENGKETLQRTDPPKTHMTHHPISDHEATLRCWALGFYPAEITLTWQRDGEDQTQDTELVETRPAGDGTFQKWAAVVVPSGEEQRYTCHVQHEGLPKPLTLRWELSSQPTIPIVGIIAGLVLLGAVITGAVVAAVMWRRKSSDRKGGSYTQAASSDSAQGSDVSLTACKV

SEQ ID NO: 21426 - protein, 371 aa, Homo sapiens
MAVMAPRTLLLLLSGALALTQTWAGSHSMRYFFTSVSRPGRGEPRFIAVGYVDDTQFVRFDSDAASQRMEPRAPWIEQEGPEYWDQETRNVKAQSQTDRVDLGTLRGYYNQSEAGSHTIQIMYGCDVGSDGRFLRGYRQDAYDGKDYIALNEDLRSWTAADMAAQITKRKWEAAHAAEQQRAYLEGRCVEWLRRYLENGKETLQRTDPPKTHMTHHPISDHEATLRCWALGFYPAEITLTWQRDGEDQTQDTELVETRPAGDGTFQKWAAVVVPSGEEQRYTCHVQHEGLPKPLTLRWELSSQPTIPIVGIIAGLVLLGAVITGAVVAAVMWRRKSSGGEGVKDRKGGSYTQAASSDSAQGSDVSLTACKV

SEQ ID NO: 21427 - protein, 499 aa, Homo sapiens
MTLILTSLLFFGLSLGPRTRVQAENLPKPILWAEPGPVITWHNPVTIWCQGTLEAQGYRLDKEGNSMSRHILKTLESENKVKLSIPSMMWEHAGRYHCYYQSPAGWSEPSDPLELVVTAYSRPTLSALPSPVVTSGVNVTLRCASRLGLGRFTLIEEGDHRLSWTLNSHQHNHGKFQALFPMGPLTFSNRGTFRCYGYENNTPYVWSEPSDPLQLLVSGVSRKPSLLTLQGPVVTPGENLTLQCGSDVGYIRYTLYKEGADGLPQRPGRQPQAGLSQANFTLSPVSRSYGGQYRCYGAHNVSSEWSAPSDPLDILIAGQISDRPSLSVQPGPTVTSGEKVTLLCQSWDPMFTFLLTKEGAAHPPLRLRSMYGAHKYQAEFPMSPVTSAHAGTYRCYGSRSSNPYLLSHPSEPLELVVSGATETLNPAQKKSDSKTAPHLQDYTVENLIRMGVAGLVLLFLGILLFEAQHSQRSPPRCSQEANSRKDNAPFRVVEPWEQI

SEQ ID NO: 21428 - protein, 433 aa, Homo sapiens
MSRHILKTLESENKVKLSIPSMMWEHAGRYHCYYQSPAGWSEPSDPLELVVTAYSRPTLSALPSPVVTSGVNVTLRCASRLGLGRFTLIEEGDHRLSWTLNSHQHNHGKFQALFPMGPLTFSNRGTFRCYGYENNTPYVWSEPSDPLQLLVSGVSRKPSLLTLQGPVVTPGENLTLQCGSDVGYIRYTLYKEGADGLPQRPGRQPQAGLSQANFTLSPVSRSYGGQYRCYGAHNVSSEWSAPSDPLDILIAGQISDRPSLSVQPGPTVTSGEKVTLLCQSWDPMFTFLLTKEGAAHPPLRLRSMYGAHKYQAEFPMSPVTSAHAGTYRCYGSRSSNPYLLSHPSEPLELVVSGATETLNPAQKKSDSKTAPHLQDYTVENLIRMGVAGLVLLFLGILLFEAQHSQRSPPRCSQEANSRKDNAPFRVVEPWEQI

SEQ ID NO: 21429 - protein, 209 aa, Homo sapiens
MGKGDPNKPRGKMSSYAFFVQTCREEHKKKHPDSSVNFAEFSKKCSERWKTMSAKEKSKFEDMAKSDKARYDREMKNYVPPKGDKKGKKKDPNAPKRPPSAFFLFCSEHRPKIKSEHPGLSIGDTAKKLGEMWSEQSAKDKQPYEQKAAKLKEKYEKDIAAYRAKGKSEAGKKGPGRPTGSKKKNEPEDEEEEEEEEDEDEEEEDEDEE

SEQ ID NO: 21430 - protein, 481 aa, Homo sapiens
MTPALTALLCLGLSLGPRTRVQAGPFPKPTLWAEPGSVISWGSPVTIWCQGSLEAQEYQLDKEGSPEPLDRNNPLEPKNKARFSIPSMTQHHAGRYRCHYYSSAGWSEPSDPLELVMTGFYNKPTLSALPSPVVASGGNMTLRCGSQKGYHHFVLMKEGEHQLPRTLDSQQLHSGGFQALFPVGPVTPSHRWRFTCYYYYTNTPRVWSHPSDPLEILPSGVSRKPSLLTLQGPVLAPGQSLTLQCGSDVGYDRFVLYKEGERDFLQRPGQQPQAGLSQANFTLGPVSPSHGGQYRCYGAHNLSSEWSAPSDPLNILMAGQIYDTVSLSAQPGPTVASGENVTLLCQSRGYFDTFLLTKEGAAHPPLRLRSMYGAHKYQAEFPMSPVTSAHAGTYRCYGSYSSNPHLLSFPSEPLELMVSGHSGGSSLPPTGPPSTPASHAKDYTVENLIRMGMAGLVLVFLGILLFEAQHSQRNPQDAAGR

SEQ ID NO: 21431 - protein, 193 aa, Homo sapiens
MTPALTALLCLGLSLGPRTRVQAGPFPKPTLWAEPGSVISWGSPVTIWCQGSLEAQEYQLDKEGSPEPLDRNNPLEPKNKARFSIPSMTQHHAGRYRCHYYSSAGWSEPSDPLELVMTGFYNKPTLSALPSPVVASGGNMTLRCGSQKGYHHFVLMKEGEHQLPRTLDSQQLHSGGFQALFPVGPVTPSHRRV

SEQ ID NO: 21432 - protein, 100 aa, Homo sapiens
MPKRKVSSAEGAAKEEPKRRSARLSAKPPAKVEAKPKKAAAKDKSSDKKVQTKGKRGAKGKQAEVANQETKEDLPAENGETKTEESPASDEAGEKEAKSD

SEQ ID NO: 21433 - protein, 90 aa, Homo sapiens
MPKRKAEGDAKGDKAKVKDEPQRRSARLSAKPAPPKPEPKPKKAPAKKGEKVPKGKKGKADAGKEGNNPAENGDAKTDQAQKAEGAGDAK

SEQ ID NO: 21434 - protein, 90 aa, Homo sapiens
MPKRKAKGDAKGDKAKVKDEPQRRSARLSAKPAPPKPEPRPKKASAKKGEKLPKGRKGKADAGKDGNNPAKNRDASTLQSQKAEGTGDAK

SEQ ID NO: 21435 - protein, 282 aa, Homo sapiens
MPKRKAAGQGDMRQEPKRRSARLSAMLVPVTPEVKPKRTSSSRKMKTKSDMMEENIDTSAQAVAETKQEAVVEEDYNENAKNGEAKITEAPASEKEIVEVKEENIEDATEKGGEKKEAVAAEVKNEEEDQKEDEEDQNEEKGEAGKEDKDEKGEEDGKEDKNGNEKGEDAKEKEDGKKGEDGKGNGEDGKEKGEDEKEEEDRKETGDGKENEDGKEKGDKKEGKDVKVKEDEKEREDGKEDEGGNEEEAGKEKEDLKEEEEGKEEDEIKEDDGKKEEPQSIV

SEQ ID NO: 21436 - protein, 431 aa, Homo sapiens
MSVNVNRSVSDQFYRYKMPRLIAKVEGKGNGIKTVIVNMVDVAKALNRPPTYPTKYFGCELGAQTQFDVKNDRYIVNGSHEANKLQDMLDGFIKKFVLCPECENPETDLHVNPKKQTIGNSCKACGYRGMLDTHHKLCTFILKNPPENSDSGTGKKEKEKKNRKGKDKENGSVSSSETPPPPPPPNEINPPPHTMEEEEDDDWGEDTTEEAQRRRMDEISDHAKVLTLSDDLERTIEERVNILFDFVKKKKEEGVIDSSDKEIVAEAERLDVKAMGPLVLTEVLFNEKIREQIKKYRRHFLRFCHNNKKAQRYLLHGLECVVAMHQAQLISKIPHILKEMYDADLLEEEVIISWSEKASKKYVSKELAKEIRVKAEPFIKWLKEAEEESSGGEEEDEDENIEVVYSKAASVPKVETVKSDNKDDDIDIDAI

SEQ ID NO: 21437 - protein, 245 aa, Homo sapiens
MAVRASFENNCEIGCFAKLTNTYCLVAIGGSENFYSVFEGELSDTIPVVHASIAGCRIIGRMCVGNRHGLLVPNNTTDQELQHIRNSLPDTVQIRRVEERLSALGNVTTCNDYVALVHPDLDRETEEILADVLKVEVFRQTVADQVLVGSYCVFSNQGGLVHPKTSIEDQDELSSLLQVPLVAGTVNRGSEVIAAGMVVNDWCAFCGLDTTSTELSVVESVFKLNEAQPSTIATSMRDSLIDSLT

SEQ ID NO: 21438 - protein, 226 aa, Homo sapiens
MAVRASFENNCEIGCFAKLTNTYCLVAIGGSENFYRCGGSPGAYGGGEACAGVKSSGSGRVPAPLPRHHRVHVPTVCSRASSPIPSPWCTRLSPAAASSGACVWETEEILADVLKVEVFRQTVADQVLVGSYCVFSNQGGLVHPKTSIEDQDELSSLLQVPLVAGTVNRGSEVIAAGMVVNDWCAFCGLDTTSTELSVVESVFKLNEAQPSTIATSMRDSLIDSLT

SEQ ID NO: 21439 - protein, 1019 aa, Homo sapiens [sequence omitted]

SEQ ID NO: 21440 - protein, 464 aa, Homo sapiens
MSKLWFKQDDKFFLPKACLNFEFFSPFAYVDPLHCNMAYLYLELLKDSLNEYAYAAELAGLSYDLQNTIYGMYLSVKGYNDKQPILLKKIIEKMATFEIDEKRFEIIKEAYMRSLNNFRAEQPHQHAMYYLRLLMTEVAWTKDELKEALDDVTLPRLKAFIPQLLSRLHIEALLHGNITKQAALGIMQMVEDTLIEHAHTKPLLPSQLVRYREVQLPDRGWFVYQQRNEVHNNCGIEIYYQTDMQSTSENMFLELFCQIISEPCFNTLRTKEQLGYIVFSGPRRANGIQGLRFIIQSEKPPHYLESRVEAFLITMEKSIEDMTEEAFQKHIQALAIRRLDKPKKLSAECAKYWGEIISQQYNFDRDNTEVAYLKTLTKEDIIKFYKEMLAVDAPRRHKVSVHVLAREMDSCPVVGEFPCQNDINLSQAPALPQPEVIQNMTEFKRGLPLFPLVKPHINFMAAKL

SEQ ID NO: 21441 - protein, 713 aa, Homo sapiens
MLLATLLLLLLGGALAHPDRIIFPNHACEDPPAVLLEVQGTLQRPLVRDSRTSPANCTWLILGSKEQTVTIRFQKLHLACGSERLTLRSPLQPLISLCEAPPSPLQLPGGNVTITYSYAGARAPMGQGFLLSYSQDWLMCLQEEFQCLNHRCVSAVQRCDGVDACGDGSDEAGCSSDPFPGLTPRPVPSLPCNVTLEDFYGVFSSPGYTHLASVSHPQSCHWLLDPHDGRRLAVRFTALDLGFGDAVHVYDGPGPPESSRLLRSLTHFSNGKAVTVETLSGQAVVSYHTVAWSNGRGFNATYHVRGYCLPWDRPCGLGSGLGAGEGLGERCYSEAQRCDGSWDCADGTDEEDCPGCPPGHFPCGAAGTSGATACYLPADRCNYQTFCADGADERRCRHCQPGNFRCRDEKCVYETWVCDGQPDCADGSDEWDCSYVLPRKVITAAVIGSLVCGLLLVIALGCTCKLYAIRTQEYSIFAPLSRMEAEIVQQQAPPSYGQLIAQGAIPPVEDFPTENPNDNSVLGNLRSLLQILRQDMTPGGGPGARRRQRGRLMRRLVRRLRRWGLLPRTNTPARASEARSQVTPSAAPLEALDGGTGPAREGGAVGGQDGEQAPPLPIKAPLPSASTSPAPTTVPEAPGPLPSLPLEPSLLSGVVQALRGRLLPSLGPPGPTRSPPGPHTAVLALEDEDDVLLVPLAEPGVWVAEAEDEPLLT

SEQ ID NO: 21442 - protein, 556 aa, Homo sapiens
MLLATLLLLLLGGALAHPDRIIFPNHACEDPPAVLLEVQGTLQRPLVRDSRTSPANCTWLILGSKEQTVTIRFQKLHLACGSERLTLRSPLQPLISLCEAPPSPLQLPGGNVTITYSYAGARAPMGQGFLLSYSQDWLMCLQEEFQCLNHRCVSAVQRCDGVDACGDGSDEAGCSSDPFPGLTPRPVPSLPCNVTLEDFYGVFSSPGYTHLASVSHPQSCHWLLDPHDGRRLAVRFTALDLGFGDAVHVYDGPGPPESSRLLRSLTHFSNGKAVTVETLSGQAVVSYHTVAWSNGRGFNATYHVRGYCLPWDRPCGLGSGLGAGEGLGERCYSEAQRCDGSWDCADGTDEEDCPGCPPGHFPCGAAGTSGATACYLPADRCNYQTFCADGADERRCRHCQPGNFRCRDEKCVYETWVCDGQPDCADGSDEWDCSYVLPRKVITAAVIGSLVCGLLLVIALGCTCKLYAIRTQEYSIFAPLSRMEAEIVQQQAPPSYGQLIAQGAIPPVEDFPTENPNDNSVLGNLRSLLQILRQDMTPGGGPGARRRQRGRLMRRL

SEQ ID NO: 21443 - protein, 428 aa, Homo sapiens
ASTQSPSVFPLTRCCKNIPSNATSVTLGCLATGYFPEPVMVTWDTGSLNGTTMTLPATTLTLSGHYATISLLTVSGAWAKQMFTCRVAHTPSSTDWVDNKTFSVCSRDFTPPTVKILQSSCDGGGHFPPTIQLLCLVSGYTPGTINITWLEDGQVMDVDLSTASTTQEGELASTQSELTLSQKHWLSDRTYTCQVTYQGHTFEDSTKKCADSNPRGVSAYLSRPSPFDLFIRKSPTITCLVVDLAPSKGTVNLTWSRASGKPVNHSTRKEEKQRNGTLTVTSTLPVGTRDWIEGETYQCRVTHPHLPRALMRSTTKTSGPRAAPEVYAFATPEWPGSRDKRTLACLIQNFMPEDISVQWLHNEVQLPDARHSTTQPRKTKGSGFFVFSRLEVTRAEWEQKDEFICRAVHEAASPSQTVQRAVSVNPGK

SEQ ID NO: 21444 - protein, 237 aa, Homo sapiens
MSFLKSFPPPGPAEGLLRQQPDTEAVLNGKGLGTGTLYIAESRLSWLDGSGLGFSLEYPTISLHALSRDRSDCLGEHLYVMVNAKFEEESKEPVADEEEEDSDDDVEPITEFRFVPSDKSALEAMFTAMCECQALHPDPEDEDSDDYDGEEYDVEAHEQGQGDIPTFYTYEEGLSHLTAEGQATLERLEGMLSQSVSSQYNMAGVRTEDSIRDYEDGMEVDTTPTVAGQFEDADVDH

SEQ ID NO: 21445 - protein, 53 aa, Homo sapiens
MCSYYHMKKRSVSGCNITIFAVMFSHLSAGKSPCGNQANVLCISRLEFVQYQS

SEQ ID NO: 21446 - protein, 4544 aa, Homo sapiens
MLTPPLLLLLPLLSALVAAAIDAPKTCSPKQFACRDQITCISKGWRCDGERDCPDGSDEAPEICPQSKAQRCQPNEHNCLGTELCVPMSRLCNGVQDCMDGSDEGPHCRELQGNCSRLGCQHHCVPTLDGPTCYCNSSFQLQADGKTCKDFDECSVYGTCSQLCTNTDGSFICGCVEGYLLQPDNRSCKAKNEPVDRPPVLLIANSQNILATYLSGAQVSTITPTSTRQTTAMDFSYANETVCWVHVGDSAAQTQLKCARMPGLKGFVDEHTINISLSLHHVEQMAIDWLTGNFYFVDDIDDRIFVCNRNGDTCVTLLDLELYNPKGIALDPAMGKVFFTDYGQIPKVERCDMDGQNRTKLVDSKIVFPHGITLDLVSRLVYWADAYLDYIEVVDYEGKGRQTIIQGILIEHLYGLTVFENYLYATNSDNANAQQKTSVIRVNRFNSTEYQVVTRVDKGGALHIYHQRRQPRVRSHACENDQYGKPGGCSDICLLANSHKARTCRCRSGFSLGSDGKSCKKPEHELFLVYGKGRPGIIRGMDMGAKVPDEHMIPIENLMNPRALDFHAETGFIYFADTTSYLIGRQKIDGTERETILKDGIHNVEGVAVDWMGDNLYWTDDGPKKTISVARLEKAAQTRKTLIEGKMTHPRAIVVDPLNGWMYWTDWEEDPKDSRRGRLERAWMDGSHRDIFVTSKTVLWPNGLSLDIPAGRLYWVDAFYDRIETILLNGTDRKIVYEGPELNHAFGLCHHGNYLFWTEYRSGSVYRLERGVGGAPPTVTLLRSERPPIFEIRMYDAQQQQVGTNKCRVNNGGCSSLCLATPGSRQCACAEDQVLDADGVTCLANPSYVPPPQCQPGEFACANSRCIQERWKCDGDNDCLDNSDEAPALCHQHTCPSDRFKCENNRCIPNRWLCDGDNDCGNSEDESNATCSARTCPPNQFSCASGRCIPISWTCDLDDDCGDRSDESASCAYPTCFPLTQFTCNNGRCININWRCDNDNDCGDNSDEAGCSHSCSSTQFKCNSGRCIPEHWTCDGDNDCGDYSDETHANCTNQATRPPGGCHTDEFQCRLDGLCIPLRWRCDGDTDCMDSSDEKSCEGVTHVCDPSVKFGCKDSARCISKAWVCDGDNDCEDNSDEENCESLACRPPSHPCANNTSVCLPPDKLCDGNDDCGDGSDEGELCDQCSLNNGGCSHNCSVAPGEGIVCSCPLGMELGPDNHTCQIQSYCAKHLKCSQKCDQNKFSVKCSCYEGWVLEPDGESCRSLDPFKPFIIFSNRHEIRRIDLHKGDYSVLVPGLRNTIALDFHLSQSALYWTDVVEDKIYRGKLLDNGALTSFEVVIQYGLATPEGLAVDWIAGNIYWVESNLDQIEVAKLDGTLRTTLLAGDIEHPRAIALDPRDGILFWTDWDASLPRIEAASMSGAGRRTVHRETGSGGWPNGLTVDYLEKRILWIDARSDAIYSARYDGSGHMEVLRGHEFLSHPFAVTLYGGEVYWTDWRTNTLAKANKWTGHNVTVVQRTNTQPFDLQVYHPSRQPMAPNPCEANGGQGPCSHLCLINYNRTVSCACPHLMKLHKDNTTCYEFKKFLLYARQMEIRGVDLDAPYYNYIISFTVPDIDNVTVLDYDAREQRVYWSDVRTQAIKRAFINGTGVETVVSADLPNAHGLAVDWVSRNLFWTSYDTNKKQINVARLDGSFKNAVVQGLEQPHGLVVHPLRGKLYWTDGDNISMANMDGSNRTLLFSGQKGPVGLAIDFPESKLYWISSGNHTINRCNLDGSGLEVIDAMRSQLGKATALAIMGDKLWWADQVSEKMGTCSKADGSGSVVLRNSTTLVMHMKVYDESIQLDHKGTNPCSVNNGDCSQLCLPTSETTRSCMCTAGYSLRSGQQACEGVGSFLLYSVHEGIRGIPLDPNDKSDALVPVSGTSLAVGIDFHAENDTIYWVDMGLSTISRAKRDQTWREDVVTNGIGRVEGIAVDWIAGNIYWTDQGFDVIEVARLNGSFRYVVISQGLDKPRAITVHPEKGYLFWTEWGQYPRIERSRLDGTERVVLVNVSISWPNGISVDYQDGKLYWCDARTDKIERIDLETGENREVVLSSNNMDMFSVSVFEDFIYWSDRTHANGSIKRGSKDNATDSVPLRTGIGVQLKDIKVFNRDRQKGTNVCAVANGGCQQLCLYRGRGQRACACAHGMLAEDGASCREYAGYLLYSERTILKSIHLSDERNLNAPVQPFEDPEHMKNVIALAFDYRAGTSPGTPNRIFFSDIHFGNIQQINDDGSRRITIVENVGSVEGLAYHRGWDTLYWTSYTTSTITRHTVDQTRPGAFERETVITMSGDDHPRAFVLDECQNLMFWTNWNEQHPSIMRAALSGANVLTLIEKDIRTPNGLAIDHRAEKLYFSDATLDKIERCEYDGSHRYVILKSEPVHPFGLAVYGEHIFWTDWVRRAVQRANKHVGSNMKLLRVDIPQQPMGIIAVANDTNSCELSPCRINNGGCQDLCLLTHQGHVNCSCRGGRILQDDLTCRAVNSSCRAQDEFECANGECINFSLTCDGVPHCKDKSDEKPSYCNSRRCKKTFRQCSNGRCVSNMLWCNGADDCGDGSDEIPCNKTACGVGEFRCRDGTCIGNSSRCNQFVDCEDASDEMNCSATDCSSYFRLGVKGVLFQPCERTSLCYAPSWVCDGANDCGDYSDERDCPGVKRPRCPLNYFACPSGRCIPMSWTCDKEDDCEHGEDETHCNKFCSEAQFECQNHRCISKQWLCDGSDDCGDGSDEAAHCEGKTCGPSSFSCPGTHVCVPERWLCDGDKDCADGADESIAAGCLYNSTCDDREFMCQNRQCIPKHFVCDHDRDCADGSDESPECEYPTCGPSEFRCANGRCLSSRQWECDGENDCHDQSDEAPKNPHCTSQEHKCNASSQFLCSSGRCVAEALLCNGQDDCGDSSDERGCHINECLSRKLSGCSQDCEDLKIGFKCRCRPGFRLKDDGRTCADVDECSTTFPCSQRCINTHGSYKCLCVEGYAPRGGDPHSCKAVTDEEPFLIFANRYYLRKLNLDGSNYTLLKQGLNNAVALDFDYREQMIYWTDVTTQGSMIRRMHLNGSNVQVLHRTGLSNPDGLAVDWVGGNLYWCDKGRDTIEVSKLNGAYRTVLVSSGLREPRALVVDVQNGYLYWTDWGDHSLIGRIGMDGSSRSVIVDTKITWPNGLTLDYVTERIYWADAREDYIEFASLDGSNRHVVLSQDIPHIFALTLFEDYVYWTDWETKSINRAHKTTGTNKTLLISTLHRPMDLHVFHALRQPDVPNHPCKVNNGGCSNLCLLSPGGGHKCACPTNFYLGSDGRTCVSNCTASQFVCKNDKCIPFWWKCDTEDDCGDHSDEPPDCPEFKCRPGQFQCSTGICTNPAFICDGDNDCQDNSDEANCDIHVCLPSQFKCTNTNRCIPGIFRCNGQDNCGDGEDERDCPEVTCAPNQFQCSITKRCIPRVWVCDRDNDCVDGSDEPANCTQMTCGVDEFRCKDSGRCIPARWKCDGEDDCGDGSDEPKEECDERTCEPYQFRCKNNRCVPGRWQCDYDNDCGDNSDEESCTPRPCSESEFSCANGRCIAGRWKCDGDHDCADGSDEKDCTPRCDMDQFQCKSGHCIPLRWRCDADADCMDGSDEEACGTGVRTCPLDEFQCNNTLCKPLAWKCDGEDDCGDNSDENPEECARFVCPPNRPFRCKNDRVCLWIGRQCDGTDNCGDGTDEEDCEPPTAHTTHCKDKKEFLCRNQRCLSSSLRCNMFDDCGDGSDEEDCSIDPKLTSCATNASICGDEARCVRTEKAAYCACRSGFHTVPGQPGCQDINECLRFGTCSQLCNNTKGGHLCSCARNFMKTHNTCKAEGSEYQVLYIADDNEIRSLFPGHPHSAYEQAFQGDESVRIDAMDVHVKAGRVYWTNWHTGTISYRSLPPAAPPTTSNRHRRQIDRGVTHLNISGLKMPRGIAIDWVAGNVYWTDSGRDVIEVAQMKGENRKTLISGMIDEPHAIVVDPLRGTMYWSDWGNHPKIETAAMDGTLRETLVQDNIQWPTGLAVDYHNERLYWADAKLSVIGSIRLNGTDPIVAADSKRGLSHPFSIDVFEDYIYGVTYINNRVFKIHKFGHSPLVNLTGGLSHASDVVLYHQHKQPEVTNPCDRKKCEWLCLLSPSGPVCTCPNGKRLDNGTCVPVPSPTPPPDAPRPGTCNLQCFNGGSCFLNARRQPKCRCQPRYTGDKCELDQCWEHCRNGGTCAASPSGMPTCRCPTGFTGPKCTQQVCAGYCANNSTCTVNQGNQPQCRCLPGFLGDRCQYRQCSGYCENFGTCQMAADGSRQCRCTAYFEGSRCEVNKCSRCLEGACVVNKQSGDVTCNCTDGRVAPSCLTCVGHCSNGGSCTMNSKMMPECQCPPHMTGPRCEEHVFSQQQPGHIASILIPLLLLLLLVLVAGVVFWYKRRVQGAKGFQHQRMTNGAMNVEIGNPTYKMYEGGEPDDVGGLLDADFALDPDKPTNFTNPVYATLYMGGHGSRHSLASTDEKRELLGRGPEDEIGDPLA

SEQ ID NO: 21447 - protein, 292 aa, Homo sapiens
MLTPPLLLLLPLLSALVAAAIDAPKTCSPKQFACRDQITCISKGWRCDGERDCPDGSDEAPEICPQSKAQRCQPNEHNCLGTELCVPMSRLCNGVQDCMDGSDEGPHCRELQGNCSRLGCQHHCVPTLDGPTCYCNSSFQLQADGKTCKDFDECSVYGTCSQLCTNTDGSFICGCVEGYLLQPDNRSCKAKNEPVDRPPVLLIANSQNILATYLSGAQVSTITPTSTRQTTAMDFSYANETVCWVHVGDSAAQTQLKCARMPGLKGFVDEHTINISLSLHLCVFSKSQQEMG

SEQ ID NO: 21448 - protein, 143 aa, Homo sapiens
MATPLDNCLRPFPDPMVKVTAETKKISEVSSYVSANNKKNSFWGSGLLYPVALLRCQDCWAGHQTHVLSKEFTSYFSSGAGREAQHQPSAVLGSLIWLRRVYLLRAMVVHGGSQPCQRWLVIRMEVGGHPSFPGHAWLTFHLN

SEQ ID NO: 21449 - protein, 189 aa, Homo sapiens
MASPFALLMVLVVLSCKSSCSLGCDLPETHSLDNRRTLMLLAQMSRISPSSCLMDRHDFGFPQEEFDGNQFQKAPAISVLHELIQQIFNLFTTKDSSAAWDEDLLDKFCTELYQQLNDLEACVMQEERVGETPLMNADSILAVKKYFRRITLYLTEKKYSPCAWEVVRAEIMRSLSLSTNLQERLRRKE

SEQ ID NO: 21450 - protein, 555 aa, Homo sapiens
MTLRAAVFDLDGVLALPAVFGVLGRTEEALALPRGLLNDAFQKGGPEGATTRLMKGEITLSQWIPLMEENCRKCSETAKVCLPKNFSIKEIFDKAISARKINRPMLQAALMLRKKGFTTAILTNTWLDDRAERDGLAQLMCELKMHFDFLIESCQVGMVKPEPQIYKFLLDTLKASPSEVVFLDDIGANLKPARDLGMVTILVQDTDTALKELEKVTGIQLLNTPAPLPTSCNPSDMSHGYVTVKPRVRLHFVELGSGPAVCLCHGFPESWYSWRYQIPALAQAGYRVLAMDMKGYGESSAPPEIEEYCMEVLCKEMVTFLDKLGLSQAVFIGHDWGGMLVWYMALFYPERVRAVASLNTPFIPANPNMSPLESIKANPVFDYQLYFQEPGVAEAELEQNLSRTFKSLFRASDESVLSMHKVCEAGGLFVNSPEEPSLSRMVTEEEIQFYVQQFKKSGFRGPLNWYRNMERNWKWACKSLGRKILIPALMVTAEKDFVLVPQMSQHMEDWIPHLKRGHIEDCGHWTQMDKPTEVNQILIKWLDSDARNPPVVSKM

SEQ ID NO: 21451 - protein, 502 aa, Homo sapiens
MKGEITLSQWIPLMEENCRKCSETAKVCLPKNFSIKEIFDKAISARKINRPMLQAALMLRKKGFTTAILTNTWLDDRAERDGLAQLMCELKMHFDFLIESCQVGMVKPEPQIYKFLLDTLKASPSEVVFLDDIGANLKPARDLGMVTILVQDTDTALKELEKVTGIQLLNTPAPLPTSCNPSDMSHGYVTVKPRVRLHFVELGSGPAVCLCHGFPESWYSWRYQIPALAQAGYRVLAMDMKGYGESSAPPEIEEYCMEVLCKEMVTFLDKLGLSQAVFIGHDWGGMLVWYMALFYPERVRAVASLNTPFIPANPNMSPLESIKANPVFDYQLYFQEPGVAEAELEQNLSRTFKSLFRASDESVLSMHKVCEAGGLFVNSPEEPSLSRMVTEEEIQFYVQQFKKSGFRGPLNWYRNMERNWKWACKSLGRKILIPALMVTAEKDFVLVPQMSQHMEDWIPHLKRGHIEDCGHWTQMDKPTEVNQILIKWLDSDARNPPVVSKM

SEQ ID NO: 21452 - protein, 489 aa, Homo sapiens
MEENCRKCSETAKVCLPKNFSIKEIFDKAISARKINRPMLQAALMLRKKGFTTAILTNTWLDDRAERDGLAQLMCELKMHFDFLIESCQVGMVKPEPQIYKFLLDTLKASPSEVVFLDDIGANLKPARDLGMVTILVQDTDTALKELEKVTGIQLLNTPAPLPTSCNPSDMSHGYVTVKPRVRLHFVELGSGPAVCLCHGFPESWYSWRYQIPALAQAGYRVLAMDMKGYGESSAPPEIEEYCMEVLCKEMVTFLDKLGLSQAVFIGHDWGGMLVWYMALFYPERVRAVASLNTPFIPANPNMSPLESIKANPVFDYQLYFQEPGVAEAELEQNLSRTFKSLFRASDESVLSMHKVCEAGGLFVNSPEEPSLSRMVTEEEIQFYVQQFKKSGFRGPLNWYRNMERNWKWACKSLGRKILIPALMVTAEKDFVLVPQMSQHMEDWIPHLKRGHIEDCGHWTQMDKPTEVNQILIKWLDSDARNPPVVSKM

SEQ ID NO: 21453 - protein, 208 aa, Homo sapiens
MEDLLDLDEELRYSLATSRAKMGRRAQQESAQAENHLNGKNSSLTLTGETSSAKLPRCRQGGWAGDSVKASKFRRKASEEIEDFRLRPQSLNGSDYGGDIPIIPDLEEVQEEDFVLQVAAPPSIQIKRVMTYRDLDNDLMKYSAIQTLDGEIDLKLLTKVLAPEHEVREDDVGWDWDHLFTEVSSEVLTEWDPLQTEKEDPAGQARHT

SEQ ID NO: 21454 - protein, 213 aa, Homo sapiens
MEDLLDLDEELRYSLATSRAKMGRRAQQESAQAENHLNGKNSSLTLTGETSSAKLPRCRQGGWAGDSVKASNGTQTGKQQLDLNACYHKTHHRDLGLASLEEADIPIIPDLEEVQEEDFVLQVAAPPSIQIKRVMTYRDLDNDLMKYSAIQTLDGEIDLKLLTKVLAPEHEVREDDVGWDWDHLFTEVSSEVLTEWDPLQTEKEDPAGQARHT

SEQ ID NO: 21455 - protein, 109 aa, Homo sapiens
MEDLLDLDEELRYSLATSRAKMGRRAQQESAQAENHLNGKNSSLTLTGETSSAKLPRCRQGGWAGDSVKASKFRRKASEEIEDFRLRPQSLNGSDYGGAVPKQANNSWI

SEQ ID NO: 21456 - protein, 113 aa, Homo sapiens
MEDLLDLDEELRYSLATSRAKMGRRAQQESAQAENHLNGKNSSLTLTGETSSAKLPRCRQGGWAGDSVKASKFRRKASEEIEEYVSSILILMVSYVDLGQQCSLGGHDLFHLC

SEQ ID NO: 21457 - protein, 174 aa, Homo sapiens
MAAAAELSLLEKSLGLSKGNKYSAQGERQIPVLQTNNGPSLTGLTTIAAHLVKQANKEYLLGSTAEEKAIVQQWLEYRVTQVDGHSSKNDIHTLLKDLNSYLEDKVYLTGYNFTLADILLYYGLHRFIVDLTVQEKEKYLNVSRWFCHIQHYPGIRQHLSSVVFIKNRLYTNSH

SEQ ID NO: 21458 - protein, 139 aa, Homo sapiens
MAAAAELSLLEKSLGLSKGNKYSAQGERQIPVLQTNNGPSLTGLTTIAAHLVKQANKEYLLGSTAEEKAIVQQWLEYRVTQVDGHSSKNDIHTLLKDLNSYLEDKVYLTGYNFTLADILLYYGLHRFIIRKLRHTEVGN

SEQ ID NO: 21459 - protein, 275 aa, Homo sapiens
MTSAGVFNAGSDERANSRDEEYPCSSEVSPSTESSCSNFINIKVGLLEQFLLYKFKMKQRILKEDMLKIVNPRYQNQFAEIHRRASEHIEVVFAVDLKEVNPTCHLYDLVSKLKLPNNGRIHVGKVLPKTGLLMTFLVVIFLKGNCANKEDTWKFLDMMQIYDGKKYYIYGEPRKLITQDFVRLTYLEYHQVPCSYPAHYQFLWGPRAYTETSKMKVLEYLAKVNDIAPGAFSSQYEEALQDEEESPSQRCSRNWHYCSGQDCLRAKFSSFSQPY

SEQ ID NO: 21460 - protein, 407 aa, Homo sapiens
MPRGHKSKLRTCEKRQETNGQPQGLTGPQATAEKQEESHSSSSSSRACLGDCRRSSDASIPQESQGVSPTGSPDAVVSYSKSDVAANGQDEKSPSTSRDASVPQESQGASPTGSPDAGVSGSKYDVAANGQDEKSPSTSHDVSVPQESQGASPTGSPDAGVSGSKYDVAAEGEDEESVSASQKAIIFKRLSKDAVKKKACTLAQFLQKKFEKKESILKADMLKCVRREYKPYFPQILNRTSQHLVVAFGVELKEMDSSGESYTLVSKLGLPSEGILSGDNALPKSGLLMSLLVVIFMNGNCATEEEVWEFLGLLGIYDGILHSIYGDARKIITEDLVQDKYVVYRQVCNSDPPCYEFLWGPRAYAETTKMRVLRVLADSSNTSPGLYPHLYEDALIDEVERALRLRA

SEQ ID NO: 21461 - protein, 676 aa, Homo sapiens
MSDQIKFIMDSLNKEPFRKNYNLITFDSLEPMQLLQVLSDVLAEIDPKQLVDIREEMPEQTAKRMLSLLGILKYKPSGNATDMSTFRQGLVIGSKPVIYPVLHWLLQRTNELKKRAYLARFLIKLEVPSEFLQDETVADTNKQYEELMEAFKTLHKEYEQLKISGFSTAEIRKDISAMEEEKDQLIKRVEHLKKRVETAQNHQWMLKIARQLRVEKEREEYLAQQKQEQKNQLFHAVQRLQRVQNQLKSMRQAAADAKPESLMKRLEEEIKFNLYMVTEKFPKELENKKKELHFLQKVVSEPAMGHSDLLELESKINEINTEINQLIEKKMMRNEPIEGKLSLYRQQASIISRKKEAKAEELQEAKEKLASLEREASVKRNQTREFDGTEVLKGDEFKRYVNKLRSKSTVFKKKHQIIAELKAEFGLLQRTEELLKQRHENIQQQLQTMEEKKGISGYSYTQEELERVSALKSEVDEMKGRTLDDMSEMVKKLYSLVSEKKSALASVIKELRQLRQKYQELTQECDEKKSQYDSCAAGLESNRSKLEQEVRRLREECLQEESRYHYTNCMIKNLEVQLRRATDEMKAYISSDQQEKRKAIREQYTKNTAEQENLGKKLREKQKVIRESHGPNMKQAKMWRDLEQLMECKKQCFLKQQSQTSIGQVIQEGGEDRLIL

SEQ ID NO: 21462 - protein, 431 aa, Homo sapiens
MSDQIKFIMDSLNKEPFRKNYNLITFDSLEPMQLLQVLSDVLAEIDPKQLVDIREEMPEQTAKRMLSLLGILKYKPSGNATDMSTFRQGLVIGSKPVIYPVLHWLLQRTNELKKRAYLARFLIKLEVPSEFLQDETVADTNKQYEELMEAFKTLHKEYEQLKISGFSTAEIRKDISAMEEEKDQLIKRVEHLKKRVETAQNHQWMLKIARQLRVEKEREEYLAQQKQEQKNQLFHAVQRLQRVQNQLKSMRQAAADAKPESLMKRLEEEIKFNLYMVTEKFPKELENKKKELHFLQKVVSEPAMGHSDLLELESKINEINTEINQLIEKKMMRNEPIEGKLSLYRQQASIISRKKEAKAEELQEAKEKLASLEREASVKRNQTREFDGTEVLKGDERQDLTLSPRLECGGVIMAYCSLKLLGSSDPPTSAS

SEQ ID NO: 21463 - protein, 107 aa, Homo sapiens
MIKNLEVQLRRATDEMKAYISSDQQEKRKAIREQYTKNTAEQENLGKKLREKQKVIRESHGPNMKQAKMWRDLEQLMECKKQCFLKQQSQTSIGQVIQEGGEDRLIL

SEQ ID NO: 21464 - protein, 547 aa, Homo sapiens
MATMVPSVLWPRACWTLLVCCLLTPGVQGQEFLLRVEPQNPVLSAGGSLFVNCSTDCPSSEKIALETSLSKELVASGMGWAAFNLSNVTGNSRILCSVYCNGSQITGSSNITVYRLPERVELAPLPPWQPVGQNFTLRCQVEDGSPRTSLTVVLLRWEEELSRQPAVEEPAEVTATVLASRDDHGAPFSCRTELDMQPQGLGLFVNTSAPRQLRTFVLPVTPPRLVAPRFLEVETSWPVDCTLDGLFPASEAQVYLALGDQMLNATVMNHGDTLTATATATARADQEGAREIVCNVTLGGERREARENLTVFSFLGPIVNLSEPTAHEGSTVTVSCMAGARVQVTLDGVPAAAPGQPAQLQLNATESDDGRSFFCSATLEVDGEFLHRNSSVQLRVLYGPKIDRATCPQHLKWKDKTRHVLQCQARGNPYPELRCLKEGSSREVPVGIPFFVNVTHNGTYQCQASSSRGKYTLVVVMDIEAGSSHFVPVFVAVLLTLGVVTIVLALMYVFREHQRSGSYHVREESTYLPLTSMQPTEAMGEEPSRAE

SEQ ID NO: 21465 - protein, 221 aa, Homo sapiens
MSAHMSGLEIMDEDQLIKDVLDKFLNCHEQTYDEEFLNTFTHLSQEDHVSKRGVFGTDSSENIFTSAKVTHKNEADDYHLRNKTIFLRTSSQCLEEQVDNFLDLEDLDMDEEIKPQMSEDLLLLPGEVEQDVSTSIPSCIPFVAQPPTCEVKPKPSVKRMDKQTEEILGDEVQLFSLDEEFDYDNVMLTSKFSPAEIENIKELCKQQKRKDTSPDLEKSCD

SEQ ID NO: 21466 - protein, 147 aa, Homo sapiens
MSAHMSGLEIMDEDQLIKDVLDKFLNCHEQTYDEEFLNTFTHLSQDLLLLPGEVEQDVSTSIPSCIPFVAQPPTCEVKPKPSVKRMDKQTEEILGDEVQLFSLDEEFDYDNVMLTSKFSPAEIENIKELCKQQKRKDTSPDLEKSCD

SEQ ID NO: 21467 - protein, 271 aa, Homo sapiens
MGSLFPLSLLFFLAAAYPGVGSALGRRTKRAQSPKGSPLAPSGTSVPFWVRMSPEFVAVQPGKSVQLNCSNSCPQPQNSSLRTPLRQGKTLRGPGWVSYQLLDVRAWSSLAHCLVTCAGKTRWATSRITAYKPPHSVILEPPVLKGRKYTLRCHVTQVFPVGYLVVTLRHGSRVIYSESLERFTGLDLANVTLTYEFAAGPRDFWQPVICHARLNLDGLVVRNSSAPITLMLAWSPAPTALASGSIAALVGILLTVGAAYLCKCLAMKSQA

SEQ ID NO: 21468 - protein, 237 aa, Homo sapiens
MGSLFPLSLLFFLAAAYPGVGSALGRRTKRAQSPKGSPLAPSGTSVPFWVRMSPEFVAVQPGKSVQLNCSNSCPQPQNSSLRTPLRQGKTLRGPGWVSYQLLDVRAWSSLAHCLVTCAGKTRWATSRITAYKPPHSVILEPPVLKGRKYTLRCHVTQVFPVGYLVVTLRHGSRVIYSESLERFTGLDLANVTLTYEFAAGPRDFWQPVICHARLNLDGLVVRNSSAPITLMLGEAPL

SEQ ID NO: 21469 - protein, 272 aa, Homo sapiens
MGSLFPLSLLFFLAAAYPGVGSALGRRTKRAQSPKGSPLAPSGTSVPFWVRMSPEFVAVQPGKSVQLNCSNSCPQPQNSSLRTPLRQGKTLRGPGWVSYQLLDVRAWSSLAHCLVTCAGKTRWATSRITAYSVPGGLLGGDPEAWKPGHLFRKPGALHRPGSGQRDLDLRVCCWTPRLLAARDLPRAPQSRRPGGPQQLGTHYTDARLEPRAHSFGLRFHRCPCRDPPHCGRCVPMQVPSYEVPGVKGDVLCRLSEKKRNMKQSGEMAIHGG

SEQ ID NO: 21470 - protein, 824 aa, Homo sapiens
MMQNVHLAPETDEDDLYSGYNDYNPIYDIEELENDAAFQQAVRTSHGRRPPITAKISSTAVTRPIATGYGSKTSLASSIGRPMTGAIQDGVTRPMTAVRAAGFTKAALRGSAFDPLSQSRGPASPLEAKKKDSPEEKIKQLEKEVNELVEESCIANSCGDLKLALEKAKDAGRKERVLVRQREQVTTPENINLDLTYSVLFNLASQYSVNEMYAEALNTYQVIVKNKMFSNAGILKMNMGNIYLKQRNYSKAIKFYRMALDQVPSVNKQMRIKIMQNIGVTFIQAGQYSDAINSYEHIMSMAPNLKAGYNLTICYFAIGDREKMKKAFQKLITVPLEIDEDKYISPSDDPHTNLVTEAIKNDHLRQMERERKAMAEKYIMTSAKLIAPVIETSFAAGYDWCVEVVKASQYVELANDLEINKAVTYLRQKDYNQAVEILKVLEKKDSRVKSAAATNLSALYYMGKDFAQASSYADIAVNSDRYNPAALTNKGNTVFANGDYEKAAEFYKEALRNDSSCTEALYNIGLTYEKLNRLDEALDCFLKLHAILRNSAEVLYQIANIYELMENPSQAIEWLMQVVSVIPTDPQVLSKLGELYDREGDKSQAFQYYYESYRYFPCNIEVIEWLGAYYIDTQFWEKAIQYFERASLIQPTQVKWQLMVASCFRRSGNYQKALDTYKDTHRKFPENVECLRFLVRLCTDLGLKDAQEYARKLKRLEKMKEIREQRIKSGRDGSGGSRGKREGSASGDSGQNYSASSKGERLSARLRALPGTNEPYESSSNKEIDASYVDPLGPQIERPKTAAKKRIDEDDFADEELGDDLLPE

SEQ ID NO: 21471 - protein, 833 aa, Homo sapiens
MKFTNTKVQMMQNVHLAPETDEDDLYSGYNDYNPIYDIEELENDAAFQQAVRTSHGRRPPITAKISSTAVTRPIATGYGSKTSLASSIGRPMTGAIQDGVTRPMTAVRAAGFTKAALRGSAFDPLSQSRGPASPLEAKKKDSPEEKIKQLEKEVNELVEESCIANSCGDLKLALEKAKDAGRKERVLVRQREQVTTPENINLDLTYSVLFNLASQYSVNEMYAEALNTYQVIVKNKMFSNAGILKMNMGNIYLKQRNYSKAIKFYRMALDQVPSVNKQMRIKIMQNIGVTFIQAGQYSDAINSYEHIMSMAPNLKAGYNLTICYFAIGDREKMKKAFQKLITVPLEIDEDKYISPSDDPHTNLVTEAIKNDHLRQMERERKAMAEKYIMTSAKLIAPVIETSFAAGYDWCVEVVKASQYVELANDLEINKAVTYLRQKDYNQAVEILKVLEKKDSRVKSAAATNLSALYYMGKDFAQASSYADIAVNSDRYNPAALTNKGNTVFANGDYEKAAEFYKEALRNDSSCTEALYNIGLTYEKLNRLDEALDCFLKLHAILRNSAEVLYQIANIYELMENPSQAIEWLMQVVSVIPTDPQVLSKLGELYDREGDKSQAFQYYYESYRYFPCNIEVIEWLGAYYIDTQFWEKAIQYFERASLIQPTQVKWQLMVASCFRRSGNYQKALDTYKDTHRKFPENVECLRFLVRLCTDLGLKDAQEYARKLKRLEKMKEIREQRIKSGRDGSGGSRGKREGSASGDSGQNYSASSKGERLSARLRALPGTNEPYESSSNKEIDASYVDPLGPQIERPKTAAKKRIDEDDFADEELGDDLLPE

SEQ ID NO: 21472 - protein, 814 aa, Homo sapiens
MKFTNTKVQMMQNVHLAPETDEDDLYSGYNDYNPIYDIEELENDAAFQQAVRTSHGRRPPSKTSLASSIGRPMTGAIQDGVTRPMTAVRAAGFTKAALRGSAFDPLSQSRGPASPLEAKKKDSPEEKIKQLEKEVNELVEESCIANSCGDLKLALEKAKDAGRKERVLVRQREQVTTPENINLDLTYSVLFNLASQYSVNEMYAEALNTYQVIVKNKMFSNAGILKMNMGNIYLKQRNYSKAIKFYRMALDQVPSVNKQMRIKIMQNIGVTFIQAGQYSDAINSYEHIMSMAPNLKAGYNLTICYFAIGDREKMKKAFQKLITVPLEIDEDKYISPSDDPHTNLVTEAIKNDHLRQMERERKAMAEKYIMTSAKLIAPVIETSFAAGYDWCVEVVKASQYVELANDLEINKAVTYLRQKDYNQAVEILKVLEKKDSRVKSAAATNLSALYYMGKDFAQASSYADIAVNSDRYNPAALTNKGNTVFANGDYEKAAEFYKEALRNDSSCTEALYNIGLTYEKLNRLDEALDCFLKLHAILRNSAEVLYQIANIYELMENPSQAIEWLMQVVSVIPTDPQVLSKLGELYDREGDKSQAFQYYYESYRYFPCNIEVIEWLGAYYIDTQFWEKAIQYFERASLIQPTQVKWQLMVASCFRRSGNYQKALDTYKDTHRKFPENVECLRFLVRLCTDLGLKDAQEYARKLKRLEKMKEIREQRIKSGRDGSGGSRGKREGSASGDSGQNYSASSKGERLSARLRALPGTNEPYESSSNKEIDASYVDPLGPQIERPKTAAKKRIDEDDFADEELGDDLLPE

SEQ ID NO: 21473 - protein, 778 aa, Homo sapiens
MAQKMDCGAGLLGFQAEASVEDSALLMQTLMEAIQISEAPPTNQATAAASPQSSQPPTANEMADIQVSAAAARPKSAFKVQNATTKGPNGVYDFSQAHNAKDVPNTQPKAAFKSQNATPKGPNAAYDFSQAATTGELAANKSEMAFKAQNATTKVGPNATYNFSQSLNANDLANSRPKTPFKAWNDTTKAPTADTQTQNVNQAKMATSQADIETDPGISEPDGATAQTSADGSQAQNLESRTIIRGKRTRKINNLNVEENSSGDQRRAPLAAGTWRSAPVPVTTQNPPGAPPNVLWQTPLAWQNPSGWQNQTARQTPPARQSPPARQTPPAWQNPVAWQNPVIWPNPVIWQNPVIWPNPIVWPGPVVWPNPLAWQNPPGWQTPPGWQTPPGWQGPPDWQGPPDWPLPPDWPLPPDWPLPTDWPLPPDWIPADWPIPPDWQNLRPSPNLRPSPNSRASQNPGAAQPRDVALLQERANKLVKYLMLKDYTKVPIKRSEMLRDIIREYTDVYPEIIERACFVLEKKFGIQLKEIDKEEHLYILISTPESLAGILGTTKDTPKLGLLLVILGVIFMNGNRASEAVLWEALRKMGLRPGVRHPLLGDLRKLLTYEFVKQKYLDYRRVPNSNPPEYEFLWGLRSYHETSKMKVLRFIAEVQKRDPRDWTAQFMEAADEALDALDAAAAEAEARAEARTRMGIGDEAVSGPWSWDDIEFELLTWDEEGDFGDPWSRIPFTFWARYHQNARSRFPQTFAGPIIGPGGTASANFAANFGAIGFFWVE

SEQ ID NO: 21474 - protein, 834 aa, Homo sapiens
MAQKMDCGAGLLGFQNPDACRAVCHPLPQPPASTLPLSAFPTLCDPPYSQLRDPPAVLSCYCTPLGASPAPAEASVEDSALLMQTLMEAIQISEAPPTNQATAAASPQSSQPPTANEMADIQVSAAAARPKSAFKVQNATTKGPNGVYDFSQAHNAKDVPNTQPKAAFKSQNATPKGPNAAYDFSQAATTGELAANKSEMAFKAQNATTKVGPNATYNFSQSLNANDLANSRPKTPFKAWNDTTKAPTADTQTQNVNQAKMATSQADIETDPGISEPDGATAQTSADGSQAQNLESRTIIRGKRTRKINNLNVEENSSGDQRRAPLAAGTWRSAPVPVTTQNPPGAPPNVLWQTPLAWQNPSGWQNQTARQTPPARQSPPARQTPPAWQNPVAWQNPVIWPNPVIWQNPVIWPNPIVWPGPVVWPNPLAWQNPPGWQTPPGWQTPPGWQGPPDWQGPPDWPLPPDWPLPPDWPLPTDWPLPPDWIPADWPIPPDWQNLRPSPNLRPSPNSRASQNPGAAQPRDVALLQERANKLVKYLMLKDYTKVPIKRSEMLRDIIREYTDVYPEIIERACFVLEKKFGIQLKEIDKEEHLYILISTPESLAGILGTTKDTPKLGLLLVILGVIFMNGNRASEAVLWEALRKMGLRPGVRHPLLGDLRKLLTYEFVKQKYLDYRRVPNSNPPEYEFLWGLRSYHETSKMKVLRFIAEVQKRDPRDWTAQFMEAADEALDALDAAAAEAEARAEARTRMGIGDEAVSGPWSWDDIEFELLTWDEEGDFGDPWSRIPFTFWARYHQNARSRFPQTFAGPIIGPGGTASANFAANFGAIGFFWVE

SEQ ID NO: 21475 - protein, 1270 aa, Homo sapiens
MDSLEEPQKKVFKARKTMRVSDRQQLEAVYKVKEELLKTDVKLLNGNHENGDLDPTSPLENMDYIKDKEEVNGIEEICFDPEGSKAEWKETPCILSVNVKNKQDDDLNCEPLSPHNITPEPVSKLPAEPVSGDPAPGDLDAGDPASGVLASGDSTSGDPTSSEPSSSDAASGDATSGDAPSGDVSPGDATSGDATADDLSSGDPTSSDPIPGEPVPVEPISGDCAADDIASSEITSVDLASGAPASTDPASDDLASGDLSSSELASDDLATGELASDELTSESTFDRTFEPKSVPVCEPVPEIDNIEPSSNKDDDFLEKNGADEKLEQIQSKDSLDEKNKADNNIDANEETLETDDTTICSDRPPENEKKVEEDIITELALGEDAISSSMEIDQGEKNEDETSADLVETINENVIEDNKSENILENTDSMETDEIIPILEKLAPSEDELTCFSKTSLLPIDETNPDLEEKMESSFGSPSKQESSESLPKEAFLVLSDEEDISGEKDESEVISQNETCSPAEVESNEKDNKPEEEEQVIHEDDERPSEKNEFSRRKRSKSEDMDNVQSKRRRYMEEEYEAEFQVKITAKGDINQKLQKVIQWLLEEKLCALQCAVFDKTLAELKTRVEKIECNKRHKTVLTELQAKIARLTKRFEAAKEDLKKRHEHPPNPPVSPGKTVNDVNSNNNMSYRNAGTVRQMLESKRNVSESAPPSFQTPVNTVSSTNLVTPPAVVSSQPKLQTPVTSGSLTATSVLPAPNTATVVATTQVPSGNPQPTISLQPLPVILHVPVAVSSQPQLLQSHPGTLVTNQPSGNVEFISVQSPPTVSGLTKNPVSLPSLPNPTKPNNVPSVPSPSIQRNPTASAAPLGTTLAVQAVPTAHSIVQATRTSLPTVGPSGLYSPSTNRGPIQMKIPISAFSTSSAAEQNSNTTPRIENQTNKTIDASVSKKAADSTSQCGKATGSDSSGVIDLTMDDEESGASQDPKKLNHTPVSTMSSSQPVSRPLQPIQPAPPLQPSGVPTSGPSQTTIHLLPTAPTTVNVTHRPVTQVTTRLPVPRAPANHQVVYTTLPAPPAQAPLRGTVMQAPAVRQVNPQNSVTVRVPQTTTYVVNNGLTLGSTGPQLTVHHRPPQVHTEPPRPVHPAPLPEAPQPQRLPPEAASTSLPQKPHLKLARVQSQNGIVLSWSVLEVDRSCATVDSYHLYAYHEEPSATVPSQWKKIGEVKALPLPMACTLTQFVSGSKYYFAVRAKDIYGRFGPFCDPQSTDVISSTQSS

SEQ ID NO: 21476 - protein, 1105 aa, Homo sapiens
MDSLEEPQKKVFKARKTMRVSDRQQLEAVYKVKEELLKTDVKLLNGNHENGDLDPTSPLENMDYIKDKEEVNGIEEICFDPEGSKAEWKETPCILSVNVKNKQDDDLNCEPLSPHNITPEPVSKLPAEPVSGDPAPGDLDAGDPASGVLASGDSTSGDPTSSEPSSSDAASGDATSGDAPSGDVSPGDATSGDATADDLSSGDPTSSDPIPGEPVPVEPISGDCAADDIASSEITSVDLASGAPASTDPASDDLASGDLSSSELASDDLATGELASDELTSESTFDRTFEPKSVPVCEPVPEIDNIEPSSNKDDDFLEKNGADEKLEQIQSKDSLDEKNKADNNIDANEETLETDDTTICSDRPPENEKKVEEDIITELALGEDAISSSMEIDQGEKNEDETSADLVETINENVIEDNKSENILENTDSMETDEIIPILEKLAPSEDELTCFSKTSLLPIDETNPDLEEKMESSFGSPSKQESSESLPKEAFLVLSDEEDISGEKDESEVISQNETCSPEVESNEKDNKPEEEEQVIHEDDERPSEKNEFSRRKRSKSEDMDNVQSKRRRYMEEEYEAEFQVKITAKGDINQKLQKVIQWLLEEKLCALQCAVFDKTLAELKTRVEKIECNKRHKTVLTELQAKIARLTKRFEAAKEDLKKRHEHPPNPPVSPGKTVNDVNSNNNMSYRNAGTVRQMLESKRNVSESAPPSFQTPVNTVSSTNLVTPPAVVSSQPKLQTPVTSGSLTATSVLPAPNTATVVATTQVPSGNPQPTISLQPLPVILHVPVAVSSQPQLLQSHPGTLVTNQPSGNVEFISVQSPPTVSGLTKNPVSLPSLPNPTKPNNVPSVPSPSIQRNPTASAAPLGTTLAVQAVPTAHSIVQATRTSLPTVGPSGLYSPSTNRGPIQMKIPISAFSTSSAAEQNSNTTPRIENQTNKTIDASVSKKAADSTSQCGKATGSDSSGVIDLTMDDEESGASQDPKKLNHTPVSTMSSSQPVSRPLQPIQPAPPLQPSGVPTSGPSQTTIHLLPTAPTTVNVTHRPVTQVTTRLPVPRAPANHQVVYTTLPAPPAQAPLRGTVMQAPAVRQVNPQNSKRFFLYMAPRYM

SEQ ID NO: 21477 - protein, 1278 aa, Homo sapiens
MHQDQRFRMDSLEEPQKKVFKARKTMRVSDRQQLEAVYKVKEELLKTDVKLLNGNHENGDLDPTSPLENMDYIKDKEEVNGIEEICFDPEGSKAEWKETPCILSVNVKNKQDDDLNCEPLSPHNITPEPVSKLPAEPVSGDPAPGDLDAGDPASGVLASGDSTSGDPTSSEPSSSDAASGDATSGDAPSGDVSPGDATSGDATADDLSSGDPTSSDPIPGEPVPVEPISGDCAADDIASSEITSVDLASGAPASTDPASDDLASGDLSSSELASDDLATGELASDELTSESTFDRTFEPKSVPVCEPVPEIDNIEPSSNKDDDFLEKNGADEKLEQIQSKDSLDEKNKADNNIDANEETLETDDTTICSDRPPENEKKVEEDIITELALGEDAISSSMEIDQGEKNEDETSADLVETINENVIEDNKSENILENTDSMETDEIIPILEKLAPSEDELTCFSKTSLLPIDETNPDLEEKMESSFGSPSKQESSESLPKEAFLVLSDEEDISGEKDESEVISQNETCSPAEVESNEKDNKPEEEEQVIHEDDERPSEKNEFSRRKRSKSEDMDNVQSKRRRYMEEEYEAEFQVKITAKGDINQKLQKVIQWLLEEKLCALQCAVFDKTLAELKTRVEKIECNKRHKTVLTELQAKIARLTKRFEAAKEDLKKRHEHPPNPPVSPGKTVNDVNSNNNMSYRNAGTVRQMLESKRNVSESAPPSFQTPVNTVSSTNLVTPPAVVSSQPKLQTPVTSGSLTATSVLPAPNTATVVATTQVPSGNPQPTISLQPLPVILHVPVAVSSQPQLLQSHPGTLVTNQPSGNVEFISVQSPPTVSGLTKNPVSLPSLPNPTKPNNVPSVPSPSIQRNPTASAAPLGTTLAVQAVPTAHSIVQATRTSLPTVGPSGLYSPSTNRGPIQMKIPISAFSTSSAAEQNSNTTPRIENQTNKTIDASVSKKAADSTSQCGKATGSDSSGVIDLTMDDEESGASQDPKKLNHTPVSTMSSSQPVSRPLQPIQPAPPLQPSGVPTSGPSQTTIHLLPTAPTTVNVTHRPVTQVTTRLPVPRAPANHQVVYTTLPAPPAQAPLRGTVMQAPAVRQVNPQNSVTVRVPQTTTYVVNNGLTLGSTGPQLTVHHRPPQVHTEPPRPVHPAPLPEAPQPQRLPPEAASTSLPQKPHLKLARVQSQNGIVLSWSVLEVDRSCATVDSYHLYAYHEEPSATVPSQWKKIGEVKALPLPMACTLTQFVSGSKYYFAVRAKDIYGRFGPFCDPQSTDVISSTQSS

SEQ ID NO: 21478 - protein, 1269 aa, Homo sapiens
MDSLEEPQKKVFKARKTMRVSDRQQLEAVYKVKEELLKTDVKLLNGNHENGDLDPTSPLENMDYIKDKEEVNGIEEICFDPEGSKAEWKETPCILSVNVKNKQDDDLNCEPLSPHNITPEPVSKLPAEPVSGDPAPGDLDAGDPASGVLASGDSTSGDPTSSEPSSSDAASGDATSGDAPSGDVSPGDATSGDATADDLSSGDPTSSDPIPGEPVPVEPISGDCAADDIASSEITSVDLASGAPASTDPASDDLASGDLSSSELASDDLATGELASDELTSESTFDRTFEPKSVPVCEPVPEIDNIEPSSNKDDDFLEKNGADEKLEQIQSKDSLDEKNKADNNIDANEETLETDDTTICSDRPPENEKKVEEDIITELALGEDAISSSMEIDQGEKNEDETSADLVETINENVIEDNKSENILENTDSMETDEIIPILEKLAPSEDELTCFSKTSLLPIDETNPDLEEKMESSFGSPSKQESSESLPKEAFLVLSDEEDISGEKDESEVISQNETCSPEVESNEKDNKPEEEEQVIHEDDERPSEKNEFSRRKRSKSEDMDNVQSKRRRYMEEEYEAEFQVKITAKGDINQKLQKVIQWLLEEKLCALQCAVFDKTLAELKTRVEKIECNKRHKTVLTELQAKIARLTKRFEAAKEDLKKRHEHPPNPPVSPGKTVNDVNSNNNMSYRNAGTVRQMLESKRNVSESAPPSFQTPVNTVSSTNLVTPPAVVSSQPKLQTPVTSGSLTATSVLPAPNTATVVATTQVPSGNPQPTISLQPLPVILHVPVAVSSQPQLLQSHPGTLVTNQPSGNVEFISVQSPPTVSGLTKNPVSLPSLPNPTKPNNVPSVPSPSIQRNPTASAAPLGTTLAVQAVPTAHSIVQATRTSLPTVGPSGLYSPSTNRGPIQMKIPISAFSTSSAAEQNSNTTPRIENQTNKTIDASVSKKAADSTSQCGKATGSDSSGVIDLTMDDEESGASQDPKKLNHTPVSTMSSSQPVSRPLQPIQPAPPLQPSGVPTSGPSQTTIHLLPTAPTTVNVTHRPVTQVTTRLPVPRAPANHQVVYTTLPAPPAQAPLRGTVMQAPAVRQVNPQNSVTVRVPQTTTYVVNNGLTLGSTGPQLTVHHRPPQVHTEPPRPVHPAPLPEAPQPQRLPPEAASTSLPQKPHLKLARVQSQNGIVLSWSVLEVDRSCATVDSYHLYAYHEEPSATVPSQWKKIGEVKALPLPMACTLTQFVSGSKYYFAVRAKDIYGRFGPFCDPQSTDVISSTQSS

SEQ ID NO: 21479 - protein, 682 aa, Homo sapiens
MASPDRSKRKILKAKKTMPLSCRKQVEMLNKSRNVEALKTAIGSNVPSGNQSFSPSVITRTTEITKCSPSENGASSLDSNKNSISEKSKVFSQNCIKPVEEIVHSETKLEQVVCSYQKPSRTTESPSRVFTEEAKDSLNTSENDSEHQTNVTRSLFEHEGACSLKSSCCPPSVLSGVVQMPESTVTSTVGDKKTDQMVFHLETNSNSESHDKRQSDNILCSEDSGFVPVEKTPNLVNSVTSNNCADDILKTDECSRTSISNCESADSTWQSSLDTNNNSHYQKKRMFSENEENVKRMKTSEQINENICVSLERQTAFLEQVRHLIQQEIYSINYELFDKKLKELNQRIGKTECRNKHEGIADKLLAKIAKLQRRIKTVLLFQRNCLKPNMLSSNGASKVANSEAMILDKNLESVNSPIEKSSVNYEPSNPSEKGSKKINLSSDQNKSVSESNNDDVMLISVESPNLTTPITSNPTDTRKITSGNSSNSPNAEVMAVQKKLDSIIDLTKEGLSNCNTESPVSPLESHSKAASNSKETTPLAQNAVQVPESFEHLPPLPEPPAPLPELVDKTRDTLPPQKPELKVKRVFRPNGIALTWNITKINPKCAPVESYHLFLCHENSNNKLIWKKIGEIKALPLPMACTLSQFLASNRYYFTVQSKDIFGRYGPFCDIKSIPGFSENLT

SEQ ID NO: 21480 - protein, 543 aa, Homo sapiens
MASPDRSKRKILKAKKTMPLSCRKQVEMLNKSRNVEALKTAIGSNVPSGNQSFSPSVITRTTEITKCSPSENGASSLDSNKNSISEKSKVFSQNCIKPVEEIVHSETKLEQVVCSYQKPSRTTESPSRVFTEEAKDSLNTSENDSEHQTNVTRSLFEHEGACSLKSSCCPPSVLSGVVQMPESTVTSTVGDKKTDQMVFHLETNSNSESHDKRQSDNILCSEDSGFVPVEKTPNLVNSVTSNNCADDILKTDECSRTSISNCESADSTWQSSLDTNNNSHYQKKRMFSENEENVKRMKTSEQINENICVSLERQTAFLEQVRHLIQQEIYSINYELFDKKLKELNQRIGKTECRNKHEGIADKLLAKIAKLQRRIKTVLLFQRNCLKPNMLSSNGASKVANSEAMILDKNLESVNSPIEKSSVNYEPSNPSEKGSKKINLSSDQNKSVSESNNDDVMLISVESPNLTTPITSNPTDTRKITSGNSSNSPNAEVMKVQYPPWSHIRKLLQTQRKQPHWHKMQSRFLSPLSTCHLSQNHQHHYLN

SEQ ID NO: 21481 - protein, 606 aa, Homo sapiens
MSDTSESGAGLTRFQAEASEKDSSSMMQTLLTVTQNVEVPETPKASKALEVSEDVKVSKASGVSKATEVSKTPEAREAPATQASSTTQLTDTQVLAAENKSLAADTKKQNADPQAVTMPATETKKVSHVADTKVNTKAQETEAAPSQAPADEPEPESAAAQSQENQDTRPKVKAKKARKVKHLDGEEDGSSDQSQASGTTGGRRVSKALMASMARRASRGPIAFWARRASRTRLAAWARRALLSLRSPKARRGKARRRAAKLQSSQEPEAPPPRDVALLQGRANDLVKYLLAKDQTKIPIKRSDMLKDIIKEYTDVYPEIIERAGYSLEKVFGIQLKEIDKNDHLYILLSTLEPTDAGILGTTKDSPKLGLLMVLLSIIFMNGNRSSEAVIWEVLRKLGLRPGIHHSLFGDVKKLITDEFVKQKYLDYARVPNSNPPEYEFFWGLRSYYETSKMKVLKFACKVQKKDPKEWAAQYREAMEADLKAAAEAAAEAKARAEIRARMGIGLGSENAAGPCNWDEADIGPWAKARIQAGAEAKAKAQESGSASTGASTSTNNSASASASTSGGFSAGASLTATLTFGLFAGLGGAGASTSGSSGACGFSYK

SEQ ID NO: 21482 - protein, 588 aa, Homo sapiens
MSDTSESGAGLTRFQAEASEKDSSSMMQTLLTVTQNVEVPETPKVSKATEVSKTPEAREAPATQASSTTQLTDTQVLAAENKSLAADTKKQNADPQAVTMPATETKKVSHVADTKVNTKAQETEAAPSQAPADEPEPESAAAQSQENQDTRPKVKAKKARKVKHLDGEEDGSSDQSQASGTTGGRRVSKALMASMARRASRGPIAFWARRASRTRLAAWARRALLSLRSPKARRGKARRRAAKLQSSQEPEAPPPRDVALLQGRANDLVKYLLAKDQTKIPIKRSDMLKDIIKEYTDVYPEIIERAGYSLEKVFGIQLKEIDKNDHLYILLSTLEPTDAGILGTTKDSPKLGLLMVLLSIIFMNGNRSSEAVIWEVLRKLGLRPGIHHSLFGDVKKLITDEFVKQKYLDYARVPNSNPPEYEFFWGLRSYYETSKMKVLKFACKVQKKDPKEWAAQYREAMEADLKAAAEAAAEAKARAEIRARMGIGLGSENAAGPCNWDEADIGPWAKARIQAGAEAKAKAQESGSASTGASTSTNNSASASASTSGGFSAGASLTATLTFGLFAGLGGAGASTSGSSGACGFSYK

SEQ ID NO: 21483 - protein, 341 aa, Homo sapiens
MPHSQKSRHCELEQGLQAPKEAQGLVGVQVAEAEKVNTTASSSPSTLIQGTLEKVSASGTPGTPQSSQRVCSPCTTIKATPWNQSDESSRSQEKKDPGASQALMLEKKVDELVKFLSVKYTTKQPITEAEMLKGVIKEHKDHFPPIFMQAHECMEIVFGTDMKEVDPISHSCVLLKSLDLTYDRRLSDDQGMPKTGLLILTFGVILMEANCASEEKIWEVLNIIRVYAGWKDFIYGEPRKLITRDLVQEKYLECCQVSNSDPPRYKFPWGPRAHAETTKMKVLEFFSRVSGSDASSFPLLYEEALRDEKEKAQAIIATMGGTTLMASAHSWAKSSSFSCPE

SEQ ID NO: 21484 - protein, 148 aa, Homo sapiens
MKALIVLGLVLLSVTVQGKVFERCELARTLKRLGMDGYRGISLANWMCLAKWESGYNTRATNYNAGDRSTDYGIFQINSRYWCNDGKTPGAVNACHLSCSALLQDNIADAVACAKRVVRDPQGIRAWVAWRNRCQNRDVRQYVQGCGV

SEQ ID NO: 21485 - protein, 741 aa, Homo sapiens
MAEGSFSVQSESYSVEDMDEGSDEVGEEEMVEGNDYEEFGAFGGYGTLTSFDIHILRAFGSLGPGLRILSNEPWELENPVLAQTLVEALQLDPETLANETAARAANVARAAASNRAARAAAAAARTAFSQVVASHRVATPQVSGEDTQPTTYAAEAQGPTPEPPLASPQTSQMLVTSKMAAPEAPATSAQSQTGSPAQEAATEGPSSACAFSQAPCAREVDANRPSTAFLGQNDVFDFTQPAGVSGMAFPRPKRPAPAQEAATEGPSAASGVPQTGPGREVAATRPKTTKSGKALAKTRWVEPQNVVAAAAAKAKMATSIPEPEGAAAATAQHSAEPWARMGGKRTKKSKHLDDEYESSEEERETPAVPPTWRASQPSLTVRAQLAPRPPMAPRSQIPSRHVLCLPPRNVTLLQERANKLVKYLMIKDYKKIPIKRADMLKDVIREYDEHFPEIIERATYTLEKKFGIHLKEIDKEEHLYILVCTRDSSARLLGKTKDTPRLSLLLVILGVIFMNGNRASEAVLWEALRKMGLRPGVRHPFLGDLRKLITDDFVKQKYLEYKKIPNSNPPEYEFLWGLRARHETSKMRVLRFIAQNQNRDPREWKAHFLEAVDDAFKTMDVDMAEEHARAQMRAQMNIGDEALIGRWSWDDIQVELLTWDEDGDFGDAWARIPFAFWARYHQYILNSNRANRRATWRAGVSSGTNGGASTSVLDGPSTSSTIRTRNAARAGASFFSWIQHR

SEQ ID NO: 21486 - protein, 739 aa, Homo sapiens
MAEGSFSVQSESYSVEDMDEGSDEVGEEEMVEGNDYEEFGAFGGYGTLTSFDIHILRAFGSLGPGLRILSNEPWELENPVLAQTLVEALQLDPETLANETAARAANVARAAASNRAARAAAAAARTAFSQVVASHRVATPQVSGEDTQPTTYAAEAQGPTPEPPLASPQTSQMLVTSKMAAPEAPATSAQSQTGSPAQEAATEGPSSACAFSQAPCAREVDANRPSTAFLGQNDVFDFTQPAGVSGMAFPRPKRPAPAQEAATEGPSAASGVPQTGPGREVAATRPKTTKSGKALAKTRWVEPQNVVAAAAAKAKMATSIPEPEGAAAATAQHSAEPWARMGGKRTKKSKHLDDEYESSEEERETPAVPPTWRASQPSLTVRAQLAPRPPMAPRSQIPSRHVLCLPPRNVTLLQERANKLVKYLMIKDYKKIPIKRADMLKDVIREYDEHFPEIIERATYTLEKKFGIHLKEIDKEEHLYILVCTRDSSARLLGKTKDTPRLSLLLVILGVIFMNGNRASEAVLWEALRKMGLRPGVRHPFLGDLRKLITDDFVKQKYLEYKKIPNSNPPEYEFLWGLRARHETSKMRVLRFIAQNQNRDPREWKAHFLEAVDDAFKTMDVDMAEEHARAQMRAQMNIGDEALIGRWSWDDIQVELLTWDEDGDFGDAWARIPFAFWARYHQYILNSNRANRRATWRAGVSSGTNGGASTSVLDGPSTSSTIRTRNAARAGASFFSWIQ

SEQ ID NO: 21487 - protein, 414 aa, Homo sapiens
MAEGSFSVQSESYSVEDMDEGSDEVGEEEMVEGNDYEEFGAFGGYGTLTSFDIHILRAFGSLGPGLRILSNEPWELENPVLAQTLVEALQLDPETLANETAARAANVARAAASNRAARAAAAAARTAFSQVVASHRVATPQVSGEDTQPTTYAAEAQGPTPEPPLASPQTSQMLVTSKMAAPEAPATSAQSQTGSPAQEAATEGPSSACAFSQAPCAREVDANRPSTAFLGQNDVFDFTQPAGVSGMAFPRPKRPAPAQEAATEGPSAASGVPQTGPGREVAATRPKTTKSGKALAKTRWVEPQNVVAAAAAKAKMATSIPEPEGAAAATAQHSAEPWARMGGKRTKKVRSPCPLPPPHPLAPVLSFSSLSCSSPPSPLPLLPLFSSFPSFSPHLPSPPLLSSQLVHVSPTQVC

SEQ ID NO: 21488 - protein, 757 aa, Homo sapiens
MAEGSFSVQSESYSVEDMDEGSDEVGEEEMVEGNDYEEFGAFGGYGTLTSFDIHILRAFGSLGPGLRILSNEPWELENPVLAQTLVEALQLDPETLANETAARAANVARAAASNRAARAAAAAARTAFSQVVASHRVATPQVSGEDTQPTTYAAEAQGPTPEPPLASPQTSQMLVTSKMAAPEAPATSAQSQTGSPAQEAATEGPSSACAFSQAPCAREVDANRPSTAFLGQNDVFDFTQPAGVSGMAFPRPKRPAPAQEAATEGPSAASGVPQTGPGREVAATRPKTTKSGKALAKTRWVEPQNVVAAAAAKAKMATSIPEPEGAAAATAQHSAEPWARMGGKRTKKSKHLDDEYESSEEERETPAVPPTWRASQPSLTVRAQLAPRPPMAPRSQIPSRHVLCLPPRNVTLLQERANKLVKYLMIKDYKKIPIKRADMLKDVIREYDEHFPEIIERATYTLEKKFGIHLKEIDKEEHLYILVCTRDSSARLLGKTKDTPRLSLLLVILGVIFMNGNRASEAVLWEALRKMGLRPGVRHPFLGDLRKLITDDFVKQKNPELREETPLSMAPSWYLEYKKIPNSNPPEYEFLWGLRARHETSKMRVLRFIAQNQNRDPREWKAHFLEAVDDAFKTMDVDMAEEHARAQMRAQMNIGDEALIGRWSWDDIQVELLTWDEDGDFGDAWARIPFAFWARYHQYILNSNRANRRATWRAGVSSGTNGGASTSVLDGPSTSSTIRTRNAARAGASFFSWIQHR

SEQ ID NO: 21489 - protein, 957 aa, Homo sapiens
MSLVSQNSRRRRRRVAKATAHNSSWGEMQAPNAPGLPADVPGSDVPQGPSDSQILQGLCASEGPSTSVLPTSAEGPSTFVPPTISEASSASGQPTISEGPGTSVLPTPSEGLSTSGPPTISKGLCTSVTLAASEGRNTSRPPTSSEEPSTSVPPTASEVPSTSLPPTPGEGTSTSVPPTAYEGPSTSVVPTPDEGPSTSVLPTPGEGPGTSVPLAATEGLSTSVQATPDEGPSTSVPPTATEGLSTPVPPTRDEGPSTSVPATPGEGPSTSVLPAASDGQSISLVPTRGKGSSTSVPPTATEGLSTSVQPTAGEGSSTSVPPTPGGGLSTSVPPTATEELSTSVPPTPGEGPSTSVLPIPGEGLSTSVPPTASDGSDTSVPPTPGEGASTLVQPTAPDGPGSSVLPNPGEGPSTLFSSSASVDRNPSKCSLVLPSPRVTKASVDSDSEGPKGAEGPIEFEVLRDCESPNSISIMGLNTSRVAITLKPQDPMEQNVAELLQFLLVKDQSKYPIRESEMREYIVKEYRNQFPEILRRAAAHLECIFRFELRELDPEAHTYILLNKLGPVPFEGLEESPNGPKMGLLMMILGQIFLNGNQAKEAEIWEMLWRMGVQRERRLSIFGNPKRLLSVEFVWQRYLDYRPVTDCKPVEYEFFWGPRSHLETTKMKILKFMAKIYNKDPMDWPEKYNEALEEDAARAFAEGWQALPHFRRPFFEEAAAEVPSPDSEVSSYSSKYAPHSWPESRLESKARKLVQLFLLMDSTKLPIPKKGILYYIGRECSKVFPDLLNRAARTLNHVYGTELVVLDPRNHSYTLYNRREMEETEEIVDSPNRPGNNFLMQVLSFIFIMGNHARESAVWAFLRGLGVQAGRKHVITCRYLSQRYIDSLRVPDSDPVQYEFVWGPRARLETSKMKALRYVARIHRKEPQDWPQQYREAMEDEANRADVGHRQIFVHNFR

SEQ ID NO: 21490 - protein, 653 aa, Homo sapiens
MPVGGLLPLFSSPAGGVLGGGLGGGGGRKGSGPAALRLTEKFVLLLVFSAFITLCFGAIFFLPDSSKLLSGVLFHSSPALQPAADHKPGPGARAEDAAEGRARRREEGAPGDPEAALEDNLARIRENHERALREAKETLQKLPEEIQRDILLEKKKVAQDQLRDKAPFRGLPPVDFVPPIGVESREPADAAIREKRAKIKEMMKHAWNNYKGYAWGLNELKPISKGGHSSSLFGNIKGATIVDALDTLFIMEMKHEFEEAKSWVEENLDFNVNAEISVFEVNIRFVGGLLSAYYLSGEEIFRKKAVELGVKLLPAFHTPSGIPWALLNMKSGIGRNWPWASGGSSILAEFGTLHLEFMHLSHLSGNPIFAEKVMNIRTVLNKLEKPQGLYPNYLNPSSGQWGQHHVSVGGLGDSFYEYLLKAWLMSDKTDLEAKKMYFDAVQAIETHLIRKSSSGLTYIAEWKGGLLEHKMGHLTCFAGGMFALGADAAPEGMAQHYLELGAEIARTCHESYNRTFMKLGPEAFRFDGGVEAIATRQNEKYYILRPEVMETYMYMWRLTHDPKYRKWAWEAVEALENHCRVNGGYSGLRDVYLLHESYDDVQQSFFLAETLKYLYLIFSDDDLLPLEHWIFNSEAHLLPILPKDKKEVEIREE

SEQ ID NO: 21491 - protein, 367 aa, Homo sapiens
MPVGGLLPLFSSPAGGVLGGGLGGGGGRKGSGPAALRLTEKFVLLLVFSAFITLCFGAIFFLPDSSKLLSGVLFHSSPALQPAADHKPGPGARAEDAAEGRARRREEGAPGDPEAALEDNLARIRENHERALREAKETLQKLPEEIQRDILLEKKKVAQDQLRDKAPFRGLPPVDFVPPIGVESREPADAAIREKRAKIKEEIEARKGQANCPGSSSSCEVEIQMMKHAWNNYKGYAWGLNELKPISKGGHSSSLFGNIKGATIVDALDTLFIMEMKHEFEEAKSWVEENLDFNVNAEISVFEVNIRFVGGLLSAYYLSGEEIFRKKAVELGVKLLPAFHTPSGIPWALLNMKRWMCNIPRAMEATI

SEQ ID NO: 21492 - protein, 905 aa, Homo sapiens
MAASLSERLFSLELLVDWVRLEARLLPSPAAAVEQEEEEEEKEQGEASSPRGLCPAVAFRLLDFPTLLVYPPDGPGAPAAEPWPGVIRFGRGKSCLFRLQPATLHCRLLRTPLATLLLQLPPGRPTPTPQLLGACDISLATAAHRVVGPAASGCSHRHRGRFPLHNRVGERTGDIALAYRLTDLGSRLLSQLERPLTFTRTGGGAEVSPQTQQERQQLQQPASQPSPKEADKPLGELEIPEAQKDLKEMVKSKAECDNVGSVENGKTNSVVTCSGAGNGRNVSSLNEEVTELDMETNIFCPPPLYYTNLTQEKPPPAQAKITIEPQMNAPEEMDDASPEKKRVNPPAHRSCLKHPSSAAHEHPPMLVNPPHIQNIGATNQTCQTEQNRINTIRQLPLLNALLVELSLLYDQPVTSPAHIHPHLAWLYRTEDKKSPESSAKSTCRSEAKKDKRSVGGCEKSVSLQYKKNQIENYKEDKYSEKSSGALHKRVPKGRLLYGLTNTLRLRLKLTNPDMLVVHEKRELYRKRQSQMLGTKFRIPSSKVKLLSSAEQSQKPQLPEDKYLDSDASFTENSDTSRQISGVFDEPSTSKETKLKYATEKKTVDCSKNRINNVSLEEVVSPANSIIPERLTPTNILGGNVEMKIQSPCVFQQDAVVDRIVDKEIDIRQVKTTDNDILMADISDKRTGKNSCYENISELKYSDDLSSPCYSEDFCTSEDTSRSFKAHDSSSRTENPKHSQYTSKSSDTGVSKKKNSSDRSSILSPPFSAGSPVHSYRKFHISKTQDKSLEEASSISASDLSSTHWTEQKENQIDQNSMHNSEITKRAQDISVKTRSSWKSLEKSQSPQTSQVSSYLPSNVSELNVLDSSTSDHFEEGNDDVGSLNISKQCKDICELVINKLPGYTM

SEQ ID NO: 21493 - protein, 523 aa, Homo sapiens
MSLVSQNARHCSAEITADYGDGRGEIQATNASGSPTSMLVVDAPQCPQAPINSQCVNTSQAVQDPNDLEVLIDEQSRRLGALRVHDPLEDRSIALVNFMRMKSQTEGSIQQSEMLEFLREYSDQFPEILRRASAHLDQVFGLNLRVIDPQADTYNLVSKRGFQITDRIAESLDMPKASLLALVLGHILLNGNRAREASIWDLLLKVDMWDKPQRINNLFGNTRNLLTTDFVCMRFLEYWPVYGTNPLEFEFLWGSRAHREITKMEALKFVSDAHDEEPWSWPEEYNKALEGDKTKERSLTAGLEFWSEDTMNDKANDLVQLAISVTEEMLPIHQDELLAHTGKEFEDVFPNILNRATLILDMFYGLSLIEVDTSEHIYLLVQQPESEEEQVMLESLGRPTQEYVMPILGLIFLMGNRVKEANVWNLLRRFSVDVGRKHSITRKLMRQRYLECRPLSYSNPVEYELLWGPRAHHETIKMKVLEYMARLYRKRPQNWPEQYREAVEDEEARAKSEATIMFFLDPT

SEQ ID NO: 21494 - protein, 307 aa, Homo sapiens
MLQTPESRGLPVPQAEGEKDGGHDGETRAPTASQERPKEELGAGREEGAAEPALTRKGARALAAKALARRRAYRRLNRTVAELVQFLLVKDKKKSPITRSEMVKYVIGDLKILFPDIIARAAEHLRYVFGFELKQFDRKHHTYILINKLKPLEEEEEEDLGGDGPRLGLLMMILGLIYMRGNSAREAQVWEMLRRLGVQPSKYHFLFGYPKRLIMEDFVQQRYLSYRRVPHTNPPEYEFSWGPRSNLEISKMEVLGFVAKLHKKEPQHWPVQYREALADEADRARAKARAEASMRARASARAGIHLW

SEQ ID NO: 21495 - protein, 641 aa, Homo sapiens
MTTPALLPLSGRRIPPLNLGPPSFPHHRATLRLSEKFILLLILSAFITLCFGAFFFLPDSSKHKRFDLGLEDVLIPHVDAGKGAKNPGVFLIHGPDEHRHREEEERLRNKIRADHEKALEEAKEKLRKSREEIRAEIQTEKNKVVQEMKIKENKPLPPVPIPNLVGIRGGDPEDNDIREKREKIKEMMKHAWDNYRTYGWGHNELRPIARKGHSPNIFGSSQMGATIVDALDTLYIMGLHDEFLDGQRWIEDNLDFSVNSEVSVFEVNIRFIGGLLAAYYLSGEEIFKIKAVQLAEKLLPAFNTPTGIPWAMVNLKSGVGRNWGWASAGSSILAEFGTLHMEFIHLSYLTGDLTYYKKVMHIRKLLQKMDRPNGLYPNYLNPRTGRWGQYHTSVGGLGDSFYEYLLKAWLMSDKTDHEARKMYDDAIEAIEKHLIKKSRGGLTFIGEWKNGHLEKKMGHLACFAGGMFALGADGSRADKAGHYLELGAEIARTCHESYDRTALKLGPESFKFDGAVEAVAVRQAEKYYILRPEVIETYWYLWRFTHDPRYRQWGWEAALAIEKYCRVNGGFSGVKDVYSSTPTHDDVQQSFFLAETLKYLYLLFSGDDLLPLDHWVFNTEAHPLPVLHLANTTLSGNPAVR

SEQ ID NO: 21496 - protein, 303 aa, Homo sapiens
MALDFLAGCAGGVAGVLVGHPFDTVKVRLQVQSVEKPQYRGTLHCFKSIIKQESVLGLYKGLGSPLMGLTFINALVFGVQGNTLRALGHDSPLNQFLAGAAAGAIQCVICCPMELAKTRLQLQDAGPARTYKGSLDCLAQIYGHEGLRGVNRGMVSTLLRETPSFGVYFLTYDALTRALGCEPGDRLLVPKLLLAGGTSGIVSWLSTYPVDVVKSRLQADGLRGAPRYRGILDCVHQSYRAEGWRVFTRGLASTLLRAFPVNAATFATVTVVLTYARGEEAGPEGEAVPAAPAGPALAQPSSL

SEQ ID NO: 21497 - protein, 145 aa, Homo sapiens
MALDFLAGCAGGTASGPERGEASVPRDVALLQVHHQARERAGPVQGPGLAAHGAHLHQRAGVRGAGQHPPGPGPRLAPQPVPGRCGGGRHPVRHLLPHGAGQDAAAAAGRGPSAHLQGLAGLPRADLRARGSAWRQPGHGVHVAA

SEQ ID NO: 21498 - protein, 237 aa, Homo sapiens
MGLTFINALVFGVQGNTLRALGHDSPLNQFLAGAAAGAIQCVICCPMELAKTRLQLQDAGPARTYKGSLDCLAQIYGHEGLRGVNRGMVSTLLRETPSFGVYFLTYDALTRALGCEPGDRLLVPKLLLAGGTSGIVSWLSTYPVDVVKSRLQADGLRGAPRYRGILDCVHQSYRAEGWRVFTRGLASTLLRAFPVNAATFATVTVVLTYARGEEAGPEGEAVPAAPAGPALAQPSSL

SEQ ID NO: 21499 - protein, 386 aa, Homo sapiens [sequence omitted]

SEQ ID NO: 21500 - protein, 117 aa, Homo sapiens
MDWTWRILFLVAAATGAHSQVQLVQSGAEVKKPGASVKVSCKASGYTFTGYYMHWVRQAPGQGLEWMGWINPNSGGTNYAQKFQGWVTMTRDTSISTAYMELSRLRSDDTAVYYCAR

SEQ ID NO: 21501 - protein, 117 aa, Homo sapiens
MDWTWRILFLVAAVTDAYSQMQLVQSGAEVKKTGSSVKVSCKASGYTFTYRYLHWVRQAPGQALEWMGWITPFNGNTNYAQKFQDRVTITRDRSMSTAYMELSSLRSEDTAMYYCAR

SEQ ID NO: 21502 - protein, 117 aa, Homo sapiens
MDWTWRILFLVAAATGAHSQVQLVQSGAEVKKPGASVKVSCKASGYTFTSYAMHWVRQAPGQRLEWMGWINAGNGNTKYSQKFQGRVTITRDTSASTAYMELSSLRSEDTAVYYCAR

SEQ ID NO: 21503 - protein, 117 aa, Homo sapiens
MDCTWRILLLVAAATGTHAEVQLVQSGAEVKKPGATVKISCKVSGYTFTDYYMHWVQQAPGKGLEWMGLVDPEDGETIYAEKFQGRVTITADTSTDTAYMELSSLRSEDTAVYYCAT

SEQ ID NO: 21504 - protein, 117 aa, Homo sapiens
MDWTWSILFLVAAATGTYSQVQLVQSGHEVKQPGASVKVSCKASGYSFTTYGMNWVPQAPGQGLEWMGWFNTYTGNPTYAQGFTGRFVFSMDTSASTAYLQISSLKAEDMAMYYCAR

SEQ ID NO: 21505 - protein, 121 aa, Homo sapiens
MSVSFLIFLPVLGLPWGVLSQVQLQQSGPGLVKPSQTLSLTCAISGDSVSSNSAAWNWIRQSPSRGLEWLGRTYYRSKWYNDYAVSVKSRITINPDTSKNQFSLQLNSVTPEDTAVYYCAR

SEQ ID NO: 21506 - protein, 144 aa, Homo sapiens
MPKNKGKGGKNRRRGKNENESEKRELVFKEDGQEYAQVIKMLGNGRLEALCFDGVKRLCHIRGKLRKKVWINTSDIILVGLRDYQDNKADVILKYNADEARSLKAYGELPEHAKINETDTFGPGDDDEIQFDDIGDDDEDIDDI

SEQ ID NO: 21507 - protein, 117 aa, Homo sapiens
MEFWLSWVLLVAILKDVQCEVQLVESGGGLVQPGGSLRLSCSASGFTFSSYAMHWVRQAPGKGLEYVSAISSNGGSTYYADSVKGRFTISRDNSKNTLYLQMSSLRAEDTAVYYCVK

SEQ ID NO: 21508 - protein, 117 aa, Homo sapiens
MEFGLSWVFLVALLRGVQCQVQLVESGGGVVQPGRSLRLSCAASGFTFSSYAMHWVRQAPGKGLEWVAVISYDGSNKYYADSVKGRFTISRDNSKNTLYLQMNSLRAEDTAVYYCAR

SEQ ID NO: 21509 - protein, 118 aa, Homo sapiens
MKHLWFFLLLVAAPRWVLSQVQLQESGPGLVKPSQTLSLTCTVSGGSISSGDYYWSWIRQPPGKGLEWIGYIYYSGSTYYNPSLKSRVTISVDTSKNQFSLKLSSVTAADTAVYYCAR

SEQ ID NO: 21510 - protein, 259 aa, Homo sapiens
MSEVPVARVWLVLLLLTVQVGVTAGAPWQCAPCSAEKLALCPPVSASCSEVTRSAGCGCCPMCALPLGAACGVATARCARGLSCRALPGEQQPLHALTRGQGACVQESDASAPHAAEAGSPESPESTEITEEELLDNFHLMAPSEEDHSILWDAISTYDGSKALHVTNIKKWKEPCRIELYRVVESLAKAQETSGEEISKFYLPNCNKNGFYHSRQCETSMDGEAGLCWCVYPWNGKRIPGSPEIRGDPNCQIYFNVQN

SEQ ID NO: 21511 - protein, 178 aa, Homo sapiens
MHSSALLCCLVLLTGVRASPGQGTQSENSCTHFPGNLPNMLRDLRDAFSRVKTFFQMKDQLDNLLLKESLLEDFKGYLGCQALSEMIQFYLEEVMPQAENQDPDIKAHVNSLGENLKTLRLRLRRCHRFLPCENKSKAVEQVKNAFNKLQEKGIYKAMSEFDIFINYIEAYMTMKIRN

SEQ ID NO: 21512 - protein, 862 aa, Homo sapiens
MAHTFRGCSLAFMFIITWLLIKAKIDACKRGDVTVKPSHVILLGSTVNITCSLKPRQGCFHYSRRNKLILYKFDRRINFHHGHSLNSQVTGLPLGTTLFVCKLACINSDEIQICGAEIFVGVAPEQPQNLSCIQKGEQGTVACTWERGRDTHLYTEYTLQLSGPKNLTWQKQCKDIYCDYLDFGINLTPESPESNFTAKVTAVNSLGSSSSLPSTFTFLDIVRPLPPWDIRIKFQKASVSRCTLYWRDEGLVLLNRLRYRPSNSRLWNMVNVTKAKGRHDLLDLKPFTEYEFQISSKLHLYKGSWSDWSESLRAQTPEEEPTGMLDVWYMKRHIDYSRQQISLFWKNLSVSEARGKILHYQVTLQELTGGKAMTQNITGHTSWTTVIPRTGNWAVAVSAANSKGSSLPTRINIMNLCEAGLLAPRQVSANSEGMDNILVTWQPPRKDPSAVQEYVVEWRELHPGGDTQVPLNWLRSRPYNVSALISENIKSYICYEIRVYALSGDQGGCSSILGNSKHKAPLSGPHINAITEEKGSILISWNSIPVQEQMGCLLHYRIYWKERDSNSQPQLCEIPYRVSQNSHPINSLQPRVTYVLWMTALTAAGESSHGNEREFCLQGKANWMAFVAPSICIAIIMVGIFSTHYFQQKVFVLLAALRPQWCSREIPDPANSTCAKKYPIAEEKTQLPLDRLLIDWPTPEDPEPLVISEVLHQVTPVFRHPPCSNWPQREKGIQGHQASEKDMMHSASSPPPPRALQAESRQLVDLYKVLESRGSDPKPENPACPWTVLPAGDLPTHDGYLPSNIDDLPSHEAPLADSLEELEPQHISLSVFPSSSLHPLTFSCGDKLTLDQLKMRCDSLML

SEQ ID NO: 21513 - protein, 659 aa, Homo sapiens
MAHTFRGCSLAFMFIITWLLIKAKIDACKRGDVTVKPSHVILLGSTVNITCSLKPRQGCFHYSRRNKLILYKFDRRINFHHGHSLNSQVTGLPLGTTLFVCKLACINSDEIQICGAEIFVGVAPEQPQNLSCIQKGEQGTVACTWERGRDTHLYTEYTLQLSGPKNLTWQKQCKDIYCDYLDFGINLTPESPESNFTAKVTAVNSLGSSSSLPSTFTFLDIVRPLPPWDIRIKFQKASVSRCTLYWRDEGLVLLNRLRYRPSNSRLWNMVNVTKAKGRHDLLDLKPFTEYEFQISSKLHLYKGSWSDWSESLRAQTPEEEPTGMLDVWYMKRHIDYSRQQISLFWKNLSVSEARGKILHYQVTLQELTGGKAMTQNITGHTSWTTVIPRTGNWAVAVSAANSKGSSLPTRINIMNLCEAGLLAPRQVSANSEGMDNILVTWQPPRKDPSAVQEYVVEWRELHPGGDTQVPLNWLRSRPYNVSALISENIKSYICYEIRVYALSGDQGGCSSILGNSKHKAPLSGPHINAITEEKGSILISWNSIPVQEQMGCLLHYRIYWKERDSNSQPQLCEIPYRVSQNSHPINSLQPRVTYVLWMTALTAAGESSHGNEREFCLQGKANWMAFVAPSICIAIIMVGIFSTHYFQQKRRHSCPWTGS

SEQ ID NO: 21514 - protein, 776 aa, Homo sapiens
MAHTFRGCSLAFMFIITWLLIKAKIDACKRGDVTVKPSHVILLGSTVNITCSLKPRQGCFHYSRRNKLILYKFDRRINFHHGHSLNSQVTGLPLGTTLFVCKLACINSDEIQICGAEIFVGVAPEQPQNLSCIQKGEQGTVACTWERGRDTHLYTEYTLQLSGPKNLTWQKQCKDIYCDYLDFGINLTPESPESNFTAKVTAVNSLGSSSSLPSTFTFLDIVRPLPPWDIRIKFQKASVSRCTLYWRDEGLVLLNRLRYRPSNSRLWNMVNVTKAKGRHDLLDLKPFTEYEFQISSKLHLYKGSWSDWSESLRAQTPEEEPTGMLDVWYMKRHIDYSRQQISLFWKNLSVSEARGKILHYQVTLQELTGGKAMTQNITGHTSWTTVIPRTGNWAVAVSAANSKGSSLPTRINIMNLCEAGLLAPRQVSANSEGMDNILVTWQPPRKDPSAVQEYVVEWRELHPGGDTQVPLNWLRSRPYNVSALISEIPYRVSQNSHPINSLQPRVTYVLWMTALTAAGESSHGNEREFCLQGKANWMAFVAPSICIAIIMVGIFSTHYFQQKVFVLLAALRPQWCSREIPDPANSTCAKKYPIAEEKTQLPLDRLLIDWPTPEDPEPLVISEVLHQVTPVFRHPPCSNWPQREKGIQGHQASEKDMMHSASSPPPPRALQAESRQLVDLYKVLESRGSDPKPENPACPWTVLPAGDLPTHDGYLPSNIDDLPSHEAPLADSLEELEPQHISLSVFPSSSLHPLTFSCGDKLTLDQLKMRCDSLML

SEQ ID NO: 21515 - protein, 380 aa, Homo sapiens
MAFVCLAIGCLYTFLISTTFGCTSSSDTEIKVNPPQDFEIVDPGYLGYLYLQWQPPLSLDHFKECTVEYELKYRNIGSETWKTIITKNLHYKDGFDLNKGIEAKIHTLLPWQCTNGSEVQSSWAETTYWISPQGIPETKVQDMDCVYYNWQYLLCSWKPGIGVLLDTNYNLFYWYEGLDHALQCVDYIKADGQNIGCRFPYLEASDYKDFYICVNGSSENKPIRSSYFTFQLQNIVKPLPPVYLTFTRESSCEIKLKWSIPLGPIPARCFDYEIEIREDDTTLVTATVENETYTLKTTNETRQLCFVVRSKVNIYCSDDGIWSEWSDKQCWEGEDLSKKTLLRFWLPFGFILILVIFVTGLLLRKPNTYPKMIPEFFCDT

SEQ ID NO: 21516 - protein, 388 aa, Homo sapiens
MTASVLLHPRWIEPTVMFLYDNGGGLVADELNKNMEGAAAAAAAAAAAAAAGAGGGGFPHPAAAAAGGNFSVAAAAAAAAAAAANQCRNLMAHPAPLAPGAASAYSSAPGEAPPSAAAAAAAAAAAAAAAAAASSSGGPGPAGPAGAEAAKQCSPCSAAAQSSSGPAALPYGYFGSGYYPCARMGPHPNAIKSCAQPASAAAAAAFADKYMDTAGPAAEEFSSRAKEFAFYHQGYAAGPYHHHQPMPGYLDMPVVPGLGGPGESRHEPLGLPMESYQPWALPNGWNGQMYCPKEQAQPPHLWKSTLPDVVSHPSDASSYRRGRKKRVPYTKVQLKELEREYATNKFITKDKRRRISATTNLSERQVTIWFQNRRVKEKKVINKLKTTS

SEQ ID NO: 21517 - protein, 411 aa, Homo sapiens
MRAHPGGGRCCPEQEEGESAAGGSGAGGDSAIEQGGQGSALAPSPVSGVRREGARGGGRGRGRWKQAGRGGGVCGRGRGRGRGRGRGRGRGRGRGRPPSGGSGLGGDGGGCGGGGSGGGGAPRREPVPFPSGSAGPGPRGPRATESGKRMDCPALPPGWKKEEVIRKSGLSAGKSDVYYFSPSGKKFRSKPQLARYLGNTVDLSSFDFRTGKMMPSKLQKNKQRLRNDPLNQNKGKPDLNTTLPIRQTASIFKQPVTKVTNHPSNKVKSDPQRMNEQPRQLFWEKRLQGLSASDVTEQIIKTMELPKGLQGVGPGSNDETLLSAVASALHTSSAPITGQVSAAVEKNPAVWLNTSQPLCKAFIVTDEDIRKQEERVQQVRKKLEEALMADILSRAADTEEMDIEMDSGDEA

SEQ ID NO: 21518 - protein, 302 aa, Homo sapiens
MRAHPGGGRCCPEQEEGESAAGGSGAGGDSAIEQGGQGSALAPSPVSGVRREGARGGGRGRGRWKQAGRGGGVCGRGRGRGRGRGRGRGRGRGRGRPPSGGSGLGGDGGGCGGGGSGGGGAPRREPVPFPSGSAGPGPRGPRATESGKRMDCPALPPGWKKEEVIRKSGLSAGKSDVYYFSPSGKKFRSKPQLARYLGNTVDLSSFDFRTGKMMPSKLQKNKQRLRNDPLNQNKLRWNTHRPAPWHALSRLCLLIRCLLCLECAYPLPLHLVNSYSSKTQLHCLHLWEACPAYSRQNQSFPP

SEQ ID NO: 21519 - protein, 194 aa, Homo sapiens
MTMRHNWTPDLSPLWVLLLCAHVVTLLVRATPVSQTTTAATASVRSTKDPCPSQPPVFPAAKQCPALEVTWPEVEVPLNGTLSLSCVACSRFPNFSILYWLGNGSFIEHLPGRLWEGSTSRERGSTGTQLCKALVLEQLTPALHSTNFSCVLVDPEQVVQRHVVLAQLWAGLRATLPPTQEALPSSHSSPQQQG

SEQ ID NO: 21520 - protein, 115 aa, Homo sapiens
MTMRHNWTPDLSPLWVLLLCAHVVTLLVRATPVSQTTTAATASVRSTKDPCPSQPPVFPAAKQCPALEVTWPEVEVPLSWAEGNLAPHPRSPALQPQQSTAAGLRLSTGPAAAQP

SEQ ID NO: 21521 - protein, 163 aa, Homo sapiens
MTMRHNWTPDLSPLWVLLLCAHVVTLLVRATPVSQTTTAATASVRSTKDPCPSQPPVFPAAKQCPALEVTWPEVEVPLNGTLSLSCVACSRFPNFSILYWLGNGSFIEHLPGRLWEGSTSRERGSTGWAEGNLAPHPRSPALQPQQSTAAGLRLSTGPAAAQP

SEQ ID NO: 21522 - protein, 146 aa, Homo sapiens [sequence omitted]

SEQ ID NO: 21523 - protein, 202 aa, Homo sapiens
MLVAGFLLALPPSWAAGAPRAGRRPARPRGCADRPEELLEQLYGRLAAGVLSAFHHTLQLGPREQARNASCPAGGRPADRRFRPPTNLRSVSPWAYRISYDPARYPRYLPEAYCLCRGCLTGLFGEEDVRFRSAPVYMPTVVLRRTPACAGGRSVYTEAYVTIPVGCTCVPEPEKDADSINSSIDKQGAKLLLGPNDAPAGP

SEQ ID NO: 21524 - protein, 739 aa, Homo sapiens
MAPWLQLCSVFFTVNACLNGSQLAVAAGGSGRARGADTCGWRGVGPASRNSGLYNITFKYDNCTTYLNPVGKHVIADAQNITISQYACHDQVAVTILWSPGALGIEFLKGFRVILEELKSEGRQCQQLILKDPKQLNSSFKRTGMESQPFLNMKFETDYFVKVVPFPSIKNESNYHPFFFRTRACDLLLQPDNLACKPFWKPRNLNISQHGSDMQVSFDHAPHNFGFRFFYLHYKLKHEGPFKRKTCKQEQTTETTSCLLQNVSPGDYIIELVDDTNTTRKVMHYALKPVHSPWAGPIRAVAITVPLVVISAFATLFTVMCRKKQQENIYSHLDEESSESSTYTAALPRERLRPRPKVFLCYSSKDGQNHMNVVQCFAYFLQDFCGCEVALDLWEDFSLCREGQREWVIQKIHESQFIIVVCSKGMKYFVDKKNYKHKGGGRGSGKGELFLVAVSAIAEKLRQAKQSSSAALSKFIAVYFDYSCEGDVPGILDLSTKYRLMDNLPQLCSHLHSRDHGLQEPGQHTRQGSRRNYFRSKSGRSLYVAICNMHQFIDEEPDWFEKQFVPFHPPPLRYREPVLEKFDSGLVLNDVMCKPGPESDFCLKVEAAVLGATGPADSQHESQHGGLDQDGEARPALDGSAALQPLLHTVKAGSPSDMPRDSGIYDSSVPSSELSLPLMEGLSTDQTETSSLTESVSSSSGLGEEEPPALPSKLLSSGSCKADLGCRSYTDELHAVAPL

SEQ ID NO: 21525 - protein, 595 aa, Homo sapiens
MESQPFLNMKFETDYFVKVVPFPSIKNESNYHPFFFRTRACDLLLQPDNLACKPFWKPRNLNISQHGSDMQVSFDHAPHNFGFRFFYLHYKLKHEGPFKRKTCKQEQTTETTSCLLQNVSPGDYIIELVDDTNTTRKVMHYALKPVHSPWAGPIRAVAITVPLVVISAFATLFTVMCRKKQQENIYSHLDEESSESSTYTAALPRERLRPRPKVFLCYSSKDGQNHMNVVQCFAYFLQDFCGCEVALDLWEDFSLCREGQREWVIQKIHESQFIIVVCSKGMKYFVDKKNYKHKGGGRGSGKGELFLVAVSAIAEKLRQAKQSSSAALSKFIAVYFDYSCEGDVPGILDLSTKYRLMDNLPQLCSHLHSRDHGLQEPGQHTRQGSRRNYFRSKSGRSLYVAICNMHQFIDEEPDWFEKQFVPFHPPPLRYREPVLEKFDSGLVLNDVMCKPGPESDFCLKVEAAVLGATGPADSQHESQHGGLDQDGEARPALDGSAALQPLLHTVKAGSPSDMPRDSGIYDSSVPSSELSLPLMEGLSTDQTETSSLTESVSSSSGLGEEEPPALPSKLLSSGSCKADLGCRSYTDELHAVAPL

SEQ ID NO: 21526 - protein, 715 aa, Homo sapiens
MPRASASGVPALFVSGEQGVGPASRNSGLYNITFKYDNCTTYLNPVGKHVIADAQNITISQYACHDQVAVTILWSPGALGIEFLKGFRVILEELKSEGRQCQQLILKDPKQLNSSFKRTGMESQPFLNMKFETDYFVKVVPFPSIKNESNYHPFFFRTRACDLLLQPDNLACKPFWKPRNLNISQHGSDMQVSFDHAPHNFGFRFFYLHYKLKHEGPFKRKTCKQEQTTETTSCLLQNVSPGDYIIELVDDTNTTRKVMHYALKPVHSPWAGPIRAVAITVPLVVISAFATLFTVMCRKKQQENIYSHLDEESSESSTYTAALPRERLRPRPKVFLCYSSKDGQNHMNVVQCFAYFLQDFCGCEVALDLWEDFSLCREGQREWVIQKIHESQFIIVVCSKGMKYFVDKKNYKHKGGGRGSGKGELFLVAVSAIAEKLRQAKQSSSAALSKFIAVYFDYSCEGDVPGILDLSTKYRLMDNLPQLCSHLHSRDHGLQEPGQHTRQGSRRNYFRSKSGRSLYVAICNMHQFIDEEPDWFEKQFVPFHPPPLRYREPVLEKFDSGLVLNDVMCKPGPESDFCLKVEAAVLGATGPADSQHESQHGGLDQDGEARPALDGSAALQPLLHTVKAGSPSDMPRDSGIYDSSVPSSELSLPLMEGLSTDQTETSSLTESVSSSSGLGEEEPPALPSKLLSSGSCKADLGCRSYTDELHAVAPL

SEQ ID NO: 21527 - protein, 707 aa, Homo sapiens
MDYRQSWPWQGVGPASRNSGLYNITFKYDNCTTYLNPVGKHVIADAQNITISQYACHDQVAVTILWSPGALGIEFLKGFRVILEELKSEGRQCQQLILKDPKQLNSSFKRTGMESQPFLNMKFETDYFVKVVPFPSIKNESNYHPFFFRTRACDLLLQPDNLACKPFWKPRNLNISQHGSDMQVSFDHAPHNFGFRFFYLHYKLKHEGPFKRKTCKQEQTTETTSCLLQNVSPGDYIIELVDDTNTTRKVMHYALKPVHSPWAGPIRAVAITVPLVVISAFATLFTVMCRKKQQENIYSHLDEESSESSTYTAALPRERLRPRPKVFLCYSSKDGQNHMNVVQCFAYFLQDFCGCEVALDLWEDFSLCREGQREWVIQKIHESQFIIVVCSKGMKYFVDKKNYKHKGGGRGSGKGELFLVAVSAIAEKLRQAKQSSSAALSKFIAVYFDYSCEGDVPGILDLSTKYRLMDNLPQLCSHLHSRDHGLQEPGQHTRQGSRRNYFRSKSGRSLYVAICNMHQFIDEEPDWFEKQFVPFHPPPLRYREPVLEKFDSGLVLNDVMCKPGPESDFCLKVEAAVLGATGPADSQHESQHGGLDQDGEARPALDGSAALQPLLHTVKAGSPSDMPRDSGIYDSSVPSSELSLPLMEGLSTDQTETSSLTESVSSSSGLGEEEPPALPSKLLSSGSCKADLGCRSYTDELHAVAPL

SEQ ID NO: 21528 - protein, 420 aa, Homo sapiens
MLHFHYYDTSNKIMEPHRPNVKTAVPLSLESYHISEEYGFLLPDSLKELPDHYRPWMEIANKLPQLIDAHQLQAHVDKMPLLSCQFLKGHREQRLAHLVLSFLTMGYVWQEGEAQPAEVLPRNLALPFVEVSRNLGLPPILVHSDLVLTNWTKKDPDGFLEIGNLETIISFPGGESLHGFILVTALVEKEAVPGIKALVQATNAILQPNQEALLQALQRLRLSIQDITKTLGQMHDYVDPDIFYAGIRIFLSGWKDNPAMPAGLMYEGVSQEPLKYSGGSAAQSTVLHAFDEFLGIRHSKESGDFLYRMRDYMPPSHKAFIEDIHSAPSLRDYILSSGQDHLLTAYNQCVQALAELRSYHITMVTKYLITAAAKAKHGKPNHLPGPPQALKDRGTGGTAVMSFLKSVRDKTLESILHPRG

SEQ ID NO: 21529 - protein, 172 aa, Homo sapiens
MLHFHYYDTSNKIMEPHRPNVKTAVPLSLESYHISEEYGFLLPDSLKELPDHYRPWMEIANKLPQLIDAHQLQAHVDKMPLLSCQFLKGHREQRLAHLVLSFLTMGYVWQEGEAQPAEVLPRNLALPFVEVSRNLGLPPILVHSDLVLTNWTKKDPDGDGVSLCLPGWSAVA

SEQ ID NO: 21530 - protein, 206 aa, Homo sapiens
MNFQQRLQSLWTLARPFCPPLLATASQMQMVVLPCLGFTLLLWSQVSGAQGQEFHFGPCQVKGVVPQKLWEAFWAVKDTMQAQDNITSARLLQQEVLQNVSDAESCYLVHTLLEFYLKTVFKNYHNRTVEVRTLKSFSTLANNFVLIVSQLQPSQENEMFSIRDSAHRRFLLFRRAFKQLDVEAALTKALGEVDILLTWMQKFYKL

SEQ ID NO: 21531 - protein, 207 aa, Homo sapiens
MNFQQRLQSLWTLASRPFCPPLLATASQMQMVVLPCLGFTLLLWSQVSGAQGQEFHFGPCQVKGVVPQKLWEAFWAVKDTMQAQDNITSARLLQQEVLQNVSDAESCYLVHTLLEFYLKTVFKNYHNRTVEVRTLKSFSTLANNFVLIVSQLQPSQENEMFSIRDSAHRRFLLFRRAFKQLDVEAALTKALGEVDILLTWMQKFYKL

SEQ ID NO: 21532 - protein, 154 aa, Homo sapiens
MNFQQRLQSLWTLASRPFCPPLLATASQMQMVVLPCLGFTLLLWSQVSGAQGQEFHFGPCQVKGVVPQKLWEAFWAVKDTMQAQDNITSARLLQQEVLQNVSQENEMFSIRDSAHRRFLLFRRAFKQLDVEAALTKALGEVDILLTWMQKFYKL

SEQ ID NO: 21533 - protein, 63 aa, Homo sapiens
MNFQQRLQSLWTLASKLRITSRVPGCCSRRFCRTSRKKMRCFPSETVHTGGFCYSGEHSNSWT

SEQ ID NO: 21534 - protein, 272 aa, Homo sapiens
MDSYLLMWGLLTFIMVPGCQAELCDDDPPEIPHATFKAMAYKEGTMLNCECKRGFRRIKSGSLYMLCTGNSSHSSWDNQCQCTSSATRNTTKQVTPQPEEQKERKTTEMQSPMQPVDQASLPGHCREPPPWENEATERIYHFVVGQMVYYQCVQGYRALHRGPAESVCKMTHGKTRWTQPQLICTGEMETSQFPGEEKPQASPEGRPESETSCLVTTTDFQIQTEMAATMETSIFTTEYQVAVAGCVFLLISVLLLSGLTWQRRQRKSRRTI

SEQ ID NO: 21535 - protein, 343 aa, Homo sapiens
MSRAGSWDMDGLRADGGGAGGAPASSSSSSVAAAAASGQCRGFLSAPVFAGTHSGRAAAAAAAAAAAAAAASGFAYPGTSERTGSSSSSSSSAVVAARPEAPPAKECPAPTPAAAAAAPPSAPALGYGYHFGNGYYSCRMSHGVGLQQNALKSSPHASLGGFPVEKYMDVSGLASSSVPANEVPARAKEVSFYQGYTSPYQHVPGYIDMVSTFGSGEPRHEAYISMEGYQSWTLANGWNSQVYCTKDQPQGSHFWKSSFPGDVALNQPDMCVYRRGRKKRVPYTKLQLKELENEYAINKFINKDKRRRISAATNLSERQVTIWFQNRRVKDKKIVSKLKDTVS

SEQ ID NO: 21536 - protein, 587 aa, Homo sapiens
MAAAVAVAAASRRQSCYLCDLPRMPWAMIWDFTEPVCRGCVNYEGADRVEFVIETARQLKRAHGCFPEGRSPPGAAASAAAKPPPLSAKDILLQQQQQLGHGGPEAAPRAPQALERYPLAAAAERPPRLGSDFGSSRPAASLAQPPTPQPPPVNGILVPNGFSKLEEPPELNRQSPNPRRGHAVPPTLVPLMNGSATPLPTALGLGGRAAASLAAVSGTAAASLGSAQPTDLGAHKRPASVSSSAAVEHEQREAAAKEKQPPPPAHRGPADSLSTAAGAAELSAEGAGKSRGSGEQDWVNRPKTVRDTLLALHQHGHSGPFESKFKKEPALTAGRLLGFEANGANGSKAVARTARKRKPSPEPEGEVGPPKINGEAQPWLSTSTEGLKIPMTPTSSFVSPPPPTASPHSNRTTPPEAAQNGQSPMAALILVADNAGGSHASKDANQVHSTTRRNSNSPPSPSSMNQRRLGPREVGGQGAGNTGGLEPVHPASLPDSSLATSAPLCCTLCHERLEDTHFVQCPSVPSHKFCFPCSRQSIKQQGASGEVYCPSGEKCPLVGSNVPWAFMQGEIATILAGDVKVKKERDS

SEQ ID NO: 21537 - protein, 571 aa, Homo sapiens
MAAAVAVAAASRRQSCYLCDLPRMPWAMIWDFTEPVCRGCVNYEGADRVEFVIETARQLKRAHGCFPEGRSPPGAAASAAAKPPPLSAKDILLQQQQQLGHGGPEAAPRAPQALERYPLAAAAERPPRLGSDFGSSRPAASLAQPPTPQPPPVNGILVPNGFSKLEEPPELNRQSPNPRRGHAVPPTLVPLMNGSATPLPTALGLGGRAAASLAAVSGTAAASLGSAQPTDLGAHKRPASVSSSAAVEHEQREAAAKEKQPPPPAHRGPADSLSTAAGAAELSAEGAGKSRGSGEQDWVNRPKTVRDTLLALHQHGHSGPFESKFKKEPALTAVARTARKRKPSPEPEGEVGPPKINGEAQPWLSTSTEGLKIPMTPTSSFVSPPPPTASPHSNRTTPPEAAQNGQSPMAALILVADNAGGSHASKDANQVHSTTRRNSNSPPSPSSMNQRRLGPREVGGQGAGNTGGLEPVHPASLPDSSLATSAPLCCTLCHERLEDTHFVQCPSVPSHKFCFPCSRQSIKQQGASGEVYCPSGEKCPLVGSNVPWAFMQGEIATILAGDVKVKKERDS

SEQ ID NO: 21538 - protein, 163 aa, Homo sapiens
MAALILVADNAGGSHASKDANQVHSTTRRNSNSPPSPSSMNQRRLGPREVGGQGAGNTGGLEPVHPASLPDSSLATSAPLCCTLCHERLEDTHFVQCPSVPSHKFCFPCSRQSIKQQGASGEVYCPSGEKCPLVGSNVPWAFMQGEIATILAGDVKVKKERDS

SEQ ID NO: 21539 - protein, 432 aa, Homo sapiens
MLFEQGQQALELPECTMQKAAYYENPGLFGGYGYSKTTDTYGYSTPHQPYPPPAAASSLDTDYPGSACSIQSSAPLRAPAHKGAELNGSCMRPGTGNSQGGGGGSQPPGLNSEQQPPQPPPPPPTLPPSSPTNPGGGVPAKKPKGGPNASSSSATISKQIFPWMKESRQNSKQKNSCATAGESCEDKSPPGPASKRVRTAYTSAQLVELEKEFHFNRYLCRPRRVEMANLLNLTERQIKIWFQNRRMKYKKDQKAKGILHSPASQSPERSPPLGGAAGHVAYSGQLPPVPGLAYDAPSPPAFAKSQPNMYGLAAYTAPLSSCLPQQKRYAAPEFEPHPMASNGGGFASANLQGSPVYVGGNFVESMAPASGPVFNLGHLSHPSSASVDYSCAAQIPGNHHHGPCDPHPTYTDLSAHHSSQGRLPEAPKLTHL

SEQ ID NO: 21540 - protein, 171 aa, Homo sapiens
MLVNFILRCGLLLVTLSLAIAKHKQSSFTKSCYPRGTLSQAVDALYIKAAWLKATIPEDRIKNIRLLKKKTKKQFMKNCQFQEQLLSFFMEDVFGQLQLQGCKKIRFVEDFHSLRQKLSHCISCASSAREMKSITRMKRIFYRIGNKGIYKAISELDILLSWIKKLLESSQ

SEQ ID NO: 21541 - protein, 242 aa, Homo sapiens
MLAVEVSEAEGGIREWEEEEKEEEAAERTPTGEKSPNSPRTLLSLRGKARTGGPMEVKLELHPLQNRWALWFFKNDRSRAWQDNLHLVTKVDTVEDFWALYSHIQLASKLSSGCDYALFKDGIQPMWEDSRNKRGGRWLVSLAKQQRHIELDRLWLETLLCLIGESFEEHSREVCGAVVNIRTKGDKIAVWTREAENQAGVLHVGRVYKERLGLSPKTIIGYQAHADTATKSNSLAKNKFVV

SEQ ID NO: 21542 - protein, 711 aa, Homo sapiens
MAERESGGLGGGAASPPAASPFLGLHIASPPNFRLTHDISLEEFEDEDLSEITDECGISLQCKDTLSLRPPRAGLLSAGGGGAGSRLQAEMLQMDLIDATGDTPGAEDDEEDDDEERAARRPGAGPPKAESGQEPASRGQGQSQGQSQGPGSGDTYRPKRPTTLNLFPQVPRSQDTLNNNSLGKKHSWQDRVSRSSSPLKTGEQTPPHEHICLSDELPPQSGPAPTTDRGTSTDSPCRRSTATQMAPPGGPPAAPPGGRGHSHRDRIHYQADVRLEATEEIYLTPVQRPPDAAEPTSAFLPPTESRMSVSSDPDPAAYPSTAGRPHPSISEEEEGFDCLSSPERAEPPGGGWRGSLGEPPPPPRASLSSDTSALSYDSVKYTLVVDEHAQLELVSLRPCFGDYSDESDSATVYDNCASVSSPYESAIGEEYEEAPRPQPPACLSEDSTPDEPDVHFSKKFLNVFMSGRSRSSSAESFGLFSCIINGEEQEQTHRAIFRFVPRHEDELELEVDDPLLVELQAEDYWYEAYNMRTGARGVFPAYYAIEVTKEPEHMAALAKNSDWVDQFRVKFLGSVQVPYHKGNDVLCAAMQKIATTRRLTVHFNPPSSCVLEISVRGVKIGVKADDSQEAKGNKCSHFFQLKNISFCGYHPKNNKYFGFITKHPADHRFACHVFVSEDSTKALAESVGRAFQQFYKQFVEYTCPTEDIYLE

SEQ ID NO: 21543 - protein, 678 aa, Homo sapiens
MPTWGARPASPDRFAVSAEAENKVREQQPHVERIFSVGVSVLPKDCPDNPHIWLQLEGPKENASRAKEYLKGLCSPELQDEIHYPPKLHCIFLGAQGFFLDCLAWSTSAHLVPRAPGSLMISGLTEAFVMAQSRVEELAERLSWDFTPGPSSGASQCTGVLRDFSALLQSPGDAHREALLQLPLAVQEELLSLVQEASSGQGPGALASWEGRSSALLGAQCQGVRAPPSDGRESLDTGSMGPGDCRGARGDTYAVEKEGGKQGGPREMDWGWKELPGEEAWEREVALRPQSVGGGARESAPLKGKALGKEEIALGGGGFCVHREPPGAHGSCHRAAQSRGASLLQRLHNGNASPPRVPSPPPAPEPPWHCGDRGDCGDRGDVGDRGDKQQGMARGRGPQWKRGARGGNLVTGTQRFKEALQDPFTLCLANVPGQPDLRHIVIDGSNVAMVHGLQHYFSSRGIAIAVQYFWDRGHRDITVFVPQWRFSKDAKVRESHFLQKLYSLSLLSLTPSRVMDGKRISSYDDRFMVKLAEETDGIIVSNDQFRDLAEESEKWMAIIRERLLPFTFVGNLFMVPDDPLGRNGPTLDEFLKKPARTQGSSKAQHPSRGFAEHGKQQQGREEEKGSGGIRKTRETERLRRQLLEVFWGQDHKVDFILQREPYCRDINQLSEALLSLNF

SEQ ID NO: 21544 - protein, 511 aa, Homo sapiens
MDVCGWKEMEVALVNFDNSDEIQEEPGYATDFDSTSPKGRPGGSSFSNGKILISESTNHETAFSKLPGDYADPPGPEPVVLNEGNQRVIINIAGLRFETQLRTLSQFPETLLGDREKRMQFFDSMRNEYFFDRNRPSFDGILYYYQSGGKIRRPANVPIDIFADEISFYELGSEAMDQFREDEGFIKDPETLLPTNDIHRQFWLLFEYPESSSAARAVAVVSVLVVVISITIFCLETLPEFREDRELKVVRDPNLNMSKTVLSQTMFTDPFFMVESTCIVWFTFELVLRFVVCPSKTDFFRNIMNIIDIISIIPYFATLITELVQETEPSAQQNMSLAILRIIRLVRVFRIFKLSRHSKGLQILGQTLKASMRELGLLIFFLFIGVILFSSAVYFAEVDEPESHFSSIPDGFWWAVVTMTTVGYGDMCPTTPGGKIVGTLCAIAGVLTIALPVPVIVSNFNYFYHRETENEEKQNIPGEIERILNSVGSRMGSTDSLNKTNGGCSTEKSRK

SEQ ID NO: 21545 - protein, 298 aa, Homo sapiens
MEEKQILCVGLVVLDVISLVDKYPKEDSEIRCLSQRWQRGGNASNSCTVLSLLGAPCAFMGSMAPGHVADFLVADFRRRGVDVSQVAWQSKGDTPSSCCIINNSNGNRTIVLHDTSLPDVSATDFEKVDLTQFKWIHIEGRNASEQVKMLQRIDAHNTRQPPEQKIRVSVEVEKPREELFQLFGYGDVVFVSKDVAKHLGFQSAEEALRGLYGRVRKGAVLVCAWAEEGADALGPDGKLLHSDAFPPPRVVDTLGAGDTFNASVIFSLSQGRSVQEALRFGCQVAGKKCGLQGFDGIV

SEQ ID NO: 21546 - protein, 298 aa, Homo sapiens
MEEKQILCVGLVVLDVISLVDKYPKEDSEIRCLSQRWQRGGNASNSCTVLSLLGAPCAFMGSMAPGHVADFVLDDLRRYSVDLRYTVFQTTGSVPIATVIINEASGSRTILYYDRSLPDVSATDFEKVDLTQFKWIHIEGRNASEQVKMLQRIDAHNTRQPPEQKIRVSVEVEKPREELFQLFGYGDVVFVSKDVAKHLGFQSAEEALRGLYGRVRKGAVLVCAWAEEGADALGPDGKLLHSDAFPPPRVVDTLGAGDTFNASVIFSLSQGRSVQEALRFGCQVAGKKCGLQGFDGIV

SEQ ID NO: 21547 - protein, 471 aa, Homo sapiens
MPAPQRKHRRGGFSHRCFPTPQTAMTPQPAGPPDGGWGWVVAAAAFAINGLSYGLLRSLGLAFPDLAEHFDRSAQDTAWISALALAVQQAASPVGSALSTRWGARPVVMVGGVLASLGFVFSAFASDLLHLYLGLGLLAGFGWALVFAPALGTLSRYFSRRRVLAVGLALTGNGASSLLLAPALQLLLDTFGWRGALLLLGAITLHLTPCGALLLPLVLPGDPPAPPRSPLAALGLSLFTRRAFSIFALGTALVGGGYFVPYVHLAPHALDRGLGGYGAALVVAVAAMGDAGARLVCGWLADQGWVPLPRLLAVFGALTGLGLWVVGLVPVVGGEESWGGPLLAAAVAYGLSAGSYAPLVFGVLPGLVGVGGVVQATGLVMMLMSLGGLLGPPLSGFLRDETGDFTASFLLSGSLILSGSFIYIGLPRALPSCGPASPPATPPPETGELLPAPQAVLLSPGGPGSTLDTTC

SEQ ID NO: 21548 - protein, 1159 aa, Homo sapiens
MPVRRGHVAPQNTFLDTIIRKFEGQSRKFIIANARVENCAVIYCNDGFCELCGYSRAEVMQRPCTCDFLHGPRTQRRAAAQIAQALLGAEERKVEIAFYRKDGSCFLCLVDVVPVKNEDGAVIMFILNFEVVMEKDMVGSPAHDTNHRGPPTSWLAPGRAKTFRLKLPALLALTARESSVRSGGAGGAGAPGAVVVDVDLTPAAPSSESLALDEVTAMDNHVAGLGPAEERRALVGPGSPPRSAPGQLPSPRAHSLNPDASGSSCSLARTRSRESCASVRRASSADDIEAMRAGVLPPPPRHASTGAMHPLRSGLLNSTSDSDLVRYRTISKIPQITLNFVDLKGDPFLASPTSDREIIAPKIKERTHNVTEKVTQVLSLGADVLPEYKLQAPRIHRWTILHYSPFKAVWDWLILLLVIYTAVFTPYSAAFLLKETEEGPPATECGYACQPLAVVDLIVDIMFIVDILINFRTTYVNANEEVVSHPGRIAVHYFKGWFLIDMVAAIPFDLLIFGSGSEELIGLLKTARLLRLVRVARKLDRYSEYGAAVLFLLMCTFALIAHWLACIWYAIGNMEQPHMDSRIGWLHNLGDQIGKPYNSSGLGGPSIKDKYVTALYFTFSSLTSVGFGNVSPNTNSEKIFSICVMLIGSLMYASIFGNVSAIIQRLYSGTARYHTQMLRVREFIRFHQIPNPLRQRLEEYFQHAWSYTNGIDMNAVLKGFPECLQADICLHLNRSLLQHCKPFRGATKGCLRALAMKFKTTHAPPGDTLVHAGDLLTALYFISRGSIEILRGDVVVAILGKNDIFGEPLNLYARPGKSNGDVRALTYCDLHKIHRDDLLEVLDMYPEFSDHFWSSLEITFNLRDTNMIPGSPGSTELEGGFSRQRKRKLSFRRRTDKDTEQPGEVSALGPGRAGAGPSSRGRPGGPWGESPSSGPSSPESSEDEGPGRSSSPLRLVPFSSPRPPGEPPGGEPLMEDCEKSSDTCNPLSGAFSGVSNIFSFWGDSRGRQYQELPRCPAPTPSLLNIPLSSPGRRPRGDVESRLDALQRQLNRLETRLSADMATVLQLLQRQMTLVPPAYSAVTTPGPGPTSTSPLLPVSPLPTLTLDSLSQVSQFMACEELPPGAPELPQEGPTRRLSLPGQLGALTSQPLHRHGSDPGS

SEQ ID NO: 21549 - protein, 819 aa, Homo sapiens
MAAPAGKASRTGALRPRAQKGRVRRAVRISSLVAQEVLSLGADVLPEYKLQAPRIHRWTILHYSPFKAVWDWLILLLVIYTAVFTPYSAAFLLKETEEGPPATECGYACQPLAVVDLIVDIMFIVDILINFRTTYVNANEEVVSHPGRIAVHYFKGWFLIDMVAAIPFDLLIFGSGSEELIGLLKTARLLRLVRVARKLDRYSEYGAAVLFLLMCTFALIAHWLACIWYAIGNMEQPHMDSRIGWLHNLGDQIGKPYNSSGLGGPSIKDKYVTALYFTFSSLTSVGFGNVSPNTNSEKIFSICVMLIGSLMYASIFGNVSAIIQRLYSGTARYHTQMLRVREFIRFHQIPNPLRQRLEEYFQHAWSYTNGIDMNAVLKGFPECLQADICLHLNRSLLQHCKPFRGATKGCLRALAMKFKTTHAPPGDTLVHAGDLLTALYFISRGSIEILRGDVVVAILGKNDIFGEPLNLYARPGKSNGDVRALTYCDLHKIHRDDLLEVLDMYPEFSDHFWSSLEITFNLRDTNMIPGSPGSTELEGGFSRQRKRKLSFRRRTDKDTEQPGEVSALGPGRAGAGPSSRGRPGGPWGESPSSGPSSPESSEDEGPGRSSSPLRLVPFSSPRPPGEPPGGEPLMEDCEKSSDTCNPLSGAFSGVSNIFSFWGDSRGRQYQELPRCPAPTPSLLNIPLSSPGRRPRGDVESRLDALQRQLNRLETRLSADMATVLQLLQRQMTLVPPAYSAVTTPGPGPTSTSPLLPVSPLPTLTLDSLSQVSQFMACEELPPGAPELPQEGPTRRLSLPGQLGALTSQPLHRHGSDPGS

SEQ ID NO: 21550 - protein, 1102 aa, Homo sapiens
MPVRRGHVAPQNTFLDTIIRKFEGQSRKFIIANARVENCAVIYCNDGFCELCGYSRAEVMQRPCTCDFLHGPRTQRRAAAQIAQALLGAEERKVEIAFYRKDGSCFLCLVDVVPVKNEDGAVIMFILNFEVVMEKDMVVDVDLTPAAPSSESLALDEVTAMDNHVAGLGPAEERRALVGPGSPPRSAPGQLPSPRAHSLNPDASGSSCSLARTRSRESCASVRRASSADDIEAMRAGVLPPPPRHASTGAMHPLRSGLLNSTSDSDLVRYRTISKIPQITLNFVDLKGDPFLASPTSDREIIAPKIKERTHNVTEKVTQVLSLGADVLPEYKLQAPRIHRWTILHYSPFKAVWDWLILLLVIYTAVFTPYSAAFLLKETEEGPPATECGYACQPLAVVDLIVDIMFIVDILINFRTTYVNANEEVVSHPGRIAVHYFKGWFLIDMVAAIPFDLLIFGSGSEELIGLLKTARLLRLVRVARKLDRYSEYGAAVLFLLMCTFALIAHWLACIWYAIGNMEQPHMDSRIGWLHNLGDQIGKPYNSSGLGGPSIKDKYVTALYFTFSSLTSVGFGNVSPNTNSEKIFSICVMLIGSLMYASIFGNVSAIIQRLYSGTARYHTQMLRVREFIRFHQIPNPLRQRLEEYFQHAWSYTNGIDMNAVLKGFPECLQADICLHLNRSLLQHCKPFRGATKGCLRALAMKFKTTHAPPGDTLVHAGDLLTALYFISRGSIEILRGDVVVAILGKNDIFGEPLNLYARPGKSNGDVRALTYCDLHKIHRDDLLEVLDMYPEFSDHFWSSLEITFNLRDTNMIPGSPGSTELEGGFSRQRKRKLSFRRRTDKDTEQPGEVSALGPGRAGAGPSSRGRPGGPWGESPSSGPSSPESSEDEGPGRSSSPLRLVPFSSPRPPGEPPGGEPLMEDCEKSSDTCNPLSGAFSGVSNIFSFWGDSRGRQYQELPRCPAPTPSLLNIPLSSPGRRPRGDVESRLDALQRQLNRLETRLSADMATVLQLLQRQMTLVPPAYSAVTTPGPGPTSTSPLLPVSPLPTLTLDSLSQVSQFMACEELPPGAPELPQEGPTRRLSLPGQLGALTSQPLHRHGSDPGS

SEQ ID NO: 21551 - protein, 888 aa, Homo sapiens
MPVRRGHVAPQNTFLDTIIRKFEGQSRKFIIANARVENCAVIYCNDGFCELCGYSRAEVMQRPCTCDFLHGPRTQRRAAAQIAQALLGAEERKVEIAFYRKDGSCFLCLVDVVPVKNEDGAVIMFILNFEVVMEKDMVGSPAHDTNHRGPPTSWLAPGRAKTFRLKLPALLALTARESSVRSGGAGGAGAPGAVVVDVDLTPAAPSSESLALDEVTAMDNHVAGLGPAEERRALVGPGSPPRSAPGQLPSPRAHSLNPDASGSSCSLARTRSRESCASVRRASSADDIEAMRAGVLPPPPRHASTGAMHPLRSGLLNSTSDSDLVRYRTISKIPQITLNFVDLKGDPFLASPTSDREIIAPKIKERTHNVTEKVTQVLSLGADVLPEYKLQAPRIHRWTILHYSPFKAVWDWLILLLVIYTAVFTPYSAAFLLKETEEGPPATECGYACQPLAVVDLIVDIMFIVDILINFRTTYVNANEEVVSHPGRIAVHYFKGWFLIDMVAAIPFDLLIFGSGSEELIGLLKTARLLRLVRVARKLDRYSEYGAAVLFLLMCTFALIAHWLACIWYAIGNMEQPHMDSRIGWLHNLGDQIGKPYNSSGLGGPSIKDKYVTALYFTFSSLTSVGFGNVSPNTNSEKIFSICVMLIGSLMYASIFGNVSAIIQRLYSGTARYHTQMLRVREFIRFHQIPNPLRQRLEEYFQHAWSYTNGIDMNAVLKGFPECLQADICLHLNRSLLQHCKPFRGATKGCLRALAMKFKTTHAPPGDTLVHAGDLLTALYFISRGSIEILRGDVVVAILGMGWGAGTGLEMPSAASRGASLLNMQSLGLWTWDCLQGHWAPLIHLNSGPPSGAMERSPTWGEAAELWGSHILLPFRIRHKQTLFASLK

SEQ ID NO: 21552 - protein, 548 aa, Homo sapiens
MAAPAGKASRTGALRPRAQKGRVRRAVRISSLVAQEVLSLGADVLPEYKLQAPRIHRWTILHYSPFKAVWDWLILLLVIYTAVFTPYSAAFLLKETEEGPPATECGYACQPLAVVDLIVDIMFIVDILINFRTTYVNANEEVVSHPGRIAVHYFKGWFLIDMVAAIPFDLLIFGSGSEELIGLLKTARLLRLVRVARKLDRYSEYGAAVLFLLMCTFALIAHWLACIWYAIGNMEQPHMDSRIGWLHNLGDQIGKPYNSSGLGGPSIKDKYVTALYFTFSSLTSVGFGNVSPNTNSEKIFSICVMLIGSLMYASIFGNVSAIIQRLYSGTARYHTQMLRVREFIRFHQIPNPLRQRLEEYFQHAWSYTNGIDMNAVLKGFPECLQADICLHLNRSLLQHCKPFRGATKGCLRALAMKFKTTHAPPGDTLVHAGDLLTALYFISRGSIEILRGDVVVAILGMGWGAGTGLEMPSAASRGASLLNMQSLGLWTWDCLQGHWAPLIHLNSGPPSGAMERSPTWGEAAELWGSHILLPFRIRHKQTLFASLK

SEQ ID NO: 21553 - protein, 1063 aa, Homo sapiens
MSSHSAGSCFLCLVDVVPVKNEDGAVIMFILNFEVVMEKDMVGSPAHDTNHRGPPTSWLAPGRAKTFRLKLPALLALTARESSVRSGGAGGAGAPGAVVVDVDLTPAAPSSESLALDEVTAMDNHVAGLGPAEERRALVGPGSPPRSAPGQLPSPRAHSLNPDASGSSCSLARTRSRESCASVRRASSADDIEAMRAGVLPPPPRHASTGAMHPLRSGLLNSTSDSDLVRYRTISKIPQITLNFVDLKGDPFLASPTSDREIIAPKIKERTHNVTEKVTQVLSLGADVLPEYKLQAPRIHRWTILHYSPFKAVWDWLILLLVIYTAVFTPYSAAFLLKETEEGPPATECGYACQPLAVVDLIVDIMFIVDILINFRTTYVNANEEVVSHPGRIAVHYFKGWFLIDMVAAIPFDLLIFGSGSEELIGLLKTARLLRLVRVARKLDRYSEYGAAVLFLLMCTFALIAHWLACIWYAIGNMEQPHMDSRIGWLHNLGDQIGKPYNSSGLGGPSIKDKYVTALYFTFSSLTSVGFGNVSPNTNSEKIFSICVMLIGSLMYASIFGNVSAIIQRLYSGTARYHTQMLRVREFIRFHQIPNPLRQRLEEYFQHAWSYTNGIDMNAVLKGFPECLQADICLHLNRSLLQHCKPFRGATKGCLRALAMKFKTTHAPPGDTLVHAGDLLTALYFISRGSIEILRGDVVVAILGKNDIFGEPLNLYARPGKSNGDVRALTYCDLHKIHRDDLLEVLDMYPEFSDHFWSSLEITFNLRDTNMIPGSPGSTELEGGFSRQRKRKLSFRRRTDKDTEQPGEVSALGPGRAGAGPSSRGRPGGPWGESPSSGPSSPESSEDEGPGRSSSPLRLVPFSSPRPPGEPPGGEPLMEDCEKSSDTCNPLSGAFSGVSNIFSFWGDSRGRQYQELPRCPAPTPSLLNIPLSSPGRRPRGDVESRLDALQRQLNRLETRLSADMATVLQLLQRQMTLVPPAYSAVTTPGPGPTSTSPLLPVSPLPTLTLDSLSQVSQFMACEELPPGAPELPQEGPTRRLSLPGQLGALTSQPLHRHGSDPGS

SEQ ID NO: 21554 - protein, 666 aa, Homo sapiens
MATTVTCTRFTDEYQLYEDIGKGAFSVVRRCVKLCTGHEYAAKIINTKKLSARDHQKLEREARICRLLKHSNIVRLHDSISEEGFHYLVFDLVTGGELFEDIVAREYYSEADASHCIQQILEAVLHCHQMGVVHRDLKPENLLLASKCKGAAVKLADFGLAIEVQGDQQAWFGFAGTPGYLSPEVLRKEAYGKPVDIWACGVILYILLVGYPPFWDEDQHKLYQQIKAGAYDFPSPEWDTVTPEAKNLINQMLTINPAKRITAHEALKHPWVCQRSTVASMMHRQETVECLKKFNARRKLKGAILTTMLATRNFSVGRQTTAPATMSTAASGTTMGLVEQAKSLLNKKADGVKPQTNSTKNSAAATSPKGTLPPAALEPQTTVIHNPVDGIKESSDSANTTIEDEDAKAPRVPDILSSVRRGSGAPEAEGPLPCPSPAPFSPLPAPSPRISDILNSVRRGSGTPEAEGPLSAGPPPCLSPALLGPLSSPSPRISDILNSVRRGSGTPEAEGPSPVGPPPCPSPTIPGPLPTPSRKQEIIKTTEQLIEAVNNGDFEAYAKICDPGLTSFEPEALGNLVEGMDFHRFYFENLLAKNSKPIHTTILNPHVHVIGEDAACIAYIRLTQYIDGQGRPRTSQSEETRVWHRRDGKWQNVHFHCSGAPVAPLQ

SEQ ID NO: 21555 - protein, 542 aa, Homo sapiens
MATTVTCTRFTDEYQLYEDIGKGAFSVVRRCVKLCTGHEYAAKIINTKKLSARDHQKLEREARICRLLKHSNIVRLHDSISEEGFHYLVFDLVTGGELFEDIVAREYYSEADASHCIQQILEAVLHCHQMGVVHRDLKPENLLLASKCKGAAVKLADFGLAIEVQGDQQAWFGFAGTPGYLSPEVLRKEAYGKPVDIWACGVILYILLVGYPPFWDEDQHKLYQQIKAGAYDFPSPEWDTVTPEAKNLINQMLTINPAKRITAHEALKHPWVCQRSTVASMMHRQETVECLKKFNARRKLKGAILTTMLATRNFSVGRQTTAPATMSTAASGTTMGLVEQAKSLLNKKADGVKPQTNSTKNSAAATSPKGTLPPAALEPQTTVIHNPVDGIKESSDSANTTIEDEDAKARKQEIIKTTEQLIEAVNNGDFEAYAKICDPGLTSFEPEALGNLVEGMDFHRFYFENLLAKNSKPIHTTILNPHVHVIGEDAACIAYIRLTQYIDGQGRPRTSQSEETRVWHRRDGKWQNVHFHCSGAPVAPLQ

SEQ ID NO: 21556 - protein, 503 aa, Homo sapiens
MATTVTCTRFTDEYQLYEDIGKGAFSVVRRCVKLCTGHEYAAKIINTKKLSARDHQKLEREARICRLLKHSNIVRLHDSISEEGFHYLVFDLVTGGELFEDIVAREYYSEADASHCIQQILEAVLHCHQMGVVHRDLKPENLLLASKCKGAAVKLADFGLAIEVQGDQQAWFGFAGTPGYLSPEVLRKEAYGKPVDIWACGVILYILLVGYPPFWDEDQHKLYQQIKAGAYDFPSPEWDTVTPEAKNLINQMLTINPAKRITAHEALKHPWVCQRSTVASMMHRQETVECLKKFNARRKLKGAILTTMLATRNFSAAKSLLNKKADGVKPQTNSTKNSAAATSPKGTLPPAALESSDSANTTIEDEDAKARKQEIIKTTEQLIEAVNNGDFEAYAKICDPGLTSFEPEALGNLVEGMDFHRFYFENLLAKNSKPIHTTILNPHVHVIGEDAACIAYIRLTQYIDGQGRPRTSQSEETRVWHRRDGKWQNVHFHCSGAPVAPLQ

SEQ ID NO: 21557 - protein, 479 aa, Homo sapiens
MATTVTCTRFTDEYQLYEDIGKGAFSVVRRCVKLCTGHEYAAKIINTKKLSARDHQKLEREARICRLLKHSNIVRLHDSISEEGFHYLVFDLVTGGELFEDIVAREYYSEADASHCIQQILEAVLHCHQMGVVHRDLKPENLLLASKCKGAAVKLADFGLAIEVQGDQQAWFGFAGTPGYLSPEVLRKEAYGKPVDIWACGVILYILLVGYPPFWDEDQHKLYQQIKAGAYDFPSPEWDTVTPEAKNLINQMLTINPAKRITAHEALKHPWVCQRSTVASMMHRQETVECLKKFNARRKLKGAILTTMLATRNFSAAKSLLNKKADGVKESSDSANTTIEDEDAKARKQEIIKTTEQLIEAVNNGDFEAYAKICDPGLTSFEPEALGNLVEGMDFHRFYFENLLAKNSKPIHTTILNPHVHVIGEDAACIAYIRLTQYIDGQGRPRTSQSEETRVWHRRDGKWQNVHFHCSGAPVAPLQ

SEQ ID NO: 21558 - protein, 518 aa, Homo sapiens
MATTVTCTRFTDEYQLYEDIGKGAFSVVRRCVKLCTGHEYAAKIINTKKLSARDHQKLEREARICRLLKHSNIVRLHDSISEEGFHYLVFDLVTGGELFEDIVAREYYSEADASHCIQQILEAVLHCHQMGVVHRDLKPENLLLASKCKGAAVKLADFGLAIEVQGDQQAWFGFAGTPGYLSPEVLRKEAYGKPVDIWACGVILYILLVGYPPFWDEDQHKLYQQIKAGAYDFPSPEWDTVTPEAKNLINQMLTINPAKRITAHEALKHPWVCQRSTVASMMHRQETVECLKKFNARRKLKGAILTTMLATRNFSAAKSLLNKKADGVKPQTNSTKNSAAATSPKGTLPPAALEPQTTVIHNPVDGIKESSDSANTTIEDEDAKARKQEIIKTTEQLIEAVNNGDFEAYAKICDPGLTSFEPEALGNLVEGMDFHRFYFENLLAKNSKPIHTTILNPHVHVIGEDAACIAYIRLTQYIDGQGRPRTSQSEETRVWHRRDGKWQNVHFHCSGAPVAPLQ

SEQ ID NO: 21559 - protein, 492 aa, Homo sapiens
MATTVTCTRFTDEYQLYEDIGKGAFSVVRRCVKLCTGHEYAAKIINTKKLSARDHQKLEREARICRLLKHSNIVRLHDSISEEGFHYLVFDLVTGGELFEDIVAREYYSEADASHCIQQILEAVLHCHQMGVVHRDLKPENLLLASKCKGAAVKLADFGLAIEVQGDQQAWFGFAGTPGYLSPEVLRKEAYGKPVDIWACGVILYILLVGYPPFWDEDQHKLYQQIKAGAYDFPSPEWDTVTPEAKNLINQMLTINPAKRITAHEALKHPWVCQRSTVASMMHRQETVECLKKFNARRKLKGAILTTMLATRNFSVGRQTTAPATMSTAASGTTMGLVEQAKSLLNKKADGVKEPQTTVIHNPVDGIKESSDSANTTIEDEDAKARKQEIIKTTEQLIEAVNNGDFEAYAFYFENLLAKNSKPIHTTILNPHVHVIGEDAACIAYIRLTQYIDGQGRPRTSQSEETRVWHRRDGKWQNVHFHCSGAPVAPLQ

SEQ ID NO: 21560 - protein, 449 aa, Homo sapiens
MATTVTCTRFTDEYQLYEDIGKGAFSVVRRCVKLCTGHEYAAKIINTKKLSARDHQKLEREARICRLLKHSNIVRLHDSISEEGFHYLVFDLVTGGELFEDIVAREYYSEADASHCIQQILEAVLHCHQMGVVHRDLKPENLLLASKCKGAAVKLADFGLAIEVQGDQQAWFGFAGTPGYLSPEVLRKEAYGKPVDIWACGVILYILLVGYPPFWDEDQHKLYQQIKAGAYDFPSPEWDTVTPEAKNLINQMLTINPAKRITAHEALKHPWVCQRSTVASMMHRQETVECLKKFNARRKLKGAILTTMLATRNFSARKQEIIKTTEQLIEAVNNGDFEAYAKICDPGLTSFEPEALGNLVEGMDFHRFYFENLLAKNSKPIHTTILNPHVHVIGEDAACIAYIRLTQYIDGQGRPRTSQSEETRVWHRRDGKWQNVHFHCSGAPVAPLQ

SEQ ID NO: 21561 - protein, 517 aa, Homo sapiens
MATTVTCTRFTDEYQLYEDIGKGAFSVVRRCVKLCTGHEYAAKIINTKKLSARDHQKLEREARICRLLKHSNIVRLHDSISEEGFHYLVFDLVTGGELFEDIVAREYYSEADASHCIQQILEAVLHCHQMGVVHRDLKPENLLLASKCKGAAVKLADFGLAIEVQGDQQAWFGFAGTPGYLSPEVLRKEAYGKPVDIWACGVILYILLVGYPPFWDEDQHKLYQQIKAGAYDFPSPEWDTVTPEAKNLINQMLTINPAKRITAHEALKHPWVCQRSTVASMMHRQETVECLKKFNARRKLKGAILTTMLATRNFSAKSLLNKKADGVKPQTNSTKNSAAATSPKGTLPPAALEPQTTVIHNPVDGIKESSDSANTTIEDEDAKARKQEIIKTTEQLIEAVNNGDFEAYAKICDPGLTSFEPEALGNLVEGMDFHRFYFENLLAKNSKPIHTTILNPHVHVIGEDAACIAYIRLTQYIDGQGRPRTSQSEETRVWHRRDGKWQNVHFHCSGAPVAPLQ

SEQ ID NO: 21562 - protein, 611 aa, Homo sapiens
MPRRKRNAGSSSDGTEDSDFSTDLEHTDSSESDGTSRRSARVTRSSARLSQSSQDSSPVRNLQSFGTEEPAYSTRRVTRSQQQPTPVTPKKYPLRQTRSSGSETEQVVDFSDRETKNTADHDESPPRTPTGNAPSSESDIDISSPNVSHDESIAKDMSLKDSGSDLSHRPKRRRFHESYNFNMKCPTPGCNSLGHLTGKHERHFSISGCPLYHNLSADECKVRAQSRDKQIEERMLSHRQDDNNRHATRHQAPTERQLRYKEKVAELRKKRNSGLSKEQKEKYMEHRQTYGNTREPLLENLTSEYDLDLFRRAQARASEDLEKLRLQGQITEGSNMIKTIAFGRYELDTWYHSPYPEEYARLGRLYMCEFCLKYMKSQTILRRHMAKCVWKHPPGDEIYRKGSISVFEVDGKKNKIYCQNLCLLAKLFLDHKTLYYDVEPFLFYVMTEADNTGCHLIGYFSKEKNSFLNYNVSCILTMPQYMRQGYGKMLIDFSYLLSKVEEKVGSPERPLSDLGLISYRSYWKEVLLRYLHNFQGKEISIKEISQETAVNPVDIVSTLQALQMLKYWKGKHLVLKRQDLIDEWIAKEAKRSNSNKTMDPSCLKWTPPKGT

SEQ ID NO: 21563 - protein, 501 aa, Homo sapiens
MPRRKRNAGSSSDGTEDSDFSTDLEHTDSSESDGTSRRSARVTRSSARLSQSSQDSSPVRNLQSFGTEEPAYSTRRVTRSQQQPTPVTPKKYPLRQTRSSGSETEQVVDFSDRGHLTGKHERHFSISGCPLYHNLSADECKAPTERQLRYKEKVAELRKKRNSGLSKEQKEKYMEHRQTYGNTREPLLENLTSEYDLDLFRRAQARASEDLEKLRLQGQITEGSNMIKTIAFGRYELDTWYHSPYPEEYARLGRLYMCEFCLKYMKSQTILRRHMAKCVWKHPPGDEIYRKGSISVFEVDGKKNKIYCQNLCLLAKLFLDHKTLYYDVEPFLFYVMTEADNTGCHLIGYFSKEKNSFLNYNVSCILTMPQYMRQGYGKMLIDFSYLLSKVEEKVGSPERPLSDLGLISYRSYWKEVLLRYLHNFQGKEISIKEISQETAVNPVDIVSTLQALQMLKYWKGKHLVLKRQDLIDEWIAKEAKRSNSNKTMDPSCLKWTPPKGT

SEQ ID NO: 21564 - protein, 442 aa, Homo sapiens
MPRRKRNAGSSSDGTEDSDFSTDLEHTDSSESDGTSRRSARVTRSSARLSQSSQGHLTGKHERHFSISGCPLYHNLSADECKAPTERQLRYKEKVAELRKKRNSGLSKEQKEKYMEHRQTYGNTREPLLENLTSEYDLDLFRRAQARASEDLEKLRLQGQITEGSNMIKTIAFGRYELDTWYHSPYPEEYARLGRLYMCEFCLKYMKSQTILRRHMAKCVWKHPPGDEIYRKGSISVFEVDGKKNKIYCQNLCLLAKLFLDHKTLYYDVEPFLFYVMTEADNTGCHLIGYFSKEKNSFLNYNVSCILTMPQYMRQGYGKMLIDFSYLLSKVEEKVGSPERPLSDLGLISYRSYWKEVLLRYLHNFQGKEISIKEISQETAVNPVDIVSTLQALQMLKYWKGKHLVLKRQDLIDEWIAKEAKRSNSNKTMDPSCLKWTPPKGT

SEQ ID NO: 21565 - protein, 581 aa, Homo sapiens
MPRRKRNAGSSSDGTEDSDFSTDLEHTDSSESDGTSRRSARVTRSSARLSQSSQDSSPVRNLQSFGTEEPAYSTRRVTRSQQQPTPVTPKKYPLRQTRSSGSETEQVVDFSDRETKNTADHDESPPRTPTGNAPSSESDIDISSPNVSHDESIAKDMSLKDSGSDLSHRPKRRRFHESYNFNMKCPTPGCNSLGHLTGKHERHFSISGCPLYHNLSADECKAPTERQLRYKEKVAELRKKRNSGLSKEQKEKYMEHRQTYGNTREPLLENLTSEYDLDLFRRAQARASEDLEKLRLQGQITEGSNMIKTIAFGRYELDTWYHSPYPEEYARLGRLYMCEFCLKYMKSQTILRRHMAKCVWKHPPGDEIYRKGSISVFEVDGKKNKIYCQNLCLLAKLFLDHKTLYYDVEPFLFYVMTEADNTGCHLIGYFSKEKNSFLNYNVSCILTMPQYMRQGYGKMLIDFSYLLSKVEEKVGSPERPLSDLGLISYRSYWKEVLLRYLHNFQGKEISIKEISQETAVNPVDIVSTLQALQMLKYWKGKHLVLKRQDLIDEWIAKEAKRSNSNKTMDPSCLKWTPPKGT

SEQ ID NO: 21566 - protein, 472 aa, Homo sapiens
MPRRKRNAGSSSDGTEDSDFSTDLEHTDSSESDGTSRRSARVTRSSARLSQSSQGHLTGKHERHFSISGCPLYHNLSADECKVRAQSRDKQIEERMLSHRQDDNNRHATRHQAPTERQLRYKEKVAELRKKRNSGLSKEQKEKYMEHRQTYGNTREPLLENLTSEYDLDLFRRAQARASEDLEKLRLQGQITEGSNMIKTIAFGRYELDTWYHSPYPEEYARLGRLYMCEFCLKYMKSQTILRRHMAKCVWKHPPGDEIYRKGSISVFEVDGKKNKIYCQNLCLLAKLFLDHKTLYYDVEPFLFYVMTEADNTGCHLIGYFSKEKNSFLNYNVSCILTMPQYMRQGYGKMLIDFSYLLSKVEEKVGSPERPLSDLGLISYRSYWKEVLLRYLHNFQGKEISIKEISQETAVNPVDIVSTLQALQMLKYWKGKHLVLKRQDLIDEWIAKEAKRSNSNKTMDPSCLKWTPPKGT

SEQ ID NO: 21567 - protein, 261 aa, Homo sapiens
MWDLVLSIALSVGCTGAVPLIQSRIVGGWECEKHSQPWQVAVYSHGWAHCGGVLVHPQWVLTAAHCLKKNSQVWLGRHNLFEPEDTGQRVPVSHSFPHPLYNMSLLKHQSLRPDEDSSHDLMLLRLSEPAKITDVVKVLGLPTQEPALGTTCYASGWGSIEPEEFLRPRSLQCVSLHLLSNDMCARAYSEKVTEFMLCAGLWTGGKDTCGGDSGGPLVCNGVLQGITSWGPEPCALPEKPAVYTKVVHYRKWIKDTIAANP

SEQ ID NO: 21568 - protein, 223 aa, Homo sapiens
MWDLVLSIALSVGCTGAVPLIQSRIVGGWECEKHSQPWQVAVYSHGWAHCGGVLVHPQWVLTAAHCLKKNSQVWLGRHNLFEPEDTGQRVPVSHSFPHPLYNMSLLKHQSLRPDEDSSHDLMLLRLSEPAKITDVVKVLGLPTQEPALGTTCYASGWGSIEPEEFLRPRSLQCVSLHLLSNDMCARAYSEKVTEFMLCAGLWTGGKDTCGVSHPYSQHLEGKG

SEQ ID NO: 21569 - protein, 164 aa, Homo sapiens
MWDLVLSIALSVGCTGAVPLIQSRIVGGWECEKHSQPWQVAVYSHGWAHCGGVLVHPQWVLTAAHCLKKNSQVWLGRHNLFEPEDTGQRVPVSHSFPHPLYNMSLLKHQSLRPDEDSSHDLMLLRLSEPAKITDVVKVLGLPTQEPALGTTCYASGWGSIEPEE

SEQ ID NO: 21570 - protein, 159 aa, Homo sapiens
MSLLKHQSLRPDEDSSHDLMLLRLSEPAKITDVVKVLGLPTQEPALGTTCYASGWGSIEPEEFLRPRSLQCVSLHLLSNDMCARAYSEKVTEFMLCAGLWTGGKDTCGGDSGGPLVCNGVLQGITSWGPEPCALPEKPAVYTKVVHYRKWIKDTIAANP

SEQ ID NO: 21571 - protein, 408 aa, Homo sapiens
MAGRGFSWGPGHLNEDNARFLLLAALIVLYLLGGAAVFSALELAHERQAKQRWEERLANFSRGHNLSRDELRGFLRHYEEATRAGIRVDNVRPRWDFTGAFYFVGTVVSTIGFGMTTPATVGGKIFLIFYGLVGCSSTILFFNLFLERLITIIAYIMKSCHQRQLRRRGALPQESLKDAGQCEVDSLAGWKPSVYYVMLILCTASILISCCASAMYTPIEGWSYFDSLYFCFVAFSTIGFGDLVSSQNAHYESQGLYRFANFVFILMGVCCIYSLFNVISILIKQSLNWILRKMDSGCCPQCQRGLLRSRRNVVMPGSVRNRCNISIETDGVAESDTDGRRLSGEMISMKDLLAANKASLAILQKQLSEMANGCPHQTSTLARDNEFSGGVGAFAIMNNRLAETSGDR

SEQ ID NO: 21572 - protein, 336 aa, Homo sapiens
MLQSLAGSSCVRLVERHRSAWCFGFLVLGYLLYLVFGAVVFSSVELPYEDLLRQELRKLKRRFLEEHECLSEQQLEQFLGRVLEASNYGVSVLSNASGNWNWDFTSALFFASTVLSTTGYGHTVPLSDGGKAFCIIYSVIGIPFTLLFLTAVVQRITVHVTRRPVLYFHIRWGFSKQVVAIVHAVLLGFVTVSCFFFIPAAVFSVLEDDWNFLESFYFCFISLSTIGLGDYVPGEGYNQKFRELYKIGITCYLLLGLIAMLVVLETFCELHELKKFRKMFYVKKDKDEDQVHIIEHDQLSFSSITDQAAGMKEDQKQNEPFVATQSSACVDGPANH

SEQ ID NO: 21573 - protein, 430 aa, Homo sapiens
MSSRSPRPPPRRSRRRLPRPSCCCCCCRRSHLNEDTGRFVLLAALIGLYLVAGATVFSALESPGEAEARARWGATLRNFSAAHGVAEPELRAFLRHYEAALAAGVRADALRPRWDFPGAFYFVGTVVSTIGFGMTTPATVGGKAFLIAYGLFGCAGTILFFNLFLERIISLLAFIMRACRERQLRRSGLLPATFRRGSALSEADSLAGWKPSVYHVLLILGLFAVLLSCCASAMYTSVEGWDYVDSLYFCFVTFSTIGFGDLVSSQHAAYRNQGLYRLGNFLFILLGVCCIYSLFNVISILIKQVLNWMLRKLSCRCCARCCPAPGAPLARRNAITPGSRLRRRLAALGADPAARDSDAEGRRLSGELISMRDLTASNKVSLALLQKQLSETANGYPRSVCVNTRQNGFSGGVGALGIMNNRLAETSASR

SEQ ID NO: 21574 - protein, 255 aa, Homo sapiens
MWQGCAVERPVGRMTSQTPLPQSPRPRRPTMSTVVELNVGGEFHTTTLGTLRKFPGSKLAEMFSSLAKASTDAEGRFFIDRPSTYFRPILDYLRTGQVPTQHIPEVYREAQFYEIKPLVKLLEDMPQIFGEQVSRKQFLLQVPGYSENLELMVRLARAEAITARKSSVLVCLVETEEQDAYYSEVLCFLQDKKMFKSVVKFGPWKAVLDNSDLMHCLEMDIKAQGYKVFSKFYLTYPTKRNEFHFNIYSFTFTWW

SEQ ID NO: 21575 - protein, 225 aa, Homo sapiens
MSTVVELNVGGEFHTTTLGTLRKFPGSKLAEMFSSLAKASTDAEGRFFIDRPSTYFRPILDYLRTGQVPTQHIPEVYREAQFYEIKPLVKLLEDMPQIFGEQVSRKQFLLQVPGYSENLELMVRLARAEAITARKSSVLVCLVETEEQDAYYSEVLCFLQDKKMFKSVVKFGPWKAVLDNSDLMHCLEMDIKAQGYKVFSKFYLTYPTKRNEFHFNIYSFTFTWW

SEQ ID NO: 21576 - protein, 1648 aa, Homo sapiens
MSLHSTHNRNNSGDILDIPSSQNSSSLNALTHSSRLKLHLKSDMSECENDDPLLRSAGKVRDINRTYVISASRKTADMPLTPNPVGRLALQRRTTRNKESSLLVSELEDTTEKTAETRLTLQRRAKTDSAEKWKTAEIDSVKMTLNVGGETENNGVSKESRTNVRIVNNAKNSFVASSVPLDEDPQVIEMMADKKYKETFSAPSRANENVALKYSSNRPPIASLSQTEVVRSGHLTTKPTQSKLDIKVLGTGNLYHRSIGKEIAKTSNKFGSLEKRTPTKCTTEHKLTTKCSLPQLKSPAPSILKNRMSNLQVKQRPKSSFLANKQERSAENTILPEEETVVQNTSAGKDPLKVENSQVTVAVRVRPFTKREKIEKASQVVFMSGKEITVEHPDTKQVYNFIYDVSFWSFDECHPHYASQTTVYEKLAAPLLERAFEGFNTCLFAYGQTGSGKSYTMMGFSEEPGIIPRFCEDLFSQVARKQTQEVSYHIEMSFFEVYNEKIHDLLVCKDENGQRKQPLRVREHPVYGPYVEALSMNIVSSYADIQSWLELGNKQRATAATGMNDKSSRSHSVFTLVMTQTKTEFVEGEEHDHRITSRINLIDLAGSERCSTAHTNGDRLKEGVSINKSLLTLGKVISALSEQANQRSVFIPYRESVLTWLLKESLGGNSKTAMIATISPAASNIEETLSTLRYANQARLIVNIAKVNEDMNAKLIRELKAEIAKLKAAQRNSRNIDPERYRLCRQEITSLRMKLHQQERDMAEMQRVWKEKFEQAEKRKLQETKELQKAGIMFQMDNHLPNLVNLNEDPQLSEMLLYMIKEGTTTVGKYKPNSSHDIQLSGVLIADDHCTIKNFGGTVSIIPVGEAKTYVNGKHILEITVLRHGDRVILGGDHYFRFNHPVEVQKGKRPSGRDTPISEGPKDFEFAKNELLMAQRSQLEAEIKEAQLKAKEEMMQGIQIAKEMAQQELSSQKAAYESKIKALEAELREESQRKKMQEINNQKANHKIEELEKAKQHLEQEIYVNKKRLEMETLATKQALEDHSIRHARILEALETEKQKIAKEVQILQQNRNNRDKTFTVQTTWSSMKLSMMIQEANAISSKLKTYYVFGRHDISDKSSSDTSIRVRNLKLGISTFWSLEKFESKLAAMKELYESNGSNRGEDAFCDPEDEWEPDITDAPVSSLSRRRSRSLMKNRRISGCLHDIQVHPIKNLHSSHSSGLMDKSSTIYSNSAESFLPGICKELIGSSLDFFGQSYDEERTIADSLINSFLKIYNGLFAISKAHEEQDEESQDNLFSSDRAIQSLTIQTACAFEQLVVLMKHWLSDLLPCTNIARLEDELRQEVKKLGGYLQLFLQGCCLDISSMIKEAQKNAIQIVQQAVKYVGQLAVLKGSKLHFLENGNNKAASVQEEFMDAVCDGVGLGMKILLDSGLEKAKELQHELFRQCTKNEVTKEMKTNAMGLIRSLENIFAESKIKSFRRQVQEENFEYQDFKRMVNRAPEFLKLKHCLEKAIEIIISALKGCHSDINLLQTCVESIRNLASDFYSDFSVPSTSVGSYESRVTHIVHQELESLAKSLLFCFESEESPDLLKPWETYNQNTKEEHQQSKSSGIDGSKNKGVPKRVYELHGSSPAVSSEECTPSRIQWV

SEQ ID NO: 21577 - protein, 646 aa, Homo sapiens
MEERGSPDGDLARSLEQGPEGPETPIQVVLRVRPMSAAELRRGQQSVLHCSGTRTLQGGPEVAFRFGAVLDAARTQEDVFRACGVRRLGELALRGFSCTVFTFGQTGSGKTYTLTGPPPQGEGVPVPPSLAGIMQRTFAWLLDRVQHLGAPVTLRASYLEIYNEQVRDLLSLGSPRPLPVRWNKTRGFYVEQLRVVEFGSLEALMELLQTGLSRRRNSAHTLNQASSRSHALLTLYISRQTAQQMPSVDPGEPPVGGKLCFVDLAGSEKVAATGSRGELMLEANSINRSLLALGHCISLLLDPQRKQSHIPFRDSKLTKLLADSLGGRGVTLMVACVSPSAQCLPETLSTLRYASRAQRVTTRPQAPKSPVAKQPQRLETEMLQLQEENRRLQFQLDQMDCKASGLSGARVAWAQRNLYGMLQEFMLENERLRKEKSQLQNSRDLAQNEQRILAQQVHALERRLLSACYHHQQGPGLTPPCPCLMAPAPPCHALPPLYSCPCCHICPLCRVPLAHWACLPGEHHLPQVLDPEASGGRPPSARPPPWAPPCSPGSAKCPRERSHSDWTQTRVLAEMLTEEEVVPSAPPLPVRPPKTSPGLRGGAGVPNLAQRLEALRDQIGSSLRRGRSQPPCSEGARSPGQVLPPH

SEQ ID NO: 21578 - protein, 381 aa, Homo sapiens
MESGSTAASEEARSLRECELYVQKHNIQALLKDSIVQLCTARPERPMAFLREYFERLEKEEAKQIQNLQKAGTRTDSREDEISPPPPNPVVKGRRRRGAISAEVYTEEDAASYVRKVIPKDYKTMAALAKAIEKNVLFSHLDDNERSDIFDAMFSVSFIAGETVIQQGDEGDNFYVIDQGETDVYVNNEWATSVGEGGSFGELALIYGTPRAATVKAKTNVKLWGIDRDSYRRILMGSTLRKRKMYEEFLSKVSILESLDKWERLTVADALEPVQFEDGQKIVVQGEPGDEFFIILEGSAAVLQRRSENEEFVEVGRLGPSDYFGEIALLMNRPRAATVVARGPLKCVKLDRPRFERVLGPCSDILKRNIQQYNSFVSLSV

SEQ ID NO: 21579 - protein, 337 aa, Homo sapiens
MESGSTAASEEARSLRECELYVQKHNIQALLKDSIVQLCTARPERPMAFLREYFERLEKEEAKQIQNLQKAGTRTDSREDEISPPPPNPVVKGRRRRGAISAEVYTEEDAASYVRKVIPKDYKTMAALAKAIEKNVLFSHLDDNERSDIFDAMFSVSFIAGETVIQQGDEGDNFYVIDQGETDVYVNNEWATSVGEGGSFGELALIYGTPRAATVKAKTNVKLWGIDRDSYRRILMGSTLRKRKMYEEFLSKVSILESLDKWERLTVADALEPVQFEDGQKIVVQGEPGDEFFIILEGSAAVLQRRSENEEFVEVGRLGPSDYFGHLIISRRSIPLG

SEQ ID NO: 21580 - protein, 790 aa, Homo sapiens
MGTRKKVHAFVRVKPTDDFAHEMIRYGDDKRSIDIHLKKDIRRGVVNNQQTDWSFKLDGVLHDASQDLVYETVAKDVVSQALDGYNGTIMCYGQTGAGKTYTMMGATENYKHRGILPRALQQVFRMIEERPTHAITVRVSYLEIYNESLFDLLSTLPYVGPSVTPMTIVENPQGVFIKGLSVHLTSQEEDAFSLLFEGETNRIIASHTMNKNSSRSHCIFTIYLEAHSRTLSEEKYITSKINLVDLAGSERLGKSGSEGQVLKEATYINKSLSFLEQAIIALGDQKRDHIPFRQCKLTHALKDSLGGNCNMVLVTNIYGEAAQLEETLSSLRFASRMKLVTTEPAINEKYDAERMVKNLEKELALLKQELAIHDSLTNRTFVTYDPMDEIQIAEINSQVRRYLEGTLDEIDIISLRQIKEVFNQFRVVLSQQEQEVESTLRRKYTLIDRNDFAAISAIQKAGLVDVDGHLVGEPEGQNFGLGVAPFSTKPGKKAKSKKTFKEPLSSLARKEGASSPVNGKDLDYVSTSKTQLVPSSKDGDVKDMLSRDRETSSIEPLPSDSPKEELRPIRPDTPPSKPVAFEEFKNEQGSEINRIFKENKSILNERRKRASETTQHINAIKREIDVTKEALNFQKSLREKQGKYENKGLMIIDEEEFLLILKLKDLKKQYRSEYQDLRDLRAEIQYCQHLVDQCRHRLLMEFDIWYNESFVIPEDMQMALKPGGSIRPGMVPVNRIVSLGEDDQDKFSQLQQRVLPEGPDSISFYNAKVKIEQKHNYLKTMMGLQQAHRK

SEQ ID NO: 21581 - protein, 725 aa, Homo sapiens
MGTRKKVHAFVRVKPTDDFAHEMIRYGDDKRSIDIHLKKDIRRGVVNNQQTDWSFKLDGVLHDASQDLVYETVAKDVVSQALDGYNGTIMCYGQTGAGKTYTMMGATENYKHRGILPRALQQVFRMIEERPTHAITVRVSYLEIYNESLFDLLSTLPYVGPSVTPMTIVENPQGVFIKGLSVHLTSQEEDAFSLLFEGETNRIIASHTMNKNSSRSHCIFTIYLEAHSRTLSEEKYITSKINLVDLAGSERLGKSGSEGQVLKEATYINKSLSFLEQAIIALGDQKRDHIPFRQCKLTHALKDSLGGNCNMVLVTNIYGEAAQLEETLSSLRFASRMKLVTTEPAINEKYDAERMVKNLEKELALLKQELAIHDSLTNRTFVTYDPMDEIQIAEINSQVRRYLEGTLDEIDIISLRQIKEVFNQFRVVLSQQEQEVESTLRRKYTLIDRNDFAAISAIQKAGLVDVDGHLVGEPEGQNFGLGVAPFSTKPGKKAKSKKTFKEPLRPDTPPSKPVAFEEFKNEQGSEINRIFKENKSILNERRKRASETTQHINAIKREIDVTKEALNFQKSLREKQGKYENKGLMIIDEEEFLLILKLKDLKKQYRSEYQDLRDLRAEIQYCQHLVDQCRHRLLMEFDIWYNESFVIPEDMQMALKPGGSIRPGMVPVNRIVSLGEDDQDKFSQLQQRVLPEGPDSISFYNAKVKIEQKHNYLKTMMGLQQAHRK

SEQ ID NO: 21582 - protein, 420 aa, Homo sapiens
MAALVRPARFVVRPLLQVVQAWDLDARRWVRALRRSPVKVVFPSGEVVEQKRAPGKQPRKAPSEASAQEQREKQPLEESASRAPSTWEESGLRYDKAYPGDRRLSSVMTIVKSRPFREKQGKILLEGRRLISDALKAGAVPKMFFFSRLEYLKELPVDKLKGVSLIKVKFEDIKDWSDLVTPQGIMGIFAKPDHVKMTYPKTQLQHSLPLLLICDNLRDPGNLGTILRSAAGAGCSKVLLTKGCVDAWEPKVLRAGMGAHFRMPIINNLEWETVPNYLPPDTRVYVADNCGLYAQAEMSNKASDHGWVCDQRVMKFHKYEEEEDVETGASQDWLPHVEVQSYDSDWTEAPAAVVIGGETYGVSLESLQLAESTGGKRLLIPVVPGVDSLNSAMAASILLFEGKRQLRGRAEDLSRDRSYH

SEQ ID NO: 21583 - protein, 1643 aa, Homo sapiens
MHRAVDPPGARAAREAFALGGLSCAGAWSSCPPHPPPRSAWLPGGRCSASIGQPPLPAPLPPSHGSSSGHPSKPYYAPGAPTPRPLHGKLESLHGCVQALLREPAQPGLWEQLGQLYESEHDSEEATRCYHSALRYGGSFAELGPRIGRLQQAQLWNFHTGSCQHRAKVLPPLEQVWNLLHLEHKRNYGAKRGGPPVKRAAEPPVVQPVPPAALSGPSGEEGLSPGGKRRRGCNSEQTGLPPGLPLPPPPLPPPPPPPPPPPPPLPGLATSPPFQLTKPGLWSTLHGDAWGPERKGSAPPERQEQRHSLPHPYPYPAPAYTAHPPGHRLVPAAPPGPGPRPPGAESHGCLPATRPPGSDLRESRVQRSRMDSSVSPAATTACVPYAPSRPPGLPGTTTSSSSSSSSNTGLRGVEPNPGIPGADHYQTPALEVSHHGRLGPSAHSSRKPFLGAPAATPHLSLPPGPSSPPPPPCPRLLRPPPPPAWLKGPACRAAREDGEILEELFFGTEGPPRPAPPPLPHREGFLGPPASRFSVGTQDSHTPPTPPTPTTSSSNSNSGSHSSSPAGPVSFPPPPYLARSIDPLPRPPSPAQNPQDPPLVPLTLALPPAPPSSCHQNTSGSFRRPESPRPRVSFPKTPEVGPGPPPGPLSKAPQPVPPGVGELPARGPRLFDFPPTPLEDQFEEPAEFKILPDGLANIMKMLDESIRKEEEQQQHEAGVAPQPPLKEPFASLQSPFPTDTAPTTTAPAVAVTTTTTTTTTTTATQEEEKKPPPALPPPPPLAKFPPPSQPQPPPPPPPSPASLLKSLASVLEGQKYCYRGTGAAVSTRPGPLPTTQYSPGPPSGATALPPTSAAPSAQGSPQPSASSSSQFSTSGGPWARERRAGEEPVPGPMTPTQPPPPLSLPPARSESEVLEEISRACETLVERVGRSATDPADPVDTAEPADSGTERLLPPAQAKEEAGGVAAVSGSCKRRQKEHQKEHRRHRRACKDSVGRRPREGRAKAKAKVPKEKSRRVLGNLDLQSEEIQGREKSRPDLGGASKAKPPTAPAPPSAPAPSAQPTPPSASVPGKKAREEAPGPPGVSRADMLKLRSLSEGPPKELKIRLIKVESGDKETFIASEVEERRLRMADLTISHCAADVVRASRNAKVKGKFRESYLSPAQSVKPKINTEEKLPREKLNPPTPSIYLESKRDAFSPVLLQFCTDPRNPITVIRGLAGSLRLNLGLFSTKTLVEASGEHTVEVRTQVQQPSDENWDLTGTRQIWPCESSRSHTTIAKYAQYQASSFQESLQEEKESEDEESEEPDSTTGTPPSSAPDPKNHHIIKFGTNIDLSDAKRWKPQLQELLKLPAFMRVTSTGNMLSHVGHTILGMNTVQLYMKVPGSRTPGHQENNNFCSVNINIGPGDCEWFAVHEHYWETISAFCDRHGVDYLTGSWWPILDDLYASNIPVYRFVQRPGDLVWINAGTVHWVQATGWCNNIAWNVGPLTAYQYQLALERYEWNEVKNVKSIVPMIHVSWNVARTVKISDPDLFKMIKFCLLQSMKHCQVQRESLVRAGKKIAYQGRVKDEPAYYCNECDVEVFNILFVTSENGSRNTYLVHCEGCARRRSAGLQGVVVLEQYRTEELAQAYDAFTLAPASTSR

SEQ ID NO: 21584 - protein, 1682 aa, Homo sapiens
MHRAVDPPGARAAREAFALGGLSCAGAWSSCPPHPPPRSAWLPGGRCSASIGQPPLPAPLPPSHGSSSGHPSKPYYAPGAPTPRPLHGKLESLHGCVQALLREPAQPGLWEQLGQLYESEHDSEEATRCYHSALRYGGSFAELGPRIGRLQQAQLWNFHTGSCQHRAKVLPPLEQVWNLLHLEHKRNYGAKRGGPPVKRAAEPPVVQPVPPAALSGPSGEEGLSPGGKRRRGCNSEQTGLPPGLPLPPPPLPPPPPPPPPPPPPLPGLATSPPFQLTKPGLWSTLHGDAWGPERKGSAPPERQEQRHSLPHPYPYPAPAYTAHPPGHRLVPAAPPGPGPRPPGAESHGCLPATRPPGSDLRESRVQRSRMDSSVSPAATTACVPYAPSRPPGLPGTTTSSSSSSSSNTGLRGVEPNPGIPGADHYQTPALEVSHHGRLGPSAHSSRKPFLGAPAATPHLSLPPGPSSPPPPPCPRLLRPPPPPAWLKGPACRAAREDGEILEELFFGTEGPPRPAPPPLPHREGFLGPPASRFSVGTQDSHTPPTPPTPTTSSSNSNSGSHSSSPAGPVSFPPPPYLARSIDPLPRPPSPAQNPQDPPLVPLTLALPPAPPSSCHQNTSGSFRRPESPRPRVSFPKTPEVGPGPPPGPLSKAPQPVPPGVGELPARGPRLFDFPPTPLEDQFEEPAEFKILPDGLANIMKMLDESIRKEEEQQQHEAGVAPQPPLKEPFASLQSPFPTDTAPTTTAPAVAVTTTTTTTTTTTATQEEEKKPPPALPPPPPLAKFPPPSQPQPPPPPPPSPASLLKSLASVLEGQKYCYRGTGAAVSTRPGPLPTTQYSPGPPSGATALPPTSAAPSAQGSPQPSASSSSQFSTSGGPWARERRAGEEPVPGPMTPTQPPPPLSLPPARSESEVLEEISRACETLVERVGRSATDPADPVDTAEPADSGTERLLPPAQAKEEAGGVAAVSGSCKRRQKEHQKEHRRHRRACKDSVGRRPREGRAKAKAKVPKEKSRRVLGNLDLQSEEIQGREKSRPDLGGASKAKPPTAPAPPSAPAPSAQPTPPSASVPGKKAREEAPGPPGVSRADMLKLRSLSEGPPKELKIRLIKVESGDKETFIASEVEERRLRMADLTISHCAADVVRASRNAKVKGKFRESYLSPAQSVKPKINTEEKLPREKLNPPTPSIYLESKRDAFSPVLLQFCTDPRNPITVIRGLAGSLRLNLGLFSTKTLVEASGEHTVEVRTQVQQPSDENWDLTGTRQIWPCESSRSHTTIAKYAQYQASSFQESLQEEKESEDEESEEPDSTTGTPPSSAPDPKNHHIIKFGTNIDLSDAKRWKPQLQELLKLPAFMRVTSTGNMLSHVGHTILGMNTVQLYMKVPGSRTPGHQENNNFCSVNINIGPGDCEWFAVHEHYWETISAFCDRHGVDYLTGSWWPILDDLYASNIPVYRFVQRPGDLVWINAGTVHWVQATGWCNNIAWNVGPLTAYQYQLALERYEWNEVKNVKSIVPMIHVSWNVARTVKISDPDLFKMIKFCLLQSMKHCQVQRESLVRAGKKIAYQGRVKDEPAYYCNECDVEVFNILFVTSENGSRNTYLVHCEGCARRRSAGLQGVVVLEQYRTEELAQAYDAFTLVRARRARGQRRRALGQAAGTGFGSPAAPFPEPPPAFSPQAPASTSR

SEQ ID NO: 21585 - protein, 838 aa, Homo sapiens
MYAFYSLLIYIFYSLFRRDGGAAAAAEPGDPAQRARKPRGRRRPDLPAPELWTELTGLAASSEPEDGSEGAAEGRAAAVSLEEALLRLAEFLSVQLGAEESCGGPADLGQSGEVPSLLTVTSQLLALLAWLRSPRGRQALLQGTQPAPRVRPPSPDGSTSQEESPSHFTAVPGEPLGDETQGQQPLQLEEDQRAWQRLEQLILGQLEELKQQLEQQEEELGRLRLGVGATDSEKRVQHLTLENEALKQSLSLMRDLLLHWGPGPPIRAPQEEAEALLELQGRLQEAQDTTEALRAQLGVQEVQLQGLQGALQQLQQETEQNCRRELQQMHGQLAGLRARMASLRQGCGDLRGLVSTFTQSCQGSLSEARGQVSWALGALSSGGPGTQLPEGQQGPPAGCPGRLPELKGNIRVLCRLRPGTSSSLVSVEPGPGGTVTTCYRGRHRRFRLDWVFPPDASQEEVFRELEPAVLSCLRGYSVCIFTYGQTGTGKTYSMEGPPEDPGIVPRALQSLFREMGAGRQHRVTLSMVEIYNEAVRDLLAPGPPERLAVRQGPEGQGGIQVAGLTHWDVPNLETLHQMLKLGRSNRATAATAMNQRSSRSHALVTLTLRAASPPRAPGTAGTLHLVDLAGSERARKAGAAGPPRGDPDGARRLREAQTINRSLLALGGVMAALRAHRPHVPFRDSQLTRLLQPALGPGTTAVLLLQVGAGAGQVCACRSPPTRARPPAPLARRSPRGRRISGRQSAPSSSPTEWVKWSWGQPGAAGSRAPPGRLLPSAPTLRSPGPPAPLRRPLAVLHAPVPTTARARLSRPQRACPSSPGSRPCPWGLRPGLCWQRR

SEQ ID NO: 21586 - protein, 299 aa, Homo sapiens
MRDLLLHWGPGPPIRAPQEEAEALLELQGRLQEAQDTTEALRAQLGVQEVQLQGLQGALQQLQQETEQNCRRELQQMHGQLAGLRARMASLRQGCGDLRGLVSTFTQSCQGSLSEARGQVSWALGALSSGGPGTQLPEGQQGPPAGCPGRLPELKGNIRVLCRLRPGTSSSLVSVEPGPGGTVTTCYRGRHRRFRLDWVFPPDASQEEVFRELEPAVLSCLRGYSVCIFTYGQTGTGKTYSMEGPPEDPGIVPRALQSLFREMGAGRQHRRYHGRCLSPAESPEHPRPGLPPCRARSPL

SEQ ID NO: 21587 - protein, 833 aa, Homo sapiens
MVPSRRTWNLGATPSLRGLWRVGRAPEPEPGMARPAPAPASPAARPFPHTGPGRLRTGRGKDTPVCGDEDSSARSAARPALAQCRALSVDWAGPGSPHGLYLTLQVEHLKEKLISQAQEVSRLRSELGGTDLEKHRDLLMVENERLRQEMRRCEAELQELRTKPAGPCPGCEHSQESAQLRDKLSQLQLEMAESKGMLSELNLEVQQKTDRLAEVELRLKDCLAEKAQEEERLSRRLRDSHETIASLRAQSPPVKYVIKTVEVESSKTKQALSESQARNQHLQEQVAMQRQVLKEMEQQLQSSHQLTARLRAQIAMYESELERAHGQMLEEMQSLEEDKNRAIEEAFARAQVEMKAVHENLAGVRTNLLTLQPALRTLTNDYNGLKRQVRGFPLLLQEALRSVKAEIGQAIEEVNSNNQELLRKYRRELQLRKKCHNELVRLKGNIRVIARVRPVTKEDGEGPEATNAVTFDADDDSIIHLLHKGKPVSFELDKVFSPQASQQDVFQEVQALVTSCIDGFNVCIFAYGQTGAGKTYTMEGTAENPGINQRALQLLFSEVQEKASDWEYTITVSAAEIYNEVLRDLLGKEPQEKLEIRLCPDGSGQLYVPGLTEFQVQSVDDINKVFEFGHTNRTTEFTNLNEHSSRSHALLIVTVRGVDCSTGLRTTGKLNLVDLAGSERVGKSGAEGSRLREAQHINKSLSALGDVIAALRSRQGHVPFRNSKLTYLLQDSLSGDSKTLMVVQVSPVEKNTSETLYSLKFAERVRSVELGPGLRRAELGSWSSQEHLEWEPACQTPQPSARAHSAPSSGTSSRPGSIRRKLQPSGKSRPLPV

SEQ ID NO: 21588 - protein, 826 aa, Homo sapiens
MVPSRRTWNLGATPSLRGLWRVGRAPEPEPGMARPAPAPASPAARPFPHTGPGRLRTGRGKDTPVCGDEDSSARSAARPALAQCRALSVDWAGPGSPHGLYLTLQVEHLKEKLISQAQEVSRLRSELGGTDLEKHRDLLMVENERLRQEMRRCEAELQELRTKPAGPCPGCEHSQESAQLRDKLSQLQLEMAESKGMLSELNLEVQQKTDRLAEVELRLKDCLAEKAQEEERLSRRLRDSHETIASLRAQSPPVKYVIKTVEVESSKTKQALSESQARNQHLQEQVAMQRQVLKEMEQQLQSSHQLTARLRAQIAMYESELERAHGQMLEEMQSLEEDKNRAIEEAFARAQVEMKAVHENLAGVRTNLLTLQPALRTLTNDYNGLKRQVRGFPLLLQEALRSVKAEIGQAIEEVNSNNQELLRKYRRELQLRKKCHNELVRLKGNIRVIARVRPVTKEDGEGPEATNAVTFDADDDSIIHLLHKGKPVSFELDKVFSPQASQQDVFQEVQALVTSCIDGFNVCIFAYGQTGAGKTYTMEGTAENPGINQRALQLLFSEVQEKASDWEYTITVSAAEIYNEVLRDLLGKEPQEKLEIRLCPDGSGQLYVPGLTEFQVQSVDDINKVFEFGHTNRTTEFTNLNEHSSRSHALLIVTVRGVDCSTGLRTTGKLNLVDLAGSERVGKSGAEGSRLREAQHINKSLSALGDVIAALRSRQGHVPFRNSKLTYLLQDSLSGDSKTLMVVQVSPVEKNTSETLYSLKFAERVRSVELGPGLRRAELGSWSSQEHLEWEPACQTPQPSARAHSAPSSGTSSRPGSIRRKLQPSA

SEQ ID NO: 21589 - protein, 637 aa, Homo sapiens
MVPSRRTWNLGATPSLRGLWRVGRAPEPEPGMARPAPAPASPAARPFPHTGPGRLRTGRGKDTPVCGDEDSSARSAARPALAQCRALSVDWAGPGSPHGLYLTLQVEHLKEKLISQAQEVSRLRSELGGTDLEKHRDLLMVENERLRQEMRRCEAELQELRTKPAGPCPGCEHSQESAQLRDKLSQLQLEMAESKGMLSELNLEVQQKTDRLAEVELRLKDCLAEKAQEEERLSRRLRDSHETIASLRAQSPPVKYVIKTVEVESSKTKQALSESQARNQHLQEQVAMQRQVLKEMEQQLQSSHQLTARLRAQIAMYESELERAHGQMLEEMQSLEEDKNRAIEEAFARAQVEMKAVHENLAGVRTNLLTLQPALRTLTNDYNGLKRQVRGFPLLLQEALRSVKAEIGQAIEEVNSNNQELLRKYRRELQLRKKCHNELVRLKGNIRVIARVRPVTKEDGEGPEATNAVTFDADDDSIIHLLHKGKPVSFELDKVFSPQASQQDVFQEVQALVTSCIDGFNVCIFAYGQTGAGKTYTMEGTAENPGINQRALQLLFSEVQEKASDWEYTITVSAAEIYNEVLRDLLGKEPQEKLEIRLCPDGSGQLYVPGLTEFQVQSVDDINKVWRREPLTTATLL

SEQ ID NO: 21590 - protein, 687 aa, Homo sapiens
MVENERLRQEMRRCEAELQELRTKPAGPCPGCEHSQESAQLRDKLSQLQLEMAESKGMLSELNLEVQQKTDRLAEVELRLKDCLAEKAQEEERLSRRLRDSHETIASLRAQSPPVKYVIKTVEVESSKTKQALSESQARNQHLQEQVAMQRQVLKEMEQQLQSSHQLTARLRAQIAMYESELERAHGQMLEEMQSLEEDKNRAIEEAFARAQVEMKAVHENLAGVRTNLLTLQPALRTLTNDYNGLKRQVRGFPLLLQEALRSVKAEIGQAIEEVNSNNQELLRKYRRELQLRKKCHNELVRLKGNIRVIARVRPVTKEDGEGPEATNAVTFDADDDSIIHLLHKGKPVSFELDKVFSPQASQQDVFQEVQALVTSCIDGFNVCIFAYGQTGAGKTYTMEGTAENPGINQRALQLLFSEVQEKASDWEYTITVSAAEIYNEVLRDLLGKEPQEKLEIRLCPDGSGQLYVPGLTEFQVQSVDDINKVFEFGHTNRTTEFTNLNEHSSRSHALLIVTVRGVDCSTGLRTTGKLNLVDLAGSERVGKSGAEGSRLREAQHINKSLSALGDVIAALRSRQGHVPFRNSKLTYLLQDSLSGDSKTLMVVQVSPVEKNTSETLYSLKFAERVRSVELGPGLRRAELGSWSSQEHLEWEPACQTPQPSARAHSAPSSGTSSRPGSIRRKLQPSA

SEQ ID NO: 21591 - protein, 848 aa, Homo sapiens
MCASACKDTAAWCPEEAAEPQAMVPSRRTWNLGATPSLRGLWRVGRAPEPEPGMARPAPAPASPAARPFPHTGPGRLRTGRGKDTPVCGDEDSSARSAARPALAQCRALSVDWAGPGSPHGLYLTLQVEHLKEKLISQAQEVSRLRSELGGTDLEKHRDLLMVENERLRQEMRRCEAELQELRTKPAGPCPGCEHSQESAQLRDKLSQLQLEMAESKGMLSELNLEVQQKTDRLAEVELRLKDCLAEKAQEEERLSRRLRDSHETIASLRAQSPPVKYVIKTVEVESSKTKQALSESQARNQHLQEQVAMQRQVLKEMEQQLQSSHQLTARLRAQIAMYESELERAHGQMLEEMQSLEEDKNRAIEEAFARAQVEMKAVHENLAGVRTNLLTLQPALRTLTNDYNGLKRQVRGFPLLLQEALRSVKAEIGQAIEEVNSNNQELLRKYRRELQLRKKCHNELVRLKGNIRVIARVRPVTKEDGEGPEATNAVTFDADDDSIIHLLHKGKPVSFELDKVFSPQASQQDVFQEVQALVTSCIDGFNVCIFAYGQTGAGKTYTMEGTAENPGINQRALQLLFSEVQEKASDWEYTITVSAAEIYNEVLRDLLGKEPQEKLEIRLCPDGSGQLYVPGLTEFQVQSVDDINKVFEFGHTNRTTEFTNLNEHSSRSHALLIVTVRGVDCSTGLRTTGKLNLVDLAGSERVGKSGAEGSRLREAQHINKSLSALGDVIAALRSRQGHVPFRNSKLTYLLQDSLSGDSKTLMVVQVSPVEKNTSETLYSLKFAERVRSVELGPGLRRAELGSWSSQEHLEWEPACQTPQPSARAHSAPSSGTSSRPGSIRRKLQPSA

SEQ ID NO: 21592 - protein, 941 aa, Homo sapiens
MAGAAAAVAAGAAAGAAAAAVSVAAPGRASAPPPPPPVYCVCRQPYDVNRFMIECDICKDWFHGSCVGVEEHHAVDIDLYHCPNCAVLHGSSLMKKRRNWHRHDYTEIDDGSKPVQAGTRTFIKELRSRVFPSADEIIIKMHGSQLTQRYLEKHGFDVPIMVPKLDDLGLRLPSPTFSVMDVERYVGGDKVIDVIDVARQADSKMTLHNYVKYFMNPNRPKVLNVISLEFSDTKMSELVEVPDIAKKLSWVENYWPDDSVFPKPFVQKYCLMGVQDSYTDFHIDFGGTSVWYHVLWGEKIFYLIKPTDENLARYESWSSSVTQSEVFFGDKVDKCYKCVVKQGHTLFVPTGWIHAVLTSQDCMAFGGNFLHNLNIGMQLRCYEMEKRLKTPDLFKFPFFEAICWFVAKNLLETLKELREDGFQPQTYLVQGVKALHTALKLWMKKELVSEHAFEIPDNVRPGHLIKELSKVIRAIEEENGKPVKSQGIPIVCPVSRSSNEATSPYHSRRKMRKLRDHNVRTPSNLDILELHTREVLKRLEMCPWEEDILSSKLNGKFNKHLQPSSTVPEWRAKDNDLRLLLTNGRIIKDERQPFADQSLYTADSENEEDKRRTKKAKMKIEESSGVEGVEHEESQKPLNGFFTRVKSELRSRSSGYSDISESEDSGPECTALKSIFTTEESESSGDEKKQEITSNFKEESNVMRNFLQKSQKPSRSEIPIKRECPTSTSTEEEAIQGMLSMAGLHYSTCLQRQIQSTDCSGERNSLQDPSSCHGSNHEVRQLYRYDKPVECGYHVKTEDPDLRTSSWIKQFDTSRFHPQDLSRSQKCIRKEGSSEISQRVQSRNYVDSSGSSLQNGKYMQNSNLTSGACQISNGSLSPERPVGETSFSVPLHPTKRPASNPPPISNQATKGKRPKKGMATAKQRLGKILKLNRNGHARFFV

SEQ ID NO: 21593 - protein, 809 aa, Homo sapiens
MAGAAAAVAAGAAAGAAAAAVSVAAPGRASAPPPPPPVYCVCRQPYDVNRFMIECDICKDWFHGSCVGVEEHHAVDIDLYHCPNCAVLHGSSLMKKRRNWHRHDYTEIDDGSKPVQAGTRTFIKELRSRVFPSADEIIIKMHGSQLTQRYLEKHGFDVPIMVPKLDDLGLRLPSPTFSVMDVERYVGGDKVIDVIDVARQADSKMTLHNYVKYFMNPNRPKVLNVISLEFSDTKMSELVEVPDIAKKLSWVENYWPDDSVFPKPFVQKYCLMGVQDSYTDFHIDFGGTSVWYHVLWGEKIFYLIKPTDENLARYESWSSSVTQSEVFFGDKVDKCYKCVVKQGHTLFVPTGWIHAVLTSQDCMAFGGNFLHNLNIGMQLRCYEMEKRLKTPDLFKFPFFEAICWFVAKNLLETLKELREDGFQPQTYLVQGVKALHTALKLWMKKELVSEHAFEIPDNVRPGHLIKELSKVIRAIEEENGKPVKSQGIPIVCPVSRSSNEATSPYHSRRKMRKLRDHNVRTPSNLDILELHTREVLKRLEMCPWEEDILSSKLNGKFNKHLQPSSTVPEWRAKDNDLRLLLTNGRIIKDERQPFADQSLYTADSENEEDKRRTKKAKMKIEESSGVEGVEHEESQKPLNGFFTRVKSELRSRSSGYSDISESEDSGPECTALKSIFTTEESESSGDEKKQEITSNFKEESNVMRNFLQKSQKPSRSEIPIKRECPTSTSTEEEAIQGMLSMAGLHYSTCLQRQIQSTDCSGERNSLQDPSSCHGSNHEVRQLYRYDKPVECETRSHLCCPDWSPTPELK

SEQ ID NO: 21594 - protein, 416 aa, Homo sapiens
MAGDTHCPAEPLAREGTLWEALRALLPHSKEDLKLDLGEKVERSVVTLLQRATELFYEGRRDECLQSSEVILDYSWEKLNTGTWQDVDKDWRRVYAIGCLLKALCLCQAPEDANTVAAALRVCDMGLLMGAAILGDILLKVAAILQTHLPGKRPARGSLPEQPCTKKARADHGLIPDVKLEKTVPRLHRPSLQHFREQFLVPGRPVILKGVADHWPCMQKWSLEYIQEIAGCRTVPVEVGSRYTDEEWSQTLMTVNEFISKYIVNEPRDVGYLAQHQLFDQIPELKQDISIPDYCSLGDGEEEEITINAWFGPQGTISPLHQDPQQNFLVQVMGRKYIRLYSPQESGALYPHDTHLLHNTSQVDVENPDLEKFPKFAKAPFLSCILSPGEILFIPVKYWHYVRALDLSFSVSFWWS

SEQ ID NO: 21595 - protein, 220 aa, Homo sapiens
MAGDTHCPAEPLAREGTLWEALRALLPHSKEDLKLDLGEKVERSVVTLLQRATELFYEGRRDECLQSSEVILDYSWEKLNTGTWQDVDKDWRRVYAIGCLLKALCLCQAPEDANTVAAALRVCDMGLLMGAAILGDILLKVAAILQTHLPGKRPARGSLPEQPCTKVDVENPDLEKFPKFAKAPFLSCILSPGEILFIPVKYWHYVRALDLSFSVSFWWS

SEQ ID NO: 21596 - protein, 454 aa, Homo sapiens
MSREKCSPGEGAEEGRGSEASGLKASAGHGTEPAGGGPMAGDTHCPAEPLAREGTLWEALRALLPHSKEDLKLDLGEKVERSVVTLLQRATELFYEGRRDECLQSSEVILDYSWEKLNTGTWQDVDKDWRRVYAIGCLLKALCLCQAPEDANTVAAALRVCDMGLLMGAAILGDILLKVAAILQTHLPGKRPARGSLPEQPCTKKARADHGLIPDVKLEKTVPRLHRPSLQHFREQFLVPGRPVILKGVADHWPCMQKWSLEYIQEIAGCRTVPVEVGSRYTDEEWSQTLMTVNEFISKYIVNEPRDVGYLAQHQLFDQIPELKQDISIPDYCSLGDGEEEEITINAWFGPQGTISPLHQDPQQNFLVQVMGRKYIRLYSPQESGALYPHDTHLLHNTSQVDVENPDLEKFPKFAKAPFLSCILSPGEILFIPVKYWHYVRALDLSFSVSFWWS

SEQ ID NO: 21597 - protein, 490 aa, Homo sapiens
MNLAEICDNAKKGREYALLGNYDSSMVYYQGVMQQIQRHCQSVRDPAIKGKWQQVRQELLEEYEQVKSIVSTLESFKIDKPPDFPVSCQDEPFRDPAVWPPPVPAEHRAPPQIRRPNREVRPLRKEMAGVGARGPVGRAHPISKSEKPSTSRDKDYRARGRDDKGRKNMQDGASDGEMPKFDGAGYDKDLVEALERDIVSRNPSIHWDDIADLEEAKKLLREAVVLPMWMPDFFKGIRRPWKGVLMVGPPGTGKTMLAKAVATECGTTFFNVSSSTLTSKYRGESEKLVRLLFEMARFYAPTTIFIDEIDSICSRRGTSDEHEASRRVKSELLIQMDGVGGALENDDPSKMVMVLAATNFPWDIDEALRRRLEKRIYIPLPTAKGRAELLKINLREVELDPDIQLEDIAEKIEGYSGADITNVCRDASLMAMRRRINGLSPEEIRALSKEELQMPVTKGDFELALKKIAKSVSAADLEKYEKWMVEFGSA

SEQ ID NO: 21598 - protein, 573 aa, Homo sapiens
MLTRNPKTKSSLQILQDSVKWHHMAHKVNSLLDAYSGLLSNESMILAVNSSFVDPLLQFESQLKIIESSFGMLVVMPSLDKVKEMGSSYEYIEDMENLYHNILNIYENILTSLVSKDLYKLQILKEMLVWMSKDSSYLQERIMVIINKVLRFTVTKVRKYISVDAPCLGLLAAELSLLCSHEDPSIVKQASLGMCHLLYIARCQNDIGTNKPTNGKSHSLQFPSSDVEFLPKEFQQDESKIAQRVGQTLLPPLLTDFVQSLLMKLSSPDDKIASDAASILIFTLEFHAEKVTMVSKIVDAIYRQLCDNNCMKDVMLQVITLLTCTSPKKVIFQLMDYPVPADDTLIQMWKAACSQASVAPHVLKTILLILKGKPGEMEDTVTEGKRFSLDITNLMPLAACQALCTFLPLGSYRKAVAQYFPQLLTTLMFQVFYNSELKPILKDRALYAQDALRVLLNCSGLQQVDITLMKENFWDQLSEDLCYYHGVCFIAKTLSEYNFPQFPETLSYLYKLSVEGPRRSEDTVIVLIFLTEVSFVDCEQLCSHFLFLPKFKSKFQFLVSLPLNVGSYQDLRS

SEQ ID NO: 21599 - protein, 861 aa, Homo sapiens
MLTRNPKTKSSLQILQDSVKWHHMAHKVNSLLDAYSGLLSNESMILAVNSSFVDPLLQFESQLKIIESSFGMLVVMPSLDKVKEMGSSYEYIEDMENLYHNILNIYENILTSLVSKDLYKLQILKEMLVWMSKDSSYLQERIMVIINKVLRFTVTKVRKYISVDAPCLGLLAAELSLLCSHEDPSIVKQASLGMCHLLYIARCQNDIGTNKPTNGKSHSLQFPSSDVEFLPKEFQQDESKIAQRVGQTLLPPLLTDFVQSLLMKLSSPDDKIASDAASILIFTLEFHAEKVTMVSKIVDAIYRQLCDNNCMKDVMLQVITLLTCTSPKKVIFQLMDYPVPADDTLIQMWKAACSQASVAPHVLKTILLILKGKPGEMEDTVTEGKRFSLDITNLMPLAACQALCTFLPLGSYRKAVAQYFPQLLTTLMFQVFYNSELKPILKDRALYAQDALRVLLNCSGLQQVDITLMKENFWDQLSEDLCYYHGVCFIAKTLSEYNFPQFPETLSYLYKLSVEGPRRSEDTVIVLIFLTELLNNFFKDPLPEEFLVLFINWINDSNPVVSRLILHRIVHMSPIINKTENVSSILIAILDAFLSKDDNVVLQALLTLRRLLNELDKVTYSLGTRIGSSYCTLMDHINGGIRSMAIRHFGQLVRDMRQYTWMVNDVVLEGLVPLILFLEDDDKRVAEACKYTLKICTSQLKWSTSRLLKDENYSFEMVVLNICNNLIISHRNYITDLTSDTLRFLWSPRTYLKRASVILIGYLAKSGGHLLLRDEIEVMLDVIERLLRDEDPMIKQLAEITYDIFKKKAHKLTSAPLKQNFQKLLKLFYIKKLKPLYNYNSPNGQIDSPTDSKDVKNDKAL

SEQ ID NO: 21600 - protein, 223 aa, Homo sapiens
MASKLLRAVILGPPGSGKGTVCQRIAQNFGLQHLSSGHFLRENIKASTEVGEMAKQYIEKSLLVPDHVITRLMMSELENRRGQHWLLDGFPRTLGQAEALDKICEVDLVISLNIPFETLKDRLSRRWIHPPSGRVYNLDFNPPHVHGIDDVTGEPLVQQEDDKPEAVAARLRQYKDVAKPVIELYKSRGVLHQFSGTETNKIWPYVYTLFSNKITPIQSKEAY

SEQ ID NO: 21601 - protein, 562 aa, Homo sapiens
MNTNDAKEYLARREIPQLFESLLNGLMCSKPEDPVEYLESCLQKVKELGGCDKVKWDTFVSQEKKTLPPLNGGQSRRSFLRNVMPENSNFPYRRYDRLPPIHQFSIESDTDLSETAELIEEYEVFDPTRPRPKIILVIGGPGSGKGTQSLKIAERYGFQYISVGELLRKKIHSTSSNRKWSLIAKIITTGELAPQETTITEIKQKLMQIPDEEGIVIDGFPRDVAQALSFEDQICTPDLVVFLACANQRLKERLLKRAEQQGRPDDNVKATQRRLMNFKQNAAPLVKYFQEKGLIMTFDADRDEDEVFYDISMAVDNKLFPNKEAAAGSSDLDPSMILDTGEIIDTGSDYEDQGDDQLNVFGEDTMGGFMEDLRKCKIIFIIGGPGSGKGTQCEKLVEKYGFTHLSTGELLREELASESERSKLIRDIMERGDLVPSGIVLELLKEAMVASLGDTRGFLIDGYPREVKQGEEFGRRIGDPQLVICMDCSADTMTNRLLQRSRSSLPVDDTTKTIAKRLEAYYRASIPVIAYYETKTQLHKINAEGTPEDVFLQLCTAIDSIF

SEQ ID NO: 21602 - protein, 197 aa, Homo sapiens
MGGFMEDLRKCKIIFIIGGPGSGKGTQCEKLVEKYGFTHLSTGELLREELASESERSKLIRDIMERGDLVPSGIVLELLKEAMVASLGDTRGFLIDGYPREVKQGEEFGRRIGDPQLVICMDCSADTMTNRLLQRSRSSLPVDDTTKTIAKRLEAYYRASIPVIAYYETKTQLHKINAEGTPEDVFLQLCTAIDSIF

SEQ ID NO: 21603 - protein, 536 aa, Homo sapiens
MCSKPEDPVEYLESCLQKVKELGGCDKVKWDTFVSQEKKTLPPLNGGQSRRSFLRNVMPENSNFPYRRYDRLPPIHQFSIESDTDLSETAELIEEYEVFDPTRPRPKIILVIGGPGSGKGTQSLKIAERYGFQYISVGELLRKKIHSTSSNRKWSLIAKIITTGELAPQETTITEIKQKLMQIPDEEGIVIDGFPRDVAQALSFEDQICTPDLVVFLACANQRLKERLLKRAEQQGRPDDNVKATQRRLMNFKQNAAPLVKYFQEKGLIMTFDADRDEDEVFYDISMAVDNKLFPNKEAAAGSSDLDPSMILDTGEIIDTGSDYEDQGDDQLNVFGEDTMGGFMEDLRKCKIIFIIGGPGSGKGTQCEKLVEKYGFTHLSTGELLREELASESERSKLIRDIMERGDLVPSGIVLELLKEAMVASLGDTRGFLIDGYPREVKQGEEFGRRIGDPQLVICMDCSADTMTNRLLQRSRSSLPVDDTTKTIAKRLEAYYRASIPVIAYYETKTQLHKINAEGTPEDVFLQLCTAIDSIF

SEQ ID NO: 21604 - protein, 723 aa, Homo sapiens
MAEEEETAALTEKVIRTQRVFINLLDSYSSGNIGKFLSNCVVGASLEEITEEEEEEDENKSAMLEASSTKVKEGTFQIVGTLSKPDSPRPDFAVETYSAISREDLLMRLLECDVIIYNITESSQQMEEAIWAVSALSEEVSHFEKRKLFILLSTVMTWARSKALDPEDSEVPFTEEDYRRRKSHPNFLDHINAEKMVLKFGKKARKFAAYVVAAGLQYGAEGGMLHTFFKMAWLGEIPALPVFGDGTNVIPTIHVLDLAGVIQNVIDHVPKPHYLVAVDESVHTLEDIVKCISKNTGPGKIQKIPRENAYLTKDLTQDCLDHLLVNLRMEALFVKENFNIRWAAQTGFVENINTILKEYKQSRGLMPIKICILGPPAVGKSSIAKELANYYKLHHIQLKDVISEAIAKLEAIVAPNDVGEGEEEVEEEEEEENVEDAQELLDGIKESMEQNAGQLDDQYIIRFMKEKLKSMPCRNQGYILDGFPKTYDQAKDLFNQEDEEEEDDVRGRMFPFDKLIIPEFVCALDASDEFLKERVINLPESIVAGTHYSQDRFLRALSNYRDINIDDETVFNYFDELEIHPIHIDVGKLEDAQNRLAIKQLIKEIGEPRNYGLTDEEKAEEERKAAEERLAREAAEEAEREHQEAVEMAEKIARWEEWNKRLEEVKREERELLEAQSIPLRNYLMTYVMPTLIQGLNECCNVRPEDPVDFLAEYLFKNNPEAQ

SEQ ID NO: 21605 - protein, 1911 aa, Homo sapiens [sequence omitted]

SEQ ID NO: 21606 - protein, 751 aa, Homo sapiens
MTSQEKTEEYPFADIFDEDETERNFLLSKPVCFVVFGKPGVGKTTLARYITQAWKCIRVEALPILEEQIAAETESGVMLQSMLISGQSIPDELVIKLMLEKLNSPEVCHFGYIITEIPSLSQDAMTTLQQIELIKNLNLKPDVIINIKCPDYDLCQRISGQRQHNNTGYIYSRDQWDPEVIENHRKKKKEAQKDGKGEEEEEEEEQEEEEAFIAEMQMVAEILHHLVQRPEDYLENVENIVKLYKETILQTLEEVMAEHNPQYLIELNGNKPAEELFMIVMDRLKYLNLKRAAILTKLQGAEEEINDTMENDELFRTLASYKLIAPRYRWQRSKWGRTCPVNLKDGNIYSGLPDYSVSFLGKIYCLSSEEALKPFLLNPRPYLLPPMPGPPCKVFILGPQYSGKTTLCNMLAENYKGKVVDYAQLVQPRFDKARETLVENTIAEATAAAIKVVKEKLLRELQARKQAETALREFQRQYEKMEFGVFPMEATHSSIDEEGYIQGSQRDRGSSLVDTEEAKTKSENVLHDQAAKVDKDDGKETGETFTFKRHSQDASQDVKLYSDTAPTEDLIEEVTADHPEVVTMIEETIKMSQDINFEQPYEKHAEILQEVLGEVMEENKDRFPGAPKYGGWIVDNCPIVKELWMALIKKGIIPDLVIYLSDTENNGKCLFNRIYLQKKSEIDSKILERLLEELQKKKKEEEKSHRRGIETRRRKSKATGTYESEGKRQAQIAMTDDVSWYCYCKQLQYFK

SEQ ID NO: 21607 - protein, 421 aa, Homo sapiens
MTSQEKTEEYPFADIFDEDETERNFLLSKPVCFVVFGKPGVGKTTLARYITQAWKCIRVEALPILEEQIAAETESGVMLQSMLISGQSIPDELVIKLMLEKLNSPEVCHFGYIITEIPSLSQDAMTTLQQIELIKNLNLKPDVIINIKCPDYDLCQRISGQRQHNNTGYIYSRDQWDPEVIENHRKKKKEAQKDGKGEEEEEEEEQEEEEAFIAEMQMVAEILHHLVQRPEDYLENVENIVKLYKETILQTLEEVMAEHNPQYLIELNGNKPAEELFMIVMDRLKYLNLKRAAILTKLQGAEEEINDTMENDELFRTLASYKLIAPRYRWQRSKWGRTCPVNLKDGNIYSGLPDYSVSFLGKIYCLSSEEALKPFLLNPRPYLLPPMPGPPCKVFILGPQYSGKTTLCNMLAENYKGKVTN

SEQ ID NO: 21608 - protein, 1014 aa, Homo sapiens
MTSQEKTEEYPFADIFDEDETERNFLLSKPVCFVVFGKPGVGKTTLARYITQAWKCIRVEALPILEEQIAAETESGVMLQSMLISGQSIPDELVIKLMLEKLNSPEVCHFGYIITEIPSLSQDAMTTLQQIELIKNLNLKPDVIINIKCPDYDLCQRISGQRQHNNTGYIYSRDQWDPEVIENHRKKKKEAQKDGKGEEEEEEEEQEEEEAFIAEMQMVAEILHHLVQRPEDYLENVENIVKLYKETILQTLEEVMAEHNPQYLIELNGNKPAEELFMIVMDRLKYLNLKRAAILTKLQGAEEEINDTMENDELFRTLASYKLIAPRYRWQRSKWGRTCPVNLKDGNIYSGLPDYSVSFLGKIYCLSSEEALKPFLLNPRPYLLPPMPGPPCKVFILGPQYSGKTTLCNMLAENYKGKVVDYAQLVQPRFDKARETLVENTIAEATAAAIKVVKEKLLRELQARKQAETALREFQRQYEKMEFGVFPMEATHSSIDEEGYIQGSQRDRGSSLVDTEEAKTKSENVLHDQAAKVDKDDGKETGETFTFKRHSQDASQDVKLYSDTAPTEDLIEEVTADHPEVVTMIEETIKMSQDINFEQPYEKHAEILQEVLGEVMEENKDRFPGAPKYGGWIVDNCPIVKELWMALIKKGIIPDLVIYLSDTENNGKCLFNRIYLQKKSEIDSKILERLLEELQKKKKEEEEARKATEEELRLEEENRRLLELMKVKAKEAEETDNEDEEEIEGDELEVHEEPEASHDTRGSWLPEEFEASEVPETEPEAVSEPIEETTVETEIPKGSKEGLEIEKLSETVVLPEFPEDSYPDVPEMEPFKEKIGSFIILWKQLEATISEAYIKILNLEIADRTPQELLQKVVETMEKPFQYTAWELTGEDYEEETEDYQTEAEVDEELEEEEEEEGEDKMKERKRHLGDTKHFCPVVLKENFILQPGNTEEAAKYREKIYYFSSAEAKEKFLEHPEDYVAHEEPLKVRQYSYLNDCSHRIFLGLITNHHQFT

SEQ ID NO: 21609 - protein, 336 aa, Homo sapiens
MKERKRHLGDTKHFCPVVLKENFILQPGNTEEAAKYREKIYYFSSAEAKEKFLEHPEDYVAHEEPLKAPPLRICLVGPQGSGKTMCGRQLAEKLNIFHIQFEEVLQEKLLLKTEKKVGPEFEEDSENEQAAKQELEELAIQANVKVEEENTKKQLPEVQLTEEEEVIKSSLMENEPLPPEILEVILSEWWLKEPIRSTGFILDGFPRYPEEAQFLGDRGFFPDAAVFIQVDDQDIFDRLLPAQIEKWKLKQKKKLERKKLIKDMKAKIRVDTIAKRRAELILERDKKRREVSSFVFFFKTGSHSVAQGRVQWHNHSSLQPRTPGLKGSSHLSLSKC

SEQ ID NO: 21610 - protein, 1283 aa, Homo sapiens
MTSQEKTEEYPFADIFDEDETERNFLLSKPVCFVVFGKPGVGKTTLARYITQAWKCIRVEALPILEEQIAAETESGVMLQSMLISGQSIPDELVIKLMLEKLNSPEVCHFGYIITEIPSLSQDAMTTLQQIELIKNLNLKPDVIINIKCPDYDLCQRISGQRQHNNTGYIYSRDQWDPEVIENHRKKKKEAQKDGKGEEEEEEEEQEEEEAFIAEMQMVAEILHHLVQRPEDYLENVENIVKLYKETILQTLEEVMAEHNPQYLIELNGNKPAEELFMIVMDRLKYLNLKRAAILTKLQGAEEEINDTMENDELFRTLASYKLIAPRYRWQRSKWGRTCPVNLKDGNIYSGLPDYSVSFLGKIYCLSSEEALKPFLLNPRPYLLPPMPGPPCKVFILGPQYSGKTTLCNMLAENYKGKVVDYAQLVQPRFDKARETLVENTIAEATAAAIKVVKEKLLRELQARKQAETALREFQRQYEKMEFGVFPMEATHSSIDEEGYIQGSQRDRGSSLVDTEEAKTKSENVLHDQAAKVDKDDGKETGETFTFKRHSQDASQDVKLYSDTAPTEDLIEEVTADHPEVVTMIEETIKMSQDINFEQPYEKHAEILQEVLGEVMEENKDRFPGAPKYGGWIVDNCPIVKELWMALIKKGIIPDLVIYLSDTENNGKCLFNRIYLQKKSEIDSKILERLLEELQKKKKEEEEARKATEEELRLEEENRRLLELMKVKAKEAEETDNEDEEEIEGDELEVHEEPEASHDTRGSWLPEEFEASEVPETEPEAVSEPIEETTVETEIPKGSKEGLEIEKLSETVVLPEFPEDSYPDVPEMEPFKEKIGSFIILWKQLEATISEAYIKILNLEIADRTPQELLQKVVETMEKPFQYTAWELTGEDYEEETEDYQTEAEVDEELEEEEEEEGEDKMKERKRHLGDTKHFCPVVLKENFILQPGNTEEAAKYREKIYYFSSAEAKEKFLEHPEDYVAHEEPLKAPPLRICLVGPQGSGKTMCGRQLAEKLNIFHIQFEEVLQEKLLLKTEKKVGPEFEEDSENEQAAKQELEELAIQANVKVEEENTKKQLPEVQLTEEEEVIKSSLMENEPLPPEILEVILSEWWLKEPIRSTGFILDGFPRYPEEAQFLGDRGFFPDAAVFIQVDDQDIFDRLLPAQIEKWKLKQKKKLERKKLIKDMKAKIRVDTIAKRRAELILERDKKRREPNKEKRKRGISENTTCYKCNHMSPWCEYAGLPYRGLLILYSATATATAGTKHCRSGAKVIVALSKQNIHNQK

SEQ ID NO: 21611 - protein, 172 aa, Homo sapiens
MLLPNILLTGTPGVGKTTLGKELASKSGLKYINVGDLAREEQLYDGYDEEYDCPILDEDRVVDELDNQMREGGVIVDYHGCDFFPERWFHIVFVLRTDTNVLYERLETRGYNEKKLTDNIQCEIFQVLYEEATASYKEEIVHQLPSNKPEELENNVDQILKWIEQWIKDHNS

SEQ ID NO: 21612 - protein, 169 aa, Homo sapiens
MCHRKPGTPGVGKTTLGKELASKSGLKYINVGDLAREEQLYDGYDEEYDCPILDEDRVVDELDNQMREGGVIVDYHGCDFFPERWFHIVFVLRTDTNVLYERLETRGYNEKKLTDNIQCEIFQVLYEEATASYKEEIVHQLPSNKPEELENNVDQILKWIEQWIKDHNS

SEQ ID NO: 21613 - protein, 238 aa, Homo sapiens
MADPDPRYPRSSIEDDFNYGSSVASATVHIRMAFLRKVYSILSLQVLLTTVTSTVFLYFESVRTFVHESPALILLFALGSLGLIFALILNRHKYPLNLYLLFGFTLLEALTVAVVVTFYDVYIILQAFILTTTVFFGLTVYTLQSKKDFSKFGAGLFALLWILCLSGFLKFFFYSEIMELVLAAAGALLFCGFIIYDTHSLMHKLSPEEYVLAAISLYLDIINLFLHLLRFLEAVNKK

SEQ ID NO: 21614 - protein, 71 aa, Homo sapiens
MGAQLSGGRGAPEPAQTQPQPQPQPAAPEGPEQPRHPPQPQPQPQPQPQPEPSPWGPLDDVRFLIACTSWY

SEQ ID NO: 21615 - protein, 545 aa, Homo sapiens
MALRRGGCGALGLLLLLLGAACLIPRSAQVRRLARCPATCSCTKESIICVGSSWVPRIVPGDISSLSLVNGTFSEIKDRMFSHLPSLQLLLLNSNSFTIIRDDAFAGLFHLEYLFIEGNKIETISRNAFRGLRDLTHLSLANNHIKALPRDVFSDLDSLIELDLRGNKFECDCKAKWLYLWLKMTNSTVSDVLCIGPPEYQEKKLNDVTSFDYECTTTDFVVHQTLPYQSVSVDTFNSKNDVYVAIAQPSMENCMVLEWDHIEMNFRSYDNITGQSIVGCKAILIDDQVFVVVAQLFGGSHIYKYDESWTKFVKFQDIEVSRISKPNDIELFQIDDETFFVIADSSKAGLSTVYKWNSKGFYSYQSLHEWFRDTDAEFVDIDGKSHLILSSRSQVPIILQWNKSSKKFVPHGDIPNMEDVLAVKSFRMQNTLYLSLTRFIGDSRVMRWNSKQFVEIQALPSRGAMTLQPFSFKDNHYLALGSDYTFSQIYQWDKEKQLFKKFKEIYVQAPRSFTAVSTDRRDFFFASSFKGKTKIFEHIIVDLSL

SEQ ID NO: 21616 - protein, 372 aa, Homo sapiens
MAKSKTKHRLCSQESSVSALLASCTLSGSNSSNSDGSFHYKDKLYRSASQALQAYIDDFDLGQIYPGASTGKINIDEDFTNMSQFCNYIYKPNNAFENLDHKKHSNFISCRRHTVNDIDSMSLTTDDLLRLPADGSFSYTYVGPSHRTSKKNKKCRGRLGSLDIEKNPHFQGPYTSMGKDNFVTPVIRSNINGKQCGDKIELLILKAKRNLEQCTEELPKSMKKDDSPCSLDKLEADRSWENIPVTFKSPVPVNSDDSPQQTSRAKSAKGVLEDFLNNDNQSCTLSGGKHHGPVEALKQMLFNLQAVQERFNQNKTTDPKEEIKQVSEDDFSKLQLKESMIPITRSLQKALHHLSRLRDLVDDTNGERSPKM

SEQ ID NO: 21617 - protein, 533 aa, Homo sapiens
MAKSKTKHRLCSQESSVSALLASCTLSGSNSSNSDGSFHYKDKLYRSASQALQAYIDDFDLGQIYPGASTGKINIDEDFTNMSQFCNYIYKPNNAFENLDHKKHSNFISCRRHTVNDIDSMSLTTDDLLRLPADGSFSYTYVGPSHRTSKKNKKCRGRLGSLDIEKNPHFQGPYTSMGKDNFVTPVIRSNINGKQCGRLKNPKLMNRTNNCISESSLSFPKKSSFKDSSEHSLEKNYPRWLTSQKSDLNVSGITSIPDFKYPVWLHNQDLLPDANSQRVYQIFKDDQCSPRHSHQAQGTSRLINKLDCFEYAFEPSNFSNSLSDDKELVNEYKCDFEHSQCQCENPLLPGQSTKPFSGDKIELLILKAKRNLEQCTEELPKSMKKDDSPCSLDKLEADRSWENIPVTFKSPVPVNSDDSPQQTSRAKSAKGVLEDFLNNDNQSCTLSGGKHHGPVEALKQMLFNLQAVQERFNQNKTTDPKEEIKQVSEDDFSKLQLKESMIPITRSLQKALHHLSRLRDLVDDTNGERSPKM

SEQ ID NO: 21618 - protein, 400 aa, Homo sapiens
MATLLLLLGVLVVSPDALGSTTAVQTPTSGEPLVSTSEPLSSKMYTTSITSDPKADSTGDQTSALPPSTSINEGSPLWTSIGASTGSPLPEPTTYQEVSIKMSSVPQETPHATSHPAVPITANSLGSHTVTGGTITTNSPETSSRTSGAPVTTAASSLETSRGTSGPPLTMATVSLETSKGTSGPPVTMATDSLETSTGTTGPPVTMTTGSLEPSSGASGPQVSSVKLSTMMSPTTSTNASTVPFRNPDENSRGMLPVAVLVALLAVIVLVALLLLWRRRQKRRTGALVLSRGGKRNGVVDAWAGPAQVPEEGAVTVTVGGSGGDKGSGFPDGEGSSRRPTLTTFFGRRKSRQGSLAMEELKSGSGPSLKGEEEPLVASEDGAVDAPAPDEPEGGDGAAP

SEQ ID NO: 21619 - protein, 509 aa, Homo sapiens
MNNEEDLLQEDSTRDEGNETEANSMNTLRRTRKKVTKPYVCSTEVGETDMSNSNDCMRDSSQILTPPQLSSRMKHIRQAMAKNRLQFVRFEATDLHGVSRSKTIPAHFFQEKVSHGVCMPRGYLEVIPNPKDNEMNNIRATCFNSDIVLMPELSTFRVLPWADRTARVICDTFTVTGEPLLTSPRYIAKRQLSHLQASGFSLLSAFIYDFCIFGVPEILNSKIISFPALTFLNNHDQPFMQELVDGLYHTGANVESFSSSTRPGQMEISFLPEFGISSADNAFTLRTGVKEVARKYNYIASFFIETGFCDSGILSHSLWDVDRKKNMFCSTSGTEQLTITGKKWLAGLLKHSAALSCLMAPSVSCRKRYSKDRKDLKKSVPTTWGYNDNSCIFNIKCHGEKGTRIENKLGSATANPYLVLAATVAAGLDGLHSSNEVLAGPDESTDFYQVEPSEIPLKLEDALVALEEDQCLRQALGETFIRYFVAMKKYELENEEIAAERNKFLEYFI

SEQ ID NO: 21620 - protein, 208 aa, Homo sapiens
MNNEEDLLQEDSTRDEGNETEANSMNTLRRTRKKVTKPYVCSTEVGETDMSNSNDCMRDSSQILTPPQLSSRMKHIRQAMAKNRLQFVRFEATDLHGVSRSKTIPAHFFQEKVSHGVCMPRGYLEVIPNPKDNEMNNIRATCFNSDIVLMPELSTFRVLPWADRTARVICDTFTVTVSGMSIGRKTCSAALLELSSSRSLGKNGWQDS

SEQ ID NO: 21621 - protein, 118 aa, Homo sapiens
MNNEEDLLQEDSTRDEGNETEANSMNTLRRTRKKVTKPYVCSTEVGETDMSNSNERIRNQMVCHKLGNTSKPIMGPGSAESHLSYDDKDSQDETTVIKPLPPRTTTNVPGGEFNPNSE

SEQ ID NO: 21622 - protein, 298 aa, Homo sapiens
MTEPGASPEDPWVKASPVGAHAGEGRAGRARARRGAGRRGASLLSPKSPTLSVPRGCREDSSHPACAKVEYAYSDNSLDPGLFVESTRKGSVVSRANSIGSTSASSVPNTDDEDSDYHQEAYKESYKDRRRRAHTQAEQKRRDAIKRGYDDLQTIVPTCQQQDFSIGSQKLSKAIVLQKTIDYIQFLHKEKKKQEEEVSTLRKDVTALKIMKVNYEQIVKAHQDNPHEGEDQVSDQVKFNVFQGIMDSLFQSFNASISVASFQELSACVFSWIEEHCKPQTLREIVIGVLHQLKNQLY

SEQ ID NO: 21623 - protein, 214 aa, Homo sapiens
MTEPGASPEDPWVKVEYAYSDNSLDPDDEDSDYHQEAYKESYKDRRRRAHTQAEQKRRDAIKRGYDDLQTIVPTCQQQDFSIGSQKLSKAIVLQKTIDYIQFLHKEKKKQEEEVSTLRKDVTALKIMKVNYEQIVKAHQDNPHEGEDQVSDQVKFNVFQGIMDSLFQSFNASISVASFQELSACVFSWIEEHCKPQTLREIVIGVLHQLKNQLY

SEQ ID NO: 21624 - protein, 244 aa, Homo sapiens
MTEPGASPEDPWVKVEYAYSDNSLDPGLFVESTRKGSVVSRANSIGSTSASSVPNTDDEDSDYHQEAYKESYKDRRRRAHTQAEQKRRDAIKRGYDDLQTIVPTCQQQDFSIGSQKLSKAIVLQKTIDYIQFLHKEKKKQEEEVSTLRKDVTALKIMKVNYEQIVKAHQDNPHEGEDQVSDQVKFNVFQGIMDSLFQSFNASISVASFQELSACVFSWIEEHCKPQTLREIVIGVLHQLKNQLY

SEQ ID NO: 21625 - protein, 503 aa, Homo sapiens
MAGLSDLELRRELQALGFQPGPITDTTRDVYRNKLRRLRGEARLRDEERLREEARPRGEERLREEARLREDAPLRARPAAASPRAEPWLSQPASGSAYATPGAYGDIRPSAASWVGSRGLAYPARPAQLRRRASVRGSSEEDEDARTPDRATQGPGLAARRWWAASPAPARLPSSLLGPDPRPGLRATRAGPAGAARARPEVGRRLERWLSRLLLWASLGLLLVFLGILWVKMGKPSAPQEAEDNMKLLPVDCERKTDEFCQAKQKAALLELLHELYNFLAIQAGNFECGNPENLKSKCIPVMEAQEYIANVTSSSSAKFEAALTWILSSNKDVGIWLKGEDQSELVTTVDKVVCLESAHPRMGVGCRLSRALLTAVTNVLIFFWCLAFLWGLLILLKYRWRKLEEEEQAMYEMVKKIIDVVQDHYVDWEQDMERYPYVGILHVRDSLIPPQSRRRMKRVWDRAVEFLASNESRIQTESHRVAGEDMLVWRWTKPSSFSDSER

SEQ ID NO: 21626 - protein, 201 aa, Homo sapiens
MEAQEYIANVTSSSSAKFEAALTWILSSNKDVGIWLKGEDQSELVTTVDKVVCLESAHPRMGVGCRLSRALLTAVTNVLIFFWCLAFLWGLLILLKYRWRKLEEEEQAMYEMVKKIIDVVQDHYVDWEQDMERYPYVGILHVRDSLIPPQSRRRMKRVWDRAVEFLASNESRIQTESHRVAGEDMLVWRWTKPSSFSDSER

SEQ ID NO: 21627 - protein, 117 aa, Homo sapiens
MDMRVLAQLLGLLLLCFPGARCDIQMTQSPSSLSASVGDRVTITCRASQGISNYLAWFQQKPGKAPKSLIYAASSLQSGVPSKFSGSGSGTDFTLTISSLQPEDFATYYCQQYNSYP

SEQ ID NO: 21628 - protein, 120 aa, Homo sapiens
MRLLAQLLGLLMLWVPGSSGDIVMTQTPLSSPVTLGQPASISCRSSQSLVHSDGNTYLSWLQQRPGQPPRLLIYKISNRFSGVPDRFSGSGAGTDFTLKISRVEAEDVGVYYCMQATQFP

SEQ ID NO: 21629 - protein, 800 aa, Homo sapiens
MAANVGDQRSTDWSSQYSMVAGAGRENGMETPMHENPEWEKARQALASISKSGAAGGSAKSSSNGPVASAQYVSQAEASALQQQQYYQWYQQYNYAYPYSYYYPMSMYQSYGSPSQYGMAGSYGSATPQQPSAPQHQGTLNQPPVPGMDESMSYQAPPQQLPSAQPPQPSNPPHGAHTLNSGPQPGTAPATQHSQAGPATGQAYGPHTYTEPAKPKKGQQLWNRMKPAPGTGGLKFNIQKRPFAVTTQSFGSNAEGQHSGFGPQPNPEKVQNHSGSSARGNLSGKPDDWPQDMKEYVERCFTACESEEDKDRTEKLLKEVLQARLQDGSAYTIDWSREPLPGLTREPVAESPKKKRWEAASSLHPPRGAGSATRGGGAPSQRGTPGAGGAGRARGNSFTKFGNRNVFMKDNSSSSSTDSRSRSSSRSPTRHFRRSDSHSDSDSSYSGNECHPVGRRNPPPKGRGGRGAHMDRGRGRAQRGKRHDLAPTKRSRKKMAALECEDPERELKKQKRAARFQHGHSRRLRLEPLVLQMSSLESSGADPDWQELQIVGTCPDITKHYLRLTCAPDPSTVRPVAVLKKSLCMVKCHWKEKQDYAFACEQMKSIRQDLTVQGIRTEFTVEVYETHARIALEKGDHEEFNQCQTQLKSLYAENLPGNVGEFTAYRILYYIFTKNSGDITTELAYLTRELKADPCVAHALALRTAWALGNYHRFFRLYCHAPCMSGYLVDKFADRERKVALKAMIKTFRPALPVSYLQAELAFEGEAACRAFLEPLGLAYTGPDNSSIDCRLSLAQLSAF

SEQ ID NO: 21630 - protein, 781 aa, Homo sapiens
MAANVGDQRSTDWSSQYSMVAGAGRENGMETPMHENPEWEKARQALASISKSGAAGGSAKSSSNGPVASAQYVSQAEASALQQQQYYQWYQQYNYAYPYSYYYPMPPVPGMDESMSYQAPPQQLPSAQPPQPSNPPHGAHTLNSGPQPGTAPATQHSQAGPATGQAYGPHTYTEPAKPKKGQQLWNRMKPAPGTGGLKFNIQKRPFAVTTQSFGSNAEGQHSGFGPQPNPEKVQNHSGSSARGNLSGKPDDWPQDMKEYVERCFTACESEEDKDRTEKLLKEVLQARLQDGSAYTIDWSREPLPGLTREPVAESPKKKRWEAASSLHPPRGAGSATRGGGAPSQRGTPGAGGAGRARGNSFTKFGNRNVFMKDNSSSSSTDSRSRSSSRSPTRHFRRSDSHSDSDSSYSGNECHPVGRRNPPPKGRGGRGAHMDRGRGRAQRGKRHDLAPTKRSRKKMAALECEDPERELKKQKRAARFQHGHSRRLRLEPLVLQMSSLESSGADPDWQELQIVGTCPDITKHYLRLTCAPDPSTVRPVAVLKKSLCMVKCHWKEKQDYAFACEQMKSIRQDLTVQGIRTEFTVEVYETHARIALEKGDHEEFNQCQTQLKSLYAENLPGNVGEFTAYRILYYIFTKNSGDITTELAYLTRELKADPCVAHALALRTAWALGNYHRFFRLYCHAPCMSGYLVDKFADRERKVALKAMIKTYVVPSSLLPLLFPSFRLVSSCIKLSPCPLLPLPPVFLLIFFSPFPPSLSAFFPWFSTGKTVPPSLPPSSAM

SEQ ID NO: 21631 - protein, 54 aa, Homo sapiens
MAANVGDQRSTDWSSQYSMVAGAGRENGMETPMHENPDNSSIDCRLSLAQLSAF

SEQ ID NO: 21632 - protein, 1025 aa, Homo sapiens
MEPFTNDRLQLPRNMIENSMFEEEPDVVDLAKEPCLHPLEPDEVEYEPRGSRLLVRGLGEHEMEEDEEDYESSAKLLGMSFMNRSSGLRNSATGYRQSPDGACSVPSARTMVVCAFVIVVAVSVIMVIYLLPRCTFTKEGCHKKNQSIGLIQPFATNGKLFPWAQIRLPTAVVPLRYELSLHPNLTSMTFRGSVTISVQALQVTWNIILHSTGHNISRVTFMSAVSSQEKQAEILEYAYHGQIAIVAPEALLAGHNYTLKIEYSANISSSYYGFYGFSYTDESNEKKYFAATQFEPLAARSAFPCFDEPAFKATFIIKIIRDEQYTALSNMPKKSSVVLDDGLVQDEFSESVKMSTYLVAFIVGEMKNLSQDVNGTLVSIYAVPEKIGQVHYALETTVKLLEFFQNYFEIQYPLKKLDLVAIPDFEAGAMENWGLLTFREETLLYDSNTSSMADRKLVTKIIAHELAHQWFGNLVTMKWWNDLWLNEGFATFMEYFSLEKIFKELSSYEDFLDARFKTMKKDSLNSSHPISSSVQSSEQIEEMFDSLSYFKGSSLLLMLKTYLSEDVFQHAVVLYLHNHSYASIQSDDLWDSFNEVTNQTLDVKRMMKTWTLQKGFPLVTVQKKGKELFIQQERFFLNMKPEIQPSDTSYLWHIPLSYVTEGRNYSKYQSVSLLDKKSGVINLTEEVLWVKVNINMNGYYIVHYADDDWEALIHQLKINPYVLSDKDRANLINNIFELAGLGKVPLKRAFDLINYLGNENHTAPITEALFQTDLIYNLLEKLGYMDLASRLVTRVFKLLQNQIQQQTWTDEGTPSMRELRSALLEFACTHNLGNCSTTAMKLFDDWMASNGTQSLPTDVMTTVFKVGAKTDKGWSFLLGKYISIGSEAEKNKILEALASSEDVRKLYWLMKSSLNGDNFRTQKLSFIIRTVGRHFPGHLLAWDFVKENWNKLVQKFPLGSYTIQNIVAGSTYLFSTKTHLSEVQAFFENQSEATFRLRCVQEALEVIQLNIQWMEKNLKSLTWWL

SEQ ID NO: 21633 - protein, 1011 aa, Homo sapiens
MIENSMFEEEPDVVDLAKEPCLHPLEPDEVEYEPRGSRLLVRGLGEHEMEEDEEDYESSAKLLGMSFMNRSSGLRNSATGYRQSPDGACSVPSARTMVVCAFVIVVAVSVIMVIYLLPRCTFTKEGCHKKNQSIGLIQPFATNGKLFPWAQIRLPTAVVPLRYELSLHPNLTSMTFRGSVTISVQALQVTWNIILHSTGHNISRVTFMSAVSSQEKQAEILEYAYHGQIAIVAPEALLAGHNYTLKIEYSANISSSYYGFYGFSYTDESNEKKYFAATQFEPLAARSAFPCFDEPAFKATFIIKIIRDEQYTALSNMPKKSSVVLDDGLVQDEFSESVKMSTYLVAFIVGEMKNLSQDVNGTLVSIYAVPEKIGQVHYALETTVKLLEFFQNYFEIQYPLKKLDLVAIPDFEAGAMENWGLLTFREETLLYDSNTSSMADRKLVTKIIAHELAHQWFGNLVTMKWWNDLWLNEGFATFMEYFSLEKIFKELSSYEDFLDARFKTMKKDSLNSSHPISSSVQSSEQIEEMFDSLSYFKGSSLLLMLKTYLSEDVFQHAVVLYLHNHSYASIQSDDLWDSFNEVTNQTLDVKRMMKTWTLQKGFPLVTVQKKGKELFIQQERFFLNMKPEIQPSDTSYLWHIPLSYVTEGRNYSKYQSVSLLDKKSGVINLTEEVLWVKVNINMNGYYIVHYADDDWEALIHQLKINPYVLSDKDRANLINNIFELAGLGKVPLKRAFDLINYLGNENHTAPITEALFQTDLIYNLLEKLGYMDLASRLVTRVFKLLQNQIQQQTWTDEGTPSMRELRSALLEFACTHNLGNCSTTAMKLFDDWMASNGTQSLPTDVMTTVFKVGAKTDKGWSFLLGKYISIGSEAEKNKILEALASSEDVRKLYWLMKSSLNGDNFRTQKLSFIIRTVGRHFPGHLLAWDFVKENWNKLVQKFPLGSYTIQNIVAGSTYLFSTKTHLSEVQAFFENQSEATFRLRCVQEALEVIQLNIQWMEKNLKSLTWWL

SEQ ID NO: 21634 - protein, 1006 aa, Homo sapiens
MFEEEPDVVDLAKEPCLHPLEPDEVEYEPRGSRLLVRGLGEHEMEEDEEDYESSAKLLGMSFMNRSSGLRNSATGYRQSPDGACSVPSARTMVVCAFVIVVAVSVIMVIYLLPRCTFTKEGCHKKNQSIGLIQPFATNGKLFPWAQIRLPTAVVPLRYELSLHPNLTSMTFRGSVTISVQALQVTWNIILHSTGHNISRVTFMSAVSSQEKQAEILEYAYHGQIAIVAPEALLAGHNYTLKIEYSANISSSYYGFYGFSYTDESNEKKYFAATQFEPLAARSAFPCFDEPAFKATFIIKIIRDEQYTALSNMPKKSSVVLDDGLVQDEFSESVKMSTYLVAFIVGEMKNLSQDVNGTLVSIYAVPEKIGQVHYALETTVKLLEFFQNYFEIQYPLKKLDLVAIPDFEAGAMENWGLLTFREETLLYDSNTSSMADRKLVTKIIAHELAHQWFGNLVTMKWWNDLWLNEGFATFMEYFSLEKIFKELSSYEDFLDARFKTMKKDSLNSSHPISSSVQSSEQIEEMFDSLSYFKGSSLLLMLKTYLSEDVFQHAVVLYLHNHSYASIQSDDLWDSFNEVTNQTLDVKRMMKTWTLQKGFPLVTVQKKGKELFIQQERFFLNMKPEIQPSDTSYLWHIPLSYVTEGRNYSKYQSVSLLDKKSGVINLTEEVLWVKVNINMNGYYIVHYADDDWEALIHQLKINPYVLSDKDRANLINNIFELAGLGKVPLKRAFDLINYLGNENHTAPITEALFQTDLIYNLLEKLGYMDLASRLVTRVFKLLQNQIQQQTWTDEGTPSMRELRSALLEFACTHNLGNCSTTAMKLFDDWMASNGTQSLPTDVMTTVFKVGAKTDKGWSFLLGKYISIGSEAEKNKILEALASSEDVRKLYWLMKSSLNGDNFRTQKLSFIIRTVGRHFPGHLLAWDFVKENWNKLVQKFPLGSYTIQNIVAGSTYLFSTKTHLSEVQAFFENQSEATFRLRCVQEALEVIQLNIQWMEKNLKSLTWWL

SEQ ID NO: 21635 - protein, 411 aa, Homo sapiens
MSVGCACPGCSSKSFKLYSPKEPPNGNAFPPFHPGTMLDRDVGPTPMYPPTYLEPGIGRHTPYGNQTDYRIFELNKRLQNWTEECDNLWWDAFTTEFFEDDAMLTITFCLEDGPKRYTIGRTLIPRYFRSIFEGGATELYYVLKHPKEAFHSNFVSLDCDQGSMVTQHGKPMFTQVCVEGRLYLEFMFDDMMRIKTWHFSIRQHRELIPRSILAMHAQDPQMLDQLSKNITRCGLSNSTLNYLRLCVILEPMQELMSRHKTYSLSPRDCLKTCLFQKWQRMVAPPAEPTRQQPSKRRKRKMSGGSTMSSGGGNTNNSNSKKKSPASTFALSSQVPDVMVVGEPTLMGGEFGDEDERLITRLENTQFDAANGIDDEDSFNNSPALGANSPWNSKPPSSQESKSENPTSQASQ

SEQ ID NO: 21636 - protein, 316 aa, Homo sapiens
MLDRDVGPTPMYPPTYLEPGIGRHTPYGNQTDYRIFELNKRLQNWTEECDNLWWDAFTTEFFEDDAMLTITFCLEDGPKRYTIGRTLIPRYFRSIFEGGATELYYVLKHPKEAFHSNFVSLDCDQGSMVTQHGKPMFTQVCVEGRLYLEFMFDDMMRIKTWHFSIRQHRELIPRSILAMHAQDPQMLDQLSKNITRCGLSNSTLNYLRLCVILEPMQELMSRHKTYSLSPRDCLKTCLFQKWQRMVAPPAEPTRQQPSKRRKRKMSGGSTMSSGGGNTNNSNSKKKSPASTFALSSQVPVSISAFFSLLGCPTTHP

SEQ ID NO: 21637 - protein, 375 aa, Homo sapiens
MLDRDVGPTPMYPPTYLEPGIGRHTPYGNQTDYRIFELNKRLQNWTEECDNLWWDAFTTEFFEDDAMLTITFCLEDGPKRYTIGRTLIPRYFRSIFEGGATELYYVLKHPKEAFHSNFVSLDCDQGSMVTQHGKPMFTQVCVEGRLYLEFMFDDMMRIKTWHFSIRQHRELIPRSILAMHAQDPQMLDQLSKNITRCGLSNSTLNYLRLCVILEPMQELMSRHKTYSLSPRDCLKTCLFQKWQRMVAPPAEPTRQQPSKRRKRKMSGGSTMSSGGGNTNNSNSKKKSPASTFALSSQVPDVMVVGEPTLMGGEFGDEDERLITRLENTQFDAANGIDDEDSFNNSPALGANSPWNSKPPSSQESKSENPTSQASQ

SEQ ID NO: 21638 - protein, 727 aa, Homo sapiens
MSYSVTLTGPGPWGFRLQGGKDFNMPLTISRITPGSKAAQSQLSQGDLVVAIDGVNTDTMTHLEAQNKIKSASYNLSLTLQKSKRPIPISTTAPPVQTPLPVIPHQKDPALDTNGSLVAPSPSPEARASPGTPGTPELRPTFSPAFSRPSAFSSLAEASDPGPPRASLRAKTSPEGARDLLGPKALPGSSQPRQYNNPIGLYSAETLREMAQMYQMSLRGKASGVGLPGGSLPIKDLAVDSASPVYQAVIKSQNKPEDEADEWARRSSNLQSRSFRILAQMTGTEFMQDPDEEALRRSSTPIEHAPVCTSQATTPLLPASAQPPAAASPSAASPPLATAAAHTAIASASTTAPASSPADSPRPQASSYSPAVAASSAPATHTSYSEGPAAPAPKPRVVTTASIRPSVYQPVPASTYSPSPGANYSPTPYTPSPAPAYTPSPAPAYTPSPVPTYTPSPAPAYTPSPAPNYNPAPSVAYSGGPAEPASRPPWVTDDSFSQKFAPGKSTTSISKQTLPRGGPAYTPAGPQVPPLARGTVQRAERFPASSRTPLCGHCNNVIRGPFLVAMGRSWHPEEFTCAYCKTSLADVCFVEEQNNVYCERCYEQFFAPLCAKCNTKIMGEVMHALRQTWHTTCFVCAACKKPFGNSLFHMEDGEPYCEKDYINLFSTKCHGCDFPVEAGDKFIEALGHTWHDTCFICAVCHVNLEGQPFYSKKDRPLCKKHAHTINL

SEQ ID NO: 21639 - protein, 617 aa, Homo sapiens
MSYSVTLTGPGPWGFRLQGGKDFNMPLTISRITPGSKAAQSQLSQGDLVVAIDGVNTDTMTHLEAQNKIKSASYNLSLTLQKSKRPIPISTTAPPVQTPLPVIPHQKVVVNSPANADYQERFNPSALKDSALSTHKPIEVKGLGGKATIIHAQYNTPISMYSQDAIMDAIAGQAQAQGSDFSGSLPIKDLAVDSASPVYQAVIKSQNKPEDEADEWARRSSNLQSRSFRILAQMTGTEFMQDPDEEALRRSRPQASSYSPAVAASSAPATHTSYSEGPAAPAPKPRVVTTASIRPSVYQPVPASTYSPSPGANYSPTPYTPSPAPAYTPSPAPAYTPSPVPTYTPSPAPAYTPSPAPNYNPAPSVAYSGGPAEPASRPPWVTDDSFSQKFAPGKSTTSISKQTLPRGGPAYTPAGPQVPPLARGTVQRAERFPASSRTPLCGHCNNVIRGPFLVAMGRSWHPEEFTCAYCKTSLADVCFVEEQNNVYCERCYEQFFAPLCAKCNTKIMGEVMHALRQTWHTTCFVCAACKKPFGNSLFHMEDGEPYCEKDYINLFSTKCHGCDFPVEAGDKFIEALGHTWHDTCFICAVCHVNLEGQPFYSKKDRPLCKKHAHTINL

SEQ ID NO: 21640 - protein, 470 aa, Homo sapiens
MSYSVTLTGPGPWGFRLQGGKDFNMPLTISRITPGSKAAQSQLSQGDLVVAIDGVNTDTMTHLEAQNKIKSASYNLSLTLQKSKRPIPISTTAPPVQTPLPVIPHQKASSYSPAVAASSAPATHTSYSEGPAAPAPKPRVVTTASIRPSVYQPVPASTYSPSPGANYSPTPYTPSPAPAYTPSPAPAYTPSPVPTYTPSPAPAYTPSPAPNYNPAPSVAYSGGPAEPASRPPWVTDDSFSQKFAPGKSTTSISKQTLPRGGPAYTPAGPQVPPLARGTVQRAERFPASSRTPLCGHCNNVIRGPFLVAMGRSWHPEEFTCAYCKTSLADVCFVEEQNNVYCERCYEQFFAPLCAKCNTKIMGEVMHALRQTWHTTCFVCAACKKPFGNSLFHMEDGEPYCEKDYINLFSTKCHGCDFPVEAGDKFIEALGHTWHDTCFICAVCHVNLEGQPFYSKKDRPLCKKHAHTINL

SEQ ID NO: 21641 - protein, 398 aa, Homo sapiens
MSYSVTLTGPGPWGFRLQGGKDFNMPLTISRITPGSKAAQSQLSQGDLVVAIDGVNTDTMTHLEAQNKIKSASYNLSLTLQKSKRPIPISTTAPPVQTPLPVIPHQKDPALDTNGSLVAPSPSPEARASPGTPGTPELRPTFSPAFSRPSAFSSLAEASDPGPPRASLRAKTSPEGARDLLGPKALPGSSQPRQYNNPIGLYSAETLREMAQMYQMSLRGKASGVGLPGGADYQERFNPSALKDSALSTHKPIEVKGLGGKATIIHAQYNTPISMYSQDAIMDAIAGQAQAQGSDFSGSLPIKDLAVDSASPVYQAVIKSQNKPEDEADEWARRSSNLQSRSFRILAQMTGTEFMQDPDEEALRRSRERFETERNSPRFAKLRNWHHGLSAQILNVKS

SEQ ID NO: 21642 - protein, 330 aa, Homo sapiens
MSYSVTLTGPGPWGFRLQGGKDFNMPLTISRITPGSKAAQSQLSQGDLVVAIDGVNTDTMTHLEAQNKIKSASYNLSLTLQKSKRPIPISTTAPPVQTPLPVIPHQKDPALDTNGSLVAPSPSPEARASPGTPGTPELRPTFSPAFSRPSAFSSLAEASDPGPPRASLRAKTSPEGARDLLGPKALPGSSQPRQYNNPIGLYSAETLREMAQMYQMSLRGKASGVGLPGGSLPIKDLAVDSASPVYQAVIKSQNKPEDEADEWARRSSNLQSRSFRILAQMTGTEFMQDPDEEALRRSRERFETERNSPRFAKLRNWHHGLSAQILNVKS

SEQ ID NO: 21643 - protein, 283 aa, Homo sapiens
MSYSVTLTGPGPWGFRLQGGKDFNMPLTISRITPGSKAAQSQLSQGDLVVAIDGVNTDTMTHLEAQNKIKSASYNLSLTLQKSKRPIPISTTAPPVQTPLPVIPHQKVVVNSPANADYQERFNPSALKDSALSTHKPIEVKGLGGKATIIHAQYNTPISMYSQDAIMDAIAGQAQAQGSDFSGSLPIKDLAVDSASPVYQAVIKSQNKPEDEADEWARRSSNLQSRSFRILAQMTGTEFMQDPDEEALRRSRERFETERNSPRFAKLRNWHHGLSAQILNVKS

SEQ ID NO: 21644 - protein, 732 aa, Homo sapiens
MSYSVTLTGPGPWGFRLQGGKDFNMPLTISRITPGSKAAQSQLSQGDLVVAIDGVNTDTMTHLEAQNKIKSASYNLSLTLQKSKRPIPISTTAPPVQTPLPVIPHQKDPALDTNGSLVAPSPSPEARASPGTPGTPELRPTFSPAFSRPSAFSSLAEASDPGPPRASLRAKTSPEGARDLLGPKALPGSSQPRQYNNPIGLYSAETLREMAQMYQMSLRGKASGVGLPGGADYQERFNPSALKDSALSTHKPIEVKGLGGKATIIHAQYNTPISMYSQDAIMDAIAGQAQAQGSDFSGSLPIKDLAVDSASPVYQAVIKSQNKPEDEADEWARRSSNLQSRSFRILAQMTGTEFMQDPDEEALRRSRPQASSYSPAVAASSAPATHTSYSEGPAAPAPKPRVVTTASIRPSVYQPVPASTYSPSPGANYSPTPYTPSPAPAYTPSPAPAYTPSPVPTYTPSPAPAYTPSPAPNYNPAPSVAYSGGPAEPASRPPWVTDDSFSQKFAPGKSTTSISKQTLPRGGPAYTPAGPQVPPLARGTVQRAERFPASSRTPLCGHCNNVIRGPFLVAMGRSWHPEEFTCAYCKTSLADVCFVEEQNNVYCERCYEQFFAPLCAKCNTKIMGEVMHALRQTWHTTCFVCAACKKPFGNSLFHMEDGEPYCEKDYINLFSTKCHGCDFPVEAGDKFIEALGHTWHDTCFICAVCHVNLEGQPFYSKKDRPLCKKHAHTINL

SEQ ID NO: 21645 - protein, 176 aa, Homo sapiens
MDLPDSASRVFCGRILSMVNTDDVNAIILAQKNMLDRFEKTNEMLLNFNNLSSARLQQMSERFLHHTRTLVEMKRDLDSIFRRIRTLKGKLARQHPEAFSHIPEASFLEEEDEDPIPPSTTTTIATSEQSTGSCDTSPDTVSPSLSPGFEDLSHVQPGSPAINGRSQTDDEEMTGE

SEQ ID NO: 21646 - protein, 117 aa, Homo sapiens
MDMRVPAQLLGLLLLWLSGARCDIQMTQSPSSLSASVGDRVTITCQASQDISNYLNWYQQKPGKAPKLLIYDASNLETGVPSRFSGSGSGTDFTFTISSLQPEDIATYYCQQYDNLP

SEQ ID NO: 21647 - protein, 110 aa, Homo sapiens
MSCQQSQQQCQPPPKCTPKCPPKCPTPKCPPKCPPKCPPVSSCCSVSSGGCCGSSSGGGCSSGGGGCCLSHHRRHRSHRHRLQSSGCCSQPSGGSSCCGGDSGQHSGGCC

SEQ ID NO: 21648 - protein, 118 aa, Homo sapiens
MSCQQSQQQCQPPPKCTPKCPPKCPTPKCPPKCPPKCPPVSSCCSVSSGGCCGSSSGGSCGSSSGGCCSSGGGGCCLSHHRRRRSHCHRPQSSGCCSQPSGGSSCCGGGSGQHSGGCC

SEQ ID NO: 21649 - protein, 106 aa, Homo sapiens
MSCQQNQQQCQPPPKCPPKCPPKCPPKCRPQCPAPCPPPVSSCCGPSSGGCCGSSSGGCCSSGGGGCCLSHHRPRLFHRHRHQSPDCCECEPSGGSGCCHSSGDCC

SEQ ID NO: 21650 - protein, 1609 aa, Homo sapiens
MRGSHRAAPALRPRGRLWPVLAVLAAAAAAGCAQAAMDECTDEGGRPQRCMPEFVNAAFNVTVVATNTCGTPPEEYCVQTGVTGVTKSCHLCDAGQPHLQHGAAFLTDYNNQADTTWWQSQTMLAGVQYPSSINLTLHLGKAFDITYVRLKFHTSRPESFAIYKRTREDGPWIPYQYYSGSCENTYSKANRGFIRTGGDEQQALCTDEFSDISPLTGGNVAFSTLEGRPSAYNFDNSPVLQEWVTATDIRVTLNRLNTFGDEVFNDPKVLKSYYYAISDFAVGGRCKCNGHASECMKNEFDKLVCNCKHNTYGVDCEKCLPFFNDRPWRRATAESASECLPCDCNGRSQECYFDPELYRSTGHGGHCTNCQDNTDGAHCERCRENFFRLGNNEACSSCHCSPVGSLSTQCDSYGRCSCKPGVMGDKCDRCQPGFHSLTEAGCRPCSCDPSGSIDECNIETGRCVCKDNVEGFNCERCKPGFFNLESSNPRGCTPCFCFGHSSVCTNAVGYSVYSISSTFQIDEDGWRAEQRDGSEASLEWSSERQDIAVISDSYFPRYFIAPAKFLGKQVLSYGQNLSFSFRVDRRDTRLSAEDLVLEGAGLRVSVPLIAQGNSYPSETTVKYVFRLHEATDYPWRPALTPFEFQKLLNNLTSIKIRGTYSERSAGYLDDVTLASARPGPGVPATWVESCTCPVGYGGQFCEMCLSGYRRETPNLGPYSPCVLCACNGHSETCDPETGVCNCRDNTAGPHCEKCSDGYYGDSTAGTSSDCQPCPCPGGSSCAVVPKTKEVVCTNCPTGTTGKRCELCDDGYFGDPLGRNGPVRLCRLCQCSDNIDPNAVGNCNRLTGECLKCIYNTAGFYCDRCKDGFFGNPLAPNPADKCKACNCNLYGTMKQQSSCNPVTGQCECLPHVTGQDCGACDPGFYNLQSGQGCERCDCHALGSTNGQCDIRTGQCECQPGITGQHCERCEVNHFGFGPEGCKPCDCHPEGSLSLQCKDDGRCECREGFVGNRCDQCEENYFYNRSWPGCQECPACYRLVKDKVADHRVKLQELESLIANLGTGDEMVTDQAFEDRLKEAEREVMDLLREAQDVKDVDQNLMDRLQRVNNTLSSQISRLQNIRNTIEETGNLAEQARAHVENTERLIEIASRELEKAKVAAANVSVTQPESTGDPNNMTLLAEEARKLAERHKQEADDIVRVAKTANDTSTEAYNLLLRTLAGENQTAFEIEELNRKYEQAKNISQDLEKQAARVHEEAKRAGDKAVEIYASVAQLSPLDSETLENEANNIKMEAENLEQLIDQKLKDYEDLREDMRGKELEVKNLLEKGKTEQQTADQLLARADAAKALAEEAAKKGRDTLQEANDILNNLKDFDRRVNDNKTAAEEALRKIPAINQTITEANEKTREAQQALGSAAADATEAKNKAHEAERIASAVQKNATSTKAEAERTFAEVTDLDNEVNNMLKQLQEAEKELKRKQDDADQDMMMAGMASQAAQEAEINARKAKNSVTSLLSIINDLLEQLGQLDTVDLNKLNEIEGTLNKAKDEMKVSDLDRKVSDLENEAKKQEAAIMDYNRDIEEIMKDIRNLEDIRKTLPSGCFNTPSIEKP

SEQ ID NO: 21651 - protein, 114 aa, Homo sapiens
MSCQQSQQQCQPPPKCTPKCTPKCPAPKCPPKCPPVSSCCSVSSGGCCGSSSGGGCGSNSGGCCSSGGGGCCLSHHRRHRSHRRRPQSSDCCSQPSGGSSCCGGGSSQHSGGCC

SEQ ID NO: 21652 - protein, 118 aa, Homo sapiens
MSCQQSQQQCQPPPKCTPKCPPKCPTPKCPPKCPPKCPPVSSCCSVSSGGCCGSSSGGCCSSGGGGCCSSGGGGCCLSHHRRRRSHRHRPQSSDCCSQPSAGSSCCGGGSGQHSGGCC

SEQ ID NO: 21653 - protein, 110 aa, Homo sapiens
MSCQQNQQQCQPPPKCPPKCTPKCPPKCPPKCPPQCPAPCFPAVSSCCGPSSGSCCGPSSGGCCSSGAGGCSLSHHRPRLFHRRRHQSPDCCESEPSGGSGCCHSSGGCC

SEQ ID NO: 21654 - protein, 122 aa, Homo sapiens
MPPLAPQLCRAVFLVPILLLLQVKPLNGSPGPKDGSQTEKTPSADQNQEQFEEHFVASSVGEMWQVVDMAQQEEDQSSKTAAVHKHSFHLSFCFSLASVMVFSGGPLRRTFPNIQLCFMLTH

SEQ ID NO: 21655 - protein, 46 aa, Homo sapiens
MPPLAPQLCRAVFLVPILLLLQVKPLNGSPGPKDGSQTEKTPSAGS

SEQ ID NO: 21656 - protein, 147 aa, Homo sapiens
MGQEVHGSCWALGAGGGQRQWVGRSMPPLAPQLCRAVFLVPILLLLQVKPLNGSPGPKDGSQTEKTPSADQNQEQFEEHFVASSVGEMWQVVDMAQQEEDQSSKTAAVHKHSFHLSFCFSLASVMVFSGGPLRRTFPNIQLCFMLTH

SEQ ID NO: 21657 - protein, 410 aa, Homo sapiens
MVCFRLFPVPGSGLVLVCLVLGAVRSYALELNLTDSENATCLYAKWQMNFTVRYETTNKTYKTVTISDHGTVTYNGSICGDDQNGPKIAVQFGPGFSWIANFTKAASTYSIDSVSFSYNTGDNTTFPDAEDKGILTVDELLAIRIPLNDLFRCNSLSTLEKNDVVQHYWDVLVQAFVQNGTVSTNEFLCDKDKTSTVAPTIHTTVPSPTTTPTPKEKPEAGTYSVNNGNDTCLLATMGLQLNITQDKVASVININPNTTHSTGSCRSHTALLRLNSSTIKYLDFVFAVKNENRFYLKEVNISMYLVNGSVFSIANNNLSYWDAPLGSSYMCNKEQTVSVSGAFQINTFDLRVQPFNVTQGKYSTAQDCSADDDNFLVPIAVGAALAGVLILVLLAYFIGLKHHHAGYEQF

SEQ ID NO: 21658 - protein, 410 aa, Homo sapiens
MVCFRLFPVPGSGLVLVCLVLGAVRSYALELNLTDSENATCLYAKWQMNFTVRYETTNKTYKTVTISDHGTVTYNGSICGDDQNGPKIAVQFGPGFSWIANFTKAASTYSIDSVSFSYNTGDNTTFPDAEDKGILTVDELLAIRIPLNDLFRCNSLSTLEKNDVVQHYWDVLVQAFVQNGTVSTNEFLCDKDKTSTVAPTIHTTVPSPTTTPTPKEKPEAGTYSVNNGNDTCLLATMGLQLNITQDKVASVININPNTTHSTGSCRSHTALLRLNSSTIKYLDFVFAVKNENRFYLKEVNISMYLVNGSVFSIANNNLSYWDAPLGSSYMCNKEQTVSVSGAFQINTFDLRVQPFNVTQGKYSTAQECSLDDDTILIPIIVGAGLSGLIIVIVIAYVIGRRKSYAGYQTL

SEQ ID NO: 21659 - protein, 411 aa, Homo sapiens
MVCFRLFPVPGSGLVLVCLVLGAVRSYALELNLTDSENATCLYAKWQMNFTVRYETTNKTYKTVTISDHGTVTYNGSICGDDQNGPKIAVQFGPGFSWIANFTKAASTYSIDSVSFSYNTGDNTTFPDAEDKGILTVDELLAIRIPLNDLFRCNSLSTLEKNDVVQHYWDVLVQAFVQNGTVSTNEFLCDKDKTSTVAPTIHTTVPSPTTTPTPKEKPEAGTYSVNNGNDTCLLATMGLQLNITQDKVASVININPNTTHSTGSCRSHTALLRLNSSTIKYLDFVFAVKNENRFYLKEVNISMYLVNGSVFSIANNNLSYWDAPLGSSYMCNKEQTVSVSGAFQINTFDLRVQPFNVTQGKYSTAEECSADSDLNFLIPVAVGVALGFLIIVVFISYMIGRRKSRTGYQSV

SEQ ID NO: 21660 - protein, 547 aa, Homo sapiens
MYRLMSAVTARAAAPGGLASSCGRRGVHQRAGLPPLGHGWVGGLGLGLGLALGVKLAGGLRGAAPAQSPAAPDPEASPLAEPPQEQSLAPWSPQTPAPPCSRCFARAIESSRDLLHRIKDEVGAPGIVVGVSVDGKEVWSEGLGYADVENRVPCKPETVMRIASISKSLTMVALAKLWEAGKLDLDIPVQHYVPEFPEKEYEGEKVSVTTRLLISHLSGIRHYEKDIKKVKEEKAYKALKMMKENVAFEQEKEGKSNEKNDFTKFKTEQENEAKCRNSKPGKKKNDFEQGELYLREKFENSIESLRLFKNDPLFFKPGSQFLYSTFGYTLLAAIVERASGCKYLDYMQKIFHDLDMLTTVQEENEPVIYNRARFYVYNKKKRLVNTPYVDNSYKWAGGGFLSTVGDLLKFGNAMLYGYQVGLFKNSNENLLPGYLKPETMVMMWTPVPNTEMSWDKEGKYAMAWGVVERKQTYGSCRKQRHYASHTGGAVGASSVLLVLPEELDTETINNKVPPRGIIVSIICNMQSVGLNSTALKIALEFDKDRSD

SEQ ID NO: 21661 - protein, 373 aa, Homo sapiens
MYRLMSAVTARAAAPGGLASSCGRRGVHQRAGLPPLGHGWVGGLGLGLGLALGVKLAGGLRGAAPAQSPAAPDPEASPLAEPPQEQSLAPWSPQTPAPPCSRCFARAIESSRDLLHRIKDEVGAPGIVVGVSVDGKEVWSEGLGYADVENRVPCKPETVMRIASISKSLTMVALAKLWEAGKLDLDIPVQHYVPEFPEKEYEGEKVSVTTRLLISHLSGIRHYEKDIKKVKEEKAYKALKMMKENVAFEQEKEGKSNEKNDFTKFKTEQENEAKCRNSKPGKKKNDFEQGELYLREKFENSIESLRLFKNDPLFFKPGSQFLYSTFGYTLLAAIVERASGCKYLDYMQKIFHDLDMLTTVQEENEPVIYNRAR

SEQ ID NO: 21662 - protein, 509 aa, Homo sapiens; identical to SEQ ID NO: 279

SEQ ID NO: 21663 - protein, 363 aa, Homo sapiens
MGCGCSSHPEDDWMENIDVCENCHYPIVPLDGKGTLLIRNGSEVRDPLVTYEGSNPPASPLQDNLVIALHSYEPSHDGDLGFEKGEQLRILEQSGEWWKAQSLTTGQEGFIPFNFVAKANSLEPEPWFFKNLSRKDAERQLLAPGNTHGSFLIRESESTAGSFSLSVRDFDQNQGEVVKHYKIRNLDNGGFYISPRITFPGLHELVRHYTNASDGLCTRLSRPCQTQKPQKPWWEDEWEVPRETLKLVERLGAGQFGEVWMGYYNGHTKVAVKSLKQGSMSPDAFLAEANLMKQLQHQRLVRLYAVVTQEPIYIITEYMENGSLVDFLKTPSGIKLTINKLLDMAAQVRRLGRGAGQGNRPVT

SEQ ID NO: 21664 - protein, 539 aa, Homo sapiens
MGCGCSSHPEDDWMENIDVCENCHYPIVPLDGKGTLLIRNGSEVRDPLVTYEGSNPPASPLQDNLVIALHSYEPSHDGDLGFEKGEQLRILEQSGEWWKAQSLTTGQEGFIPFNFVAKANSLEPEPWFFKNLSRKDAERQLLAPGNTHGSFLIRESESTAGSFSLSVRDFDQNQGEVVKHYKIRNLDNGGFYISPRITFPGLHELVRHYTNASDGLCTRLSRPCQTQKPQKPWWEDEWEVPRETLKLVERLGAGQFGEVWMGYYNGHTKVAVKSLKQGSMSPDAFLAEANLMKQLQHQRLVRLYAVVTQEPIYIITEYMENDTLLDSQLEEKGLGASPWGNLGQQLLLLPTGSLVDFLKTPSGIKLTINKLLDMAAQIAEGMAFIEERNYIHRDLRAANILVSDTLSCKIADFGLARLIEDNEYTAREGAKFPIKWTAPEAINYGTFTIKSDVWSFGILLTEIVTHGRIPYPGMTNPEVIQNLERGYRMVRPDNCPEELYQLMRLCWKERPEDRPTFDYLRSVLEDFFTATEGQYQPQP

SEQ ID NO: 21665 - protein, 61 aa, Homo sapiens
MDPNCSCATGGSCSCASSCKCKECKCTSCKKSCCSCCPMGCAKCAQGCVCKGASEKCSCCA

SEQ ID NO: 21666 - protein, 61 aa, Homo sapiens
MDPNCSCTTGVSCACTGSCTCKECKCTSCKKSCCSCCPVGCAKCAHGCVCKGTLENCSCCA

SEQ ID NO: 21667 - protein, 507 aa, Homo sapiens
MARLLRSATWELFPWRGYCSQKAKGELCRDFVEALKAVVGGSHVSTAAVVREQHGRDESVHRCEPPDAVVWPQNVEQVSRLAALCYRQGVPIIPFGTGTGLEGGVCAVQGGVCVNLTHMDRILELNQEDFSVVVEPGVTRKALNAHLRDSGLWFPVDPGADASLCGMAATGASGTNAVRYGTMRDNVLNLEVVLPDGRLLHTAGRGRHFRFGFWPEIPHHTAWYSPCVSLGRRKSAAGYNLTGLFVGSEGTLGLITATTLRLHPAPEATVAATCAFPSVQAAVDSTVHILQAAVPVARIEFLDEVMMDACNRYSKLNCLVAPTLFLEFHGSQQALEEQLQRTEEIVQQNGASDFSWAKEAEERSRLWTARHNAWYAALATRPGCKGYSTDVCVPISRLPEIVVQTKEDLNASGLTGSIVGHVGDGNFHCILLVNPDDAEELGRVKAFAEQLGRRALALHGTCTGEHGIGMGKRQLLQEEVGAVGVETMRQLKAVLDPQGLMNPGKVL

SEQ ID NO: 21668 - protein, 484 aa, Homo sapiens
MARLLRSATWELFPWRGYCSQKAKGELCRDFVEALKAVVGGSHVSTAAVVREQHGRDESVHRCEPPDAVVWPQNVEQVSRLAALCYRQGVPIIPFGTGTGLEGGVCAVQGGVCVNLTHMDRILELNQEDFSVVVEPGVTRKALNAHLRDSGLWFPVDPGADASLCGMAATGASGTNAVRYGTMRDNVLNLEVVLPDGRLLHTAGRGRHFRKSAAGYNLTGLFVGSEGTLGLITATTLRLHPAPEATVAATCAFPSVQAAVDSTVHILQAAVPVARIEFLDEVMMDACNRYSKLNCLVAPTLFLEFHGSQQALEEQLQRTEEIVQQNGASDFSWAKEAEERSRLWTARHNAWYAALATRPGCKGYSTDVCVPISRLPEIVVQTKEDLNASGLTGSIVGHVGDGNFHCILLVNPDDAEELGRVKAFAEQLGRRALALHGTCTGEHGIGMGKRQLLQEEVGAVGVETMRQLKAVLDPQGLMNPGKVL

SEQ ID NO: 21669 - protein, 283 aa, Homo sapiens
MASGTTTTAVKIGIIGGTGLDDPEILEGRTEKYVDTPFGKPSDALILGKIKNVDCVLLARHGRQHTIMPSKVNYQANIWALKEEGCTHVIVTTACGSLREEIQPGDIVIIDQFIDRTTMRPQSFYDGSHSCARGVCHIPMAEPFCPKTREVLIETAKKLGLRCHSKGTMVTIEGPRFSSRAESFMFRTWGADVINMTTVPEVVLAKEAGICYASIAMATDYDCWKEHEEAVSVDRVLKTLKENANKAKSLLLTTIPQIGSTEWSETLHNLKNMAQFSVLLPRH

SEQ ID NO: 21670 - protein, 346 aa, Homo sapiens
MASGTTTTAVKIGIIGGTGLDDPEILEGRTEKYVDTPFGKPSDALILGKIKNVDCVLLARHGRQHTIMPSKVNYQANIWALKEEGCTHVIVTTACGSLREEIQPGDIVIIDQFIDRTTMRPQSFYDGSHSCARGVCHIPMAEPFCPKTREVLIETAKKLGLRCHSKGTMVTIEGPRFSSRAESFMFRTWGADVINMTTVPEVVLAKEAGICYASIAMATDYDCWKEHEEAVSVDRVLKTLKENANKAKSLLLTTIPQIGSTEWSETLHNLKMIKFQMILSEGYHPFNIQESPFYRGLLDFPSVGHGRGKKCLSAPAIILRPPQPRGTVTTFKVSWSKDQTYICMKS

SEQ ID NO: 21671 - protein, 334 aa, Homo sapiens
MASGTTTTAVKIGIIGGTGLDDPEILEGRTEKYVDTPFGKPSDALILGKIKNVDCVLLARHGRQHTIMPSKVNYQANIWALKEEGCTHVIVTTACGSLREEIQPGDIVIIDQFIDRTTMRPQSFYDGSHSCARGVCHIPMAEPFCPKTREVLIETAKKLGLRCHSKGTMVTIEGPRFSSRAESFMFRTWGADVINMTTVPEVVLAKEAGICYASIAMATDYDCWKEHEEAVSVDRVLKTLKENANKAKSLLLTTIPQIGSTEWSETLHNLKMIKFQMILSEGYHPFNIQESPFYRGLLDFPSVGHGRGEILPLSPLDLAGYCFQQPMQPPCPDS

SEQ ID NO: 21672 - protein, 280 aa, Homo sapiens
MASGTTTTAVKIGIIGGTGLDDPEILEGRTEKYVDTPFGKPSDALILGKIKNVDCVLLARHGRQHTIMPSKVNYQANIWALKEEGCTHVIVTTACGSLREEIQPGDIVIIDQFIDRTTMRPQSFYDGSHSCARGVCHIPMAEPFCPKTREVLIETAKKLGLRCHSKGTMVTIEGPRFSSRAESFMFRTWGADVINMTTVPEVVLAKEAGICYASIAMATDYDCWKEHEEAVSVDRVLKTLKENANKAKSLLLTTIPQIGSTEWSETLHNLKVRSAFQLPP

SEQ ID NO: 21673 - protein, 305 aa, Homo sapiens
MASGTTTTAVKIGIIGGTGLDDPEILEGRTEKYVDTPFGKPSDALILGKIKNVDCVLLARHGRQHTIMPSKVNYQANIWALKEEGCTHVIVTTACGSLREEIQPGDIVIIDQFIDRTTMRPQSFYDGSHSCARGVCHIPMAEPFCPKTREVLIETAKKLGLRCHSKGTMVTIEGPRFSSRAESFMFRTWGADVINMTTVPEVVLAKEAGICYASIAMATDYDCWKEHEEAMIKFQMILSEGYHPFNIQESPFYRGLLDFPSVGHGRGKKCLSAPAIILRPPQPRGTVTTFKVSWSKDQTYICMKS

SEQ ID NO: 21674 - protein, 293 aa, Homo sapiens
MASGTTTTAVKIGIIGGTGLDDPEILEGRTEKYVDTPFGKPSDALILGKIKNVDCVLLARHGRQHTIMPSKVNYQANIWALKEEGCTHVIVTTACGSLREEIQPGDIVIIDQFIDRTTMRPQSFYDGSHSCARGVCHIPMAEPFCPKTREVLIETAKKLGLRCHSKGTMVTIEGPRFSSRAESFMFRTWGADVINMTTVPEVVLAKEAGICYASIAMATDYDCWKEHEEAMIKFQMILSEGYHPFNIQESPFYRGLLDFPSVGHGRGEILPLSPLDLAGYCFQQPMQPPCPDS

SEQ ID NO: 21675 - protein, 239 aa, Homo sapiens
MASGTTTTAVKIGIIGGTGLDDPEILEGRTEKYVDTPFGKPSDALILGKIKNVDCVLLARHGRQHTIMPSKVNYQANIWALKEEGCTHVIVTTACGSLREEIQPGDIVIIDQFIDRTTMRPQSFYDGSHSCARGVCHIPMAEPFCPKTREVLIETAKKLGLRCHSKGTMVTIEGPRFSSRAESFMFRTWGADVINMTTVPEVVLAKEAGICYASIAMATDYDCWKEHEEAVRSAFQLPP

SEQ ID NO: 21676 - protein, 164 aa, Homo sapiens
MVGVVSDDQDFLDSKDTMKMAVVLVTPLGNGDLALKFGYPTPHGGCQKMDTTFTEGAVPGQFSNPAMALSDIRVAFSDYQHFALLYLEMRKGGLRNQWLQLYGGRAAGRRPRHPRFGSGMSPLCLHQPFLHAEGGTAGSWCLWPRVPAPPCPSLPLFAPPAPSL

SEQ ID NO: 21677 - protein, 142 aa, Homo sapiens
MRFFVPLFLVGILFPAILAKQFTKCELSQLLKDIDGYGGIALPELICTMFHTSGYDTQAIVENNESTEYGLFQISNKLWCKSSQVPQSRNICDISCDKFLDDDITDDIMCAKKILDIKGIDYWLAHKALCTEKLEQWLCEKL

SEQ ID NO: 21678 - protein, 703 aa, Homo sapiens
MPEPRGSSQLRVNAAFAARYNRYREREELQRLKDRYGDRDSSSDSSSESDSSDERVEFDPQQERDFYKTLSLLKKKDPRIYQKDATFYNRTASSSDSEEDPEALEKQKKVRPMYLKDYERKVILEKAGKYVDEENSDGETSNHRLQETSSQSYVEEQKQLKESFRAFVEDSEDEDGAGEGGSSLLQKRAKTRQEKAQEEADYIEWLKGQKEIRNPDSLKELTHLKEYWNDPELDEGERFLRDYILNKRYEEEEEEEEDEEEMEEEEGVHGPPVQLAVDDSSDEGELFLKKQEDFEQKYNFRFEEPDSASVKTYPRSIASSVRRKDERRKEKREETRERKKREKAKKQEELKQLKNLKRKEILAKLEKLRKVTGNEMLGLEEGDLEDDFDPAQHDQLMQKCFGDEYYGAVEEEKPQFEEEEGLEDDWNWDTWDGPEQEGDWSQQELHCEDPNFNMDADYDPSQPRKKKREAPLTGKKKRKSPFAAAVGQEKPVFEPGDKTFEEYLDEYYRLDYEDIIDDLPCRFKYRTVVPCDFGLSTEEILAADDKELNRWCSLKKTCMYRSEQEELRDKRAYSQKAQNSWKKRQVFKSLCREEAETPAEATGKPQRDEAGPQRQLPALDGSLMGPESPPAQEEEAPVSPHKKPAPQKRRRAKKARLLGPTVMLGGCEFSRQRLQAFGLNPKRLHFRQLGRQRRKQQGPKNSS

SEQ ID NO: 21679 - protein, 533 aa, Homo sapiens; identical to SEQ ID NO: 278

SEQ ID NO: 21680 - protein, 134 aa, Homo sapiens
MSPVHRSRTSQTQEAHKPTSTLSFISPPQPPRQDPKSPHILCSQPNACSRQSHVSYPNPWGLPCSQSKVSPPGTATNPNPKEWSRISGPPVSLDPQPWSSAPFKPTAQLPLLAQSLGPPAKPALPDPALPLQML

SEQ ID NO: 21681 - protein, 465 aa, Homo sapiens
MEPSSLELPADTVQRIAAELKCHPTDERVALHLDEEDKLRHFRECFYIPKIQDLPPVDLSLVNKDENAIYFLGNSLGLQPKMVKTYLEEELDKWAKIAAYGHEVGKRPWITGDESIVGLMKDIVGANEKEIALMNALTVNLHLLMLSFFKPTPKRYKILLEAKAFPSDHYAIESQLQLHGLNIEESMRMIKPREGEETLRIEDILEVIEKEGDSIAVILFSGVHFYTGQHFNIPAITKAGQAKGCYVGFDLAHAVGNVELYLHDWGVDFACWCSYKYLNAGAGGIAGAFIHEKHAHTIKPALVGWFGHELSTRFKMDNKLQLIPGVCGFRISNPPILLVCSLHASLEIFKQATMKALRKKSVLLTGYLEYLIKHNYGKDKAATKKPVVNIITPSHVEERGCQLTITFSVPNKDVFQELEKRGVVCDKRNPNGIRVAPVPLYNSFHDVYKFTNLLTSILDSAETKN

SEQ ID NO: 21682 - protein, 307 aa, Homo sapiens
MEPSSLELPADTVQRIAAELKCHPTDERVALHLDEEDKLRHFRECFYIPKIQDLPPVDLSLVNKDENAIYFLGNSLGLQPKMVKTYLEEELDKWAKIAAYGHEVGKRPWITGDESIVGLMKDIVGANEKEIALMNALTVNLHLLMLSFFKPTPKRYKILLEAKAFPSDHYAIESQLQLHGLNIEESMRMIKPREGEETLRIEDILEVIEKEGDSIAVILFSGVHFYTGQHFNIPAITKAGQAKGCYVGFDLAHAVGNVELYLHDWGVDFACWCSYKYLNAGAGGIAGAFIHEKHAHTIKPARSEFFN

SEQ ID NO: 21683 - protein, 505 aa, Homo sapiens
MTCGSGFGGRAFSCISACGPRPGRCCITAAPYRGISCYRGLTGGFGSHSVCGGFRAGSCGRSFGYRSGGVCGPSPPCITTVSVNESLLTPLNLEIDPNAQCVKQEEKEQIKSLNSRFAAFIDKVRFLEQQNKLLETKLQFYQNRECCQSNLEPLFEGYIETLRREAECVEADSGRLASELNHVQEVLEGYKKKYEEEVSLRATAENEFVALKKDVDCAYLRKSDLEANVEALIQEIDFLRRLYEEEILILQSHISDTSVVVKLDNSRDLNMDCIIAEIKAQYDDIVTRSRAEAESWYRSKCEEMKATVIRHGETLRRTKEEINELNRMIQRLTAEVENAKCQNSKLEAAVAQSEQQGEAALSDARCKLAELEGALQKAKQDMACLIREYQEVMNSKLGLDIEIATYRRLLEGEEQRLCEGIGAVNVCVSSSRGGVVCGDLCVSGSRPVTGSVCSAPCNGNVAVSTGLCAPCGQLNTTCGGGSCGVGSCGISSLGVGSCGSSCRKC

SEQ ID NO: 21684 - protein, 430 aa, Homo sapiens
MAEAVLIDLFGLKLNSQKNCHQTLLKTLNAVQYHHAAKAKFLCIMCCSNISYERDGEQDNCEIETSNGLSALLEEFEIVSCPSMAATLYTIKQKIDEKNLSSIKVIVPRHRKTLMKAFIDQLFTDVYNFEFEDLQVTFRGGLFKQSIEINVITAQELRGIQNEIETFLRSLPALRGKLTIITSSLIPDIFIHGFTTRTGGISYIPTLSSFNLFSSSKRRDPKVVVQENLRRLANAAGFNVEKFYRIKTHHSNDIWIMGRKEPDSYDGITTNQRGVTIAALGADCIPIVFADPVKKACGVAHAGWKGTLLGVAMATVNAMIAEYGCSLEDIVVVLGPSVGPCCFTLPRESAEAFHNLHPACVQLFDSPNPCIDIRKATRILLEQGGILPQNIQDQNQDLNLCTSCHPDKFFSHVRDGLNFGTQIGFISIKE

SEQ ID NO: 21685 - protein, 661 aa, Homo sapiens
MELKKDINAVSIDMLLIVHSEKRRAAQGTLSDQQANPSSLLQRGGGFQGVGNGVRRWQKLEGNDFHENLVEKQHPQQPQVITSYNSQGTQLTVEVHPRDAMPQLLKKFSLAKRLQGDKNGNTRPRQPGGKDAHAYPWDRSSLKSMSLDLQQFEKLDIYASQVTAKSGLDELVSDLLQEAHTDLERVRAIWIWICHHIEYDIAAAQEKDRQAFKPTDILRTQKTNCDGYAGLFERMCRLAGVQCMTVPGYSKGFGYQTGQSFSGEFDHAWNAVYLEGRWHLVDSTWGSGLVDTITSKFTFLYNEFYFLTHPALFIEDHFPDNKNWQLLKPPQSLRQFENNMYHKSEFYNKGMLSAHPETSMIRTVNGKATVTIESCAPTLFMFMLNGKQEHGLLSLRKNGMKLEVYPPTMGTHKLQIFAKGNSDIYSSVLEYTLKCNYVDMGVQLPAELHQPVGPSWFSEQMGIMKPSHPDPIIHTSDGRCSISFSVEEGINVLASLHGDDGPITEETQRRYIFQLHREKQTELKVQLPHAGKFALKIFVKKRQEPGNYIFVFNYLVCCANTKVNWPMFPESFGNWGQDNELLEPLSGVLPANRNVPFKLKLHGIAKVLVKGQDTWPLTLNHEGYWEGSCSTAGCQEVYVMVLENANHNFYSYILKYKVNAQ

SEQ ID NO: 21686 - protein, 640 aa, Homo sapiens
MELKKDINAVSIDMLLIVHSEKRRAAQGTLSDQQANPSSLLQRGGGFQGVGNGVRRWQKLEGNDFHGTQLTVEVHPRDAMPQLLKKFSLAKRLQGDKNGNTRPRQPGGKDAHAYPWDRSSLKSMSLDLQQFEKLDIYASQVTAKSGLDELVSDLLQEAHTDLERVRAIWIWICHHIEYDIAAAQEKDRQAFKPTDILRTQKTNCDGYAGLFERMCRLAGVQCMTVPGYSKGFGYQTGQSFSGEFDHAWNAVYLEGRWHLVDSTWGSGLVDTITSKFTFLYNEFYFLTHPALFIEDHFPDNKNWQLLKPPQSLRQFENNMYHKSEFYNKGMLSAHPETSMIRTVNGKATVTIESCAPTLFMFMLNGKQEHGLLSLRKNGMKLEVYPPTMGTHKLQIFAKGNSDIYSSVLEYTLKCNYVDMGVQLPAELHQPVGPSWFSEQMGIMKPSHPDPIIHTSDGRCSISFSVEEGINVLASLHGDDGPITEETQRRYIFQLHREKQTELKVQLPHAGKFALKIFVKKRQEPGNYIFVFNYLVCCANTKVNWPMFPESFGNWGQDNELLEPLSGVLPANRNVPFKLKLHGIAKVLVKGQDTWPLTLNHEGYWEGSCSTAGCQEVYVMVLENANHNFYSYILKYKVNAQ

SEQ ID NO: 21687 - protein, 1357 aa, Homo sapiens
MEFYESAYFIVLIPSIVITVIFLFFWLFMKETLYDEVLAKQKREQKLIPTKTDKKKAEKKKNKKKEIQNGNLHESDSESVPRDFKLSDALAVEDDQVAPVPLNVVETSSSVRERKKKEKKQKPVLEEQVIKESDASKIPGKKVEPVPVTKQPTPPSEAAASKKKPGQKKSKNGSDDQDKKVETLMVPSKRQEALPLHQETKQESGSGKKKASSKKQKTENVFVDEPLIHATTYIPLMDNADSSPVVDKREVIDLLKPDQVEGIQKSGTKKLKTETDKENAEVKFKDFLLSLKTMMFSEDEALCVVDLLKEKSGVIQDALKKSSKGELTTLIHQLQEKDKLLAAVKEDAAATKDRCKQLTQEMMTEKERSNVVITRMKDRIGTLEKEHNVFQNKIHVSYQETQQMQMKFQQVREQMEAEIAHLKQENGILRDAVSNTTNQLESKQSAELNKLRQDYARLVNELTEKTGKLQQEEVQKKNAEQAATQLKVQLQEAERRWEEVQSYIRKRTAEHEAAQQDLQSKFVAKENEVQSLHSKLTDTLVSKQQLEQRLMQLMESEQKRVNKEESLQMQVQDILEQNEALKAQIQQFHSQIAAQTSASVLAEELHKVIAEKDKQIKQTEDSLASERDRLTSKEEELKDIQNMNFLLKAEVQKLQALANEQAAAAHELEKMQQSVYVKDDKIRLLEEQLQHEISNKMEEFKILNDQNKALKSEVQKLQTLVSEQPNKDVVEQMEKCIQEKDEKLKTVEELLETGLIQVATKEEELNAIRTENSSLTKEVQDLKAKQNDQVSFASLVEELKKVIHEKDGKIKSVEELLEAELLKVANKEKTVQDLKQEIKALKEEIGNVQLEKAQQLSITSKVQELQNLLKGKEEQMNTMKAVLEEKEKDLANTGKWLQDLQEENESLKAHVQEVAQHNLKEASSASQFEELEIVLKEKENELKRLEAMLKERESDLSSKTQLLQDVQDENKLFKSQIEQLKQQNYQQASSFPPHEELLKVISEREKEISGLWNELDSLKDAVEHQRKKNNDLREKNWEAMEALASTEKMLQDKVNKTSKERQQQVEAVELEAKEVLKKLFPKVSVPSNLSYGEWLHGFEKKAKECMAGTSGSEEVKVLEHKLKEADEMHTLLQLECEKYKSVLAETEGILQKLQRSVEQEENKWKVKVDESHKTIKQMQSSFTSSEQELERLRSENKDIENLRREREHLEMELEKAEMERSTYVTEVRELKDLLTELQKKLDDSYSEAVRQNEELNLLKAQLNETLTKLRTEQNERQKVAGDLHKAQQSLELIQSKIVKAAGDTTVIENSDVSPETESSEKETMSVSLNQTVTQLQQLLQAVNQQLTKEKEHYQVLE

SEQ ID NO: 21688 - protein, 1300 aa, Homo sapiens
MEFYESAYFIVLIPSIVITVIFLFFWLFMKETLYDEVLAKQKREQKLIPTKTDKKKAEKKKNKKKEIQNGNLHESDSESVPRDFKLSDALAVEDDQVAPVPLNVVETSSSVRERKKKEKKQKPVLEEQVIKESDASKIPGKKVEPVPVTKQPTPPSEAAASKKKPGQKKSKNGSDDQDKKVETLMVPSKRQEALPLHQETKQESGSGKKKASSKKQKTENVFVDEPLIHATTYIPLMDNADSSPVVDKREVIDLLKPDQVEGIQKSGTKKLKTETDKENAEVKFKDFLLSLKTMMFSEDEALCVVDLLKEKSGVIQDALKKSSKGELTTLIHQLQEKDKLLAAVKEDAAATKDRCKQLTQEMMTEKERSNVVITRMKDRIGTLEKEHNVFQNKIHVSYQETQQMQMKFQQVREQMEAEIAHLKQENGILRDAVSNTTNQLESKQSAELNKLRQDYARLVNELTEKTGKLQQEEVQKKNAEQAATQLKVQLQEAERRWEEVQSYIRKRTAEHEAAQQDLQSKFVAKENEVQSLHSKLTDTLVSKQQLEQRLMQLMESEQKRVNKEESLQMQVQDILEQNEALKAQIQQFHSQIAAQTSASVLAEELHKVIAEKDKQIKQTEDSLASERDRLTSKEEELKDIQNMNFLLKAEVQKLQALANEQAAAAHELEKMQQSVYVKDDKIRLLEEQLQHEISNKMEEFKILNDQNKALKSEVQKLQTLVSEQPNKDVVEQMEKCIQEKDEKLKTVEELLETGLIQVATKEEELNAIRTENSSLTKEVQDLKAKQNDQVSFASLVEELKKVIHEKDGKIKSVEELLEAELLKVANKEKTVQDLKQEIKALKEEIGNVQLEKAQQLSITSKVQELQNLLKGKEEQMNTMKAVLEEKEKDLANTGKWLQDLQEENESLKAHVQEVAQHNLKEASSASQFEELEIVLKEKENELKRLEAMLKERESDLSSKTQLLQDVQDENKLFKSQIEQLKQQNYQQASSFPPHEELLKVISEREKEISGLWNELDSLKDAVEHQRKKNNERQQQVEAVELEAKEVLKKLFPKVSVPSNLSYGEWLHGFEKKAKECMAGTSGSEEVKVLEHKLKEADEMHTLLQLECEKYKSVLAETEGILQKLQRSVEQEENKWKVKVDESHKTIKQMQSSFTSSEQELERLRSENKDIENLRREREHLEMELEKAEMERSTYVTEVRELKAQLNETLTKLRTEQNERQKVAGDLHKAQQSLELIQSKIVKAAGDTTVIENSDVSPETESSEKETMSVSLNQTVTQLQQLLQAVNQQLTKEKEHYQVLE

SEQ ID NO: 21689 - protein, 1306 aa, Homo sapiens
MEFYESAYFIVLIPSIVITVIFLFFWLFMKETLYDEVLAKQKREQKLIPTKTDKKKAEKKKNKKKEIQNGNLHESDSESVPRDFKLSDALAVEDDQVAPVPLNVVETSSSVRERKKKEKKQKPVLEEQVIKESDASKIPGKKVEPVPVTKQPTPPSEAAASKKKPGQKKSKNGSDDQDKKVETLMVPSKRQEALPLHQETKQESGSGKKKASSKKQKTENVFVDEPLIHATTYIPLMDNADSSPVVDKREVIDLLKPDQVEGIQKSGTKKLKTETDKENAEVKFKDFLLSLKTMMFSEDEALCVVDLLKEKSGVIQDALKKSSKGELTTLIHQLQEKDKLLAAVKEDAAATKDRCKQLTQEMMTEKERSNVVITRMKDRIGTLEKEHNVFQNKIHVSYQETQQMQMKFQQVREQMEAEIAHLKQENGILRDAVSNTTNQLESKQSAELNKLRQDYARLVNELTEKTGKLQQEEVQKKNAEQAATQLKVQLQEAERRWEEVQSYIRKRTAEHEAAQQDLQSKFVAKENEVQSLHSKLTDTLVSKQQLEQRLMQLMESEQKRVNKEESLQMQVQDILEQNEALKAQIQQFHSQIAAQTSASVLAEELHKVIAEKDKQIKQTEDSLASERDRLTSKEEELKDIQNMNFLLKAEVQKLQALANEQAAAAHELEKMQQSVYVKDDKIRLLEEQLQHEISNKMEEFKILNDQNKALKSEVQKLQTLVSEQPNKDVVEQMEKCIQEKDEKLKTVEELLETGLIQVATKEEELNAIRTENSSLTKEVQDLKAKQNDQVSFASLVEELKKVIHEKDGKIKSVEELLEAELLKVANKEKTVQLSITSKVQELQNLLKGKEEQMNTMKAVLEEKEKDLANTGKWLQDLQEENESLKAHVQEVAQHNLKEASSASQFEELEIVLKEKENELKRLEAMLKERESDLSSKTQLLQDVQDENKLFKSQIEQLKQQNYQQASSFPPHEELLKVISEREKEISGLWNELDSLKDAVEHQRKKNNDLREKNWEAMEALASTEKMLQDKVNKTSKERQQQVEAVELEAKEVLKKLFPKVSVPSNLSYGEWLHGFEKKAKECMAGTSGSEEVKVLEHKLKEADEMHTLLQLECEKYKSVLAETEGILQKLQRSVEQEENKWKVKVDESHKTIKQMQSSFTSSEQELERLRSENKDIENLRREREHLEMELEKAEMERSTYVTEVRELKAQLNETLTKLRTEQNERQKVAGDLHKAQQSLELIQSKIVKAAGDTTVIENSDVSPETESSEKETMSVSLNQTVTQLQQLLQAVNQQLTKEKEHYQVLE

SEQ ID NO: 21690 - protein, 1329 aa, Homo sapiens
MEFYESAYFIVLIPSIVITVIFLFFWLFMKETLYDEVLAKQKREQKLIPTKTDKKKAEKKKNKKKEIQNGNLHESDSESVPRDFKLSDALAVEDDQVAPVPLNVVETSSSVRERKKKEKKQKPVLEEQVIKESDASKIPGKKVEPVPVTKQPTPPSEAAASKKKPGQKKSKNGSDDQDKKVETLMVPSKRQEALPLHQETKQESGSGKKKASSKKQKTENVFVDEPLIHATTYIPLMDNADSSPVVDKREVIDLLKPDQVEGIQKSGTKKLKTETDKENAEVKFKDFLLSLKTMMFSEDEALCVVDLLKEKSGVIQDALKKSSKGELTTLIHQLQEKDKLLAAVKEDAAATKDRCKQLTQEMMTEKERSNVVITRMKDRIGTLEKEHNVFQNKIHVSYQETQQMQMKFQQVREQMEAEIAHLKQENGILRDAVSNTTNQLESKQSAELNKLRQDYARLVNELTEKTGKLQQEEVQKKNAEQAATQLKVQLQEAERRWEEVQSYIRKRTAEHEAAQQDLQSKFVAKENEVQSLHSKLTDTLVSKQQLEQRLMQLMESEQKRVNKEESLQMQVQDILEQNEALKAQIQQFHSQIAAQTSASVLAEELHKVIAEKDKQIKQTEDSLASERDRLTSKEEELKDIQNMNFLLKAEVQKLQALANEQAAAAHELEKMQQSVYVKDDKIRLLEEQLQHEISNKMEEFKILNDQNKALKSEVQKLQTLVSEQPNKDVVEQMEKCIQEKDEKLKTVEELLETGLIQVATKEEELNAIRTENSSLTKEVQDLKAKQNDQVSFASLVEELKKVIHEKDGKIKSVEELLEAELLKVANKEKTVQDLKQEIKALKEEIGNVQLEKAQQLSITSKVQELQNLLKGKEEQMNTMKAVLEEKEKDLANTGKWLQDLQEENESLKAHVQEVAQHNLKEASSASQFEELEIVLKEKENELKRLEAMLKERESDLSSKTQLLQDVQDENKLFKSQIEQLKQQNYQQASSFPPHEELLKVISEREKEISGLWNELDSLKDAVEHQRKKNNDLREKNWEAMEALASTEKMLQDKVNKTSKERQQQVEAVELEAKEVLKKLFPKVSVPSNLSYGEWLHGFEKKAKECMAGTSGSEEVKVLEHKLKEADEMHTLLQLECEKYKSVLAETEGILQKLQRSVEQEENKWKVKVDESHKTIKQMQSSFTSSEQELERLRSENKDIENLRREREHLEMELEKAEMERSTYVTEVRELKAQLNETLTKLRTEQNERQKVAGDLHKAQQSLELIQSKIVKAAGDTTVIENSDVSPETESSEKETMSVSLNQTVTQLQQLLQAVNQQLTKEKEHYQVLE

SEQ ID NO: 21691 - protein, 1275 aa, Homo sapiens
MTGSNSHITILTLNVNGLNSPIKRHRLASWIKSQDPSVCCIQETHLTCRDTHRLKIKGWRKIYQANGKQKKAGVAILVSDKTDFKPTKIKRDKEGHYIMVKGSIQQEELTILNIYAPNTGAPRFIKQVLSDLQRDLDSHTLIMGDFNTPLSILDRSTRQKVNKDTQELNSALHQTDLIDIYRTLHPKSTEYTFFSAPHHTYSKIDHIVGSKALLSKCKRTEIITNYLSDHSAIKLELRIKNLTQSRSTTWKLNNLLLNDYWVHNEMKAEIKMFFETNENKDTTYQNLWDAFKAVCRGKFIALNAYKRKQERSKIDTLTSQLKELEKQEQTHSKASRRQEITKIRAELKEIETQKTLQKINESRSWFFERINKIDRPLARLIKKKREKNQIDTIKNDKGDITTDPTEIQTTIREYYKHLYANKLENLEEMDTFLDTYTLPRLNQEEVESLNRPITGSEIVAIINSLPTKKSPGPDGFTAEFYQRYKEELVPFLLKLFQSIEKEGILPNSFYEASIILIPKPGRDTTKKENFRPISLMNIDAKILNKILANRIQQHIKKLIHHDQVGFIPGMQGWFNIRKSINVIQHINRAKDKNHVIISIDAEKAFDKIQQPFMLKTLNKLGIDGMYLKIIRAIYDKPTANIILNGQKLEAFPLKTGTRQGCPLSPLLFNIVLEVLARAIRQEKEIKGIQLGKEEVKLSLFADDMIVYLENPIVSAQNLLKLISNFSKVSGYKINVQKSQAFLYNNNRQTESQIMGELPFTIASKRIKYLGIQLTRDVKDLFKENYKPLLKEIKEDTNKWKNIPCSWVGRINIVKMAILPKVIYRFNAIPIKLPMTFFTELEKTTLKFIWNQKRARIAKSILSQKNKAGGITLPDFKLYYKATVTKTAWYWYQNRDIDQWNRTEPSEIMPHIYNYLIFDKPEKNKQWGKDSLLNKWCWENWLAICRKLKLDPFLTPYTKINSRWIKDLNVKPKTIKTLEENLGITIQDIGVGKDFMSKTPKAMATKDKIDKWDLIKLKSFCTAKETTIRVNRQPTTWEKIFATYSSDKGLISRIYNELKQIYKKKTNNPIKKWAKDMNRHFSKEDIYAAKKHMKKCSSSLAIREMQIKTTMRYHLTPVRMAIIKKSGNNRCWRGCGEIGTLVHCWWDCKLVQPLWKSVWRFLRDLELEIPFDPAIPLLGIYPKDYKSCCYKDTCTRMFIAALFTIAKTWNQPNCPTMIDWIKKMWHIYTMEYYAAIKNDEFISFVGTWMKLETIILSKLSQEQKTKHRIFSLIGGN

SEQ ID NO: 21692 - protein, 789 aa, Homo sapiens
METLLGGLLAFGMAFAVVDACPKYCVCQNLSESLGTLCPSKGLLFVPPDIDRRTVELRLGGNFIIHISRQDFANMTGLVDLTLSRNTISHIQPFSFLDLESLRSLHLDSNRLPSLGEDTLRGLVNLQHLIVNNNQLGGIADEAFEDFLLTLEDLDLSYNNLHGLPWDSVRRMVNLHQLSLDHNLLDHIAEGTFADLQKLARLDLTSNRLQKLPPDPIFARSQASALTATPFAPPLSFSFGGNPLHCNCELLWLRRLERDDDLETCGSPGGLKGRYFWHVREEEFVCEPPLITQHTHKLLVLEGQAATLKCKAIGDPSPLIHWVAPDDRLVGNSSRTAVYDNGTLDIFITTSQDSGAFTCIAANAAGEATAMVEVSIVQLPHLSNSTSRTAPPKSRLSDITGSSKTSRGGGGSGGGEPPKSPPERAVLVSEVTTTSALVKWSVSKSAPRVKMYQLQYNCSDDEVLIYRMIPASNKAFVVNNLVSGTGYDLCVLAMWDDTATTLTATNIVGCAQFFTKADYPQCQSMHSQILGGTMILVIGGIIVATLLVFIVILMVRYKVCNHEAPSKMAAAVSNVYSQTNGAQPPPPSSAPAGAPPQGPPKVVVRNELLDFTASLARASDSSSSSSLGSGEAAGLGRAPWRIPPSAPRPKPSLDRLMGAFASLDLKSQRKEELLDSRTPAGRGAGTSARGHHSDREPLLGPPAARARSLLPLPLEGKAKRSHSFDMGDFAAAAAGGVVPGGYSPPRKVSNIWTKRSLSVNGMLLPFEESDLVGARGTFGSSEWVMESTV

SEQ ID NO: 21693 - protein, 1247 aa, Homo sapiens
MLRLVAACPESCVVCTKDVTLCHQLTYIVAAPMTTRVLIITDGYLSSIESTNLSLLFNLALLSLSRNGIEDVQEDALHGLTMLRTLLLEHNQISSSSLTDHTFSKLHSLQVLVLSNNALRTLRGSWFRNTSGLTRLQLDGNQITNLTDSSFGGTNLHSLRYLDLSNNFISYIGKDAFRPLPQLQEVDLSRNRLAHMPDVFTPLKQLILLSLDKNQWSCTCDLHPLARFLRNYIKSSAHTLRNAKDLNCQPSTAAVAAAQSVLRLSETNCDSKAPNFTLVLKDRSPLLPGPDVALLTVLGFAGAVGLTCLGLVVFNWKLHQGKANEHTSENLCCRTFDEPLCAHEARNYHTKGYCNCHLTQENEIKVMSTVGSRKEMPLLQENSHQATSASESATLDGSFRNLKKKDRGVGSTLFCQDGRLLHSECSEPPGNMRAFNEAGLLTTYNPRKVQKLWNLEPGEVQPQTLQHHIIRTEDISSDIFRRRYATPASALAGESLEKRLTNESWQPPIEKEDNGLHPHRQRHFITSSSSKPCEPEEHYVQKIVQKNRSKYDDPCGLLKQSKPRYFQPNNSLICKYVPCEQFEDYMKEKKPNRRQHSKPEKEQIQINSAIEKFLMSEDNIDLSGLSTKTKKAYSPKRVIFHDPDLVEINRSMMSPKISTPWKRQKNQSNQLTKLDVKKFSNTGERNKGEKWFTNSWVLKRKRTPQSDLKGKIKGQNLKLNLHPFRKVRVHPEKSLSSLPKQCKQVLLPPKKLSKTSETEAKINTVCSADFLQQSESSNYVRLTSKRLPLKHDSKQTPYYQRNTKRAPLLSANNLRVVNQSSIESSCYSAGHIPDGNTSKLPQPTPTDAEHRHSHSQFSTEQMEDATQLESKVLSYLATTWENTGSDVLPFQHSRRATDQGTTESTEHMGQNVSKTSELNQFSLSPRNQTQLLDAHKTDSYNKEYTLDQNEALQHREQNSSHAQLENKEKTLMTKPQISHQIVENCIMDKEENDVEKKLSKTETYDSSLIPQTQSKNNLSFMKTNSIPYQNRIELPKDISTSPVSSQAVWHLTNSSEKGIDSTNALPRNDGTEALEIKIVGKEEKNMLDESKTDSSMLTQISQMTLKGITKERQQTWENGTSEKYILHDASSAEETITAKDLSITSSHETQNRILCSEVDPEVNSNVHNFREVQNIQPDKDSAHKEGAMTVETHEALSFLPGLKDSFEAENEVFLVPSRINEAENSAPKPVLYPPSAEYATTSPLETE

SEQ ID NO: 21694 - protein, 250 aa, Homo sapiens
MAEGGASKGGGEEPGKLPEPAEEESQVLRGTGHCKWFNVRMGFGFISMINREGSPLDIPVDVFVHQSKLFMEGFRSLKEGEPVEFTFKKSSKGLESIRVTGPGGSPCLGSERRPKGKTLQKRKPKGDRCYNCGGLDHHAKECSLPPQPKKCHYCQSIMHMVANCPHKNVAQPPASSQGRQEAESQPCTSTLPREVGGGHGCTSPPFPQEARAEISERSGRSPQEASSTKSSIAPEEQSKKGPSVQKRKKT

SEQ ID NO: 21695 - protein, 180 aa, Homo sapiens
MEGFRSLKEGEPVEFTFKKSSKGLESIRVTGPGGSPCLGSERRPKGKTLQKRKPKGDRCYNCGGLDHHAKECSLPPQPKKCHYCQSIMHMVANCPHKNVAQPPASSQGRQEAESQPCTSTLPREVGGGHGCTSPPFPQEARAEISERSGRSPQEASSTKSSIAPEEQSKKGPSVQKRKKT

SEQ ID NO: 21696 - protein, 209 aa, Homo sapiens
MGSVSNQQFAGGCAKAAEEAPEEAPEDAARAADEPQLLHGAGICKWFNVRMGFGFLSMTARAGVALDPPVDVFVHQSKLHMEGFRSLKEGEAVEFTFKKSAKGLESIRVTGPGGVFCIGSERRPKGKSMQKRRSKGDRCYNCGGLDHHAKECKLPPQPKKCHFCQSISHMVASCPLKAQQGPSAQGKPTYFREEEEEIHSPTLLPEAQN

SEQ ID NO: 21697 - protein, 663 aa, Homo sapiens
MGRYRIRVATGAWLFSGSYNRVQLWLVGTRGEAELELQLRPARGEEEEFDHDVAEDLGLLQFVRLRKHHWLVDDAWFCDRITVQGPGACAEVAFPCYRWVQGEDILSLPEGTARLPGDNALDMFQKHREKELKDRQQIYCWATWKEGLPLTIAADRKDDLPPNMRFHEEKRLDFEWTLKAGALEMALKRVYTLLSSWNCLEDFDQIFWGQKSALAEKVRQCWQDDELFSYQFLNGANPMLLRRSTSLPSRLVLPSGMEELQAQLEKELQNGSLFEADFILLDGIPANVIRGEKQYLAAPLVMLKMEPNGKLQPMVIQIQPPNPSSPTPTLFLPSDPPLAWLLAKSWVRNSDFQLHEIQYHLLNTHLVAEVIAVATMRCLPGLHPIFKFLIPHIRYTMEINTRARTQLISDGGIFDKAVSTGGGGHVQLLRRAAAQLTYCSLCPPDDLADRGLLGLPGALYAHDALRLWEIIARYVEGIVHLFYQRDDIVKGDPELQAWCREITEVGLCQAQDRGFPVSFQSQSQLCHFLTMCVFTCTAQHAAINQGQLDWYAWVPNAPCTMRMPPPTTKEDVTMATVMGSLPDVRQACLQMAISWHLSRRQPDMVPLGHHKEKYFSGPKPKAVLNQFRTDLEKLEKEITARNEQLDWPYEYLKPSCIENSVTI

SEQ ID NO: 21698 - protein, 1032 aa, Homo sapiens
MEAAAAVVAAEAEVENEDGDSSCGDVCFMDKGLQSISELSLDSTLHAVNLHCNNISKIEAIDHIWNLQHLDLSSNQISRIEGLNTLTKLCTLNLSCNLITKVEGLEELINLTRLNVSYNHIDDLSGLIPLHGIKHKLRYIDLHSNRIDSIHHLLQCMVGLHFLTNLILEKDGDDNPVCRLPGYRAVILQTLPQLRILDCKNIFGEPVNLTEINSSQLQCLEGLLDNLVSSDSPLNISEDEIIDRMPVITAPIDELVPLEQFASTPSDAVLTSFMSVCQSSEPEKNNHENDLQNEIKLQKLDDQILQLLNETSNSIDNVLEKDPRPKRDTDITSESDYGNRKECNRKVPRRSKIPYDAKTIQTIKHHNKNYNSFVSCNRKMKPPYLKELYVSSSLANCPMLQESEKPKTEIIKVDQSHSEDNTYQSLVEQLDQEREKRWRAEQAENKLMDYIDELHKHANEKEDIHSLALLTTDRLKEIIFRERNSKGQLEVMVHKLQNEIKKLTVELMKAKDQQEDHLKHLRTLEKTLEKMERQKRQQQAAQIRLIQEVELKASAADREIYLLRTSLHREREQAQQLHQLLALKEQEHRKELETREFFTDADFQDALAKEIAKEEKKHEQMIKEYQEKIDVLSQQYMDLENEFRIALTVEARRFQDVKDGFENVATELAKSKHALIWAQRKENESSSLIKDLTCMVKEQKTKLAEVSKLKQETAANLQNQINTLEILIEDDKQKSIQIELLKHEKVQLISELAAKESLIFGLRTERKVWGHELAQQGSSLAQNRGKLEAQIESLSRENECLRKTNESDSDALRIKCKIIDDQTETIRKLKDCLQEKDEHIKRLQEKITEIEKCTQEQLDEKSSQLDEVLEKLERHNERKEKLKQQLKGKEVELEEIRKAYSTLNRKWHDKGELLCHLETQVKEVKEKFENKEKKLKAERDKSIELQKNAMEKLHSMDDAFKRQVDAIVEAHQAEIAQLANEKQKCIDSANLKVHQIEKEMRELLEETCKNKKTMEAKIKQLAFALNEIQQDM

SEQ ID NO: 21699 - protein, 1012 aa, Homo sapiens
MLLKSIFIVYIFFYSISELSLDSTLHAVNLHCNNISKIEAIDHIWNLQHLDLSSNQISRIEGLNTLTKLCTLNLSCNLITKVEGLEELINLTRLNVSYNHIDDLSGLIPLHGIKHKLRYIDLHSNRIDSIHHLLQCMVGLHFLTNLILEKDGDDNPVCRLPGYRAVILQTLPQLRILDCKNIFGEPVNLTEINSSQLQCLEGLLDNLVSSDSPLNISEDEIIDRMPVITAPIDELVPLEQFASTPSDAVLTSFMSVCQSSEPEKNNHENDLQNEIKLQKLDDQILQLLNETSNSIDNVLEKDPRPKRDTDITSESDYGNRKECNRKVPRRSKIPYDAKTIQTIKHHNKNYNSFVSCNRKMKPPYLKELYVSSSLANCPMLQESEKPKTEIIKVDQSHSEDNTYQSLVEQLDQEREKRWRAEQAENKLMDYIDELHKHANEKEDIHSLALLTTDRLKEIIFRERNSKGQLEVMVHKLQNEIKKLTVELMKAKDQQEDHLKHLRTLEKTLEKMERQKRQQQAAQIRLIQEVELKASAADREIYLLRTSLHREREQAQQLHQLLALKEQEHRKELETREFFTDADFQDALAKEIAKEEKKHEQMIKEYQEKIDVLSQQYMDLENEFRIALTVEARRFQDVKDGFENVATELAKSKHALIWAQRKENESSSLIKDLTCMVKEQKTKLAEVSKLKQETAANLQNQINTLEILIEDDKQKSIQIELLKHEKVQLISELAAKESLIFGLRTERKVWGHELAQQGSSLAQNRGKLEAQIESLSRENECLRKTNESDSDALRIKCKIIDDQTETIRKLKDCLQEKDEHIKRLQEKITEIEKCTQEQLDEKSSQLDEVLEKLERHNERKEKLKQQLKGKEVELEEIRKAYSTLNRKWHDKGELLCHLETQVKEVKEKFENKEKKLKAERDKSIELQKNAMEKLHSMDDAFKRQVDAIVEAHQAEIAQLANEKQKCIDSANLKVHQIEKEMRELLEETCKNKKTMEAKIKQLAFALNEIQQDM

SEQ ID NO: 21700 - protein, 628 aa, Homo sapiens
MAILPLLLCLLPLAPASSPPQSATPSPCPRRCRCQTQSLPLSVLCPGAGLLFVPPSLDRRAAELRLADNFIASVRRRDLANMTGLLHLSLSRNTIRHVAAGAFADLRALRALHLDGNRLTSLGEGQLRGLVNLRHLILSNNQLAALAAGALDDCAETLEDLDLSYNNLEQLPWEALGRLGNVNTLGLDHNLLASVPAGAFSRLHKLARLDMTSNRLTTIPPDPLFSRLPLLARPRGSPASALVLAFGGNPLHCNCELVWLRRLAREDDLEACASPPALGGRYFWAVGEEEFVCEPPVVTHRSPPLAVPAGRPAALRCRAVGDPEPRVRWVSPQGRLLGNSSRARAFPNGTLELLVTEPGDGGIFTCIAANAAGEATAAVELTVGPPPPPQLANSTSCDPPRDGDPDALTPPSAASASAKVADTGPPTDRGVQVTEHGATAALVQWPDQRPIPGIRMYQIQYNSSADDILVYRMIPAESRSFLLTDLASGRTYDLCVLAVYEDSATGLTATRPVGCARFSTEPALRPCGAPHAPFLGGTMIIALGGVIVASVLVFIFVLLMRYKVHGGQPPGKAKIPAPVSSVCSQTNGALGPTPTPAPPAPEPAALRAHTVVQLDCEPWGPGHEPVGP

SEQ ID NO: 21701 - protein, 1503 aa, Homo sapiens
MPGPPALRRRLLLLLLVLLIAGSAGAAPLPQTGAGEAPPAAEVSSSFVILCVCSLIILIVLIANCVSCCKDPEIDFKEFEDNFDDEIDFTPPAEDTPSVQSPAEVFTLSVPNISLPAPSQFQPSVEGLKSQVARHSLNYIQEIGNGWFGKVLLGEIYTGTSVARVIVKELKASANPKEQDTFLKNGEPYYILQHPNILQCVGQCVEAIPYLLVFEFCDLGDLKAYLRSEQEHMRGDSQTMLLQRMACEVAAGLAAMHKLHFLHSDLALRNCFLTSDLNVKVGDYGIGFSRYKEDYIETDDKKVFPLRWTAPELVTSFQDRLLTADQTKYSNIWSLGVTLWELFDNAAQPYSNLSNLDVLNQVIRERDTKLPKPQLEQPYSDRWYEVLQFCWLSPEKRPAAEDVHRLLTYLRLQSQRDSEVDFEQQWNALKPNTNSRDSSNNAAFPILDHFARDRLGREMEEVLTVTETSQGLSFEYVWEAAKHDHFDERSRGHLDEGLSYTSIFYPVEVFESSLSDPGPGKQDDSGQDVPLRVPGVVPVFDAHNLSVGSDYYIQLEEKSGSNLELDYPPALLTTDMDNPERTGPELSQLTALRSVELEESSTDEDFFQSSTDPKDSSLPGDLHVTSGPESPFNNIFNDVDKSEDLPSHQKIFDLMELNGVQADFKPATLSSSLDNPKESVITGHFEKEKPRKIFDSEPLCLSDNLMHQDNFDPLNVQELSENFLFLQEKNLLKGSLSSKEHINDLQTELKNAGFTEAMLETSCRNSLDTELQFAENKPGLSLLQENVSTKGDDTDVMLTGDTLSTSLQSSPEVQVPPTSFETEETPRRVPPDSLPTQGETQPTCLDVIVPEDCLHQDISPDAVTVPVEILSTDARTHSLDNRSQDSPGESEETLRLTESDSVLADDILASRVSVGSSLPELGQELHNKPFSEDHHSHRRLEKNLEAVETLNQLNSKDAAKEAGLVSALSSDSTSQDSLLEDSLSAPFPASEPSLETPDSLESVDVHEALLDSLGSHTPQKLVPPDKPADSGYETENLESPEWTLHPAPEGTADSEPATTGDGGHSGLPPNPVIVISDAGDGHRGTEVTPETFTAGSQGSYRDSAYFSDNDSEPEKRSEEVPGTSPSALVLVQEQPLPEPVLPEQSPAAQDSCLEARKSQPDESCLSALHNSSDLELRATPEPAQTGVPQQVHPTEDEASSPWSVLNAELSSGDDFETQDDRPCTLASTGTNTNELLAYTNSALDKSLSSHSEGPKLKEPDIEGKYLGKLGVSGMLDLSEDGMDADEEDENSDDSDEDLRAFNLHSLSSESEDETEHPVPIILSNEDGRHLRSLLKPTAANAPDPLPEDWKKEKKAVTFFDDVTVYLFDQETPTKELGPCGGEACGPDLSGPAPASGSPYLSRCINSESSTDEEGGGFEWDDDFSPDPFMSKTTSNLLSSKPSLQTSKYFSPPPPARSTEQSWPHSAPYSRFSISPANIASFSLTHLTDSDIEQGGSSEDGEKD

SEQ ID NO: 21702 - protein, 1214 aa, Homo sapiens
MVVSAGPWSSEKAETNILEINEKLRPQLAENKQQFRNLKEKCFVTQLAGFLANRQKKYKYEECKDLIKFMLRNERQFKEEKLAEQLKQAEELRQYKVLVHSQERELTQLREKLREGRDASRSLNQHLQALLTPDKPDKSQGQDLQEQLAEGCRLAQQLFQKLSPENDEDEDEDVQVEEAEKVLESSAPREVQKAEESKVPEDSLEECAITCSNSHSPCDSNQPHKNINITFEEDKVNSTLVVDRESSHDECQDAVNILPVPGPTSSATNVSMVVSAGPLSSEKAEMNILEINEKLHPQLAEKKQQFRNLKEKCFVTQLACFLANQQNKYKYEECKDLIKSMLRNERQFKEEKLAEQLKQAEELRQYKVLVHSQERELTQLREKLREGRDASRSLNQHLQALLTPDKPDKSQGQDLQEQLAEGCRLAQQLFQKLSPENDEDEDEDVQVEEAEKVLESSAPREVQKAEESKVPEDSLEECAITCSNSHGPCDSNQPHKNINITFEEDKVNSALVVDRESSHDECQDAVNILPVPGPTSSATNVSMVVSAGPLSSEKAEMNILEINEKLHPQLAEKKQQFRNLKEKCFVTQLACFLANQQNKYKNEECKDLIKSMLRNERQFKEEKLAEQLKQAEELRQYKVLVHSQERELTQLREKLREGRDASCSLNQHLQALLTPDEPDKSQGQDLQEQLAEGCRLAQHLVQKLSPENDNDDDEDVQVEVAEKVQKSSAPREMPKAEEKEVPEDSLEECAITCSNSHGPYDSNQPHRKTKITFEEDKVDSTLIGSSSHVEWEDAVHIIPENESDDEEEEEKGPVSPRNLQESEEEEVPQESWDEGYSTLSIPPEMLASYKSYSGTFHSLEEQQVCMAVDIGGHRWDQVKKEDQEATGPRLSRELLDEKGPEVLQDSLDRCYSTPSGYLELTDSCQPYRSAFYILEQQRVGWALDMDEIEKYQEVEEDQDPSCPRLSRELLDEKEPEVLQDSLDRCYSTPSGYLELPDLGQPYRSAVYSLEEQYLGLALDVDRIKKDQEEEEDQGPPCPRLSRELLEAVEPEVLQDSLDRCYSTPSSCLEQPDSCLPYGSSFYALEEKHVGFSLDVGEIEKKGKGKKRRGRRSTKKRRRRGRKEGEEDQNPPCPRLSGMLMEVEEPEVLQDSLDRCYSTPSMYFELPDSFQHYRSVFYSFEEQHISFALDVDNRFLTLMGTSLHLVFQMGVIFPQ

SEQ ID NO: 21703 - protein, 1139 aa, Homo sapiens
MVVSAGPWSSEKAETNILEINEKLRPQLAENKQQFRNLKEKCFVTQLAGFLANRQKKYKYEECKDLIKFMLRNERQFKEEKLAEQLKQAEELRQYKVLVHSQERELTQLREKLREGRDASRSLNQHLQALLTPDKPDKSQGQDLQEQLAEGCRLAQQLFQKLSPENDEDEDEDVQVEEAEKVLESSAPREVQKAEESKVPEDSLEECAITCSNSHSPCDSNQPHKNINITFEEDKVNSTLVVDRESSHDECQDAVNILPVPGPTSSATNVSMVVSAGPLSSEKAEMNILEINEKLHPQLAEKKQQFRNLKEKCFVTQLACFLANQQNKYKYEECKDLIKSMLRNERQFKEEKLAEQLKQAEELRQYKVLVHSQERELTQLREKLREGRDASRSLNQHLQALLTPDKPDKSQGQDLQEQLAEGCRLAQQLFQKLSPENDEDEDEDVQVEEAEKVLESSAPREVQKAEESKVPEDSLEECAITCSNSHGPCDSNQPHKNINITFEEDKVNSALVVDRESSHDECQDAVNILPVPGPTSSATNVSMVVSAGPLSSEKAEMNILEINEKLHPQLAEKKQQFRNLKEKCFVTQLACFLANQQNKYKNEECKDLIKSMLRNERQFKEEKLAEQLKQAEELRQYKVLVHSQERELTQLREKLREGRDASCSLNQHLQALLTPDEPDKSQGQDLQEQLAEGCRLAQHLVQKLSPENDNDDDEDVQVEVAEKVQKSSAPREMPKAEEKEVPEDSLEECAITCSNSHGPYDSNQPHRKTKITFEEDKVDSTLIGSSSHVEWEDAVHIIPENESDDEEEEEKGPVSPRNLQESEEEEVPQESWDEGYSTLSIPPEMLASYKSYSGTFHSLEEQQVCMAVDIGGHRWDQVKKEDQEATGPRLSRELLDEKGPEVLQDSLDRCYSTPSGYLELTDSCQPYRSAFYILEQQRVGWALDMDEIEKYQEVEEDQDPSCPRLSRELLEAVEPEVLQDSLDRCYSTPSSCLEQPDSCLPYGSSFYALEEKHVGFSLDVGEIEKKGKGKKRRGRRSTKKRRRRGRKEGEEDQNPPCPRLSGMLMEVEEPEVLQDSLDRCYSTPSMYFELPDSFQHYRSVFYSFEEQHISFALDVDNRFLTLMGTSLHLVFQMGVIFPQ

SEQ ID NO: 21704 - protein, 207 aa, Homo sapiens
MAALVEPLGLERDVSRAVELLERLQRSGELPPQKLQALQRVLQSRFCSAIREVYEQLYDTLDITGSAEIRAHATAKATVAAFTASEGHAHPRVVELPKTDEGLGFNIMGGKEQNSPIYISRVIPGGVADRHGGLKRGDQLLSVNGVSVEGEQHEKAVELLKAAQGSVKLVVRYTPRVLEEMEARFEKMRSARRRQQHQSYSSLESRG

SEQ ID NO: 21705 - protein, 137 aa, Homo sapiens
MAALVEPLGLERDVSRAVELLERLQRSGELPPQKLQALQRVLQSRFCSAIREVYEQLYDTLDITGSAEIRAHATAKSVEGEQHEKAVELLKAAQGSVKLVVRYTPRVLEEMEARFEKMRSARRRQQHQSYSSLESRG

SEQ ID NO: 21706 - protein, 749 aa, Homo sapiens
MEVVPAEVNSLLPEEIMDTGITLVDDDSIEAVIVSSPIPMETELEEIVNINSTGDSTATPISTEPITVYSNHTNQVAVNTTITKADSNTTVKPAFPSGLQKLGAQTPVTISANQIILNKVSQTSDLKLGNQTLKPDGQKLILTTLGKSGSPIVLALPHSQLPQAQKVTTQAQSGDAKLPPQQIKVVTIGGRPEVKPVIGVSALTPGSQLINTTTQPSVLQTQQLKTVQIAKKPRTPTSGPVITKLIFAKPINSKAVTGQTTQVSPPVIAGRVLSQSTPGTPSKTITISESGVIGSTLNSTTQTPNKIAISPLKSPNKAVKSTVQTITVGGVSTSQFKTIIPLATAPNVQQIQVPGSKFHYVRLVTATSASSSTQPVSQNPSTNTQPLQQAKPVVVNTTPVRMSVPIVSAQAVKQVVPKPINPTSQIVTTSQPQQRLIMPATPLPQIQPNLTNLPPGTVLAPAPGTGNVGYAVLPAQYVTQLQQSSYVSIASNSTFTGTSGIQTQARLPFNGIIPSESASRPRKPCNCTKSLCLKLYCDCFANGEFCNNCNCTNCYNNLEHENERQKAIKACLDRNPEAFKPKIGKGKEGESDRRHSKGCNCKRSGCLKNYCECYEAKIMCSSICKCIGCKNFEESPERKTLMHLADAAEVRVQQQTAAKTKLSSQISDLLTRPTPALNSGGGKLPFTFVTKEVAEATCNCLLAQAEQADKKGKSKAAAERMILEEFGRCLMSVINSAGKAKSDPCAMNC

SEQ ID NO: 21707 - protein, 660 aa, Homo sapiens
MEVVPAEVNSLLPEEIMDTGITLVDDDSIEAVIVSSPIPMETELEEIVNINSTGDSTATPISTEPITVYSNHTNQVAVNTTITKADSNTTVKPAFPSGLQKLGAQTPVTISANQIILNKVSQTSDLKLGNQTLKPDGQKLILTTLGKSGSPIVLALPHSQLPQAQKVTTQAQSGDAKLPPQQIKVVTIGGRPEVKPVIGVSALTPGSQLINTTTQPSVLQTQQLKTVQAVKSTVQTITVGGVSTSQFKTIIPLATAPNVQQIQVPGSKFHYVRLVTATSASSSTQPVSQNPSTNTQPLQQAKPVVVNTTPVRMSVPIVSAQAVKQVVPKPINPTSQIVTTSQPQQRLIMPATPLPQIQPNLTNLPPGTVLAPAPGTGNVGYAVLPAQYVTQLQQSSYVSIASNSTFTGTSGIQTQARLPFNGIIPSESASRPRKPCNCTKSLCLKLYCDCFANGEFCNNCNCTNCYNNLEHENERQKAIKACLDRNPEAFKPKIGKGKEGESDRRHSKGCNCKRSGCLKNYCECYEAKIMCSSICKCIGCKNFEESPERKTLMHLADAAEVRVQQQTAAKTKLSSQISDLLTRPTPALNSGGGKLPFTFVTKEVAEATCNCLLAQAEQADKKGKSKAAAERMILEEFGRCLMSVINSAGKAKSDPCAMNC

SEQ ID NO: 21708 - protein, 528 aa, Homo sapiens
MEVVPAEIAKKPRTPTSGPVITKLIFAKPINSKAVTGQTTQVSPPVIAGRVLSQSTPGTPSKTITISESGVIGSTLNSTTQTPNKIAISPLKSPNKAVKSTVQTITVGGVSTSQFKTIIPLATAPNVQQIQVPGSKFHYVRLVTATSASSSTQPVSQNPSTNTQPLQQAKPVVVNTTPVRMSVPIVSAQAVKQVVPKPINPTSQIVTTSQPQQRLIMPATPLPQIQPNLTNLPPGTVLAPAPGTGNVGYAVLPAQYVTQLQQSSYVSIASNSTFTGTSGIQTQARLPFNGIIPSESASRPRKPCNCTKSLCLKLYCDCFANGEFCNNCNCTNCYNNLEHENERQKAIKACLDRNPEAFKPKIGKGKEGESDRRHSKGCNCKRSGCLKNYCECYEAKIMCSSICKCIGCKNFEESPERKTLMHLADAAEVRVQQQTAAKTKLSSQISDLLTRPTPALNSGGGKLPFTFVTKEVAEATCNCLLAQAEQADKKGKSKAAAERMILEEFGRCLMSVINSAGKAKSDPCAMNC

SEQ ID NO: 21709 - protein, 348 aa, Homo sapiens
MSVPIVSAQAVKQVVPKPINPTSQIVTTSQPQQRLIMPATPLPQIQPNLTNLPPGTVLAPAPGTGNVGYAVLPAQYVTQLQQSSYVSIASNSTFTGTSGIQTQARLPFNGIIPSESASRPRKPCNCTKSLCLKLYCDCFANGEFCNNCNCTNCYNNLEHENERQKAIKACLDRNPEAFKPKIGKGKEGESDRRHSKGCNCKRSGCLKNYCECYEAKIMCSSICKCIGCKNFEESPERKTLMHLADAAEVRVQQQTAAKTKLSSQISDLLTRPTPALNSGGGKLPFTFVTKEVAEATCNCLLAQAEQADKKGKSKAAAERMILEEFGRCLMSVINSAGKAKSDPCAMNC

SEQ ID NO: 21710 - protein, 243 aa, Homo sapiens
MEVVPAEVNSLLPEEIMDTGITLVDDDSIEAVIVSSPIPMETELEEIVNINSTGDSTATPISTEPITVYSNHTNQVAVNTTITKADSNTTVKPAFPSGLQKLGAQTPVTISANQIILNKVSQTSDLKLGNQTLKPDGQKLILTTLGKSGSPIVLALPHSQLPQAQKVTTQAQSGDAKLPPQQIKVVTIGGRPEVKPVIGVSALTPGSQLINTTTQPSVLQTQQLKTVQVGFFHSLLPELHQRP

SEQ ID NO: 21711 - protein, 351 aa, Homo sapiens
MVVSADPLSSERAEMNILEINQELRSQLAESNQQFRDLKEKFLITQATAYSLANQLKKYKCEEYKDIIDSVLRDELQSMEKLAEKLRQAEELRQYKALVHSQAKELTQLREKLREGRDASRWLNKHLKTLLTPDDPDKSQGQDLREQLAEGHRLAEHLVHKLSPENDEDEDEDEDDKDEEVEKVQESPAPREVQKTEEKEVPQDSLEECAVTCSNSHNPSNSNQPHRSTKITFKEHEVDSALVVESEHPHDEEEEALNIPPENQNDHEEEEGKAPVPPRHHDKSNSYRHREVSFLALDEQKVCSAQDVARDYSNPKWDETSLGFLDTPLARRESVALKGRTRSWQHSSHAN

SEQ ID NO: 21712 - protein, 184 aa, Homo sapiens
MLKKMGEAVARVARKVNETVESGSDTLDLAECKLVSFPIGIYKVLRNVSGQIHLITLANNELKSLTSKFMTTFSQLRELHLEGNFLHRLPSEVSALQHLKAIDLSRNQFQDFPEQLTALPALETINLEENEIVDVPVEKLAAMPALRSINLRFNPLNAEVRVIAPPLIKFDMLMSPEGARAPLP

SEQ ID NO: 21713 - protein, 134 aa, Homo sapiens
MLKKMGEAVARVARKVNETVESGSDTLELHLEGNFLHRLPSEVSALQHLKAIDLSRNQFQDFPEQLTALPALETINLEENEIVDVPVEKLAAMPALRSINLRFNPLNAEVRVIAPPLIKFDMLMSPEGARAPLP

SEQ ID NO: 21714 - protein, 128 aa, Homo sapiens
MLKKMGEAVARVARKVNETVESGSDTLDLAECKLVSFPIGIYKVLRNVSGQIHLITLANNELKSLTSKFMTTFSQLRDVPVEKLAAMPALRSINLRFNPLNAEVRVIAPPLIKFDMLMSPEGARAPLP

SEQ ID NO: 21715 - protein, 441 aa, Homo sapiens
MRVVTIVILLCFCKAAELRKASPGSVRSRVNHGRAGGGRRGSNPVKRYAPGLPCDVYTYLHEKYLDCQERKLVYVLPGWPQDLLHMLLARNKIRTLKNNMFSKFKKLKSLDLQQNEISKIESEAFFGLNKLTTLLLQHNQIKVLTEEVFIYTPLLSYLRLYDNPWHCTCEIETLISMLQIPRNRNLGNYAKCESPQEQKNKKLRQIKSEQLCNEEEKEQLDPKPQVSGRPPVIKPEVDSTFCHNYVFPIQTLDCKRKELKKVPNNIPPDIVKLDLSYNKINQLRPKEFEDVHELKKLNLSSNGIEFIDPAAFLGLTHLEELDLSNNSLQNFDYGVLEDLYFLKLLWLRDNPWRCDYNIHYLYYWLKHHYNVHFNGLECKTPEEYKGWSVGKYIRSYYEECPKDKLPAYPESFDQDTEDDEWEKKHRDHTAKKQSVIITIVG

SEQ ID NO: 21716 - protein, 313 aa, Homo sapiens
MRVVTIVILLCFCKAAELRKASPGSVRSRVNHGRAGGGRRGSNPVKRYAPGLPCDVYTYLHEKYLDCQERKLVYVLPGWPQDLLHMLLARNKIRTLKNNMFSKFKKLKSLDLQQNEISKIESEAFFGLNKLTTLLLQHNQIKVLTEEVFIYTPLLSYLRLYDNPWHCTCEIETLISMLQIPRNRNLGNYAKCESPQEQKNKKLRQIKSEQLCNEEEKEQLDPKPQVSGRPPVIKPEVDSTFCHNYVFPIQTLDCKRKELKKVPNNIPPDIVKLDLSYNKINQLRPKEFEDVHELKKLNLSSNGIEFIDPGSLR

SEQ ID NO: 21717 - protein, 869 aa, Homo sapiens
MVVSAGPWSSEKAEMNILEINEKLRPQLAENKQQFVNLKEMFSNSTGRLPGQPTEEIQQYKVLVHSQERELTQLKEKLREGRDASRSLNEHLQALLTLDEPDKSQGQDLQEQLAEGCRLAQHLVQKLSPENDEDEDEDVQVEEDEKVLESSAPREVQKAEESKVPEDSLEECAITCSNSHGPCDSIQPHKNIKITFEEDKVNSSLVVDRESSHDGCQDALNILPVPGPTSSATNVSMVVSAGPLSSEKAEMNILEINEKLCPQLAEKKQQFRSLKEKCFVTQVACFLAKQQNKYKYEECKDLIKSMLRNERQFKEEKLAEQLKQAEELRQYKVLVHSQERELTQLREKLREGRDASRSLNEHLQALLTPDEPDKSQGQDLQEQLAEGCRLAQHLVQKLSPENDNDDDEDVQVEVAEKVQKSSSPREMQKAEEKEVPEDSLEECAITCSNSHGPYDSNQPHRKTKITFEEDKVDSTLIGSSSHVEWEDAVHIIPENESDDEEEEEKGPVSPRNLQESEEEEVPQESWDEGYSTLSIPPERLASYQSYSSTFHSLEEQQVCMAVDIGRHRWDQVKKEDQEATGPRLSRELLDEKGPEVLQDSLDRCYSTPSGCLELTDSCQPYRSAFYILEQQRVGLAVDMDEIEKYQEVEEDQDPSCPRLSRELLDEKEPEVLQDSLDRCYSTPSGYLELPDLGQPYSSAVYSLEEQYLGLALDVDRIKKDQEEEEDQGPPCPRLSRELLEVVEPEVLQDSLDRCYSTPSSCLEQPDSCQPYGSSFYALEEKHVGFSLDVGEIEKKGKGKIGRGRRSKKKRRRGRKEGEEDQNPPCPRLNSVLMEVEEPEVLQDSLDRCYSTPSMYCELRDSFQHYRSVF

SEQ ID NO: 21718 - protein, 500 aa, Homo sapiens
MSNSVPLLCFWSLCYCFAAGSPVPFGPEGRLEDKLHKPKATQTEVKPSVRFNLRTSKDPEHEGCYLSVGHSQPLEDCSFNMTAKTFFIIHGWTMSGIFENWLHKLVSALHTREKDANVVVVDWLPLAHQLYTDAVNNTRVVGHSIARMLDWLQEKDDFSLGNVHLIGYSLGAHVAGYAGNFVKGTVGRITGLDPAGPMFEGADIHKRLSPDDADFVDVLHTYTRSFGLSIGIQMPVGHIDIYPNGGDFQPGCGLNDVLGSIAYGTITEVVKCEHERAVHLFVDSLVNQDKPSFAFQCTDSNRFKKGICLSCRKNRCNSIGYNAKKMRNKRNSKMYLKTRAGMPFRVYHYQMKIHVFSYKNMGEIEPTFYVTLYGTNADSQTLPLEIVERIEQNATNTFLVYTEEDLGDLLKIQLTWEGASQSWYNLWKEFRSYLSQPRNPGRELNIRRIRVKSGETQRKLTFCTEDPENTSISPGRELWFRKCRDGWRMKNETSPTVELP

SEQ ID NO: 21719 - protein, 354 aa, Homo sapiens
MSNSVPLLCFWSLCYCFAAGSPVPFGPEGRLEDKLHKPKATQTEVKPSVRFNLRTSKDPEHEGCYLSVGHSQPLEDCSFNMTAKTFFIIHGWTMSGIFENWLHKLVSALHTREKDANVVVVDWLPLAHQLYTDAVNNTRVVGHSIARMLDWLQEKDDFSLGNVHLIGYSLGAHVAGYAGNFVKGTVGRITGLDPAGPMFEGADIHKRLSPDDADFVDVLHTYTRSFGLSIGIQMPVGHIDIYPNGGDFQPGCGLNDVLGSIAYGTITEVVKCEHERAVHLFVDSLVNQDKPSFAFQCTDSNRFKKGICLSCRKNRCNSIGYNAKKMRNKRNSKMYLKTRAGMPFRGNLQSLECP

SEQ ID NO: 21720 - protein, 451 aa, Homo sapiens
MLRFYLFISLLCLSRSDAEETCPSFTRLSFHSAVVGTGLNVRLMLYTRKNLTCAQTINSSAFGNLNVTKKTTFIVHGFRPTGSPPVWMDDLVKGLLSVEDMNVVVVDWNRGATTLIYTHASSKTRKVAMVLKEFIDQMLAEGASLDDIYMIGVSLGAHISGFVGEMYDGWLGRITGLDPAGPLFNGKPHQDRLDPSDAQFVDVIHSDTDALGYKEPLGNIDFYPNGGLDQPGCPKTILGGFQYFKCDHQRSVYLYLSSLRESCTITAYPCDSYQDYRNGKCVSCGTSQKESCPLLGYYADNWKDHLRGKDPPMTKAFFDTAEESPFCMYHYFVDIITWNKNVRRGDITIKLRDKAGNTTESKINHEPTTFQKYHQVSLLARFNQDLDKVAAISLMFSTGSLIGPRYKLRILRMKLRSLAHPERPQLCRYDLVLMENVETVFQPILCPELQL

SEQ ID NO: 21721 - protein, 282 aa, Homo sapiens
MDRTLESLRHIIAQVLPHRDPALVFKDLNVVSMLQEFWESKQQQKAAFPSEGVVVYESLPAPGPPFVSYVTLPGGSCFGNFQCCLSRAEARRDAAKVALINSLFNELPSRRITKEFIMESVQEAVASTSGTLDDADDPSTSVGAYHYMLESNMGKTMLEFQELMTIFQLLHWNGSLKALRETKCSRQEVISYYSQYSLDEKMRSHMALDWIMKERDSPGIVSQELRMALRQLEEARKAGQELRFYKEKKEILSLALTQICSDPDTSSPSDDQLSLTALCGYH

SEQ ID NO: 21722 - protein, 206 aa, Homo sapiens
MEPLASNIQVLLQAAEFLERREREAEHGYASLCPHRSPGPIHRRKKRPPQAPGAQDSGRSVHNELEKRRRAQLKRCLERLKQQMPLGADCARYTTLSLLRRARMHIQKLEDQEQRARQLKERLRSKQQSLQRQLEQLRGLAGAAERERLRADSLDSSGLSSERSDSDQEELEVDVESLVFGGEAELLRGFVAGQEHSYSHGGGAWL

SEQ ID NO: 21723 - protein, 197 aa, Homo sapiens
MEPLASNIQVLLQAAEFLERREREAEHGYASLCPHRSPGPIHRRKKRPPQAPGAQDSGRRRAQLKRCLERLKQQMPLGADCARYTTLSLLRRARMHIQKLEDQEQRARQLKERLRSKQQSLQRQLEQLRGLAGAAERERLRADSLDSSGLSSERSDSDQEELEVDVESLVFGGEAELLRGFVAGQEHSYSHGGGAWL

SEQ ID NO: 21724 - protein, 193 aa, Homo sapiens
MEPLASNIQVLLQAAEFLERREREAEHGYASLCPHRSPGPIHRRKKRPPQAPGAQDSGRSVHNELEKRRRAQLKRCLERLKQQMPLGADCARYTTLSLLRRARMHIQKLEDQEQRARQLKERLRSKQQSLQRQLEQLRGLAGAAERERLRADSLDSSGLSSERSDSDQVLPNENGGTPNHRPTGRGNNISSHH

SEQ ID NO: 21725 - protein, 388 aa, Homo sapiens
MEPLASNIQVLLQAAEFLERREREAEHGYASLCPHRSPGPIHRRKKRPPQAPGAQDSGRSVHNELEKRRRAQLKRCLERLKQQMPLGADCARYTTLSLLRRARMHIQKLEDQEQRARQLKERLRSKQQSLQRQLEQLRGLAGAAERERLRADSLDSSGLSSERSDSDQGECPEAEGLCGPRGEPGLLTGPLPAQRSWRWMWRAWCLGVRPSCCGASSPARSTATRTAAAPGYDVPHPGRASALYSCQAHLPGRSPPQAFRAARSHLLEWTKRTLVWEQVLPKHPAAGCQAGPLEGKGQDSSGPPWTPAGQAAWARAQAFGSAAPKGTGSLLGLFPSWTRPPAFASHKLYSIFIKSLFHNFPSIVLPNENGGTPNHRPTGRGNNISSHH

SEQ ID NO: 21726 - protein, 338 aa, Homo sapiens
MLSALARPASAALRRSFSTSAQNNAKVAVLGASGGIGQPLSLLLKNSPLVSRLTLYDIAHTPGVAADLSHIETKAAVKGYLGPEQLPDCLKGCDVVVIPAGVPRKPGMTRDDLFNTNATIVATLTAACAQHCPEAMICVIANPVNSTIPITAEVFKKHGVYNPNKIFGVTTLDIVRANTFVAELKGLDPARVNVPVIGGHAGKTIIPLISQCTPKVDFPQDQLTALTGRIQEAGTEVVKAKAGAGSATLSMAYAGARFVFSLVDAMNGKEGVVECSFVKSQETECTYFSTPLLLGKKGIEKNLGIGKVSSFEEKMISDAIPELKASIKKGEDFVKTLK

SEQ ID NO: 21727 - protein, 296 aa, Homo sapiens
MLSALARPASAALRRSFSTSAQNNAKVAVLGASGGIGQPLSLLLKNSPLVSRLTLYDIAHTPGVAADLSHIETKAAVKGYLGPEQLPDCLKGCDVVVIPAGVPRKPGMTRDDLFNTNATIVATLTAACAQHCPEAMICVIANPGLDPARVNVPVIGGHAGKTIIPLISQCTPKVDFPQDQLTALTGRIQEAGTEVVKAKAGAGSATLSMAYAGARFVFSLVDAMNGKEGVVECSFVKSQETECTYFSTPLLLGKKGIEKNLGIGKVSSFEEKMISDAIPELKASIKKGEDFVKTLK

SEQ ID NO: 21728 - protein, 209 aa, Homo sapiens
MELNSLLILLEAAEYLERRDREAEHGYASVLPFDGDFAREKTKAAGLVRKAPNNRSSHNELEKHRRAKLRLYLEQLKQLVPLGPDSTRHTTLSLLKRAKVHIKKLEEQDRRALSIKEQLQQEHRFLKRRLEQLSVQSVERVRTDSTGSAVSTDDSEQEVDIEGMEFGPGELDSVGSSSDADDHYSLQSGTGGDSGFGPHCRRLGRPALS

SEQ ID NO: 21729 - protein, 580 aa, Homo sapiens
MTAPAGPRGSETERLLTPNPGYGTQAGPSPAPPTPPEEEDLRRRLKYFFMSPCDKFRAKGRKPCKLMLQVVKILVVTVQLILFGLSNQLAVTFREENTIAFRHLFLLGYSDGADDTFAAYTREQLYQAIFHAVDQYLALPDVSLGRYAYVRGGGDPWTNGSGLALCQRYYHRGHVDPANDTFDIDPMVVTDCIQVDPPERPPPPPSDDLTLLESSSSYKNLTLKFHKLVNVTIHFRLKTINLQSLINNEIPDCYTFSVLITFDNKAHSGRIPISLETQAHIQECKHPSVFQHGDNSFRLLFDVVVILTCSLSFLLCARSLLRGFLLQNEFVGFMWRQRGRVISLWERLEFVNGWYILLVTSDVLTISGTIMKIGIEAKNLASYDVCSILLGTSTLLVWVGVIRYLTFFHNYNILIATLRVALPSVMRFCCCVAVIYLGYCFCGWIVLGPYHVKFRSLSMVSECLFSLINGDDMFVTFAAMQAQQGRSSLVWLFSQLYLYSFISLFIYMVLSLFIALITGAYDTIKHPGGAGAEESELQAYIAQCQDSPTSGKFRRGSGSACSLLCCCGRDPSEEHSLLVN

SEQ ID NO: 21730 - protein, 863 aa, Homo sapiens
MSSPASTPSRRGSRRGRATPAQTPRSEDARSSPSQRRRGEDSTSTGELQPMPTSPGVDLQSPAAQDVLFSSPPQMHSSAIPLDFDVSSPLTYGTPSSRVEGTPRSGVRGTPVRQRPDLGSAQKGLQVDLQSDGAAAEDIVASEQSLGQKLVIWGTDVNVAACKENFQRFLQRFIDPLAKEEENVGIDITEPLYMQRLGEINVIGEPFLNVNCEHIKSFDKNLYRQLISYPQEVIPTFDMAVNEIFFDRYPDSILEHQIQVRPFNALKTKNMRNLNPEDIDQLITISGMVIRTSQLIPEMQEAFFQCQVCAHTTRVEMDRGRIAEPSVCGRCHTTHSMALIHNRSLFSDKQMIKLQESPEDMPAGQTPHTVILFAHNDLVDKVQPGDRVNVTGIYRAVPIRVNPRVSNVKSVYKTHIDVIHYRKTDAKRLHGLDEEAEQKLFSEKRVELLKELSRKPDIYERLASALAPSIYEHEDIKKGILLQLFGGTRKDFSHTGRGKFRAEINILLCGDPGTSKSQLLQYVYNLVPRGQYTSGKGSSAVGLTAYVMKDPETRQLVLQTGALVLSDNGICCIDEFDKMNESTRSVLHEVMEQQTLSIAKAGIICQLNARTSVLAAANPIESQWNPKKTTIENIQLPHTLLSRFDLIFLLLDPQDEAYDRRLAHHLVALYYQSEEQAEEELLDMAVLKDYIAYAHSTIMPRLSEEASQALIEAYVDMRKIGSSRGMVSAYPRQLESLIRLAEAHAKVRLSNKVEAIDVEEAKRLHREALKQSATDPRTGIVDISILTTGMSATSRKRKEELAEALKKLILSKGKTPALKYQQLFEDIRGQSDIAITKDMFEEALRALADDDFLTVTGKTVRLL

SEQ ID NO: 21731 - protein, 309 aa, Homo sapiens
MSLEQRSLHCKPEEALEAQQEALGLVCVQAATSSSSPLVLGTLEEVPTAGSTDPPQSPQGASAFPTTINFTRQRQPSEGSSSREEEGPSTSCILESLFRAVITKKVADLVGFLLLKYRAREPVTKAEMLESVIKNYKHCFPEIFGKASESLQLVFGIDVKEADPTGHSYVLVTCLGLSYDGLLGDNQIMPKTGFLIIVLVMIAMEGGHAPEEEIWEELSVMEVYDGREHSAYGEPRKLLTQDLVQEKYLEYRQVPDSDPARYEFLWGPRALAETSYVKVLEYVIKVSARVRFFFPSLREAALREEEEGV

SEQ ID NO: 21732 - protein, 232 aa, Homo sapiens
MERCPSLGVTLYALVVVLGLRATPAGGQHYLHIRPAPSDNLPLVDLIEHPDPIFDPKEKDLNETLLRSLLGGHYDPGFMATSPPEDRPGGGGGAAGGAEDLAELDQLLRQRPSGAMPSEIKGLEFSEGLAQGKKQRLSKKLRRKLQMWLWSQTFCPVLYAWNDLGSRFWPRYVKVGSCFSKRSCSVPEGMVCKPSKSVHLTVLRWRCQRRGGQRCGWIPIQYPIISECKCSC

SEQ ID NO: 21733 - protein, 429 aa, Homo sapiens
METQFRRGGLGCSPASIKRKKKREDSGDFGLQVSTMFSEDDFQSTERAPYGPQLQWSQDLPRVQVFREQANLEDRSPRRTQRITGGEQVLWGPITQIFPTVRPADLTRVIMPLEQRSQHCKPEEGLQAQEEDLGLVGAQALQAEEQEAAFFSSTLNVGTLEELPAAESPSPPQSPQEESFSPTAMDAIFGSLSDEGSGSQEKEGPSTSPDLIDPESFSQDILHDKIIDLVHLLLRKYRVKGLITKAEMLGSVIKNYEDYFPEIFREASVCMQLLFGIDVKEVDPTSHSYVLVTSLNLSYDGIQCNEQSMPKSGLLIIVLGVIFMEGNCIPEEVMWEVLSIMGVYAGREHFLFGEPKRLLTQNWVQEKYLVYRQVPGTDPACYEFLWGPRAHAETSKMKVLEYIANANGRDPTSYPSLYEDALREEGEGV

SEQ ID NO: 21734 - protein, 394 aa, Homo sapiens
MFSEDDFQSTERAPYGPQLQWSQDLPRVQVFREQANLEDRSPRRTQRITGGEQVLWGPITQIFPTVRPADLTRVIMPLEQRSQHCKPEEGLQAQEEDLGLVGAQALQAEEQEAAFFSSTLNVGTLEELPAAESPSPPQSPQEESFSPTAMDAIFGSLSDEGSGSQEKEGPSTSPDLIDPESFSQDILHDKIIDLVHLLLRKYRVKGLITKAEMLGSVIKNYEDYFPEIFREASVCMQLLFGIDVKEVDPTSHSYVLVTSLNLSYDGIQCNEQSMPKSGLLIIVLGVIFMEGNCIPEEVMWEVLSIMGVYAGREHFLFGEPKRLLTQNWVQEKYLVYRQVPGTDPACYEFLWGPRAHAETSKMKVLEYIANANGRDPTSYPSLYEDALREEGEGV

SEQ ID NO: 21735 - protein, 314 aa, Homo sapiens
MPLEQRSQHCKPEEGLEAQGEALGLVGAQAPATEEQETASSSSTLVEVTLREVPAAESPSPPHSPQGASTLPTTINYTLWSQSDEGSSNEEQEGPSTFPDLETSFQVALSRKMAELVHFLLLKYRAREPFTKAEMLGSVIRNFQDFFPVIFSKASEYLQLVFGIEVVEVVRIGHLYILVTCLGLSYDGLLGDNQIVPKTGLLIIVLAIIAKEGDCAPEEKIWEELSVLEASDGREDSVFAHPRKLLTQDLVQENYLEYRQVPGSDPACYEFLWGPRALVETSYVKVLHHLLKISGGPHISYPPLHEWAFREGEE

SEQ ID NO: 21736 - protein, 540 aa, Homo sapiens
MPFAEDKTYKYICRNFSNFCNVDVVEILPYLPCLTARDQDRLRATCTLSGNRDTLWHLFNTLQRRPGWVEYFIAALRGCELVDLADEVASVYQSYQPRTSDRPPDPLEPPSLPAERPGPPTPAAAHSIPYNSCREKEPSYPMPVQETQAPESPGENSEQALQTLSPRAIPRNPDGGPLESSSDLAALSPLTSSGHQEQDTELGSTHTAGATSSLTPSRGPVSPSVSFQPLARSTPRASRLPGPTGSVVSTGTSFSSSSPGLASAGAAEGKQGAESDQAEPIICSSGAEAPANSLPSKVPTTLMPVNTVALKVPANPASVSTVPSKLPTSSKPPGAVPSNALTNPAPSKLPINSTRAGMVPSKVPTSMVLTKVSASTVPTDGSSRNEETPAAPTPAGATGGSSAWLDSSSENRGLGSELSKPGVLASQVDSPFSGCFEDLAISASTSLGMGPCHGPEENEYKSEGTFGIHVAENPSIQLLEGNPGPPADPDGGPRPQADRKFQEREVPCHRPSPGALWLQVAVTGVLVVTLLVVLYRRRLH

SEQ ID NO: 21737 - protein, 138 aa, Homo sapiens
MPFAEDKTYKYICRNFSNFCNVDVVEILPYLPCLTARDQDRLRATCTLSGNRDTLWHLFNTLQRRPGWVEYFIAALRGCELVDLADEVASVYQSYQPRERPALALLDPQPAPWPPLSFSLSLYFLPFSVILFLVTVKR

SEQ ID NO: 21738 - protein, 148 aa, Homo sapiens
MPFAEDKTYKYICRNFSNFCNVDVVEILPYLPCLTARDQDRLRATCTLSGNRDTLWHLFNTLQLPTWAGEETPGGQSSGRGLDFSSLTSGAVWLWQMSDFWSCFSTWTVSIWLILHWVLLRLNLQVFAKCLAQSKWPLLLPSLSCPTW

SEQ ID NO: 21739 - protein, 399 aa, Homo sapiens
MPVQETQAPESPGENSEQALQTLSPRAIPRNPDGGPLESSSDLAALSPLTSSGHQEQDTELGSTHTAGATSSLTPSRGPVSPSVSFQPLARSTPRASRLPGPTGSVVSTGTSFSSSSPGLASAGAAEGKQGAESDQAEPIICSSGAEAPANSLPSKVPTTLMPVNTVALKVPANPASVSTVPSKLPTSSKPPGAVPSNALTNPAPSKLPINSTRAGMVPSKVPTSMVLTKVSASTVPTDGSSRNEETPAAPTPAGATGGSSAWLDSSSENRGLGSELSKPGVLASQVDSPFSGCFEDLAISASTSLGMGPCHGPEENEYKSEGTFGIHVAENPSIQLLEGNPGPPADPDGGPRPQADRKFQEREVPCHRPSPGALWLQVAVTGVLVVTLLVVLYRRRLH

SEQ ID NO: 21740 - protein, 124 aa, Homo sapiens
MPFAEDKTYKYICRNFSNFCNVDVVEILPYLPCLTARDQDRLRATCTLSGNRDTLWHLFNTLQRRPGWVEYFIAALRGCELVDLADEVASVYQSYQPQFRASPADAQPQSHPKESRWWPPGVLL

SEQ ID NO: 21741 - protein, 131 aa, Homo sapiens
MPFAEDKTYKYICRNFSNFCNVDVVEILPYLPCLTARDQGPRTVPQTHWSHRHFLLRGQGPPHLLRPTASPTTAAERRSQVTPCLSRRPRRQSPQERIQSKPCRRSAPEPSQGIQMVAPWSPPLTWQPSAL

SEQ ID NO: 21742 - protein, 835 aa, Homo sapiens
MWLLALCLVGLAGAQRGGGGPGGGAPGGPGLGLGSLGEERFPVVNTAYGRVRGVRRELNNEILGPVVQFLGVPYATPPLGARRFQPPEAPASWPGVRNATTLPPACPQNLHGALPAIMLPVWFTDNLEAAATYVQNQSEDCLYLNLYVPTEDGPLTKKRDEATLNPPDTDIRDPGKKPVMLFLHGGSYMEGTGNMFDGSVLAAYGNVIVATLNYRLGVLGFLSTGDQAAKGNYGLLDQIQALRWLSENIAHFGGDPERITIFGSGAGASCVNLLILSHHSEGLFQKAIAQSGTAISSWSVNYQPLKYTRLLAAKVGCDREDSAEAVECLRRKPSRELVDQDVQPARYHIAFGPVVDGDVVPDDPEILMQQGEFLNYDMLIGVNQGEGLKFVEDSAESEDGVSASAFDFTVSNFVDNLYGYPEGKDVLRETIKFMYTDWADRDNGEMRRKTLLALFTDHQWVAPAVATAKLHADYQSPVYFYTFYHHCQAEGRPEWADAAHGDELPYVFGVPMVGATDLFPCNFSKNDVMLSAVVMTYWTNFAKTGDPNQPVPQDTKFIHTKPNRFEEVVWSKFNSKEKQYLHIGLKPRVRDNYRANKVAFWLELVPHLHNLHTELFTTTTRLPPYATRWPPRPPAGAPGTRRPPPPATLPPEPEPEPGPRAYDRFPGDSRDYSTELSVTVAVGASLLFLNILAFAALYYKRDRRQELRCRRLSPPGGSGSGVPGGGPLLPAAGRELPPEEELVSLQLKRGGGVGADPAEALRPACPPDYTLALRRAPDDVPLLAPGALTLLPSGLGPPPPPPPPSLHPFGPFPPPPPTATSHNNTLPHPHSTTRV

SEQ ID NO: 21743 - protein, 347 aa, Homo sapiens
MPRGQKSKLRAREKRRQARGGLEDLIDALDILEEEEESPPSASACLKDVFQSSLDGASNNPHGLREAQSTSTSATAASHTRHPEGVNDQMEERPICTQDLEATDSFPRGPVDEKVIILVHYLLYKYQMKEPITKADMLRNVTQMSKSQFPVILSRASEHLELIFGLDLKEVEPNKHIYVLVNKLDLGCDAKLSDETGVPKTGLLMTVLGIIFTNGNCVAEEEVWKVFNTMGLYDGIEHFMFGEPRKLLTKDLVKENYLEYQQVPNSDPPRYQFLWGPRAHAETSKMKVLEFLAKVNDTAPSEFSNWYTEALQDEEERARARVAAKARVSATAGARSKVKSSKSSQLQ

SEQ ID NO: 21744 - protein, 336 aa, Homo sapiens
MPRGQASKRRAREKRRQARGEDQCLGGAQATAAEKEKLPSSSSPACQSPPQSFPNAGIPQESQRASYPSSPASAVSLTSSDEGAKGQKGESPNSFHGPSSSESTGRDLLNTKTGELVQFLLNKYIRKEPITREAMLKVINRKYKQHFPEILRRSTENVEVVFGLYLKEMDPSRQSYVLVGKLDFPNQGSLSDGGGFPLSGLLMVLLSTIFMHGNRATEEEMWECLNALGMYKGRKHFIYGEPQELVTKDLVREGYLEYQQVPSSDPPRYEFLWGPRARAETSKMKVLEFVAKLNDTVASTYKSRYEEALREEEEQARARAVARDSARARASRSFQP

SEQ ID NO: 21745 - protein, 580 aa, Homo sapiens
MGTTGLESLSLGDRGAAPTVTSSERLVPDPPNDLRKEDVAMELERVGEDEEQMMIKRSSECNPLLQEPIASAQFGATAGTECRKSVPCGWERVVKQRLFGKTAGRFDVYFISPQGLKFRSKSSLANYLHKNGETSLKPEDFDFTVLSKRGIKSRYKDCSMAALTSHLQNQSNNSNWNLRTRSKCKKDVFMPPSSSSELQESRGLSNFTSTHLLLKEDEGVDDVNFRKVRKPKGKVTILKGIPIKKTKKGCRKSCSGFVQSDSKRESVCNKADAESEPVAQKSQLDRTVCISDAGACGETLSVTSEENSLVKKKERSLSSGSNFCSEQKTSGIINKFCSAKDSEHNEKYEDTFLESEEIGTKVEVVERKEHLHTDILKRGSEMDNNCSPTRKDFTGEKIFQEDTIPRTQIERRKTSLYFSSKYNKEALSPPRRKAFKKWTPPRSPFNLVQETLFHDPWKLLIATIFLNRTSGKMAIPVLWKFLEKYPSAEVARTADWRDVSELLKPLGLYDLRAKTIVKFSDEYLTKQWKYPIELHGIGKYGNDSYRIFCVNEWKQVHPEDHKLNKYHDWLWENHEKLSLS

SEQ ID NO: 21746 - protein, 574 aa, Homo sapiens
MGTTGLESLSLGDRGAAPTVTSSERLVPDPPNDLRKEDVAMELERVGEDEEQMMIKRSSECNPLLQEPIASAQFGATAGTECRKSVPCGWERVVKQRLFGKTAGRFDVYFISPQGLKFRSKSSLANYLHKNGETSLKPEDFDFTVLSKRGIKSRYKDCSMAALTSHLQNQSNNSNWNLRTRSKCKKDVFMPPSSSSELQESRGLSNFTSTHLLLKEDEGVDDVNFRKVRKPKGKVTILKGIPIKKTKKGCRKSCSGFVQSDSKRESVCNKADAESEPVAQKSQLDRTVCISDAGACGETLSVTSEENSLVKKKERSLSSGSNFCSEQKTSGIINKFCSAKDSEHNEKYEDTFLESEEIGTKVEVVERKEHLHTDILKRGSEMDNNCSPTRKDFTEDTIPRTQIERRKTSLYFSSKYNKEALSPPRRKAFKKWTPPRSPFNLVQETLFHDPWKLLIATIFLNRTSGKMAIPVLWKFLEKYPSAEVARTADWRDVSELLKPLGLYDLRAKTIVKFSDEYLTKQWKYPIELHGIGKYGNDSYRIFCVNEWKQVHPEDHKLNKYHDWLWENHEKLSLS

SEQ ID NO: 21747 - protein, 540 aa, Homo sapiens
MGTTGLESLSLGDRGAAPTVTSSERLVPDPPNDLRKEDVAMELERVGEDEEQMMIKRSSECNPLLQEPIASAQFGATAGTECRKSVPCGWERVVKQRLFGKTAGRFDVYFISPQGLKFRSKSSLANYLHKNGETSLKPEDFDFTVLSKRGIKSRYKDCSMAALTSHLQNQSNNSNWNLRTRSKCKKDVFMPPSSSSELQESRGLSNFTSTHLLLKEDEGVDDVNFRKVRKPKGKVTILKGIPIKKTKKGCRKSCSGFVQSDSKRESVCNKADAESEPVAQKSQLDRTVCISDAGACGETLSVTSEENSLVKKKERSLSSGSNFCSEQKTSGIINKFCSAKDSEHNEKYEDTFLESEEIGTKVEVVERKEHLHTDILKRGSEMDNNCSPTRKDFTGEKIFQEDTIPRTQIERRKTSLYFSSKYNKEALSPPRRKAFKKWTPPRSPFNLVQETLFHDPWKLLIATIFLNRTSGKMAIPVLWKFLEKYPSAEVARTADWRDVSELLKPLGLYDLRAKTIVKFSDEYLTKQWKYPIELHGIGAP

SEQ ID NO: 21748 - protein, 572 aa, Homo sapiens
MGTTGLESLSLGDRGAAPTVTSSERLVPDPPNDLRKEDVAMELERVGEDEEQMMIKRSSECNPLLQEPIASAQFGATAGTECRKSVPCGWERVVKQRLFGKTAGRFDVYFISPQGLKFRSKSSLANYLHKNGETSLKPEDFDFTVLSKRGIKSRYKDCSMAALTSHLQNQSNNSNWNLRTRSKCKKDVFMPPSSSSELQESRGLSNFTSTHLLLKEDEGVDDVNFRKVRKPKGKVTILKGIPIKKTKKGCRKSCSGFVQSDSKRESVCNKADAESEPVAQKSQLDRTVCISDAGACGETLSVTSEENSLVKKKERSLSSGSNFCSEQKTSGIINKFCSAKDSEHNEKYEDTFLESEEIGTKVEVVERKEHLHTDILKRGSEMDNNCSPTRKDFTGEKIFQEDTIPRTQIERRKTSLYFSSKYNKEALSPPRRKAFKKWTPPRSPFNLVQETLFHDPWKLLIATIFLNRTSGKMAIPVLWKFLEKYPSAEVARTADWRDVSELLKPLGLYDLRAKTIVKFSDEYLTKQWKYPIELHGIGKYGNDSYRIFCVNEWKQVRLTPIHNSAHLVSEAK

SEQ ID NO: 21749 - protein, 262 aa, Homo sapiens
MGTTGLESLSLGDRGAAPTVTSSERLVPDPPNDLRKEDVAMELERVGEDEEQMMIKRSSECNPLLQEPIASAQFGATAGTECQDTIPRTQIERRKTSLYFSSKYNKEALSPPRRKAFKKWTPPRSPFNLVQETLFHDPWKLLIATIFLNRTSGKMAIPVLWKFLEKYPSAEVARTADWRDVSELLKPLGLYDLRAKTIVKFSDEYLTKQWKYPIELHGIGKYGNDSYRIFCVNEWKQVHPEDHKLNKYHDWLWENHEKLSLS

SEQ ID NO: 21750 - protein, 623 aa, Homo sapiens
MNRYTTMRQLGDGTYGSVLMGKSNESGELVAIKRMKRKFYSWDECMNLREVKSLKKLNHANVIKLKEVIRENDHLYFIFEYMKENLYQLMKDRNKLFPESVIRNIMYQILQGLAFIHKHGFFHRDMKPENLLCMGPELVKIADFGLARELRSQPPYTDYVSTRWYRAPEVLLRSSVYSSPIDVWAVGSIMAELYMLRPLFPGTSEVDEIFKICQVLGTPKKSDWPEGYQLASSMNFRFPQCVPINLKTLIPNASNEAIQLMTEMLNWDPKKRPTASQALKHPYFQVGQVLGPSSNHLESKQSLNKQLQPLESKPSLVEVEPKPLPDIIDQVVGQPQPKTSQQPLQPIQPPQNLSVQQPPKQQSQEKPPQTLFPSIVKNMPTKPNGTLSHKSGRRRWGQTIFKSGDSWEELEDYDFGASHSKKPSMGVFKEKRKKDSPFRLPEPVPSGSNHSTGENKSLPAVTSLKSDSELSTAPTSKQYYLKQSRYLPGVNPKKVSLIASGKEINPHTWSNQLFPKSLGPVGAELAFKRSNAGNLGSYATYNQSGYIPSFLKKEVQSAGQRIHLAPLNATASEYTWNTKTGRGQFSGRTYNPTAKNLNIVNRAQPIPSVHGRTDWVAKYGGHR

SEQ ID NO: 21751 - protein, 648 aa, Homo sapiens
MNRYTTMRQLGDGTYGSVLMGKSNESGELVAIKRMKRKFYSWDECMNLREVKSLKKLNHANVIKLKEVIRENDHLYFIFEYMKENLYQLMKDRNKLFPESVIRNIMYQILQGLAFIHKHGFFHRDMKPENLLCMGPELVKIADFGLARELRSQPPYTDYVSTRWYRAPEVLLRSSVYSSPIDVWAVGSIMAELYMLRPLFPGTSEVDEIFKICQVLGTPKKSDWPEGYQLASSMNFRFPQCVPINLKTLIPNASNEAIQLMTEMLNWDPKKRPTASQALKHPYFQVGQVLGPSSNHLESKQSLNKQLQPLESKPSLVEVEPKPLPDIIDQVVGQPQPKTSQQPLQPIQPPQNLSVQQPPKQQSQEKPPQTLFPSIVKNMPTKPNGTLSHKSGRRRWGQTIFKSGDSWEELEDYDFGASHSKKPSMGVFKEKRKKDSPFRLPEPVPSGSNHSTGENKSLPAVTSLKSDSELSTAPTSKQYYLKQSRYLPGVNPKKVSLIASGKEINPHTWSNQLFPKSLGPVGAELAFKRSNAEESIIKPIEKLSCNETFPEKLEDPQGNLGSYATYNQSGYIPSFLKKEVQSAGQRIHLAPLNATASEYTWNTKTGRGQFSGRTYNPTAKNLNIVNRAQPIPSVHGRTDWVAKYGGHR

SEQ ID NO: 21752 - protein, 583 aa, Homo sapiens
MNRYTTMRQLGDGTYGSVLMGKSNESGELVAIKRMKRKFYSWDECMNLREVKSLKKLNHANVIKLKEVIRENDHLYFIFEYMKENLYQLMKDRNKLFPESVIRNIMYQILQGLAFIHKHGFFHRDMKPENLLCMGPELVKIADFGLARELRSQPPYTDYVSTRWYRAPEVLLRSSVYSSPIDVWAVGSIMAELYMLRPLFPGTSEVDEIFKICQVLGTPKKSDWPEGYQLASSMNFRFPQCVPINLKTLIPNASNEAIQLMTEMLNWDPKKRPTASQALKHPYFQVGQVLGPSSNHLESKQSLNKQLQPLESKPSLVEVEPKPLPDIIDQVVGQPQPKTSQQPLQPIQPPQNLSVQQPPKQQSQEKPPQTLFPSIVKNMPTKPNGTLSHKSGRRRWGQTIFKSGDSWEELEDYDFGASHSKKPSMGVFKEKRKKDSPFRLPEPVPSGSNHSTGENKSLPAVTSLKSDSELSTAPTSKQYYLKQSRYLPGVNPKKVSLIASGKEINPHTWSNQLFPKSLGPVGAELAFKRSNAEYTWNTKTGRGQFSGRTYNPTAKNLNIVNRAQPIPSVHGRTDWVAKYGGHR

SEQ ID NO: 21753 - protein, 291 aa, Homo sapiens
MERKRWECPALPQGWEREEVPRRSGLSAGHRDVFYYSPSGKKFRSKPQLARYLGGSMDLSTFDFRTGKMLMSKMNKSRQRVRYDSSNQVKGKPDLNTALPVRQTASIFKQPVTKITNHPSNKVKSDPQKAVDQPRQLFWEKKLSGLNAFDIAEELVKTMDLPKGLQGVGPGCTDETLLSAIASALHTSTMPITGQLSAAVEKNPGVWLNTTQPLCKAFMVTDEDIRKQEELVQQVRKRLEEALMADMLAHVEELARDGEAPLDKACAEDDDEEDEEEEEEEPDPDPEMEHV

SEQ ID NO: 21754 - protein, 259 aa, Homo sapiens
MERKSPSGKKFRSKPQLARYLGGSMDLSTFDFRTGKMLMSKMNKSRQRVRYDSSNQVKGKPDLNTALPVRQTASIFKQPVTKITNHPSNKVKSDPQKAVDQPRQLFWEKKLSGLNAFDIAEELVKTMDLPKGLQGVGPGCTDETLLSAIASALHTSTMPITGQLSAAVEKNPGVWLNTTQPLCKAFMVTDEDIRKQEELVQQVRKRLEEALMADMLAHVEELARDGEAPLDKACAEDDDEEDEEEEEEEPDPDPEMEHV

SEQ ID NO: 21755 - protein, 176 aa, Homo sapiens
MSAGGASVPPPPNPAVSFPPPRVTLPAGPDILRTYSGAFVCLEILFGGLVWILVASSNVPLPLLQGWVMFVSVTAFFFSLLFLGMFLSGMVAQIDANWNFLDFAYHFTVFVFYFGAFLLEAAATSLHDLHCNTTITGQPLLSDNQYNINVAASIFAFMTTACYGCSLGLALRRWRP

SEQ ID NO: 21756 - protein, 205 aa, Homo sapiens
MALQLSREQGITLRGSAEIVAEFFSFGINSILYQRGIYPSETFTRVQKYGLTLLVTTDLELIKYLNNVVEQLKDWLYKCSVQKLVVVISNIESGEVLERWQFDIECDKTAKDDSAPREKSQKAIQDEIRSVIRQITATVTFLPLLEVSCSFDLLIYTDKDLVVPEKWEESGPQFITNSEEVRLRSFTTTIHKVNSMVAYKIPVND

SEQ ID NO: 21757 - protein, 90 aa, Homo sapiens
MALQLSREQGITLRGSAEIVAEFFSFGINSILYQRGIYPSETFTRVQKYGLTLLVTTDLELIKYLNNVVEQLKVHPEKSLRKLSRMKSVQ

SEQ ID NO: 21758 - protein, 596 aa, Homo sapiens
MGSVSSLISGHSFHSKHCRASQYKLRKSSHLKKLNRYSDGLLRFGFSQDSGHGKSSSKMGKSEDFFYIKVSQKARGSHHPDYTALSSGDLGGQAGVDFDPSTPPKLMPFSNQLEMGSEKGAVRPTAFKPVLPRSGAILHSSPESASHQLHPAPPDKPKEQELKPGLCSGALSDSGRNSMSSLPTHSTSSSYQLDPLVTPVGPTSRFGGSAHNITQGIVLQDSNMMSLKALSFSDGGSKLGHSNKADKGPSCVRSPISTDECSIQELEQKLLEREGALQKLQRSFEEKELASSLAYEERPRRCRDELEGPEPKGGNKLKQASQKSQRAQQVLHLQVLQLQQEKRQLRQELESLMKEQDLLETKLRSYEREKTSFGPALEETQWEVCQKSGEISLLKQQLKESQTEVNAKASEILGLKAQLKDTRGKLEGLELRTQDLEGALRTKGLELEVCENELQRKKNEAELLREKVNLLEQELQELRAQAALARDMGPPTFPEDVPALQRELERLRAELREERQGHDQMSSGFQHERLVWKEEKEKVIQYQKQLQQSYVAMYQRNQRLEKALQQLARGDSAGEPLEVDLEGADIPYEDIIATEI

SEQ ID NO: 21759 - protein, 573 aa, Homo sapiens
MGSVSSLISGHSFHSKHCRASQYKLRKSSHLKKLNRYSDGLLRFGFSQDSGHGKSSSKMGKSEDFFYIKVSQKARGSHHPDYTALSSGDLGGQAGVDFDPSTPPKLMPFSNQLEMGSEKGAVRPTAFKPVLPRSGAILHSSPESASHQLHPAPPDKPKEQELKPGLCSGALSDSGRNSMSSLPTHSTSSSYQLDPLVTPVGPTSRFGGSAHNITQGIVLQDSNMMSLKALSFSDGGSKLGHSNKADKGPSCVRSPISTDECSIQELEQKLLEREGALQKLQRSFEEKELASSLAYEERPRRCRDELEGPEPKGGNKLKQASQKSQRAQQVLHLQVLQLQQEKRQLRQELESLMKEQDLLETKLRSYEREKTSFGPALEETQWEVCQKSGEISLLKQQLKESQTEVNAKASEILGLKAQLKDTRGKLEGLELRTQDLEGALRTKGLELEVCENELQRKKNEAELLREKVNLLEQELQELRAQAALARDMGPPTFPEDVPALQRELERLVWKEEKEKVIQYQKQLQQSYVAMYQRNQRLEKALQQLARGDSAGEPLEVDLEGADIPYEDIIATEI

SEQ ID NO: 21760 - protein, 563 aa, Homo sapiens
MGSVSSLISGHSFHSKHCRASQYKLRKSSHLKKLNRYSDGLLRFGFSQDSGHGKSSSKMGKSEDFFYIKVSQKARGSHHPDYTALSSGDLGGQAGVDFDPSTPPKLMPFSNQLEMGSEKGAVRPTAFKPVLPRSGAILHSSPESASHQLHPAPPDKPKEQELKPGLCSGALSDSGRNSMSSLPTHSTSSSYQLDPLVTPVGPTSRFGGSAHNITQGIVLQDSNMMSLKALSFSDGGSKLGHSNKADKGPSCVRSPISTDECSIQELEQKLLEREGALQKLQRSFEEKELASSLAYEERPRRCRDELEGPEPKGGNKLKQASQKSQRAQQVLHLQVLQLQQEKRQLRQELESLMKEQDLLETKLRSYEREKTSFGPALEETQWEVCQKSGEISLLKQQLKESQTEVNAKASEILGLKAQLKDTRGKLEGLELRTQDLEGALRTKGLELEVCENELQRKKNEAELLREKVNLLERLRAELREERQGHDQMSSGFQHERLVWKEEKEKVIQYQKQLQQSYVAMYQRNQRLEKALQQLARGDSAGEPLEVDLEGADIPYEDIIATEI

SEQ ID NO: 21761 - protein, 537 aa, Homo sapiens
MGSVSSLISGHSFHSKHCRASQYKLRKSSHLKKLNRYSDGLLRFGFSQDSGHGKSSSKMGKSEDFFYIKVSQKARGSHHPDYTALSSGDLGGQAGVDFDPSTPPKLMPFSNQLEMGSEKGAVRPTAFKPVLPRSGAILHSSPESASHQLHPAPPDKPKEQELKPGLCSGALSDSGRNSMSSLPTHSTSSSYQLDPLVTPVGPTSRFGGSAHNITQGIVLQDSNMMSLKALSFSDGGSKLGHSNKADKGPSCVRSPISTDECSIQELEQKLLEREGALQKLQRSFEEKELASSLAYEERPRRCRDELEGPEPKGGNKLKQASQKSQRAQQVLHLQVLQLQQEKRQLRQELESLMKEQDLLETKLRSYEREKTSFGPALEETQWEVCQKSGEISLLKQQLKESQTEVNAKASEILGLKAQLKDTRGKLEGLELRTQDLEGALRTKGLELEVCENELQRKKNEAELLREKHERLVWKEEKEKVIQYQKQLQQSYVAMYQRNQRLEKALQQLARGDSAGEPLEVDLEGADIPYEDIIATEI

SEQ ID NO: 21762 - protein, 504 aa, Homo sapiens
MGSVSSLISGHSFHSKHCRASQYKLRKSSHLKKLNRYSDGLLRFGFSQDSGHGKSSSKMGKSEDFFYIKVSQKARGSHHPDYTALSSGDLGGQAGVDFDPSTPPKLMPFSNQLEMGSEKGAVRPTAFKPVLPRSGAILHSSPESASHQLHPAPPDKPKEQELKPGLCSGALSDSGRNSMSSLPTHSTSSSYQLDPLVTPVGPTSRFGGSAHNITQGIVLQDSNMMSLKALSFSDGGSKLGHSNKADKGPSCVRSPISTDECSIQELEQKLLEREGALQKLQRSFEEKELASSLAYEERPRRCRDELEGPEPKGGNKLKQASQKSQRAQQVLHLQVLQLQQEKRQLRQELESLMKEQDLLETKLRSYEREKTSFGPALEETQWEVCQKSGEISLLKQQLKESQTEVNAKASEILGLKAQLKDTRGKLEGLELRTQDLEGALRTKGLELEVCENELQQSYVAMYQRNQRLEKALQQLARGDSAGEPLEVDLEGADIPYEDIIATEI

SEQ ID NO: 21763 - protein, 210 aa, Homo sapiens
MGSVSSLISGHSFHSKHCRASQYKLRKSSHLKKLNRYSDGLLRFGFSQDSGHGKSSSKMGKSEDFFYIKVSQKARGSHHPDYTALSSGDLGGQAGVDFDPSTPPKLMPFSNQLEMGSEKGAVRPTAFKPVLPRSGAILHSSPESASHQLHPAPPDKPKEQELKPGLCSGALSDSGRNSMSSLPTHSAGEPLEVDLEGADIPYEDIIATEI

SEQ ID NO: 21764 - protein, 76 aa, Homo sapiens
MGSVSSLISGHSFHSKHCRASQYKLRKSSHLKKLNRYSDGLLRFGFSQDSGHGKAMTRCPRASSMSGSCGRRRRRR

SEQ ID NO: 21765 - protein, 118 aa, Homo sapiens
MPREDAHFIYGYPKKGHGHSYTTAEEAAGIGILTVILGVLLLIGCWYCRRRNGYRALMDKSLHVGTQCALTRRCPQEGFDHRDSKVSLQEKNCEPVVPNAPPAYEKLSAEQSPPPYSP

SEQ ID NO: 21766 - protein, 979 aa, Homo sapiens
MSVLGEYERHCDSINSDFGSESGGCGDSSPGPSASQGPRAGGGAAEQEELHYIPIRVLGRGAFGEATLYRRTEDDSLVVWKEVDLTRLSEKERRDALNEIVILALLQHDNIIAYYNHFMDNTTLLIELEYCNGGNLYDKILRQKDKLFEEEMVVWYLFQIVSAVSCIHKAGILHRDIKTLNIFLTKANLIKLGDYGLAKKLNSEYSMAETLVGTPYYMSPELCQGVKYNFKSDIWAVGCVIFELLTLKRTFDATNPLNLCVKIVQGIRAMEVDSSQYSLELIQMVHSCLDQDPEQRPTADELLDRPLLRKRRREMEEKVTLLNAPTKRPRSSTVTEAPIAVVTSRTSEVYVWGGGKSTPQKLDVIKSGCSARQVCAGNTHFAVVTVEKELYTWVNMQGGTKLHGQLGHGDKASYRQPKHVEKLQGKAIRQVSCGDDFTVCVTDEGQLYAFGSDYYGCMGVDKVAGPEVLEPMQLNFFLSNPVEQVSCGDNHVVVLTRNKEVYSWGCGEYGRLGLDSEEDYYTPQKVDVPKALIIVAVQCGCDGTFLLTQSGKVLACGLNEFNKLGLNQCMSGIINHEAYHEVPYTTSFTLAKQLSFYKIRTIAPGKTHTAAIDERGRLLTFGCNKCGQLGVGNYKKRLGINLLGGPLGGKQVIRVSCGDEFTIAATDDNHIFAWGNGGNGRLAMTPTERPHGSDICTSWPRPIFGSLHHVPDLSCRGWHTILIVEKVLNSKTIRSNSSGLSIGTVFQSSSPGGGGGGGGGEEEDSQQESETPDPSGGFRGTMEADRGMEGLISPTEAMGNSNGASSSCPGWLRKELENAEFIPMPDSPSPLSAAFSESEKDTLPYEELQGLKVASEAPLEHKPQVEASSPRLNPAVTCAGKGTPLTPPACACSSLQVEVERLQGLVLKCLAEQQKLQQENLQIFTQLQKLNKKLEGGQQVGMHSKGTQTAKEEMEMDPKPDLDSDSWCLLGTDSCRPSL

SEQ ID NO: 21767 - protein, 840 aa, Homo sapiens
MAGPGSTGGQIGAAALAGGARSKVAPSVDFDHSCSDSVEYLTLNFGPFETVHRWRRLPPCDEFVGARRSKHTVVAYKDAIYVFGGDNGKTMLNDLLRFDVKDCSWCRAFTTGTPPAPRYHHSAVVYGSSMFVFGGYTGDIYSNSNLKNKNDLFEYKFATGQWTEWKIEGRLPVARSAHGATVYSDKLWIFAGYDGNARLNDMWTIGLQDRELTCWEEVAQSGEIPPSCCNFPVAVCRDKMFVFSGQSGAKITNNLFQFEFKDKTWTRIPTEHLLRGSPPPPQRRYGHTMVAFDRHLYVFGGAADNTLPNELHCYDVDFQTWEVVQPSSDSEVGGAEVPERACASEEVPTLTYEERVGFKKSRDVFGLDFGTTSAKQPTQPASELPSGRLFHAAAVISDAMYIFGGTVDNNIRSGEMYRFQFSCYPKCTLHEDYGRLWESRQFCDVEFVLGEKEECVQGHVAIVTARSRWLRRKITQARERLAQKLEQEAAPVPREAPGVAAGGARPPLLHVAIREAEARPFEVLMQFLYTDKIKYPRKGHVEDVLLIMDVYKLALSFQLCRLEQLCRQYIEASVDLQNVLVVCESAARLQLSQLKEHCLNFVVKESHFNQVIMMKEFERLSSPLIVEIVRRKQQPPPRTPLDQPVDIGTSLIQDMKAYLEGAGAEFCDITLLLDGHPRPAHKAILAARSSYFEAMFRSFMPEDGQVNISIGEMVPSRQAFESMLRYIYYGEVNMPPEDSLYLFAAPYYYGFYNNRLQAYCKQNLEMNVTVQNVLQILEAADKTQALDMKRHCLHIIVHQFTKVSKLPTLRSLSQQLLLDIIDSLASHISDKQCAELGADI

SEQ ID NO: 21768 - protein, 58 aa, Homo sapiens
MKSVISYALYQVQTGSLPVYSSVLTKSPLQLQTVIYRLIVQIQHLNIPSSSSTHSSPF

SEQ ID NO: 21769 - protein, 238 aa, Homo sapiens
MLCCMRRTKQVEKNDDDQKIEQDGIKPEDKAHKAATKIQASFRGHITRKKLKGEKKDDVQAAEAEANKKDEAPVADGVEKKGEGTTTAEAAPATGSKPDEPGKAGETPSEEKKGEGDAATEQAAPQAPASSEEKAGSAETESATKASTDNSPSSKAEDAPAKEEPKQADVPAAVTAAAATTPAAEDAAAKATAQPPTETGESSQAEENIEAVDETKPKESARQDEGKEEEPEADQEHA

SEQ ID NO: 21770 - protein, 274 aa, Homo sapiens
MTKSCSELCHPALHFLPCLGGLRKNLQRAVRPSPYSLGFLTFWISRVEKNDDDQKIEQDGIKPEDKAHKAATKIQASFRGHITRKKLKGEKKDDVQAAEAEANKKDEAPVADGVEKKGEGTTTAEAAPATGSKPDEPGKAGETPSEEKKGEGDAATEQAAPQAPASSEEKAGSAETESATKASTDNSPSSKAEDAPAKEEPKQADVPAAVTAAAATTPAAEDAAAKATAQPPTETGESSQAEENIEAVDETKPKESARQDEGKEEEPEADQEHA

SEQ ID NO: 21771 - protein, 117 aa, Homo sapiens
MAWSPLFLTLITHCAGSWAQSVLTQPPSVSEAPRQRVTISCSGSSSNIGNNAVNWYQQLPGKAPKLLIYYDDLLPSGVSDRFSGSKSGTSASLAISGLQSEDEADYYCAAWDDSLNG

SEQ ID NO: 21772 - protein, 115 aa, Homo sapiens
MAWTPLLLPLLTFCTVSEASYELTQPPSVSVSPGQTARITCSGDALPKKYAYWYQQKSGQAPVLVIYEDSKRPSGIPERFSGSSSGTMATLTISGAQVEDEADYYCYSTDSSGNH

SEQ ID NO: 21773 - protein, 119 aa, Homo sapiens
MAWALLLLSLLTQGTGSWAQSALTQPRSVSGSPGQSVTISCTGTSSDVGGYNYVSWYQQHPGKAPKLMIYDVSKRPSGVPDRFSGSKSGNTASLTISGLQAEDEADYYCCSYAGSYTFH

SEQ ID NO: 21774 - protein, 246 aa, Homo sapiens
MTTGDCCHLPGSLCDCSGSPAFSKVVEATGLGPPQYVAQVTSRDGRLLSTVIRALDTPSDGPFCRICHEGANGECLLSPCGCTGTLGAVHKSCLEKWLSSSNTSYCELCHTEFAVEKRPRPLTEWLKDPGPRTEKRTLCCDMVCFLFITPLAAISGWLCLRGAQDHLRLHSQLEAVGLIALTIALFTIYVLWTLVSFRYHCQLYSEWRKTNQKVRLKIREADSPEGPQHSPLAAGLLKKVAEETPV

SEQ ID NO: 21775 - protein, 176 aa, Homo sapiens
MTTGDCCHLPGSLCDCSGSPAFSKVVEATGLGPPQYVAQVTSRDGRLLSTVIRALDTPSDGPFCRICHEGANGECLLSPCGCTGTLGAVHKSCLEKWLSSSNTSYCELCHTEFAVEKRPRPLTEVSFRYHCQLYSEWRKTNQKVRLKIREADSPEGPQHSPLAAGLLKKVAEETPV

SEQ ID NO: 21776 - protein, 112 aa, Homo sapiens
MAWIPLLLPLLTLCTGSEASYELTQPPSVSVSPGQTARITCSGDALPKQYAYWYQQKPGQAPVLVIYKDSERPSGIPERFSGSSSGTTVTLTISGVQAEDEADYYCQSADSS

SEQ ID NO: 21777 - protein, 115 aa, Homo sapiens
MAWTPLLLSLLAHCTGSATSYELTQPHSVSVATAQMARITCGGNNIGSKAVHWYQQKPGQDPVLVIYSDSNRPSGIPERFSGSNPGNTATLTISRIEAGDEADYYCQVWDSSSDH

SEQ ID NO: 21778 - protein, 112 aa, Homo sapiens
MAWTPLWLTLLTLCIGSVVSSELTQDPAVSVALGQTVRITCQGDSLRSYYASWYQQKPGQAPVLVIYGKNNRPSGIPDRFSGSSSGNTASLTITGAQAEDEADYYCNSRDSS

SEQ ID NO: 21779 - protein, 99 aa, Homo sapiens
MTSALTQGLERIPDQLGYLVLSEGAVLASSGDLENDEQAASAISELVSTACGFRLHRGMNVPFKRLSVVFGEHTLLVTVSGQRVFVVKRQNRGREPIDV

SEQ ID NO: 21780 - protein, 2623 aa, Homo sapiens
MGEKVSEAPEPVPRGCSGHGSRTPASALVAASSPGASSAESSSGSETLSEEGEPGGFSREHQPPPPPPLGGTLGARAPAAWAPASVLLERGVLALPPPLPGGAVPPAPRGSSASQEEQDEELDHILSPPPMPFRKCSNPDVASGPGKSLKYKRQLSEDGRQLRRGSLGGALTGRYLLPNPVAGQAWPASAETSNLVRMRSQALGQSAPSLTASLKELSLPRRGSFCRTSNRKSLIGNGQSPALPRPHSPLSAHAGNSPQDSPRNFSPSASAHFSFARRTDGRRWSLASLPSSGYGTNTPSSTVSSSCSSQEKLHQLPYQPTPDELHFLSKHFCTTESIATENRCRNTPMRPRSRSLSPGRSPACCDHEIIMMNHVYKERFPKATAQMEERLKEIITSYSPDNVLPLADGVLSFTHHQIIELARDCLDKSHQGLITSRYFLELQHKLDKLLQEAHDRSESGELAFIKQLVRKILIVIARPARLLECLEFDPEEFYYLLEAAEGHAKEGQGIKTDIPRYIISQLGLNKDPLEEMAHLGNYDSGTAETPETDESVSSSNASLKLRRKPRESDFETIKLISNGAYGAVYFVRHKESRQRFAMKKINKQNLILRNQIQQAFVERDILTFAENPFVVSMYCSFETRRHLCMVMEYVEGGDCATLMKNMGPLPVDMARMYFAETVLALEYLHNYGIVHRDLKPDNLLVTSMGHIKLTDFGLSKVGLMSMTTNLYEGHIEKDAREFLDKQVCGTPEYIAPEVILRQGYGKPVDWWAMGIILYEFLVGCVPFFGDTPEELFGQVISDEINWPEKDEAPPPDAQDLITLLLRQNPLERLGTGGAYEVKQHRFFRSLDWNSLLRQKAEFIPQLESEDDTSYFDTRSEKYHHMETEEEDDTNDEDFNVEIRQFSSCSHRFSKVFSSIDRITQNSAEEKEDSVDKTKSTTLPSTETLSWSSEYSEMQQLSTSNSSDTESNRHKLSSGLLPKLAISTEGEQDEAASCPGDPHEEPGKPALPPEECAQEEPEVTTPASTISSSTLSVGSFSEHLDQINGRSECVDSTDNSSKPSSEPASHMARQRLESTEKKKISGKVTKSLSASALSLMIPGDMFAVSPLGSPMSPHSLSSDPSSSRDSSPSRDSSAASASPHQPIVIHSSGKNYGFTIRAIRVYVGDSDIYTVHHIVWNVEEGSPACQAGLKAGDLITHINGEPVHGLVHTEVIELLLKSGNKVSITTTPFENTSIKTGPARRNSYKSRMVRRSKKSKKKESLERRRSLFKKLAKQPSPLLHTSRSFSCLNRSLSSGESLPGSPTHSLSPRSPTPSYRSTPDFPSGTNSSQSSSPSSSAPNSPAGSGHIRPSTLHGLAPKLGGQRYRSGRRKSAGNIPLSPLARTPSPTPQPTSPQRSPSPLLGHSLGNSKIAQAFPSKMHSPPTIVRHIVRPKSAEPPRSPLLKRVQSEEKLSPSYGSDKKHLCSRKHSLEVTQEEVQREQSQREAPLQSLDENVCDVPPLSRARPVEQGCLKRPVSRKVGRQESVDDLDRDKLKAKVVVKKADGFPEKQESHQKSHGPGSDLENFALFKLEEREKKVYPKAVERSSTFENKASMQEAPPLGSLLKDALHKQASVRASEGAMSDGRVPAEHRQGGGDFRRAPAPGTLQDGLCHSLDRGISGKGEGTEKSSQAKELLRCEKLDSKLANIDYLRKKMSLEDKEDNLCPVLKPKMTAGSHECLPGNPVRPTGGQQEPPPASESRAFVSSTHAAQMSAVSFVPLKALTGRVDSGTEKPGLVAPESPVRKSPSEYKLEGRSVSCLKPIEGTLDIALLSGPQASKTELPSPESAQSPSPSGDVRASVPPVLPSSSGKKNDTTSARELSPSSLKMNKSYLLEPWFLPPSRGLQNSPAVSLPDPEFKRDRKGPHPTARSPGTVMESNPQQREGSSPKHQDHTTDPKLLTCLGQNLHSPDLARPRCPLPPEASPSREKPGLRESSERGPPTARSERSAARADTCREPSMELCFPETAKTSDNSKNLLSVGRTHPDFYTQTQAMEKAWAPGGKTNHKDGPGEARPPPRDNSSLHSAGIPCEKELGKVRRGVEPKPEALLARRSLQPPGIESEKSEKLSSFPSLQKDGAKEPERKEQPLQRHPSSIPPPPLTAKDLSSPAARQHCSSPSHASGREPGAKPSTAEPSSSPQDPPKPVAAHSESSSHKPRPGPDPGPPKTKHPDRSLSSQKPSVGATKGKEPATQSLGGSSREGKGHSKSGPDVFPATPGSQNKASDGIGQGEGGPSVPLHTDRAPLDAKPQPTSGGRPLEVLEKPVHLPRPGHPGPSEPADQKLSAVGEKQTLSPKHPKPSTVKDCPTLCKQTDNRQTDKSPSQPAANTDRRAEGKKCTEALYAPAEGDKLEAGLSFVHSENRLKGAERPAAGVGKGFPEARGKGPGPQKPPTEADKPNGMKRSPSATGQSSFRSTALPEKSLSCSSSFPETRAGVREASAASSDTSSAKAAGGMLELPAPSNRDHRKAQPAGEGRTHMTKSDSLPSFRVSTLPLESHHPDPNTMGGASHRDRALSVTATVGETKGKDPAPAQPPPARKQNVGRDVTKPSPAPNTDRPISLSNEKDFVVRQRRGKESLRSSPHKKAL

SEQ ID NO: 21781 - protein, 2429 aa, Homo sapiens
MDMSDPNFWTVLSNFTLPHLRSGNRLRRTQSCRTSNRKSLIGNGQSPALPRPHSPLSAHAGNSPQDSPRNFSPSASAHFSFARRTDGRRWSLASLPSSGYGTNTPSSTVSSSCSSQEKLHQLPYQPTPDELHFLSKHFCTTESIATENRCRNTPMRPRSRSLSPGRSPACCDHEIIMMNHVYKERFPKATAQMEERLKEIITSYSPDNVLPLADGVLSFTHHQIIELARDCLDKSHQGLITSRYFLELQHKLDKLLQEAHDRSESGELAFIKQLVRKILIVIARPARLLECLEFDPEEFYYLLEAAEGHAKEGQGIKTDIPRYIISQLGLNKDPLEEMAHLGNYDSGTAETPETDESVSSSNASLKLRRKPRESDFETIKLISNGAYGAVYFVRHKESRQRFAMKKINKQNLILRNQIQQAFVERDILTFAENPFVVSMYCSFETRRHLCMVMEYVEGGDCATLMKNMGPLPVDMARMYFAETVLALEYLHNYGIVHRDLKPDNLLVTSMGHIKLTDFGLSKVGLMSMTTNLYEGHIEKDAREFLDKQVCGTPEYIAPEVILRQGYGKPVDWWAMGIILYEFLVGCVPFFGDTPEELFGQVISDEINWPEKDEAPPPDAQDLITLLLRQNPLERLGTGGAYEVKQHRFFRSLDWNSLLRQKAEFIPQLESEDDTSYFDTRSEKYHHMETEEEDDTNDEDFNVEIRQFSSCSHRFSKVFSSIDRITQNSAEEKEDSVDKTKSTTLPSTETLSWSSEYSEMQQLSTSNSSDTESNRHKLSSGLLPKLAISTEGEQDEAASCPGDPHEEPGKPALPPEECAQEEPEVTTPASTISSSTLSVGSFSEHLDQINGRSECVDSTDNSSKPSSEPASHMARQRLESTEKKKISGKVTKSLSASALSLMIPGDMFAVSPLGSPMSPHSLSSDPSSSRDSSPSRDSSAASASPHQPIVIHSSGKNYGFTIRAIRVYVGDSDIYTVHHIVWNVEEGSPACQAGLKAGDLITHINGEPVHGLVHTEVIELLLKSGNKVSITTTPFENTSIKTGPARRNSYKSRMVRRSKKSKKKESLERRRSLFKKLAKQPSPLLHTSRSFSCLNRSLSSGESLPGSPTHSLSPRSPTPSYRSTPDFPSGTNSSQSSSPSSSAPNSPAGSGHIRPSTLHGLAPKLGGQRYRSGRRKSAGNIPLSPLARTPSPTPQPTSPQRSPSPLLGHSLGNSKIAQAFPSKMHSPPTIVRHIVRPKSAEPPRSPLLKRVQSEEKLSPSYGSDKKHLCSRKHSLEVTQEEVQREQSQREAPLQSLDENVCDVPPLSRARPVEQGCLKRPVSRKVGRQESVDDLDRDKLKAKVVVKKADGFPEKQESHQKSHGPGSDLENFALFKLEEREKKVYPKAVERSSTFENKASMQEAPPLGSLLKDALHKQASVRASEGAMSDGRVPAEHRQGGGDFRRAPAPGTLQDGLCHSLDRGISGKGEGTEKSSQAKELLRCEKLDSKLANIDYLRKKMSLEDKEDNLCPVLKPKMTAGSHECLPGNPVRPTGGQQEPPPASESRAFVSSTHAAQMSAVSFVPLKALTGRVDSGTEKPGLVAPESPVRKSPSEYKLEGRSVSCLKPIEGTLDIALLSGPQASKTELPSPESAQSPSPSGDVRASVPPVLPSSSGKKNDTTSARELSPSSLKMNKSYLLEPWFLPPSRGLQNSPAVSLPDPEFKRDRKGPHPTARSPGTVMESNPQQREGSSPKHQDHTTDPKLLTCLGQNLHSPDLARPRCPLPPEASPSREKPGLRESSERGPPTARSERSAARADTCREPSMELCFPETAKTSDNSKNLLSVGRTHPDFYTQTQAMEKAWAPGGKTNHKDGPGEARPPPRDNSSLHSAGIPCEKELGKVRRGVEPKPEALLARRSLQPPGIESEKSEKLSSFPSLQKDGAKEPERKEQPLQRHPSSIPPPPLTAKDLSSPAARQHCSSPSHASGREPGAKPSTAEPSSSPQDPPKPVAAHSESSSHKPRPGPDPGPPKTKHPDRSLSSQKPSVGATKGKEPATQSLGGSSREGKGHSKSGPDVFPATPGSQNKASDGIGQGEGGPSVPLHTDRAPLDAKPQPTSGGRPLEVLEKPVHLPRPGHPGPSEPADQKLSAVGEKQTLSPKHPKPSTVKDCPTLCKQTDNRQTDKSPSQPAANTDRRAEGKKCTEALYAPAEGDKLEAGLSFVHSENRLKGAERPAAGVGKGFPEARGKGPGPQKPPTEADKPNGMKRSPSATGQSSFRSTALPEKSLSCSSSFPETRAGVREASAASSDTSSAKAAGGMLELPAPSNRDHRKAQPAGEGRTHMTKSDSLPSFRVSTLPLESHHPDPNTMGGASHRDRALSVTATVGETKGKDPAPAQPPPARKQNVGRDVTKPSPAPNTDRPISLSNEKDFVVRQRRGKESLRSSPHKKAL

SEQ ID NO: 21782 - protein, 250 aa, Homo sapiens
MGEKVSEAPEPVPRGCSGHGSRTPASALVAASSPGASSAESSSGSETLSEEGEPGGFSREHQPPPPPPLGGTLGARAPAAWAPASVLLERGVLALPPPLPGGAVPPAPRGSSASQEEQDEELDHILSPPPMPFRKCSNPDVASGPGKSLKYKRQLSEDGRQLRRGSLGGALTGRYLLPNPVAGQAWPASAETSNLVRMRSQALGQSAPSLTASLKELSLPRRGSLIDSQKWNCLVKRPVCPNAGRTSPLG

SEQ ID NO: 21783 - protein, 2434 aa, Homo sapiens
MDESSILRRRGLQKELSLPRRGSLIDSQKWNCLVKRCRTSNRKSLIGNGQSPALPRPHSPLSAHAGNSPQDSPRNFSPSASAHFSFARRTDGRRWSLASLPSSGYGTNTPSSTVSSSCSSQEKLHQLPYQPTPDELHFLSKHFCTTESIATENRCRNTPMRPRSRSLSPGRSPACCDHEIIMMNHVYKERFPKATAQMEERLKEIITSYSPDNVLPLADGVLSFTHHQIIELARDCLDKSHQGLITSRYFLELQHKLDKLLQEAHDRSESGELAFIKQLVRKILIVIARPARLLECLEFDPEEFYYLLEAAEGHAKEGQGIKTDIPRYIISQLGLNKDPLEEMAHLGNYDSGTAETPETDESVSSSNASLKLRRKPRESDFETIKLISNGAYGAVYFVRHKESRQRFAMKKINKQNLILRNQIQQAFVERDILTFAENPFVVSMYCSFETRRHLCMVMEYVEGGDCATLMKNMGPLPVDMARMYFAETVLALEYLHNYGIVHRDLKPDNLLVTSMGHIKLTDFGLSKVGLMSMTTNLYEGHIEKDAREFLDKQVCGTPEYIAPEVILRQGYGKPVDWWAMGIILYEFLVGCVPFFGDTPEELFGQVISDEINWPEKDEAPPPDAQDLITLLLRQNPLERLGTGGAYEVKQHRFFRSLDWNSLLRQKAEFIPQLESEDDTSYFDTRSEKYHHMETEEEDDTNDEDFNVEIRQFSSCSHRFSKVFSSIDRITQNSAEEKEDSVDKTKSTTLPSTETLSWSSEYSEMQQLSTSNSSDTESNRHKLSSGLLPKLAISTEGEQDEAASCPGDPHEEPGKPALPPEECAQEEPEVTTPASTISSSTLSVGSFSEHLDQINGRSECVDSTDNSSKPSSEPASHMARQRLESTEKKKISGKVTKSLSASALSLMIPGDMFAVSPLGSPMSPHSLSSDPSSSRDSSPSRDSSAASASPHQPIVIHSSGKNYGFTIRAIRVYVGDSDIYTVHHIVWNVEEGSPACQAGLKAGDLITHINGEPVHGLVHTEVIELLLKSGNKVSITTTPFENTSIKTGPARRNSYKSRMVRRSKKSKKKESLERRRSLFKKLAKQPSPLLHTSRSFSCLNRSLSSGESLPGSPTHSLSPRSPTPSYRSTPDFPSGTNSSQSSSPSSSAPNSPAGSGHIRPSTLHGLAPKLGGQRYRSGRRKSAGNIPLSPLARTPSPTPQPTSPQRSPSPLLGHSLGNSKIAQAFPSKMHSPPTIVRHIVRPKSAEPPRSPLLKRVQSEEKLSPSYGSDKKHLCSRKHSLEVTQEEVQREQSQREAPLQSLDENVCDVPPLSRARPVEQGCLKRPVSRKVGRQESVDDLDRDKLKAKVVVKKADGFPEKQESHQKSHGPGSDLENFALFKLEEREKKVYPKAVERSSTFENKASMQEAPPLGSLLKDALHKQASVRASEGAMSDGRVPAEHRQGGGDFRRAPAPGTLQDGLCHSLDRGISGKGEGTEKSSQAKELLRCEKLDSKLANIDYLRKKMSLEDKEDNLCPVLKPKMTAGSHECLPGNPVRPTGGQQEPPPASESRAFVSSTHAAQMSAVSFVPLKALTGRVDSGTEKPGLVAPESPVRKSPSEYKLEGRSVSCLKPIEGTLDIALLSGPQASKTELPSPESAQSPSPSGDVRASVPPVLPSSSGKKNDTTSARELSPSSLKMNKSYLLEPWFLPPSRGLQNSPAVSLPDPEFKRDRKGPHPTARSPGTVMESNPQQREGSSPKHQDHTTDPKLLTCLGQNLHSPDLARPRCPLPPEASPSREKPGLRESSERGPPTARSERSAARADTCREPSMELCFPETAKTSDNSKNLLSVGRTHPDFYTQTQAMEKAWAPGGKTNHKDGPGEARPPPRDNSSLHSAGIPCEKELGKVRRGVEPKPEALLARRSLQPPGIESEKSEKLSSFPSLQKDGAKEPERKEQPLQRHPSSIPPPPLTAKDLSSPAARQHCSSPSHASGREPGAKPSTAEPSSSPQDPPKPVAAHSESSSHKPRPGPDPGPPKTKHPDRSLSSQKPSVGATKGKEPATQSLGGSSREGKGHSKSGPDVFPATPGSQNKASDGIGQGEGGPSVPLHTDRAPLDAKPQPTSGGRPLEVLEKPVHLPRPGHPGPSEPADQKLSAVGEKQTLSPKHPKPSTVKDCPTLCKQTDNRQTDKSPSQPAANTDRRAEGKKCTEALYAPAEGDKLEAGLSFVHSENRLKGAERPAAGVGKGFPEARGKGPGPQKPPTEADKPNGMKRSPSATGQSSFRSTALPEKSLSCSSSFPETRAGVREASAASSDTSSAKAAGGMLELPAPSNRDHRKAQPAGEGRTHMTKSDSLPSFRVSTLPLESHHPDPNTMGGASHRDRALSVTATVGETKGKDPAPAQPPPARKQNVGRDVTKPSPAPNTDRPISLSNEKDFVVRQRRGKESLRSSPHKKAL

SEQ ID NO: 21784 - protein, 2444 aa, Homo sapiens
MKAQRERLQIPGLTLDLTPRSLSPTPSSPGSPCSPLLAFHFWSCRTSNRKSLIGNGQSPALPRPHSPLSAHAGNSPQDSPRNFSPSASAHFSFARRNDRTDGRRWSLASLPSSGYGTNTPSSTVSSSCSSQEKLHQLPYQPTPDELHFLSKHFCTTESIATENRCRNTPMRPRSRSLSPGRSPACCDHEIIMMNHVYKERFPKATAQMEERLKEIITSYSPDNVLPLADGVLSFTHHQIIELARDCLDKSHQGLITSRYFLELQHKLDKLLQEAHDRSESGELAFIKQLVRKILIVIARPARLLECLEFDPEEFYYLLEAAEGHAKEGQGIKTDIPRYIISQLGLNKDPLEEMAHLGNYDSGTAETPETDESVSSSNASLKLRRKPRESDFETIKLISNGAYGAVYFVRHKESRQRFAMKKINKQNLILRNQIQQAFVERDILTFAENPFVVSMYCSFETRRHLCMVMEYVEGGDCATLMKNMGPLPVDMARMYFAETVLALEYLHNYGIVHRDLKPDNLLVTSMGHIKLTDFGLSKVGLMSMTTNLYEGHIEKDAREFLDKQVCGTPEYIAPEVILRQGYGKPVDWWAMGIILYEFLVGCVPFFGDTPEELFGQVISDEINWPEKDEAPPPDAQDLITLLLRQNPLERLGTGGAYEVKQHRFFRSLDWNSLLRQKAEFIPQLESEDDTSYFDTRSEKYHHMETEEEDDTNDEDFNVEIRQFSSCSHRFSKVFSSIDRITQNSAEEKEDSVDKTKSTTLPSTETLSWSSEYSEMQQLSTSNSSDTESNRHKLSSGLLPKLAISTEGEQDEAASCPGDPHEEPGKPALPPEECAQEEPEVTTPASTISSSTLSVGSFSEHLDQINGRSECVDSTDNSSKPSSEPASHMARQRLESTEKKKISGKVTKSLSASALSLMIPGDMFAVSPLGSPMSPHSLSSDPSSSRDSSPSRDSSAASASPHQPIVIHSSGKNYGFTIRAIRVYVGDSDIYTVHHIVWNVEEGSPACQAGLKAGDLITHINGEPVHGLVHTEVIELLLKSGNKVSITTTPFENTSIKTGPARRNSYKSRMVRRSKKSKKKESLERRRSLFKKLAKQPSPLLHTSRSFSCLNRSLSSGESLPGSPTHSLSPRSPTPSYRSTPDFPSGTNSSQSSSPSSSAPNSPAGSGHIRPSTLHGLAPKLGGQRYRSGRRKSAGNIPLSPLARTPSPTPQPTSPQRSPSPLLGHSLGNSKIAQAFPSKMHSPPTIVRHIVRPKSAEPPRSPLLKRVQSEEKLSPSYGSDKKHLCSRKHSLEVTQEEVQREQSQREAPLQSLDENVCDVPPLSRARPVEQGCLKRPVSRKVGRQESVDDLDRDKLKAKVVVKKADGFPEKQESHQKSHGPGSDLENFALFKLEEREKKVYPKAVERSSTFENKASMQEAPPLGSLLKDALHKQASVRASEGAMSDGRVPAEHRQGGGDFRRAPAPGTLQDGLCHSLDRGISGKGEGTEKSSQAKELLRCEKLDSKLANIDYLRKKMSLEDKEDNLCPVLKPKMTAGSHECLPGNPVRPTGGQQEPPPASESRAFVSSTHAAQMSAVSFVPLKALTGRVDSGTEKPGLVAPESPVRKSPSEYKLEGRSVSCLKPIEGTLDIALLSGPQASKTELPSPESAQSPSPSGDVRASVPPVLPSSSGKKNDTTSARELSPSSLKMNKSYLLEPWFLPPSRGLQNSPAVSLPDPEFKRDRKGPHPTARSPGTVMESNPQQREGSSPKHQDHTTDPKLLTCLGQNLHSPDLARPRCPLPPEASPSREKPGLRESSERGPPTARSERSAARADTCREPSMELCFPETAKTSDNSKNLLSVGRTHPDFYTQTQAMEKAWAPGGKTNHKDGPGEARPPPRDNSSLHSAGIPCEKELGKVRRGVEPKPEALLARRSLQPPGIESEKSEKLSSFPSLQKDGAKEPERKEQPLQRHPSSIPPPPLTAKDLSSPAARQHCSSPSHASGREPGAKPSTAEPSSSPQDPPKPVAAHSESSSHKPRPGPDPGPPKTKHPDRSLSSQKPSVGATKGKEPATQSLGGSSREGKGHSKSGPDVFPATPGSQNKASDGIGQGEGGPSVPLHTDRAPLDAKPQPTSGGRPLEVLEKPVHLPRPGHPGPSEPADQKLSAVGEKQTLSPKHPKPSTVKDCPTLCKQTDNRQTDKSPSQPAANTDRRAEGKKCTEALYAPAEGDKLEAGLSFVHSENRLKGAERPAAGVGKGFPEARGKGPGPQKPPTEADKPNGMKRSPSATGQSSFRSTALPEKSLSCSSSFPETRAGVREASAASSDTSSAKAAGGMLELPAPSNRDHRKAQPAGEGRTHMTKSDSLPSFRVSTLPLESHHPDPNTMGGASHRDRALSVTATVGETKGKDPAPAQPPPARKQNVGRDVTKPSPAPNTDRPISLSNEKDFVVRQRRGKESLRSSPHKKAL

SEQ ID NO: 21785 - protein, 1857 aa, Homo sapiens
MARKKLKKFTTLEIVLSVLLLVLFIISIVLIVLLAKESLKSTAPDPGTTGTPDPGTTGTPDPGTTGTTHARTTGPPDPGTTGTTPVSAECPVVNELERINCIPDQPPTKATCDQRGCCWNPQGAVSVPWCYYSKNHSYHVEGNLVNTNAGFTARLKNLPSSPVFGSNVDNVLLTAEYQTSNRFHFKLTDQTNNRFEVPHEHVQSFSGNAAASLTYQVEISRQPFSIKVTRRSNNRVLFDSSIGPLLFADQFLQLSTRLPSTNVYGLGEHVHQQYRHDMNWKTWPIFNRDTTPNGNGTNLYGAQTFFLCLEDASGLSFGVFLMNSNAMEVVLQPAPAITYRTIGGILDFYVFLGNTPEQVVQEYLELIGRPALPSYWALGFHLSRYEYGTLDNMREVVERNRAAQLPYDVQHADIDYMDERRDFTYDSVDFKGFPEFVNELHNNGQKLVIIVDPAISNNSSSSKPYGPYDRGSDMKIWVNSSDGVTPLIGEVWPGQTVFPDYTNPNCAVWWTKEFELFHNQVEFDGIWIDMNEVSNFVDGSVSGCSTNNLNNPPFTPRILDGYLFCKTLCMDAVQHWGKQYDIHNLYGYSMAVATAEAAKTVFPNKRSFILTRSTFAGSGKFAAHWLGDNTATWDDLRWSIPGVLEFNLFGIPMVGPDICGFALDTPEELCRRWMQLGAFYPFSRNHNGQGYKDQDPASFGADSLLLNSSRHYLNIRYTLLPYLYTLFFRAHSRGDTVARPLLHEFYEDNSTWDVHQQFLWGPGLLITPVLDEGAEKVMAYVPDAVWYDYETGSQVRWRKQKVEMELPGDKIGLHLRGGYIFPTQQPNTTTLASRKNPLGLIIALDENKEAKGELFWDNGETKDTVANKVYLLCEFSVTQNRLEVNISQSTYKDPNNLAFNEIKILGTEEPSNVTVKHNGVPSQTSPTVTYDSNLKVAIITDIDLLLGEAYTVEWSIKIRDEEKIDCYPDENGASAENCTARGCIWEASNSSGVPFCYFVNDLYSVSDVQYNSHGATADISLKSSVYANAFPSTPVNPLRLDVTYHKNEMLQFKIYDPNKNRYEVPVPLNIPSMPSSTPEGQLYDVLIKKNPFGIEIRRKSTGTIIWDSQLLGFTFSDMFIRISTRLPSKYLYGFGETEHRSYRRDLEWHTWGMFSRDQPPGYKKNSYGVHPYYMGLEEDGSAHGVLLLNSNAMDVTFQPLPALTYRTTGGVLDFYVFLGPTPELVTQQYTELIGRPVMVPYWSLGFQLCRYGYQNDSEIASLYDEMVAAQIPYDVQYSDIDYMERQLDFTLSPKFAGFPALINRMKADGMRVILILDPAISGNETQPYPAFTRGVEDDVFIKYPNDGDIVWGKVWPDFPDVVVNGSLDWDSQVELYRAYVAFPDFFRNSTAKWWKREIEELYNNPQNPERSLKFDGMWIDMNEPSSFVNGAVSPGCRDASLNHPPYMPHLESRDRGLSSKTLCMESQQILPDGSLVQHYNVHNLYGWSQTRPTYEAVQEVTGQRGVVITRSTFPSSGRWAGHWLGDNTAAWDQLKKSIIGMMEFSLFGISYTGADICGFFQDAEYEMCVRWMQLGAFYPFSRNHNTIGTRRQDPVSWDVAFVNISRTVLQTRYTLLPYLYTLMHKAHTEGVTVVRPLLHEFVSDQVTWDIDSQFLLGPAFLVSPVLERNARNVTAYFPRARWYDYYTGVDINARGEWKTLPAPLDHINLHVRGGYILPWQEPALNTHLSRQKFMGFKIALDDEGTAGGWLFWDDGQSIDTYGKGLYYLASFSASQNTMQSHIIFNNYITGTNPLKLGYIEIWGVGSVPVTSVSISVSGMVITPSFNNDPTTQVLSIDVTDRNISLHNFTSLTWISTL

SEQ ID NO: 21786 - protein, 757 aa, Homo sapiens
MSLLFSRCNSIVTVKKNKRHMAEVNASPLKHFVTAKKKINGIFEQLGAYIQESATFLEDTYRNAELDPVTTEEQVLDVKGYLSKVRGISEVLARRHMKVAFFGRTSNGKSTVINAMLWDKVLPSGIGHTTNCFLRVEGTDGHEAFLLTEGSEEKRSAKTVNQLAHALHQDKQLHAGSLVSVMWPNSKCPLLKDDLVLMDSPGIDVTTELDSWIDKFCLDADVFVLVANSESTLMQTEKHFFHKVSERLSRPNIFILNNRWDASASEPEYMEEVRRQHMERCTSFLVDELGVVDRSQAGDRIFFVSAKEVLNARIQKAQGMPEGGGALAEGFQVRMFEFQNFERRFEECISQSAVKTKFEQHTVRAKQIAEAVRLIMDSLHMAAREQQVYCEEMREERQDRLKFIDKQLELLAQDYKLRIKQITEEVERQVSTAMAEEIRRLSVLVDDYQMDFHPSPVVLKVYKNELHRHIEEGLGRNMSDRCSTAITNSLQTMQQDMIDGLKPLLPVSVRSQIDMLVPRQCFSLNYDLNCDKLCADFQEDIEFHFSLGWTMLVNRFLGPKNSRRALMGYNDQVQRPIPLTPANPSMPPLPQGSLTQEEFMVSMVTGLASLTSRTSMGILVVGGVVWKAVGWRLIALSFGLYGLLYVYERLTWTTKAKERAFKRQFVEHASEKLQLVISYTGSNCSHQVQQELSGTFAHLCQQVDVTRENLEQEIAAMNKKIEVLDSLQSKAKLLRNKAGWLDSELNMFTHQYLQPSR

SEQ ID NO: 21787 - protein, 436 aa, Homo sapiens
MHPHLSTLSLPRRRSMAFLSSWGALAEGFQVRMFEFQNFERRFEECISQSAVKTKFEQHTVRAKQIAEAVRLIMDSLHMAAREQQVYCEEMREERQDRLKFIDKQLELLAQDYKLRIKQITEEVERQVSTAMAEEIRRLSVLVDDYQMDFHPSPVVLKVYKNELHRHIEEGLGRNMSDRCSTAITNSLQTMQQDMIDGLKPLLPVSVRSQIDMLVPRQCFSLNYDLNCDKLCADFQEDIEFHFSLGWTMLVNRFLGPKNSRRALMGYNDQVQRPIPLTPANPSMPPLPQGSLTQEEFMVSMVTGLASLTSRTSMGILVVGGVVWKAVGWRLIALSFGLYGLLYVYERLTWTTKAKERAFKRQFVEHASEKLQLVISYTGSNCSHQVQQELSGTFAHLCQQVDGETLSERSMAKSTLMLLTLLFLCSFAGAQDVLTQ

SEQ ID NO: 21788 - protein, 321 aa, Homo sapiens
MQCRLPRGLAGALLTLLCMGLLCLRYHLNLSPQRVQGTPELSQPNPGPPKLQLHDVFIAVKTTRAFHRLRLELLLDTWVSRTREQTFVFTDSPDKGLQERLGSHLVVTNCSAEHSHPALSCKMAAEFDTFLASGLRWFCHVDDDNYVNPRALLQLLRAFPLARDVYVGRPSLNRPIHASEPQPHNRTRLVQFWFATGGAGFCINRKLALKMAPWASGSRFMDTSALIRLPDDCTMGYIIECKLGGRLQPSPLFHSHLETLQLLRTAQLPEQVTLSYGVFEGKLNVIKLQGPFSPEEDPSRFRSLHCLLYPDTPWCPQLGAR

SEQ ID NO: 21789 - protein, 307 aa, Homo sapiens
MQCRLPRGLAGALLTLLCMGLLCLRYHLNLSPQRVQGTPELSQPNPGPPKLQLHDVFIAVKTTRAFHRLRLELLLDTWVSRTREQVTRSHLVVTNCSAEHSHPALSCKMAAEFDTFLASGLRWFCHVDDDNYVNPRALLQLLRAFPLARDVYVGRPSLNRPIHASEPQPHNRTRLVQFWFATGGAGFCINRKLALKMAPWASGSRFMDTSALIRLPDDCTMGYIIECKLGGRLQPSPLFHSHLETLQLLRTAQLPEQVTLSYGVFEGKLNVIKLQGPFSPEEDPSRFRSLHCLLYPDTPWCPQLGAR

SEQ ID NO: 21790 - protein, 78 aa, Homo sapiens
MSESELGRKWDRCLADAVVKIGTGFGLGIVFSLTFFKRRMWPLAFGSGMGLGMAYSNCQHDFQAPYLLHGKYVKEQEQ

SEQ ID NO: 21791 - protein, 24 aa, Homo sapiens
MSESELGRKWDRCLADAVVKIESW

SEQ ID NO: 21792 - protein, 164 aa, Homo sapiens
MPDTMLPACFLGLLAFSSACYFQNCPRGGKRAMSDLELRQCLPCGPGGKGRCFGPSICCADELGCFVGTAEALRCQEENYLPSPCQSGQKACGSGGRCAAFGVCCNDESCVTEPECREGFHRRARASDRSNATQLDGPAGALLLRLVQLAGAPEPFEPAQPDAY

SEQ ID NO: 21793 - protein, 243 aa, Homo sapiens
MSSGTELLWPGAALLVLLGVAASLCVRCSRPGAKRSEKIYQQRSLREDQQSFTGSRTYSLVGQAWPGPLADMAPTRKDKLLQFYPSLEDPASSRYQNFSKGSRHGSEEAYIDPIAMEYYNWGRFSKPPEDDDANSYENVLICKQKTTETGAQQEGIGGLCRGDLSLSLALKTGPTSGLCPSASPEEDEESEDYQNSASIHQWRESRKVMGQLQREASPGPVGSPDEEDGEPDYVNGEVAATEA

SEQ ID NO: 21794 - protein, 111 aa, Homo sapiens
MSSGTELLWPGAALLVLLGVAASLCVRCSRPGAKRSEKIYQQRSLREDQQSFTGSRTYSLVGQAWPGPLADMAPTRKDKLLQFYPSLEDPASSRYQNFSKGSRHGSEEAYI

SEQ ID NO: 21795 - protein, 338 aa, Homo sapiens
MELRSGSVGSQAVARRMDGDSRDGGGGKDATGSEDYENLPTSASVSTHMTAGAMAGILEHSVMYPVDSVKTRMQSLSPDPKAQYTSIYGALKKIMRTEGFWRPLRGVNVMIMGAGPAHAMYFACYENMKRTLNDVFHHQGNSHLANGIAGSMATLLHDAVMNPAEVVKQRLQMYNSQHRSAISCIRTVWRTEGLGAFYRSYTTQLTMNIPFQSIHFITYEFLQEQVNPHRTYNPQSHIISGGLAGALAAAATTPLDVCKTLLNTQENVALSLANISGRLSGMANAFRTVYQLNGLAGYFKGIQARVIYQMPSTAISWSVYEFFKYFLTKRQLENRAPY

SEQ ID NO: 21796 - protein, 155 aa, Homo sapiens
MELRSGSVGSQAVARRMDGDSRDGGGGKDATGSEDYENLPTSASVSTHMTAGAMAGILEHSVMYPVDSVKTRMQSLSPDPKAQYTSIYGALKKIMRTEGFWRPLRGVNVMIMGAGPAHAMYFACYENMKRTLNDVFHHQGNSHLANGILKAFVWS

SEQ ID NO: 21797 - protein, 187 aa, Homo sapiens
MATLLHDAVMNPAEVVKQRLQMYNSQHRSAISCIRTVWRTEGLGAFYRSYTTQLTMNIPFQSIHFITYEFLQEQVNPHRTYNPQSHIISGGLAGALAAAATTPLDVCKTLLNTQENVALSLANISGRLSGMANAFRTVYQLNGLAGYFKGIQARVIYQMPSTAISWSVYEFFKYFLTKRQLENRAPY

SEQ ID NO: 21798 - protein, 297 aa, Homo sapiens
MSNRVVCREASHAGSWYTASGPQLNAQLEGWLSQVQSTKRPARAIIAPHAGYTYCGSCAAHAYKQVDPSITRRIFILGPSHHVPLSRCALSSVDIYRTPLYDLRIDQKIYGELWKTGMFERMSLQTDEDEHSIEMHLPYTAKAMESHKDEFTIIPVLVGALSESKEQEFGKLFSKYLADPSNLFVVSSDFCHWGQRFRYSYYDESQGEIYRSIEHLDKMGMSIIEQLDPVSFSNYLKKYHNTICGRHPIGVLLNAITELQKNGMNMSFSFLNYAQSSQCRNWQDSSVSYAAGALTVH

SEQ ID NO: 21799 - protein, 274 aa, Homo sapiens
MSNRVVCREASHAGSWYTASGPQLNAQLEGWLSQVQSTKRPARAIIAPRRIFILGPSHHVPLSRCALSSVDIYRTPLYDLRIDQKIYGELWKTGMFERMSLQTDEDEHSIEMHLPYTAKAMESHKDEFTIIPVLVGALSESKEQEFGKLFSKYLADPSNLFVVSSDFCHWGQRFRYSYYDESQGEIYRSIEHLDKMGMSIIEQLDPVSFSNYLKKYHNTICGRHPIGVLLNAITELQKNGMNMSFSFLNYAQSSQCRNWQDSSVSYAAGALTVH

SEQ ID NO: 21800 - protein, 300 aa, Homo sapiens
MPLWRADKCQDVQSASWRPRRADGPQLNAQLEGWLSQVQSTKRPARAIIAPHAGYTYCGSCAAHAYKQVDPSITRRIFILGPSHHVPLSRCALSSVDIYRTPLYDLRIDQKIYGELWKTGMFERMSLQTDEDEHSIEMHLPYTAKAMESHKDEFTIIPVLVGALSESKEQEFGKLFSKYLADPSNLFVVSSDFCHWGQRFRYSYYDESQGEIYRSIEHLDKMGMSIIEQLDPVSFSNYLKKYHNTICGRHPIGVLLNAITELQKNGMNMSFSFLNYAQSSQCRNWQDSSVSYAAGALTVH

SEQ ID NO: 21801 - protein, 420 aa, Homo sapiens
MRWRTILLQYCFLLITCLLTALEAVPIDIDKTKVQNIHPVESAKIEPPDTGLYYDEYLKQVIDVLETDKHFREKLQKADIEEIKSGRLSKELDLVSHHVRTKLDELKRQEVGRLRMLIKAKLDSLQDIGMDHQALLKQFDHLNHLNPDKFESTDLDMLIKAATSDLEHYDKTRHEEFKKYEMMKEHERREYLKTLNEEKRKEEESKFEEMKKKHENHPKVNHPGSKDQLKEVWEETDGLDPNDFDPKTFFKLHDVNSDGFLDEQELEALFTKELEKVYDPKNEEDDMVEMEEERLRMREHVMNEVDTNKDRLVTLEEFLKATEKKEFLEPDSWETLDQQQFFTEEELKEYENIIALQENELKKKADELQKQKEELQRQHDQLEAQKLEYHQVIQQMEQKKLQQGIPPSGPAGELKFEPHI

SEQ ID NO: 21802 - protein, 420 aa, Homo sapiens
MRWRTILLQYCFLLITCLLTALEAVPIDIDKTKVQNIHPVESAKIEPPDTGLYYDEYLKQVIDVLETDKHFREKLQKADIEEIKSGRLSKELDLVSHHVRTKLDELKRQEVGRLRMLIKAKLDSLQDIGMDHQALLKQFDHLNHLNPDKFESTDLDMLIKAATSDLEHYDKTRHEEFKKYEMMKEHERREYLKTLNEEKRKEEESKFEEMKKKHENHPKVNHPGSKDQLKEVWEETDGLDPNDFDPKTFFKLHDVNSDGFLDEQELEALFTKELEKVYDPKNEEDDMVEMEEERLRMREHVMNEVDTNKDRLVTLEEFLKATEKKEFLEPDSWETLDQQQFFTEEELKEYENIIALQENELKKKADELQKQKEELQRQHDQLEAQKLEYHQVIQQMEQKKLQQGIPPSGPAGELKFEPRV

SEQ ID NO: 21803 - protein, 3065 aa, Homo sapiens
MEEKQQIILANQDGGTVAGAAPTFFVILKQPGNGKTDQGILVTNQDACALASSVSSPVKSKGKICLPADCTVGGITVTLDNNSMWNEFYHRSTEMILTKQGRRMFPYCRYWITGLDSNLKYILVMDISPVDNHRYKWNGRWWEPSGKAEPHVLGRVFIHPESPSTGHYWMHQPVSFYKLKLTNNTLDQEGHIILHSMHRYLPRLHLVPAEKAVEVIQLNGPGVHTFTFPQTEFFAVTAYQNIQITQLKIDYNPFAKGFRDDGLNNKPQRDGKQKNSSDQEGNNISSSSGHRVRLTEGQGSEIQPGDLDPLSRGHETSGKGLEKTSLNIKRDFLGFMDTDSALSEVPQLKQEISECLIASSFEDDSRVASPLDQNGSFNVVIKEEPLDDYDYELGECPEGVTVKQEETDEETDVYSNSDDDPILEKQLKRHNKVDNPEADHLSSKWLPSSPSGVAKAKMFKLDTGKMPVVYLEPCAVTRSTVKISELPDNMLSTSRKDKSSMLAELEYLPTYIENSNETAFCLGKESENGLRKHSPDLRVVQKYPLLKEPQWKYPDISDSISTERILDDSKDSVGDSLSGKEDLGRKRTTMLKIATAAKVVNANQNASPNVPGKRGRPRKLKLCKAGRPPKNTGKSLISTKNTPVSPGSTFPDVKPDLEDVDGVLFVSFESKEALDIHAVDGTTEESSSLQASTTNDSGYRARISQLEKELIEDLKTLRHKQVIHPGLQEVGLKLNSVDPTMSIDLKYLGVQLPLAPATSFPFWNLTGTNPASPDAGFPFVSRTGKTNDFTKIKGWRGKFHSASASRNEGGNSESSLKNRSAFCSDKLDEYLENEGKLMETSMGFSSNAPTSPVVYQLPTKSTSYVRTLDSVLKKQSTISPSTSYSLKPHSVPPVSRKAKSQNRQATFSGRTKSSYKSILPYPVSPKQKYSHVILGDKVTKNSSGIISENQANNFVVPTLDENIFPKQISLRQAQQQQQQQQGSRPPGLSKSQVKLMDLEDCALWEGKPRTYITEERADVSLTTLLTAQASLKTKPIHTIIRKRAPPCNNDFCRLGCVCSSLALEKRQPAHCRRPDCMFGCTCLKRKVVLVKGGSKTKHFQRKAAHRDPVFYDTLGEEAREEEEGIREEEEQLKEKKKRKKLEYTICETEPEQPVRHYPLWVKVEGEVDPEPVYIPTPSVIEPMKPLLLPQPEVLSPTVKGKLLTGIKSPRSYTPKPNPVIREEDKDPVYLYFESMMTCARVRVYERKKEDQRQPSSSSSPSPSFQQQTSCHSSPENHNNAKEPDSEQQPLKQLTCDLEDDSDKLQEKSWKSSCNEGESSSTSYMHQRSPGGPTKLIEIISDCNWEEDRNKILSILSQHINSNMPQSLKVGSFIIELASQRKSRGEKNPPVYSSRVKISMPSCQDQDDMAEKSGSETPDGPLSPGKMEDISPVQTDALDSVRERLHGGKGLPFYAGLSPAGKLVAYKRKPSSSTSGLIQVASNAKVAASRKPRTLLPSTSNSKMASSSGTATNRPGKNLKAFVPAKRPIAARPSPGGVFTQFVMSKVGALQQKIPGVSTPQTLAGTQKFSIRPSPVMVVTPVVSSEPVQVCSPVTAAVTTTTPQVFLENTTAVTPMTAISDVETKETTYSSGATTTGVVEVSETNTSTSVTSTQSTATVNLTKTTGITTPVASVAFPKSLVASPSTITLPVASTASTSLVVVTAAASSSMVTTPTSSLGSVPIILSGINGSPPVSQRPENAAQIPVATPQVSPNTVKRAGPRLLLIPVQQGSPTLRPVSNTQLQGHRMVLQPVRSPSGMNLFRHPNGQIVQLLPLHQLRGSNTQPNLQPVMFRNPGSVMGIRLPAPSKPSETPPSSTSSSAFSVMNPVIQAVGSSSAVNVITQAPSLLSSGASFVSQAGTLTLRISPPEPQSFASKTGSETKITYSSGGQPVGTASLIPLQSGSFALLQLPGQKPVPSSILQHVASLQMKRESQNPDQKDETNSIKREQETKKVLQSEGEAVDPEANVIKQNSGAATSEETLNDSLEDRGDHLDEECLPEEGCATVKPSEHSCITGSHTDQDYKDVNEEYGARNRKSSKEKVAVLEVRTISEKASNKTVQNLSKVQHQKLGDVKVEQQKGFDNPEENSSEFPVTFKEESKFELSGSKVMEQQSNLQPEAKEKECGDSLEKDRERWRKHLKGPLTRKCVGASQECKKEADEQLIKETKTCQENSDVFQQEQGISDLLGKSGITEDARVLKTECDSWSRISNPSAFSIVPRRAAKSSRGNGHFQGHLLLPGEQIQPKQEKKGGRSSADFTVLDLEEDDEDDNEKTDDSIDEIVDVVSDYQSEEVDDVEKNNCVEYIEDDEEHVDIETVEELSEEINVAHLKTTAAHTQSFKQPSCTHISADEKAAERSRKAPPIPLKLKPDYWSDKLQKEAEAFAYYRRTHTANERRRRGEMRDLFEKLKITLGLLHSSKVSKSLILTRAFSEIQGLTDQADKLIGQKNLLTRKRNILIRKVSSLSGKTEEVVLKKLEYIYAKQQALEAQKRKKKMGSDEFDISPRISKQQEGSSASSVDLGQMFINNRRGKPLILSRKKDQATENTSPLNTPHTSANLVMTPQGQLLTLKGPLFSGPVVAVSPDLLESDLKPQVAGSAVALPENDDLFMMPRIVNVTSLATEGGLVDMGGSKYPHEVPDSKPSDHLKDTVRNEDNSLEDKGRISSRGNRDGRVTLGPTQVFLANKDSGYPQIVDVSNMQKAQEFLPKKISGDMRGIQYKWKESESRGERVKSKDSSFHKLKMKDLKDSSIEMELRKVTSAIEEAALDSSELLTNMEDEDDTDETLTSLLNEIAFLNQQLNDDSVGLAELPSSMDTEFPGDARRAFISKVPPGSRATFQVEHLGTGLKELPDVQGESDSISPLLLHLEDDDFSENEKQLAEPASEPDVLKIVIDSEIKDSLLSNKKAIDGGKNTSGLPAEPESVSSPPTLHMKTGLENSNSTDTLWRPMPKLAPLGLKVANPSSDADGQSLKVMPCLAPIAAKVGSVGHKMNLTGNDQEGRESKVMPTLAPVVAKLGNSGASPSSAGK

SEQ ID NO: 21804 - protein, 2856 aa, Homo sapiens
MEEKQQIILANQDGGTVAGAAPTFFVILKQPGNGKTDQGILVTNQDACALASSVSSPVKSKGKICLPADCTVGGITVTLDNNSMWNEFYHRSTEMILTKQGRRMFPYCRYWITGLDSNLKYILVMDISPVDNHRYKWNGRWWEPSGKAEPHVLGRVFIHPESPSTGHYWMHQPVSFYKLKLTNNTLDQEGHIILHSMHRYLPRLHLVPAEKAVEVIQLNGPGVHTFTFPQTEFFAVTAYQNIQITQLKIDYNPFAKGFRDDGLNNKPQRDGKQKNSSDQEGNNISSSSGHRVRLTEGQGSEIQPGDLDPLSRGHETSGKGLEKTSLNIKRDFLGFMDTDSALSEVPQLKQEISECLIASSFEDDSRVASPLDQNGSFNVVIKEEPLDDYDYELGECPEGVTVKQEETDEETDVYSNSDDDPILEKQLKRHNKVDNPEADHLSSKWLPSSPSGVAKAKMFKLDTGKMPVVYLEPCAVTRSTVKISELPDNMLSTSRKDKSSMLAELEYLPTYIENSNETAFCLGKESENGLRKHSPDLRVVQKYPLLKEPQWKYPDISDSISTERILDDSKDSVGDSLSGKEDLGRKRTTMLKIATAAKVVNANQNASPNVPGKRGRPRKLKLCKAGRPPKNTGKSLISTKNTPVSPGSTFPDVKPDLEDVDGVLFVSFESKEALDIHAVDGTTEESSSLQASTTNDSGYRARISQLEKELIEDLKTLRHKQVIHPGLQEVGLKLNSVDPTMSIDLKYLGVQLPLAPATSFPFWNLTGTNPASPDAGFPFVSRTGKTNDFTKIKGWRGKFHSASASRNEGGNSESSLKNRSAFCSDKLDEYLENEGKLMETSMGFSSNAPTSPVVYQLPTKSTSYVRTLDSVLKKQSTISPSTSYSLKPHSVPPVSRKAKSQNRQATFSGRTKSSYKSILPYPVSPKQKYSHVILGDKVTKNSSGIISENQANNFVVPTLDENIFPKQISLRQAQQQQQQQQGSRPPGLSKSQVKLMDLEDCALWEGKPRTYITEERADVSLTTLLTAQASLKTKPIHTIIRKRAPPCNNDFCRLGCVCSSLALEKRQPAHCRRPDCMFGCTCLKRKVVLVKGGSKTKHFQRKAAHRDPVFYDTLGEEAREEEEGIREEEEQLKEKKKRKKLEYTICETEPEQPVRHYPLWVKVEGEVDPEPVYIPTPSVIEPMKPLLLPQPEVLSPTVKGKLLTGIKSPRSYTPKPNPVIREEDKDPVYLYFESMMTCARVRVYERKKEDQRQPSSSSSPSPSFQQQTSCHSSPENHNNAKEPDSEQQPLKQLTCDLEDDSDKLQEKSWKSSCNEGESSSTSYMHQRSPGGPTKLIEIISDCNWEEDRNKILSILSQHINSNMPQSLKVGSFIIELASQRKSRGEKNPPVYSSRVKISMPSCQDQDDMAEKSGSETPDGPLSPGKMEDISPVQTDALDSVRERLHGGKGLPFYAGLSPAGKLVAYKRKPSSSTSGLIQVASNAKVAASRKPRTLLPSTSNSKMASSSGTATNRPGKNLKAFVPAKRPIENAAQIPVATPQVSPNTVKRAGPRLLLIPVQQGSPTLRPVSNTQLQGHRMVLQPVRSPSGMNLFRHPNGQIVQLLPLHQLRGSNTQPNLQPVMFRNPGSVMGIRLPAPSKPSETPPSSTSSSAFSVMNPVIQAVGSSSAVNVITQAPSLLSSGASFVSQAGTLTLRISPPEPQSFASKTGSETKITYSSGGQPVGTASLIPLQSGSFALLQLPGQKPVPSSILQHVASLQMKRESQNPDQKDETNSIKREQETKKVLQSEGEAVDPEANVIKQNSGAATSEETLNDSLEDRGDHLDEECLPEEGCATVKPSEHSCITGSHTDQDYKDVNEEYGARNRKSSKEKVAVLEVRTISEKASNKTVQNLSKVQHQKLGDVKVEQQKGFDNPEENSSEFPVTFKEESKFELSGSKVMEQQSNLQPEAKEKECGDSLEKDRERWRKHLKGPLTRKCVGASQECKKEADEQLIKETKTCQENSDVFQQEQGISDLLGKSGITEDARVLKTECDSWSRISNPSAFSIVPRRAAKSSRGNGHFQGHLLLPGEQIQPKQEKKGGRSSADFTVLDLEEDDEDDNEKTDDSIDEIVDVVSDYQSEEVDDVEKNNCVEYIEDDEEHVDIETVEELSEEINVAHLKTTAAHTQSFKQPSCTHISADEKAAERSRKAPPIPLKLKPDYWSDKLQKEAEAFAYYRRTHTANERRRRGEMRDLFEKLKITLGLLHSSKVSKSLILTRAFSEIQGLTDQADKLIGQKNLLTRKRNILIRKVSSLSGKTEEVVLKKLEYIYAKQQALEAQKRKKKMGSDEFDISPRISKQQEGSSASSVDLGQMFINNRRGKPLILSRKKDQATENTSPLNTPHTSANLVMTPQGQLLTLKGPLFSGPVVAVSPDLLESDLKPQVAGSAVALPENDDLFMMPRIVNVTSLATEGGLVDMGGSKYPHEVPDSKPSDHLKDTVRNEDNSLEDKGRISSRGNRDGRVTLGPTQVFLANKDSGYPQIVDVSNMQKAQEFLPKKISGDMRGIQYKWKESESRGERVKSKDSSFHKLKMKDLKDSSIEMELRKVTSAIEEAALDSSELLTNMEDEDDTDETLTSLLNEIAFLNQQLNDDSVGLAELPSSMDTEFPGDARRAFISKVPPGSRATFQVEHLGTGLKELPDVQGESDSISPLLLHLEDDDFSENEKQLAEPASEPDVLKIVIDSEIKDSLLSNKKAIDGGKNTSGLPAEPESVSSPPTLHMKTGLENSNSTDTLWRPMPKLAPLGLKVANPSSDADGQSLKVMPCLAPIAAKVGSVGHKMNLTGNDQEGRESKVMPTLAPVVAKLGNSGASPSSAGK

SEQ ID NO: 21805 - protein, 297 aa, Homo sapiens
MRALRAGLTLASGAGLGAVVEGWRRRREDARAAPGLLGRLPVLPVAAAAELPPVPGGPRGPGELAKYGLPGLAQLKSRESYVLCYDPRTRGALWVVEQLRPERLRGDGDRRECDFREDDSVHAYHRATNADYRGSGFDRGHLAAAANHRWSQKAMDDTFYLSNVAPQVPHLNQNAWNNLEKYSRSLTRSYQNVYVCTGPLFLPRTEADGKSYVKYQVIGKNHVAVPTHFFKVLILEAAGGQIELRTYVMPNAPVDEAIPLERFLVPIESIERASGLLFVPNILARAGSLKAITAGSK

SEQ ID NO: 21806 - protein, 210 aa, Homo sapiens
MLPLPSCSLPILLLFLLPSVPIESQPPPSTLPPFLAPEWDLLSPRVVLSRGAPAGPPLLFLLEAGAFRESAGAPANRSRRGVSETAPASRRGELAVCDAVSGWVTDRRTAVDLRGREVEVLGEVPAAGGSPLRQYFFETRCKADNAEEGGPGAGGGGCRGVDRRHWVSECKAKQSYVRALTADAQGRVGWRWIRIDTACVCTLLSRTGRA

SEQ ID NO: 21807 - protein, 367 aa, Homo sapiens
MSSPPPARSGFYRQEVTKTAWEVRAVYRDLQPVGSGAYGAVCSAVDGRTGAKVAIKKLYRPFQSELFAKRAYRELRLLKHMRHENVIGLLDVFTPDETLDDFTDFYLVMPFMGTDLGKLMKHEKLGEDRIQFLVYQMLKGLRYIHAAGIIHRDLKPGNLAVNEDCELKILDFGLARQADSEMTGYVVTRWYRAPEVILNWMRYTQTVDIWSVGCIMAEMITGKTLFKGSDHLDQLKEIMKVTGTPPAEFVQRLQSDEAKNYMKGLPELEKKDFASILTNASPLAVNLLEKMLVLDAEQRVTAGEALAHPYFESLHDTEDEPQVQKYDDSFDDVDRTLDEWKRVTYKEVLSFKPPRQLGARVSKETPL

SEQ ID NO: 21808 - protein, 357 aa, Homo sapiens
MSSPPPARSGFYRQEVTKTAWEVRAVYRDLQPVGSGAYGAVCSAVDGRTGAKVAIKKLYRPFQSELFAKRAYRELRLLKHMRHENVIGLLDVFTPDETLDDFTDFYLVMPFMGTDLGKLMKHEKLGEDRIQFLVYQMLKGLRDLKPGNLAVNEDCELKILDFGLARQADSEMTGYVVTRWYRAPEVILNWMRYTQTVDIWSVGCIMAEMITGKTLFKGSDHLDQLKEIMKVTGTPPAEFVQRLQSDEAKNYMKGLPELEKKDFASILTNASPLAVNLLEKMLVLDAEQRVTAGEALAHPYFESLHDTEDEPQVQKYDDSFDDVDRTLDEWKRVTYKEVLSFKPPRQLGARVSKETPL

SEQ ID NO: 21809 - protein, 312 aa, Homo sapiens
MCSPQESGMTALSARMLTRSRSLGPGAGPRGCREEPGPLRRREAAAEARKSHSPVKRPRKAQRLRVAYEGSDSEKGEGAEPLKVPVWEPQDWQQQLVNIRAMRNKKDAPVDHLGTEHCYDSSAPPKVRRYQVLLSLMLSSQTKDQVTAGAMQRLRARGLTVDSILQTDDATLGKLIYPVGFWRSKVKYIKQTSAILQQHYGGDIPASVAELVALPGVGPKMAHLAMAVAWGTVSGIAVDTHVHRIANRLRWTKKATKSPEETRAALEEWLPRELWHEINGLLVGFGQQTCLPVHPRCHACLNQALCPAAQGL

SEQ ID NO: 21810 - protein, 304 aa, Homo sapiens
MTALSARMLTRSRSLGPGAGPRGCREEPGPLRRREAAAEARKSHSPVKRPRKAQRLRVAYEGSDSEKGEGAEPLKVPVWEPQDWQQQLVNIRAMRNKKDAPVDHLGTEHCYDSSAPPKVRRYQVLLSLMLSSQTKDQVTAGAMQRLRARGLTVDSILQTDDATLGKLIYPVGFWRSKVKYIKQTSAILQQHYGGDIPASVAELVALPGVGPKMAHLAMAVAWGTVSGIAVDTHVHRIANRLRWTKKATKSPEETRAALEEWLPRELWHEINGLLVGFGQQTCLPVHPRCHACLNQALCPAAQGL

SEQ ID NO: 21811 - protein, 297 aa, Homo sapiens
MLTRSRSLGPGAGPRGCREEPGPLRRREAAAEARKSHSPVKRPRKAQRLRVAYEGSDSEKGEGAEPLKVPVWEPQDWQQQLVNIRAMRNKKDAPVDHLGTEHCYDSSAPPKVRRYQVLLSLMLSSQTKDQVTAGAMQRLRARGLTVDSILQTDDATLGKLIYPVGFWRSKVKYIKQTSAILQQHYGGDIPASVAELVALPGVGPKMAHLAMAVAWGTVSGIAVDTHVHRIANRLRWTKKATKSPEETRAALEEWLPRELWHEINGLLVGFGQQTCLPVHPRCHACLNQALCPAAQGL

SEQ ID NO: 21812 - protein, 710 aa, Homo sapiens
MVKLAKAGKNQGDPKKMAPPPKEVEEDSEDEEMSEDEEDDSSGEEVVIPQKKGKKAAATSAKKVVVSPTKKVAVATPAKKAAVTPGKKAAATPAKKTVTPAKAVTTPGKKGATPGKALVATPGKKGAAIPAKGAKNGKNAKKEDSDEEEDDDSEEDEEDDEDEDEDEDEIEPAAMKAAAAAPASEDEDDEDDEDDEDDDDDEEDDSEEEAMETTPAKGKKAAKVVPVKAKNVAEDEDEEEDDEDEDDDDDEDDEDDDDEDDEEEEEEEEEEPVKEAPGKRKKEMAKQKAAPEAKKQKVEGTEPTTAFNLFVGNLNFNKSAPELKTGISDVFAKNDLAVVDVRIGMTRKFGYVDFESAEDLEKALELTGLKVFGNEIKLEKPKGKDSKKERDARTLLAKNLPYKVTQDELKEVFEDAAEIRLVSKDGKSKGIAYIEFKTEADAEKTFEEKQGTEIDGRSISLYYTGEKGQNQDYRGGKNSTWSGESKTLVLSNLSYSATEETLQEVFEKATFIKVPQNQNGKSKGYAFIEFASFEDAKEALNSCNKREIEGRAIRLELQGPRGSPNARSQPSKTLFVKGLSEDTTEETLKESFDGSVRARIVTDRETGSSKGFGFVDFNSEEDAKAAKEAMEDGEIDGNKVTLDWAKPKGEGGFGGRGGGRGGFGGRGGGRGGRGGFGGRGRGGFGGRGGFRGGRGGGGDHKPQGKKTKFE

SEQ ID NO: 21813 - protein, 223 aa, Homo sapiens
MTSEVIEDEKQFYSKAKTYWKQIPPTVDGMLGGYGHISSIDINSSRKFLQRFLREGPNKTGTSCALDCGAGIGRITKRLLLPLFREVDMVDITEDFLVQAKTYLGEEGKRVRNYFCCGLQDFTPEPDSYDVIWIQWVIGHLTDQHLAEFLRRCKGSLRPNGIIVIKDNMAQEGVILDDVDSSVCRDLDVVRRIICSAGLSLLAEERQENLPDEIYHVYSFALR

SEQ ID NO: 21814 - protein, 145 aa, Homo sapiens
MTSEVIEDEKQFYSKAKTYWKQIPPTVDGMLGGYGHISSIDINSSRKFLQRFLREGPNKTGTSCALDCGAGIGRITKRLLLPLFREVDMVDITEDFLVQAKTYLGEEGKRATSPISTWPSSCGAARAASAPTASSSSKTTWPRRA

SEQ ID NO: 21815 - protein, 470 aa, Homo sapiens
MAGENHQWQGSILYNMLMSAKQTRAAPEAPETRLVDQCWGCSCGDEPGVGREGLLGGRNVALLYRCCFCGKDHPRQGSILYSMLTSAKQTYAAPKAPEATLGPCWGCSCGSDPGVGRAGLPGGRPVALLYRCCFCGEDHPRQGSILYSLLTSSKQTHVAPAAPEARPGGAWWDRSYFAQRPGGKEALPGGRATALLYRCCFCGEDHPQQGSTLYCVPTSTNQAQAAPEERPRAPWWDTSSGALRPVALKSPQVVCEAASAGLLKTLRFVKYLPCFQVLPLDQQLVLVRNCWASLLMLELAQDRLQFETVEVSEPSMLQKILTTRRRETGGNEPLPVPTLQHHLAPPAEARKVPSASQVQAIKCFLSKCWSLNISTKEYAYLKGTVLFNPDVPGLQCVKYIQGLQWGTQQILSEHTRMTHQGPHDRFIELNSTLFLLRFINANVIAELFFRPIIGTVSMDDMMLEMLCTKI

SEQ ID NO: 21816 - protein, 400 aa, Homo sapiens
MAGENHQWQGSILYNMLMSAKQTRAAPEAPETRLVDQCWGCSCGDEPGVGREGLLGGRNVALLYRCCFCGKDHPRQGSILYSMLTSAKQTYAAPKAPEATLGPCWGCSCGSDPGVGRAGLPGGRPVALLYRCCFCGEDHPRQGSILYSLLTSSKQTHVAPAAPEARPGGAWWDRSYFAQRPGGKEALPGGRATALLYRCCFCGEDHPQQGSTLYCVPTSTNQAQAAPEERPRAPWWDTSSGALRPVALKSPQVVCEAASAGLLKTLRFVKYLPCFQVLPLDQQLVLVRNCWASLLMLELAQDRLQFETVEVSEPSMLQKILTTRRRETGGNEPLPVPTLQHHLAPPAEARKVPSASQVQAIKCFLSKCWSLNISTKEYAYLKGTVLFNPGKGKENDCNHH

SEQ ID NO: 21817 - protein, 878 aa, Homo sapiens
MEVKGPSGRSFCCESEGQFKSCLKRHTPSLLLPSSWKGNSGSCLMAKALHRMSPTPNSCPLPLPLCRMSGVLCSRNLFTFKFSLFQLDSGASGEPGHSLGLTLGFSHCGNCQTAVVSAQPEGMASNGAYPALGPGVTANPGTSLSVFTALPFTTPAPGPAHGPLLVTAGAPPGGPLVLSTLPSTPLVTEQDGCGPSGAGASNVFVQMRTEVGPVKAAQAQTLVLTQAPLVWQAPGALCGGVVCPPPLLLAAAPVVPVMAAQVVGGTQACEGGWSQGLPLPPPPPPAAQLPPIVSQGNAGPWPQGAHGEGSLASSQAKAPPDDSCNPRSVYENFRLWQHYKPLARRHLPQSPDTEALSCFLIPVLRSLARRKPTMTLEEGLWRAMREWQHTSNFDRMIFYEMAEKFLEFEAEEEMQIQKSQWMKGPQCLPPPATPRLEPRGPPAPEVVKQPVYLPSKAGPKAPTACLPPPRPQRPVTKARRPPPRPHRRAETKARLPPPRPQRPAETKVPEEIPPEVVQEYVDIMEELLGPSLGATGEPEKQREEGEVKQPQEEDWTPPDPGLLSYTDKLCSQKDFVTKVEAVIHPQFLEELLSPDPQMDFLALSQELEQEEGLTLAQLVEKRLLPLKEKQHARAAPSRGTARLDSSSSKFAAGQGAERDVPVPQQGVGMETCPPQTTARDSQGRGRAHTGMARSKDSVVLLGCQDSPGLRAARPTSPPQDHRPTCPGVGTKDALDLPGGSPVRESHGLAQGSSEEEELPSLAFLLGSQHKLLPWWLPQSPVPASGLLSPEKWGPQGTHQFPSAERRGLNLAPSPANKAKKRPLFGSLSPAEKTPHPGPGLRVSGEQSLTWGLGGPSQSQKRKGDPLVSRKEKKQRCSQ

SEQ ID NO: 21818 - protein, 629 aa, Homo sapiens
MEVKGPSGRSFCCESEGQFKSCLKRHTPSLLLPSSWKGNSGSCLMAKALHRMSPTPNSCPLPLPLCRMSGVLCSRNLFTFKFSLFQLDSGASGEPGHSLGLTLGFSHCGNCQTAVVSAQPEGMASNGAYPALGPGVTANPGTSLSVFTALPFTTPAPGPAHGPLLVTAGAPPGGPLVLSTLPSTPLVTEQDGCGPSGAGASNVFVQMRTEVGPVKAAQAQTLVLTQAPLVWQAPGALCGGVVCPPPLLLAAAPVVPVMAAQVVGGTQACEGGWSQGLPLPPPPPPAAQLPPIVSQGNAGPWPQGAHGEGSLASSQAKAPPDDSCNPRSVYENFRLWQHYKPLARRHLPQSPDTEALSCFLIPVLRSLARRKPTMTLEEGLWRAMREWQHTSNFDRMIFYEMAEKFLEFEAEEEMQIQKSQWMKGPQCLPPPATPRLEPRGPPAPEVVKQPVYLPSKAGPKAPTACLPPPRPQRPVTKARRPPPRPHRRAETKARLPPPRPQRPAETKVPEEIPPEVVQEYVDIMEELLGPSLGATGEPEKQREEGEVKQPQEEDWTPPDPGLLSYTDKLCSQKDFVTKVEAVIHPQFLEELLSPDPQMDFLALSQELEQEEGLTLAQGAPSDAPGTDRC

SEQ ID NO: 21819 - protein, 147 aa, Homo sapiens
MAGNSILLAAVSILSACQQSYFALQVGKARLKYKVTPPAVTGSPEFERVFRAQQNCVEFYPIFIITLWMAGWYFNQVFATCLGLVYIYGRHLYFWGYSEAAKKRITGFRLSLGILALLTLLGALGIANSFLDEYLDLNIAKKLRRQF

SEQ ID NO: 21820 - protein, 77 aa, Homo sapiens
MAGNSILLAAVSILSACQQSYFALQVGKARLKYKVTPPAVTGSPEFERVFRAHFCYLSGSGVHIWPSPILLGIFRSC

SEQ ID NO: 21821 - protein, 142 aa, Homo sapiens
MSYCRQEGKDRIIFVTKEDHETPSSAELVADDPNDPYEEHGLILPNGNINWNCPCLGGMASGPCGEQFKSAFSCFHYSTEEIKGSDCVDQFRAMQECMQKYPDLYPQEDEDEEEEREKKPAEQAEETAPIEATATKEEEGSS

SEQ ID NO: 21822 - protein, 155 aa, Homo sapiens
MPVSYSSVTTRYYHRAGAEEGKDRIIFVTKEDHETPSSAELVADDPNDPYEEHGLILPNGNINWNCPCLGGMASGPCGEQFKSAFSCFHYSTEEIKGSDCVDQFRAMQECMQKYPDLYPQEDEDEEEEREKKPAEQAEETAPIEATATKEEEGSS

SEQ ID NO: 21823 - protein, 603 aa, Homo sapiens
MATIEEIAHQIIEQQMGEIVTEQQTGQKIQIVTALDHNTQGKQFILTNHDGSTPSKVILARQDSTPGKVFLTTPDAAGVNQLFFTTPDLSAQHLQLLTDNSPDQGPNKVFDLCVVCGDKASGRHYGAVTCEGCKGFFKRSIRKNLVYSCRGSKDCIINKHHRNRCQYCRLQRCIAFGMKQDSVQCERKPIEVSREKSSNCAASTEKIYIRKDLRSPLTATPTFVTDSESTRSTGLLDSGMFMNIHPSGVKTESAVLMTSDKAESCQGDLSTLANVVTSLANLGKTKDLSQNSNEMSMIESLSNDDTSLCEFQEMQTNGDVSRAFDTLAKALNPGESTACQSSVAGMEGSVHLITGDSSINYTEKEGPLLSDSHVAFRLTMPSPMPEYLNVHYIGESASRLLFLSMHWALSIPSFQALGQENSISLVKAYWNELFTLGLAQCWQVMNVATILATFVNCLHNSLQQDKMSTERRKLLMEHIFKLQEFCNSMVKLCIDGYEYAYLKAIVLFSPDHPSLENMEQIEKFQEKAYVEFQDYITKTYPDDTYRLSRLLLRLPALRLMNATITEELFFKGLIGNIRIDSVIPHILKMEPADYNSQIIGHSI

SEQ ID NO: 21824 - protein, 467 aa, Homo sapiens
MATIEEIAHQIIEQQMGEIVTEQQTGQKIQIVTALDHNTQGKQFILTNHDGSTPSKVILARQDSTPGKVFLTTPDAAGVNQLFFTTPDLSAQHLQLLTDNSPDQGPNKVFDLCVVCGDKASGRHYGAVTCEGCKGFFKRSIRKNLVYSCRGSKDCIINKHHRNRCQYCRLQRCIAFGMKQDSVQCERKPIEVSREKSSNCAASTEKIYIRKDLRSPLTATPTFVTDSESTRSTGLLDSGMFMNIHPSGVKTESAVLMTSDKAESCQGDLSTLANVVTSLANLGKTKDLSQNSNEMSMIESLSNDDTSLCEFQEMQTNGDVSRAFDTLAKALNPGESTACQSSVAGMEGSVHLITGDSSINYTEKEGPLLSDSHVAFRLTMPSPMPEYLNVHYIGESASRLLFLSMHWALSIPSFQALGQENSISLVKAYWNELFTLGLAQCWQVMNVATILATFVNCLHNSLQQAEG

SEQ ID NO: 21825 - protein, 483 aa, Homo sapiens
MATIEEIAHQIIEQQMGEIVTEQQTGQKIQIVTALDHNTQGKQFILTNHDGSTPSKVILARQDSTPGKVFLTTPDAAGVNQLFFTTPDLSAQHLQLLTDNSPDQGPNKVFDLCVVCGDKASGRHYGAVTCEGCKGFFKRSIRKNLVYSCRGSKDCIINKHHRNRCQYCRLQRCIAFGMKQDSVQCERKPIEVSREKSSNCAASTEKIYIRKDLRSPLTATPTFVTDSESTRSTGLLDSGMFMNIHPSGVKTESAVLMTSDKAESCQGDLSTLANVVTSLANLGKTKDLSQNSNEMSMIESLSNDDTSLCEFQEMQTNGDVSRAFDTLAKALNPGESTACQSSVAGMEGSVHLITGDSSINYTEKEGPLLSDSHVAFRLTMPSPMPEYLNVHYIGESASRLLFLSMHWALSIPSFQALGQENSISLVKAYWNELFTLGLAQCWQVMNVATILATFVNCLHNSLQQDAKVIAALIHFTRRAITDL

SEQ ID NO: 21826 - protein, 559 aa, Homo sapiens
MAETVWSTDTGEAVYRSRDPVRNLRLRVHLQRITSSNFLHYQPAAELGKDLIDLATFRPQPTASGHRPEEDEEEEIVIGWQEKLFSQFEVDLYQNETACQSPLDYQYRQEILKLENSGGKKNRRIFTYTDSDRYTNLEEHCQRMTTAASEVPSFLVERMANVRRRRQDRRGMEGGILKSRIVTWEPSEEFVRNNHVINTPLQTMHIMADLGPYKKLGYKKYEHVLCTLKVDSNGVITVKPDFTGLKGPYRIETEGEKQELWKYTIDNVSPHAQPEEEERERRVFKDLYGRHKEYLSSLVGTDFEMTVPGALRLFVNGEVVSAQGYEYDNLYVHFFVELPTAHWSSPAFQQLSGVTQTCTTKSLAMDKVAHFSYPFTFEAFFLHEDESSDALPEWPVLYCEVLSLDFWQRYRVEGYGAVVLPATPGSHTLTVSTWRPVELGTVAELRRFFIGGSLELEDLSYVRIPGSFKGERLSRFGLRTETTGTVTFRLHCLQQSRAFMESSSLQKRMRSVLDRLEGFSQQSSIHNVLEAFRRARRRMQEARESLPQDLVSPSGTLVS

SEQ ID NO: 21827 - protein, 520 aa, Homo sapiens
MAETVWSTDTGEAVYRSRDPVRNLRLRVHLQRITSSNFLHYQPAAELGKDLIDLATFRPQPTASGHRPEEDEEEEIVIGWQEKLFSQFEVDLYQNETACQSPLDYQYRQEILKLENSGGKKNRRIFTYTDSDRYTNLEEHCQRMTTAASEVPSFLVERMANVRRRRQDRRGMEGGILKSRIVTWEPSEEFVRNNHVINTPLQTMHIMADLGPYKKLGYKKYEHVLCTLKVDSNGVITVKPDFTGLKGPYRIETEGEKQELWKYTIDNVSPHAQPEEEERERRVFKDLYGRHKEYLSSLVGTDFEMTVPGALRLFVNGEVVSAQGYEYDNLYVHFFVELPTAHWSSPAFQQLSGVTQTCTTKSLAMDKVAHFSYPFTFEAFFLHEDESSDALPEWPVLYCEVLSLDFWQRYRVEGYGAVVLPATPGSHTLTVSTWRPVELGTVAELRRFFIGGSLELEDLSYVRIPGSFKGLSSSKTKEGRKVDGERVLNPQPVSLSLFPGKPHSTAWGLLRLRYELFLSK

SEQ ID NO: 21828 - protein, 549 aa, Homo sapiens
MAVPVSSFAQRTRSRFRVHLQRITSSNFLHYQPAAELGKDLIDLATFRPQPTASGHRPEEDEEEEIVIGWQEKLFSQFEVDLYQNETACQSPLDYQYRQEILKLENSGGKKNRRIFTYTDSDRYTNLEEHCQRMTTAASEVPSFLVERMANVRRRRQDRRGMEGGILKSRIVTWEPSEEFVRNNHVINTPLQTMHIMADLGPYKKLGYKKYEHVLCTLKVDSNGVITVKPDFTGLKGPYRIETEGEKQELWKYTIDNVSPHAQPEEEERERRVFKDLYGRHKEYLSSLVGTDFEMTVPGALRLFVNGEVVSAQGYEYDNLYVHFFVELPTAHWSSPAFQQLSGVTQTCTTKSLAMDKVAHFSYPFTFEAFFLHEDESSDALPEWPVLYCEVLSLDFWQRYRVEGYGAVVLPATPGSHTLTVSTWRPVELGTVAELRRFFIGGSLELEDLSYVRIPGSFKGERLSRFGLRTETTGTVTFRLHCLQQSRAFMESSSLQKRMRSVLDRLEGFSQQSSIHNVLEAFRRARRRMQEARESLPQDLVSPSGTLVS

SEQ ID NO: 21829 - protein, 507 aa, Homo sapiens
MEEPAAPSEAHEAAGAQAGAEAAREGVSGPDLPVCEPSGESAAPDSALPHAARGWAPFPVAPVPAHLRRGGLRPAPASGGGAWPSPLPSRSSGIWTKQIICRYYIHGQCKEGENCRYSHDLSGRKMATEGGVSPPGASAGGGPSTAAHIEPPTQEVAEAPPAASSLSLPVIGSAAERGFFEAERDNADRGAAGGAGVESWADAIEFVPGQPYRGRWVASAPEAPLQSSETERKQMAVGSGLRFCYYASRGVCFRGESCMYLHGDICDMCGLQTLHPMDAAQREEHMRACIEAHEKDMELSFAVQRGMDKVCGICMEVVYEKANPNDRRFGILSNCNHSFCIRCIRRWRSARQFENRIVKSCPQCRVTSELVIPSEFWVEEEEEKQKLIQQYKEAMSNKACRYFAEGRGNCPFGDTCFYKHEYPEGWGDEPPGPGGGSFSAYWHQLVEPVRMGEGNMLYKSIKKELVVLRLASLLFKRFLSLRDELPFSEDQWDLLHYELEEYFNLIL

SEQ ID NO: 21830 - protein, 485 aa, Homo sapiens
MAEAAAPGTTVTTSGAGAAAAEAAETAEAVSPTPIPTVTAPSPRAGGGVGGSDGSDGSGGRGDSGAYDGSGACGGSDACDGSGDSSGDSWTKQVTCRYFKYGICKEGDNCRYSHDLSDRLCGVVCKYFQRGCCVYGDRCRCEHSKPLKQEEATATELTTKSSLAASSSLSSIVGPLVEMNTNEAESRNSNFATVVAGSEDWANAIEFVPGQPYCGRTVPSCTEAPLQGSVTKEESEEEQTAVETKKQLCPYAAVGQCRYGENCVYLHGDLCDMCGLQVLHPMDAAQRSQHIQACIEAHEKDMEFSFAVQRSKDKVCGICMEVVYEKANPNEHRFGILSNCNHTFCLKCIRKWRSAKEFESRIVKSCPQCRITSNFVIPSEYWVEEKEEKQKLIQKYKEAMSNKACKYFDEGRGSCPFGENCFYKHMYPDGRREEPQRQQVGTSSRNPGQQRNHFWEFFEEGANSNPFDDEEEAVTFELGEMLLML

SEQ ID NO: 21831 - protein, 143 aa, Homo sapiens
MQHRGFLLLTLLALLALTSAVAKKKDKVKKGGPGSECAEWAWGPCTPSSKDCGVGFREGTCGAQTQRIRCRVPCNWKKEFGADCKYKFENWGACDGGTGTKVRQGTLKKARYNAQCQETIRVTKPCTPKTKAKAKAKKGKGKD

SEQ ID NO: 21832 - protein, 87 aa, Homo sapiens
MQHRGFLLLTLLALLALTSAVAKKKADCKYKFENWGACDGGTGTKVRQGTLKKARYNAQCQETIRVTKPCTPKTKAKAKAKKGKGKD

SEQ ID NO: 21833 - protein, 172 aa, Homo sapiens
MSSKKAKTKTTKKRPQRATSNVFAMFDQSQIQEFKEAFNMIDQNRDGFIDKEDLHDMLASLGKNPTDAYLDAMMNEAPGPINFTMFLTMFGEKLNGTDPEDVIRNAFACFDEEATGTIQEDYLRELLTTMGDRFTDEEVDELYREAPIDKKGNFNYIEFTRILKHGAKDKDD

SEQ ID NO: 21834 - protein, 313 aa, Homo sapiens
MPWKEESEFTKQDKAARVIQQAWKSFLNVAIFQHFKSLIDLRRQGEPRQIVKYINPKEAELLDAAAGIHVRFRLGGVKFPPDIYYKIFTHRPIEDLCANSPRNYAKLPAKHTSHNKNDHLQEEDHSGWYHRIENNGWRPVSDTFWLSTDGMVVEDKKESEFHFSKLKRRQDLEKKRKLRKIEWMRQMYYSGSLEAKSTHHETLGLIHTATKGLIRAFEDGGIDSVMEWEVDEVLNWTNTLNFDEYIASWKEIATSNSSANFKGFRFNQAQKNIYNYGGDISKMQMGIPDDTYYENVYQEPNVTRLTPDSTYGL

SEQ ID NO: 21835 - protein, 246 aa, Homo sapiens
MPWKEESEFTKQDKAARVIQQAWKSFLVKFPPDIYYKIFTHRPIEDLCANSPRNYAKLPAKHTSHNKNDHLQEEDHSGWYHRIENNGWRPVSDTFWLSTDGMVVEDKKESEFHFSKLKRRQDLEKKRKLRKIEWMRQMYYSGSLEAKSTHHETLGLIHTATKGLIRAFEDGGIDSVMEWEVDEVLNWTNTLNFDEYIASWKEIATSNSSANFKGIFFRILFSIKMEYEEFLSSPTPANVNTILPQW

SEQ ID NO: 21836 - protein, 407 aa, Homo sapiens
MLRYPYFCRMYKECLSCWLESGIPNLGVWPNRIHTTAEKYREYEAREQTDQTQAQELHRSQDRDFETMAKLHIPVMVDEVVHCLSPQKGQIFLDMTFGSGGHTKAILQKESDIVLYALDRDPTAYALAEHLSELYPKQIRAMLGQFSQAEALLMKAGVQPGTFDGVLMDLGCSSMQLDTPERGFSLRKDGPLDMRMDGGRYPDMPTAADVVNALDQQALASILRTYGEEKHAKKIASAIVQARSIYPITRTQQLASIVAGAFPPSAIYTRKDLLQRSTHIATKTFQALRIFVNNELNELYTGLKTAQKFLRPGGRLVALSFHSLEDRIVKRFLLGISMTERFNLSVRQQVMKTSQLGSDHENTEEVSMRRAPLMWELIHKKVLSPQDQDVQDNPRGRSAKLRAAIKL

SEQ ID NO: 21837 - protein, 273 aa, Homo sapiens
MLRYPYFCRMYKECLSCWLESGIPNLGVWPNRIHTTAEKYREYEAREQTDQTQAQELHRSQDRDFETMAKLHIPVMVDEVVHCLSPQKGQIFLDMTFGSGGHTKAILQKESDIVLYALDRDPTAYALAEHLSELYPKQIRAMLGQFSQAEALLMKAGVQPGTFDGVLMDLGCSSMQLDTPERGFSLRKDGPLDMRMDGGRYPDMPTAADVVNALDQQALASILRTYGEEKHAKKIASAIVQARSIYPITRTQQLASIVAEYSETYFPVAQTLY

SEQ ID NO: 21838 - protein, 99 aa, Homo sapiens
MLRYPYFCRMYKECLSCWLESGIPNLGVWPNRIHTTAEKYREYEAREQTDQTQAQELHRSQDRDFETMAKLHIPVMVDEVVHCLSPQKGQSLGVRSVGI

SEQ ID NO: 21839 - protein, 279 aa, Homo sapiens
MLRYPYFCRMYKECLSCWLESGIPNLGVWPNRIHTTAEKYREYEAREQTDQTQAQELHRSQDRDFETMAKLHIPVMVDEVVHCLSPQKGQIFLDMTFGSGGHTKAILQKESDIVLYALDRDPTAYALAEHLSELYPKQIRAMLGQFSQAEALLMKAGVQPGTFDGVLMDLGCSSMQLDTPERGFSLRKDGPLDMRMDGGRSTGTCIYPKNIRGGEACQENRFSNCSGTQHLPHHQNPAACQHRCRSISSLCYLYTERLTTAIYPYCHQDFPGSSHICEQ

SEQ ID NO: 21840 - protein, 244 aa, Homo sapiens
MDILVPLLQLLVLLLTLPLHLMALLGCWQPLCKSYFPYLMAVLTPKSNRKMESKKRELFSQIKGLTGASGKVALLELGCGTGANFQFYPPGCRVTCLDPNPHFEKFLTKSMAENRHLQYERFVVAPGEDMRQLADGSMDVVVCTLVLCSVQSPRKVLQEVRRVLRPGGVLFFWEHVAEPYGSWAFMWQQVFEPTWKHIGDGCCLTRETWKDLENAQFSEIQMERQPPPLKWLPVGPHIMGKAVK

SEQ ID NO: 21841 - protein, 200 aa, Homo sapiens
MAASQQQASAASSAAGVSGPSSAGGPGPQQQPQPPAQLVGPAQSGLLQQQQQDFDPVQRYKMLIPQLKESLQTLMKVAAQNLIQNTNIDNGQKSSDGPIQRFDKCLEEFYALCDQLELCLRLAHECLSQSCDSAKHSPTLVPTATKPDAVQPDSLPYPQYLAVIKAQISCAKDIHTALLDCANKVTGKTPAPPAGPGGTL

SEQ ID NO: 21842 - protein, 196 aa, Homo sapiens
MAASQQQASAASSAAGVSGPSSAGGPGPQQQPQPPAQLVGPAQSGLLQQQQQDFDPVQRYKMLIPQLKESLQTLMKVAAQNLIQNTNIDNGQKSSDGPIQRFDKCLEEFYALCDQLELCLPPSPTQCSLTASPTHSTWRSSKPRFPVPRTFTPPCWTVPTRSRARHPHHLLALGALCEVGDREWGRQWLVGGVQRE

SEQ ID NO: 21843 - protein, 232 aa, Homo sapiens
MATAESRALQFAEGAAFPAYRAPHAGGALLPPPSPAAALLPAPPAGPGPATFAGFLGRDPGPAPPPPASLGSPAPPKGAAAPSASQRRKRTSFSAEQLQLLELVFRRTRYPDIHLRERLAALTLLPESRIQVWFQNRRAKSRRQSGKSFQPLARPEIILNHCAPGTETKCLKPQLPLEVDVNCLPEPNGVGGGISDSSSQGQNFETCSPLSEDIGSKLDSWEEHIFSAFGNF

SEQ ID NO: 21844 - protein, 240 aa, Homo sapiens
MATAESRALQFAEGAAFPAYRAPHAGGALLPPPSPAAALLPAPPAGPGPATFAGFLGRDPGPAPPPPASLGSPAPPKGAAAPSASQRRKRTSFSAEQLQLLELVFRRTRYPDIHLRERLAALTLLPESRIQLLFSPLFQVWFQNRRAKSRRQSGKSFQPLARPEIILNHCAPGTETKCLKPQLPLEVDVNCLPEPNGVGGGISDSSSQGQNFETCSPLSEDIGSKLDSWEEHIFSAFGNF

SEQ ID NO: 21845 - protein, 526 aa, Homo sapiens
MQSESGIVPDFEVGEEFHEEPKTYYELKSQPLKSSSSAEHPGASKPPISSSSMTSRILLRQQLMREQMQEQERREQQQKLQAAQFMQQRVPVSQTPAINVSVPTTLPSATQVPMEVLKVQTHLENPTKYHIQQAQRQQVKQYLSTTLANKHANQVLSLPCPNQPGDHVMPPVPGSSAPNSPMAMLTLNSNCEKEGFYKFEEQNRAESECPGMNTHSRASCMQMDDVIDDIISLESSYNEEILGLMDPALQMANTLPVSGNLIDLYGNQGLPPPGLTISNSCPANLPNIKRELTACIFPTESEARALAKERQKKDNHNLIERRRRFNINDRIKELGTLIPKSNDPDMRWNKGTILKASVDYIRKLQREQQRAKELENRQKKLEHANRHLLLRIQELEMQARAHGLSLIPSTGLCSPDLVNRIIKQEPVLENCSQDLLQHHADLTCTTTLDLTDGTITFNNNLGTGTEANQAYSVPTKMGSKLEDILMDDTLSPVGVTDPLLSSVSPGASKTSSRRSSMSMEETEHTC

SEQ ID NO: 21846 - protein, 520 aa, Homo sapiens
MQSESGIVPDFEVGEEFHEEPKTYYELKSQPLKSSSSAEHPGASKPPISSSSMTSRILLRQQLMREQMQEQERREQQQKLQAAQFMQQRVPVSQTPAINVSVPTTLPSATQVPMEVLKVQTHLENPTKYHIQQAQRQQVKQYLSTTLANKHANQVLSLPCPNQPGDHVMPPVPGSSAPNSPMAMLTLNSNCEKEGFYKFEEQNRAESECPGMNTHSRASCMQMDDVIDDIISLESSYNEEILGLMDPALQMANTLPVSGNLIDLYGNQGLPPPGLTISNSCPANLPNIKRELTESEARALAKERQKKDNHNLIERRRRFNINDRIKELGTLIPKSNDPDMRWNKGTILKASVDYIRKLQREQQRAKELENRQKKLEHANRHLLLRIQELEMQARAHGLSLIPSTGLCSPDLVNRIIKQEPVLENCSQDLLQHHADLTCTTTLDLTDGTITFNNNLGTGTEANQAYSVPTKMGSKLEDILMDDTLSPVGVTDPLLSSVSPGASKTSSRRSSMSMEETEHTC

SEQ ID NO: 21847 - protein, 501 aa, Homo sapiens
MLYAFWFSHSSSAEHPGASKPPISSSSMTSRILLRQQLMREQMQEQERREQQQKLQAAQFMQQRVPVSQTPAINVSVPTTLPSATQVPMEVLKVQTHLENPTKYHIQQAQRQQVKQYLSTTLANKHANQVLSLPCPNQPGDHVMPPVPGSSAPNSPMAMLTLNSNCEKEGFYKFEEQNRAESECPGMNTHSRASCMQMDDVIDDIISLESSYNEEILGLMDPALQMANTLPVSGNLIDLYGNQGLPPPGLTISNSCPANLPNIKRELTACIFPTESEARALAKERQKKDNHNLIERRRRFNINDRIKELGTLIPKSNDPDMRWNKGTILKASVDYIRKLQREQQRAKELENRQKKLEHANRHLLLRIQELEMQARAHGLSLIPSTGLCSPDLVNRIIKQEPVLENCSQDLLQHHADLTCTTTLDLTDGTITFNNNLGTGTEANQAYSVPTKMGSKLEDILMDDTLSPVGVTDPLLSSVSPGASKTSSRRSSMSMEETEHTC

SEQ ID NO: 21848 - protein, 495 aa, Homo sapiens
MLYAFWFSHSSSAEHPGASKPPISSSSMTSRILLRQQLMREQMQEQERREQQQKLQAAQFMQQRVPVSQTPAINVSVPTTLPSATQVPMEVLKVQTHLENPTKYHIQQAQRQQVKQYLSTTLANKHANQVLSLPCPNQPGDHVMPPVPGSSAPNSPMAMLTLNSNCEKEGFYKFEEQNRAESECPGMNTHSRASCMQMDDVIDDIISLESSYNEEILGLMDPALQMANTLPVSGNLIDLYGNQGLPPPGLTISNSCPANLPNIKRELTESEARALAKERQKKDNHNLIERRRRFNINDRIKELGTLIPKSNDPDMRWNKGTILKASVDYIRKLQREQQRAKELENRQKKLEHANRHLLLRIQELEMQARAHGLSLIPSTGLCSPDLVNRIIKQEPVLENCSQDLLQHHADLTCTTTLDLTDGTITFNNNLGTGTEANQAYSVPTKMGSKLEDILMDDTLSPVGVTDPLLSSVSPGASKTSSRRSSMSMEETEHTC

SEQ ID NO: 21849 - protein, 525 aa, Homo sapiens
MGHLENTSVVFPRAIFSLCEKETRKLTLCLFSRSSSAEHPGASKPPISSSSMTSRILLRQQLMREQMQEQERREQQQKLQAAQFMQQRVPVSQTPAINVSVPTTLPSATQVPMEVLKVQTHLENPTKYHIQQAQRQQVKQYLSTTLANKHANQVLSLPCPNQPGDHVMPPVPGSSAPNSPMAMLTLNSNCEKEGFYKFEEQNRAESECPGMNTHSRASCMQMDDVIDDIISLESSYNEEILGLMDPALQMANTLPVSGNLIDLYGNQGLPPPGLTISNSCPANLPNIKRELTACIFPTESEARALAKERQKKDNHNLIERRRRFNINDRIKELGTLIPKSNDPDMRWNKGTILKASVDYIRKLQREQQRAKELENRQKKLEHANRHLLLRIQELEMQARAHGLSLIPSTGLCSPDLVNRIIKQEPVLENCSQDLLQHHADLTCTTTLDLTDGTITFNNNLGTGTEANQAYSVPTKMGSKLEDILMDDTLSPVGVTDPLLSSVSPGASKTSSRRSSMSMEETEHTC

SEQ ID NO: 21850 - protein, 519 aa, Homo sapiens
MGHLENTSVVFPRAIFSLCEKETRKLTLCLFSRSSSAEHPGASKPPISSSSMTSRILLRQQLMREQMQEQERREQQQKLQAAQFMQQRVPVSQTPAINVSVPTTLPSATQVPMEVLKVQTHLENPTKYHIQQAQRQQVKQYLSTTLANKHANQVLSLPCPNQPGDHVMPPVPGSSAPNSPMAMLTLNSNCEKEGFYKFEEQNRAESECPGMNTHSRASCMQMDDVIDDIISLESSYNEEILGLMDPALQMANTLPVSGNLIDLYGNQGLPPPGLTISNSCPANLPNIKRELTESEARALAKERQKKDNHNLIERRRRFNINDRIKELGTLIPKSNDPDMRWNKGTILKASVDYIRKLQREQQRAKELENRQKKLEHANRHLLLRIQELEMQARAHGLSLIPSTGLCSPDLVNRIIKQEPVLENCSQDLLQHHADLTCTTTLDLTDGTITFNNNLGTGTEANQAYSVPTKMGSKLEDILMDDTLSPVGVTDPLLSSVSPGASKTSSRRSSMSMEETEHTC

SEQ ID NO: 21851 - protein, 510 aa, Homo sapiens
MEALRVQMFMPCSFESLYLSSAEHPGASKPPISSSSMTSRILLRQQLMREQMQEQERREQQQKLQAAQFMQQRVPVSQTPAINVSVPTTLPSATQVPMEVLKVQTHLENPTKYHIQQAQRQQVKQYLSTTLANKHANQVLSLPCPNQPGDHVMPPVPGSSAPNSPMAMLTLNSNCEKEGFYKFEEQNRAESECPGMNTHSRASCMQMDDVIDDIISLESSYNEEILGLMDPALQMANTLPVSGNLIDLYGNQGLPPPGLTISNSCPANLPNIKRELTACIFPTESEARALAKERQKKDNHNLIERRRRFNINDRIKELGTLIPKSNDPDMRWNKGTILKASVDYIRKLQREQQRAKELENRQKKLEHANRHLLLRIQELEMQARAHGLSLIPSTGLCSPDLVNRIIKQEPVLENCSQDLLQHHADLTCTTTLDLTDGTITFNNNLGTGTEANQAYSVPTKMGSKLEDILMDDTLSPVGVTDPLLSSVSPGASKTSSRRSSMSMEETEHTC

SEQ ID NO: 21852 - protein, 504 aa, Homo sapiens
MEALRVQMFMPCSFESLYLSSAEHPGASKPPISSSSMTSRILLRQQLMREQMQEQERREQQQKLQAAQFMQQRVPVSQTPAINVSVPTTLPSATQVPMEVLKVQTHLENPTKYHIQQAQRQQVKQYLSTTLANKHANQVLSLPCPNQPGDHVMPPVPGSSAPNSPMAMLTLNSNCEKEGFYKFEEQNRAESECPGMNTHSRASCMQMDDVIDDIISLESSYNEEILGLMDPALQMANTLPVSGNLIDLYGNQGLPPPGLTISNSCPANLPNIKRELTESEARALAKERQKKDNHNLIERRRRFNINDRIKELGTLIPKSNDPDMRWNKGTILKASVDYIRKLQREQQRAKELENRQKKLEHANRHLLLRIQELEMQARAHGLSLIPSTGLCSPDLVNRIIKQEPVLENCSQDLLQHHADLTCTTTLDLTDGTITFNNNLGTGTEANQAYSVPTKMGSKLEDILMDDTLSPVGVTDPLLSSVSPGASKTSSRRSSMSMEETEHTC

SEQ ID NO: 21853 - protein, 419 aa, Homo sapiens
MLEMLEYNHYQVQTHLENPTKYHIQQAQRQQVKQYLSTTLANKHANQVLSLPCPNQPGDHVMPPVPGSSAPNSPMAMLTLNSNCEKEGFYKFEEQNRAESECPGMNTHSRASCMQMDDVIDDIISLESSYNEEILGLMDPALQMANTLPVSGNLIDLYGNQGLPPPGLTISNSCPANLPNIKRELTACIFPTESEARALAKERQKKDNHNLIERRRRFNINDRIKELGTLIPKSNDPDMRWNKGTILKASVDYIRKLQREQQRAKELENRQKKLEHANRHLLLRIQELEMQARAHGLSLIPSTGLCSPDLVNRIIKQEPVLENCSQDLLQHHADLTCTTTLDLTDGTITFNNNLGTGTEANQAYSVPTKMGSKLEDILMDDTLSPVGVTDPLLSSVSPGASKTSSRRSSMSMEETEHTC

SEQ ID NO: 21854 - protein, 413 aa, Homo sapiens
MLEMLEYNHYQVQTHLENPTKYHIQQAQRQQVKQYLSTTLANKHANQVLSLPCPNQPGDHVMPPVPGSSAPNSPMAMLTLNSNCEKEGFYKFEEQNRAESECPGMNTHSRASCMQMDDVIDDIISLESSYNEEILGLMDPALQMANTLPVSGNLIDLYGNQGLPPPGLTISNSCPANLPNIKRELTESEARALAKERQKKDNHNLIERRRRFNINDRIKELGTLIPKSNDPDMRWNKGTILKASVDYIRKLQREQQRAKELENRQKKLEHANRHLLLRIQELEMQARAHGLSLIPSTGLCSPDLVNRIIKQEPVLENCSQDLLQHHADLTCTTTLDLTDGTITFNNNLGTGTEANQAYSVPTKMGSKLEDILMDDTLSPVGVTDPLLSSVSPGASKTSSRRSSMSMEETEHTC

SEQ ID NO: 21855 - protein, 357 aa, Homo sapiens
MLEMLEYNHYQVQTHLENPTKYHIQQAQRQQGFYKFEEQNRAESECPGMNTHSRASCMQMDDVIDDIISLESSYNEEILGLMDPALQMANTLPVSGNLIDLYGNQGLPPPGLTISNSCPANLPNIKRELTESEARALAKERQKKDNHNLIERRRRFNINDRIKELGTLIPKSNDPDMRWNKGTILKASVDYIRKLQREQQRAKELENRQKKLEHANRHLLLRIQELEMQARAHGLSLIPSTGLCSPDLVNRIIKQEPVLENCSQDLLQHHADLTCTTTLDLTDGTITFNNNLGTGTEANQAYSVPTKMGSKLEDILMDDTLSPVGVTDPLLSSVSPGASKTSSRRSSMSMEETEHTC

SEQ ID NO: 21856 - protein, 468 aa, Homo sapiens
MTSRILLRQQLMREQMQEQERREQQQKLQAAQFMQQRVPVSQTPAINVSVPTTLPSATQVPMEVLKVQTHLENPTKYHIQQAQRQQVKQYLSTTLANKHANQVLSLPCPNQPGDHVMPPVPGSSAPNSPMAMLTLNSNCEKEGFYKFEEQNRAESECPGMNTHSRASCMQMDDVIDDIISLESSYNEEILGLMDPALQMANTLPVSGNLIDLYGNQGLPPPGLTISNSCPANLPNIKRELTESEARALAKERQKKDNHNLIERRRRFNINDRIKELGTLIPKSNDPDMRWNKGTILKASVDYIRKLQREQQRAKELENRQKKLEHANRHLLLRIQELEMQARAHGLSLIPSTGLCSPDLVNRIIKQEPVLENCSQDLLQHHADLTCTTTLDLTDGTITFNNNLGTGTEANQAYSVPTKMGSKLEDILMDDTLSPVGVTDPLLSSVSPGASKTSSRRSSMSMEETEHTC

SEQ ID NO: 21857 - protein, 144 aa, Homo sapiens
MAAPSGGVNCEEFAEFQELLKVMRTIDDRIVHELNTTVPTASFAGKIDASQTCKQLYESLMAAHASRDRVIKNCIAQTSAVVKNLREEREKNLDDLTLLKQLRKEQTKLKWMQSELNVEEVVNDRSWKVFNERCRIHFKPPKNE

SEQ ID NO: 21858 - protein, 1274 aa, Homo sapiens
MAVRQAATAGTPGPRREEEAALLFERAHYRHDPRWLLPVTPRLCLACALELLPDPGVSLVRKKHMLSCFQDALVRHTSLVTQLVSQDQRVCIHFISVLFGLLCSMEDGSVTDLCIEVLIQITTQLKLEQTIRCLLDECHKELCNMPSMRGSLATLTLLGKLVDAIPALADELVMEHGNLMEHLLRGLVYPSEGIQASVCYLYGKLYSSPVAAEMLSGHFREKLFPLFLSILDGAQTKELQINCLGLLRQLLKYDLFVSMIMNQDGLGESAKNIEGSSGNTSLPLVLKKLLLSRDETLQVASAHCITAVLVHSPAKHASAFIHADIPEFLFEHLSSSSEVLVWSSCNCLTLLVEEPLFFSKCHTVYGIEAVVRSLQGSLKMNNIELHKQGLLLFAEILTRQPEEIKLFTSSAMCRDAGRALQEAVSSPVLEVAAEALKATSAFLRKDHQSTPPVQYGELQALLEAMLNRCAEFSQTLLSRRPLGHASSRDSEKAILQRGKFLLSTLEGFRSACRLAIEFQSEPSAQENPFTAPSAKKEDTLEAFSEFLLSACDSLCIPMVMRHLEQTTHPALMEVFLSILHNLFVIVPHMKEKFSKKLASSSFIRLTLELKARFCSGLSHSALNQVCSNFLYYMCLNLLSAPEKTGPPSKEELSAVSELLQHGLPQISSRSPESLAFLSDRQYMEGAARQRQYCILLLFYLAYIHEDRFVSEAELFEAVQSFLLSLQDQGERPPLVVFKASIYLLAICQDKDNTLRETMVSAIRKFLEGIPDLQLVYTHHPLLLRFFLLYPELMSRYGHRVLELWFFWEESSYEELDDVTSAGQPALPASLVVLFQLLRSIPSILLILLDLIYSSPVDTAHKVLISLRTFLRRNEDIQVGGLIRGHFLLILQRLLVEHGASPSGASGNLPLLLSLLSLMQLRNVSEQELDSVAMKLLHQVSKLCGKCSPTDVDILQPSFNFLYWSLHQTTPSSQKRAAAVLLSSTGLMELLEKMLALTLAKADSPRTALLCSAWLLTASFSAQQHKGSLQVHQTLSVEMDQVLKALSFPKKKAALLSAAILCFLRTALRQSFSSALVALVPSGAQPLPATKDTVLAPLRMSQVRSLVIGLQNLLVQKDPLLSQACVGCLEALLDYLDARSPDIALHVASQPWNRFLLFTLLDAGENSFLRPEILRLMTLFMRYRSSSVLSHEEVGDVLQGVALADLSTLSNTTLQALHGFFQQLQSMGHLADHSMAQTLQASLEGLPPSTSSGQPPLQDMLCLGGVAVSLSHIRN

SEQ ID NO: 21859 - protein, 642 aa, Homo sapiens
MCLNLLSAPEKTGPPSKEELSAVSELLQHGLPQISSRSPESLAFLSDRQYMEGAARQRQYCILLLFYLAYIHEDRFVSEAELFEAVQSFLLSLQDQGERPPLVVFKASIYLLAICQDKDNTLRETMVSAIRKFLEGIPDLQLVYTHHPLLLRFFLLYPELMSRYGHRVLELWFFWEESSYEELDDVTSAGQPALPASLVVLFQLLRSIPSILLILLDLIYSSPVDTAHKVLISLRTFLRRNEDIQVGGLIRGHFLLILQRLLVEHGASPSGASGNLPLLLSLLSLMQLRNVSEQELDSVAMKLLHQVSKLCGKCSPTDVDILQPSFNFLYWSLHQTTPSSQKRAAAVLLSSTGLMELLEKMLALTLAKADSPRTALLCSAWLLTASFSAQQHKGSLQVHQTLSVEMDQVLKALSFPKKKAALLSAAILCFLRTALRQSFSSALVALVPSGAQPLPATKDTVLAPLRMSQVRSLVIGLQNLLVQKDPLLSQACVGCLEALLDYLDARSPDIALHVASQPWNRFLLFTLLDAGENSFLRPEILRLMTLFMRYRSSSVLSHEEVGDVLQGVALADLSTLSNTTLQALHGFFQQLQSMGHLADHSMAQTLQASLEGLPPSTSSGQPPLQDMLCLGGVAVSLSHIRN

SEQ ID NO: 21860 - protein, 607 aa, Homo sapiens
MCLNLLSAPEKTGPPSKEELSAVSELLQHGLPQISSRSPESLAFLSDRQYMEGAARQRQYCILLLFYLAYIHEDRFVSEAELFEAVQSFLLSLQDQGERPPLVVFKASIYLLAICQDKDNTLRETMVSAIRKFLEGIPDLQLVYTHHPLLLRFFLLYPELMSRYGHRVLELWFFWEESSYEELDDVTSAGQPALPASLVVLFQLLRSIPSILLILLDLIYSSPVDTAHKVLISLRTFLRRNEDIQVGGLIRGHFLLILQRLLVEHGASPSGVSKLCGKCSPTDVDILQPSFNFLYWSLHQTTPSSQKRAAAVLLSSTGLMELLEKMLALTLAKADSPRTALLCSAWLLTASFSAQQHKGSLQVHQTLSVEMDQVLKALSFPKKKAALLSAAILCFLRTALRQSFSSALVALVPSGAQPLPATKDTVLAPLRMSQVRSLVIGLQNLLVQKDPLLSQACVGCLEALLDYLDARSPDIALHVASQPWNRFLLFTLLDAGENSFLRPEILRLMTLFMRYRSSSVLSHEEVGDVLQGVALADLSTLSNTTLQALHGFFQQLQSMGHLADHSMAQTLQASLEGLPPSTSSGQPPLQDMLCLGGVAVSLSHIRN

SEQ ID NO: 21861 - protein, 569 aa, Homo sapiens
MAVRQAATAGTPGPRREEEAALLFERAHYRHDPRWLLPVTPRLCLACALELLPDPGVSLVRKKHMLSCFQDALVRHTSLVTQLVSQDQRVCIHFISVLFGLLCSMEDGSVTDLCIEVLIQITTQLKLEQTIRCLLDECHKELCNMPSMRGSLATLTLLGKLVDAIPALADELVMEHGNLMEHLLRGLVYPSEGIQASVCYLYGKLYSSPVAAEMLSGHFREKLFPLFLSILDGAQTKELQINCLGLLRQLLKYDLFVSMIMNQDGLGESAKNIEGSSGNTSLPLVLKKLLLSRDETLQVASAHCITAVLVHSPAKHASAFIHADIPEFLFEHLSSSSEVLVWSSCNCLTLLVEEPLFFSKCHTVYGIEAVVRSLQGSLKMNNIELHKQGLLLFAEILTRQPEEIKLFTSSAMCRDAGRALQEAVSSPVLEVAAEALKATSAFLRKDHQSTPPVQYGELQALLEAMLNRCAEFSQTLLSRRPLGHASSRDSEKAILQRGKFLLSTLEGFRSACRLAIEFQSEPSAQENPFTAPSAKKEDTLEAFSEFLLSACDSLCIPMVMVGSPEPRAT

SEQ ID NO: 21862 - protein, 487 aa, Homo sapiens
MVSAIRKFLEGIPDLQLVYTHHPLLLRFFLLYPELMSRYGHRVLELWFFWEESSYEELDDVTSAGQPALPASLVVLFQLLRSIPSILLILLDLIYSSPVDTAHKVLISLRTFLRRNEDIQVGGLIRGHFLLILQRLLVEHGASPSGASGNLPLLLSLLSLMQLRNVSEQELDSVAMKLLHQVSKLCGKCSPTDVDILQPSFNFLYWSLHQTTPSSQKRAAAVLLSSTGLMELLEKMLALTLAKADSPRTALLCSAWLLTASFSAQQHKGSLQVHQTLSVEMDQVLKALSFPKKKAALLSAAILCFLRTALRQSFSSALVALVPSGAQPLPATKDTVLAPLRMSQVRSLVIGLQNLLVQKDPLLSQACVGCLEALLDYLDARSPDIALHVASQPWNRFLLFTLLDAGENSFLRPEILRLMTLFMRYRSSSVLSHEELQSMGHLADHSMAQTLQASLEGLPPSTSSGQPPLQDMLCLGGVAVSLSHIRN

SEQ ID NO: 21863 - protein, 444 aa, Homo sapiens
MAVRQAATAGTPGPRREEEAALLFERAHYRHDPRWLLPVTPRLCLACALELLPDPGVSLVRKKHMLSCFQDALVRHTSLVTQLVSQDQRVCIHFISVLFGLLCSMEDGSVTDLCIEVLIQITTQLKLEQTIRCLLDECHKELCNMPSMRGSLATLTLLGKLVDAIPALADELVMEHGNLMEHLLRGLVYPSEGIQASVCYLYGKLYSSPVAAEMLSGHFREKLFPLFLSILDGAQTKELQINCLGLLRQLLKYDLFVSMIMNQDGLGESAKNIEGSSGNTSLPLVLKKLLLSRDETLQVASAHCITAVLVHSPAKHASAFIHADIPEFLFEHLSSSSEVLVWSSCNCLTLLVEEPLFFSKCHTVYGIEAVVRSLQGSLKMNNIELHKQGLLLFAEILTRQPEEIKLFTSSAMCRDAGRALQEAVSSPVLEVAAEALKATSAFLR

SEQ ID NO: 21864 - protein, 238 aa, Homo sapiens
MLALTLAKADSPRTALLCSAWLLTASFSAQQHKGSLQVHQTLSVEMDQVLKALSFPKKKAALLSAAILCFLRTALRQSFSSALVALVPSGAQPLPATKDTVLAPLRMSQVRSLVIGLQNLLVQKDPLLSQACVGCLEALLDYLDARSPDIALHVASQPWNRFLLFTLLDAGENSFLRPEILRLMTLLQSMGHLADHSMAQTLQASLEGLPPSTSSGQPPLQDMLCLGGVAVSLSHIRN

SEQ ID NO: 21865 - protein, 88 aa, Homo sapiens
MVPLCQVEVLYFAKSAEITGVRSETISVPQEIKALQLWKEIETRHPGLADVRNQIIFAVRQEYVELGDQLLVLQPGDEIAVIPPISGG

SEQ ID NO: 21866 - protein, 88 aa, Homo sapiens
MASSDVKPKSVSHAKKWSEEIENLYRFQQAGYRDETEYRQVKQVSMVDRWPETGYVKKLQRRDNTFYYYNKQRECDDKEVHKVKIYAY

SEQ ID NO: 21867 - protein, 373 aa, Homo sapiens
MWPLRVYTRKKREGQRLNLTPTPDLGSPAKAEAPPGSKRKGKVHGLSKIAEKAERSRQGGSGSGPFSPRLGVTGEKSLQENRSSEDTQDEKIASLRESVTDDLQVDSSSSNSELVSGLSLHHGMASSLLSYSVTDSYAEYKSFEESFPSPELFRKSDYLDWECPNLEEHMQWKNSTLLDTSKAVAIEKAPQFSNVSAIFSTSSEDYQKCHRKTVMTVADQNVSPKAKCASNSESDNAACEILLAEKTCPSTPEKTKKKKTNSSTPGKKNRGLLTSTPSSETAGFVIDLSSVQKASFEELFPNVSNYVNSNEIVPVSSLQENSSNEFPANASEICCIIRTSPGTRQVKNKGVIVKKKKYSLPKDTPQDIIIKMA

SEQ ID NO: 21868 - protein, 347 aa, Homo sapiens
MESPASSQPASMPQSKGKSKRKKDLRISCMSKPPAPNPTPPRNLDSRTFITIGDRNFEVEADDLVTISELGRGAYGVVEKVRHAQSGTIMAVKRIRATVNSQEQKRLLMDLDINMRTVDCFYTVTFYGALFREGDVWICMELMDTSLDKFYRKVLDKNMTIPEDILGEIAVSIVRALEHLHSKLSVIHRDVKPSNVLINKEGHVKMCDFGISGYLVDSVAKTMDAGCKPYMAPERINPELNQKGYNVKSDVWSLGITMIEMAILRFPYESWGTPFQQLKQVVEEPSPQLPADRFSPEFVDFTAQCLRKNPAERMSYLELMEHPFFTLHKTKKTDIAAFVKEILGEDS

SEQ ID NO: 21869 - protein, 318 aa, Homo sapiens
MSKPPAPNPTPPRNLDSRTFITIGDRNFEVEADDLVTISELGRGAYGVVEKVRHAQSGTIMAVKRIRATVNSQEQKRLLMDLDINMRTVDCFYTVTFYGALFREGDVWICMELMDTSLDKFYRKVLDKNMTIPEDILGEIAVSIVRALEHLHSKLSVIHRDVKPSNVLINKEGHVKMCDFGISGYLVDSVAKTMDAGCKPYMAPERINPELNQKGYNVKSDVWSLGITMIEMAILRFPYESWGTPFQQLKQVVEEPSPQLPADRFSPEFVDFTAQCLRKNPAERMSYLELMEHPFFTLHKTKKTDIAAFVKEILGEDS

SEQ ID NO: 21870 - protein, 352 aa, Homo sapiens
MGVQGTLMSRDSQTPHLLSILGKSKRKKDLRISCMSKPPAPNPTPPRNLDSRTFITIGDRNFEVEADDLVTISELGRGAYGVVEKVRHAQSGTIMAVKRIRATVNSQEQKRLLMDLDINMRTVDCFYTVTFYGALFREGDVWICMELMDTSLDKFYRKVLDKNMTIPEDILGEIAVSIVRALEHLHSKLSVIHRDVKPSNVLINKEGHVKMCDFGISGYLVDSVAKTMDAGCKPYMAPERINPELNQKGYNVKSDVWSLGITMIEMAILRFPYESWGTPFQQLKQVVEEPSPQLPADRFSPEFVDFTAQCLRKNPAERMSYLELMEHPFFTLHKTKKTDIAAFVKEILGEDS

SEQ ID NO: 21871 - protein, 240 aa, Homo sapiens
MPVSKCPKKSESLWKGWDRKAQRNGLRSQVYAVNGDYYVGEWKDNVKHGKGTQVWKKKGAIYEGDWKFGKRDGYGTLSLPDQQTGKCRRVYSGWWKGDKKSGYGIQFFGPKEYYEGDWCGSQRSGWGRMYYSNGDIYEGQWENDKPNGEGMLRLKNGNRYEGCWERGMKNGAGRFFHLDHGQLFEGFWVDNMAKCGTMIDFGRDEAPEPTQFPIPEVKILDPDGVLAEALAMFRKTEEGD

SEQ ID NO: 21872 - protein, 160 aa, Homo sapiens
MPVSKCPKKSESLWKGWDRKAQRNGLRSQVYAVNGDYYVGEWKDNVKHGKGTQVWKKKGAIYEGDWKFGKRDGYGTLSLPDQQTGKCRRVYSGWWKGDKKSGYGIQFFGPKEYYEGDWCGSQRSGWGRMYYSNGDIYEGQWENDKPNGEGMLRLSQNPRP

SEQ ID NO: 21873 - protein, 952 aa, Homo sapiens
MEVRRGDTCPRPHPSGLREEGLEPKVAFPGGANRCWNLGADAGSRLTDVFGSVMLTGSASFYDCYTSQSEDNVDLRQTYTPFSSTEYSSSVDSSLFCAPWSTYGDDIKQPSNSQISIKNRIQTERNDYGSETDLYGLVSNILEEQDKSQPYFAEGTCSSNLKSVWPMNTSRFADHHDLLTETKRPIDTVISQQAFYSDESVSAMEKQYLRNSNLTPQQKIDELHHGFTGLDLEEQWMYPSRSDHSNCHNIQTNDTAKTTFQEYPLIKNCFTPQTGLSDIMKESGVDIYHYGRDRICTKGLEAPLQQKRAEMFLSQFNRYNENVDYCRYPEYVHPNKAKLNKCSNFSVQDSKKLANGTPETPTVEADTYTKLFQVKPANQKKMEETIPDQQNFTFPKTTPHLTEKQFAKEAVFTADFGLTSEYGLKPHTACPANDFANVTEKQQFAKPDPPHSEYFKSVNLLSNSATSSGGINLNRPTWMNVQTKNNTPIPYRNQGNLMKLNSHLSAASKGSNHSSDFPQLSSTNLTPNSNLFQKYCQENPSAFSSFDFSYSGAERIQSVNHIEGLTKPGEENLFKLVTDKKIKQPNGFCDNYSAQKYGIIENVNKHNFQAKPQSGHYDPEEGPKHLDGLSQNTYQDLLESQGHSNSHRTRGGDNSRVNRTQVSCFSNNYMMGDLRHNQCFQQLGSNGFPLRSTHPFGHSVVPLLDSYDLLSYDDLSHLYPYFNMMYGDNSFSGLMPTFGFQRPIKTRSGPASELHIRLEECCEQWRALEKERKKTELALAKNYPGKKVSSTNNTPVPRLTSNPSRVDRLIVDELRELARVVTLLGKMERLRSSLLHASISTALDRHLESIHIVQSRRKDEIVNASNRQRQGVPRCQDDRDVFALASAIKEMCVATRKTRTALWCALQMTLPKTASTADVVKPLQDTVNCEDKVHESINSSNPMNQRGETNKH

SEQ ID NO: 21874 - protein, 786 aa, Homo sapiens
MNTSRFADHHDLLTETKRPIDTVISQQAFYSDESVSAMEKQYLRNSNLTPQQKIDELHHGFTGLDLEEQWMYPSRSDHSNCHNIQTNDTAKTTFQEYPLIKNCFTPQTGLSDIMKESGVDIYHYGRDRICTKGLEAPLQQKRAEMFLSQFNRYNENVDYCRYPEYVHPNKAKLNKCSNFSVQDSKKLANGTPETPTVEADTYTKLFQVKPANQKKMEETIPDQQNFTFPKTTPHLTEKQFAKEAVFTADFGLTSEYGLKPHTACPANDFANVTEKQQFAKPDPPHSEYFKSVNLLSNSATSSGGINLNRPTWMNVQTKNNTPIPYRNQGNLMKLNSHLSAASKGSNHSSDFPQLSSTNLTPNSNLFQKYCQENPSAFSSFDFSYSGAERIQSVNHIEGLTKPGEENLFKLVTDKKIKQPNGFCDNYSAQKYGIIENVNKHNFQAKPQSGHYDPEEGPKHLDGLSQNTYQDLLESQGHSNSHRTRGGDNSRVNRTQVSCFSNNYMMGDLRHNQCFQQLGSNGFPLRSTHPFGHSVVPLLDSYDLLSYDDLSHLYPYFNMMYGDNSFSGLMPTFGFQRPIKTRSGPASELHIRLEECCEQWRALEKERKKTELALAKNYPGKKVSSTNNTPVPRLTSNPSRVDRLIVDELRELARVVTLLGKMERLRSSLLHASISTALDRHLESIHIVQSRRKDEIVNASNRQRQGVPRCQDDRDVFALASAIKEMCVATRKTRTALWCALQMTLPKTASTADVVKPLQDTVNCEDKVHESINSSNPMNQRGETNKH

SEQ ID NO: 21875 - protein, 659 aa, Homo sapiens
MNTSRFADHHDLLTETKRPIDTVISQQAFYSDESVSAMEKQYLRNSNLTPQQKIDELHHGFTGLDLEEQWMYPSRSDHSNCHNIQTNDTAKTTFQEYPLIKNCFTPQTGLSDIMKESGVDIYHYGRDRICTKGLEAPLQQKRAEMFLSQFNRYNENVDYCRYPEYVHPNKAKLNKCSNFSVQDSKKLANGTPETPTVEADTYTKLFQVKPANQKKMEETIPDQQNFTFPKTTPHLTEKQFAKEAVFTADFGLTSEYGLKPHTACPANDFANVTEKQQFAKPDPPHSEYFKSVNLLSNSATSSGGINLNRPTWMNVQTKNNTPIPYRNQGNLMKLNSHLSAASKGSNHSSDFPQLSSTNLTPNSNLFQKYCQENPSAFSSFDFSYSGAERIQSVNHIEGLTKPGEENLFKLVTDKKIKQPNGFCDNYSAQKYGIIENVNKHNFQAKPQSGHYDPEEGPKHLDGLSQNTYQDLLESQGHSNSHRTRGGDNSRVNRTQVSCFSNNYMMGDLRHNQCFQQLGSNGFPLRSTHPFGHSVVPLLDSYDLLSYDDLSHLYPYFNMMYGDNSFSGLMPTFGFQRPIKTRSGPASELHIRLEECCEQWRALEKERKKTELALAKNYPGKKVSSTNNTPVPRLTSNPSRVDRLIVDELRELARVSCKNR

SEQ ID NO: 21876 - protein, 825 aa, Homo sapiens
MEVRRGDTCPRPHPSGLREEGLEPKVAFPGGANRCWNLGADAGSRLTDVFGSVMLTGSASFYDCYTSQSEDNVDLRQTYTPFSSTEYSSSVDSSLFCAPWSTYGDDIKQPSNSQISIKNRIQTERNDYGSETDLYGLVSNILEEQDKSQPYFAEGTCSSNLKSVWPMNTSRFADHHDLLTETKRPIDTVISQQAFYSDESVSAMEKQYLRNSNLTPQQKIDELHHGFTGLDLEEQWMYPSRSDHSNCHNIQTNDTAKTTFQEYPLIKNCFTPQTGLSDIMKESGVDIYHYGRDRICTKGLEAPLQQKRAEMFLSQFNRYNENVDYCRYPEYVHPNKAKLNKCSNFSVQDSKKLANGTPETPTVEADTYTKLFQVKPANQKKMEETIPDQQNFTFPKTTPHLTEKQFAKEAVFTADFGLTSEYGLKPHTACPANDFANVTEKQQFAKPDPPHSEYFKSVNLLSNSATSSGGINLNRPTWMNVQTKNNTPIPYRNQGNLMKLNSHLSAASKGSNHSSDFPQLSSTNLTPNSNLFQKYCQENPSAFSSFDFSYSGAERIQSVNHIEGLTKPGEENLFKLVTDKKIKQPNGFCDNYSAQKYGIIENVNKHNFQAKPQSGHYDPEEGPKHLDGLSQNTYQDLLESQGHSNSHRTRGGDNSRVNRTQVSCFSNNYMMGDLRHNQCFQQLGSNGFPLRSTHPFGHSVVPLLDSYDLLSYDDLSHLYPYFNMMYGDNSFSGLMPTFGFQRPIKTRSGPASELHIRLEECCEQWRALEKERKKTELALAKNYPGKKVSSTNNTPVPRLTSNPSRVDRLIVDELRELARVSCKNR

SEQ ID NO: 21877 - protein, 285 aa, Homo sapiens
MRAFIFFLFMLLAMFSASSTQISNTSVFKLEENPKPALILEEKNEANHLGGQRDSNKQGGSYTQGNPGTFRLQGQPGYFNKLEKPRHFKQGRAGVLNQPGILKNSGKSNQKGNPESSNKQENSGSSSQLGRPGISTQQGNPGSSDQQEKPGSFSQKVMVGSSSQQGKPGSSSQHGNLGSSTQKGNLGSSSLQGHLGLSSHQGKPESSGQQGKPGSSSQQGNLGTSGQQEKPGSSSQQGKPGLSSHQGKPGSSSQQGNLHLSSQQGNQGPSSKQRKPGSSSRQGNL

SEQ ID NO: 21878 - protein, 116 aa, Homo sapiens
MGGRDQITNLGSEGETHPWGYSSPPYPLHTFFIPFLPSGFGGSGLGIPSDNEKHDLQDCVEVSRPEGPAPELPSSLCGWNKISSLCGLGFPSRDPKTWDLAMLLSPWVDFFELQLL

SEQ ID NO: 21879 - protein, 124 aa, Homo sapiens
MTQNSSSLGDRIITPYTPPRSQPMNKHLFVSLSTLFQTTELDFANKKSCFLCLPLRADGFPEMPHSPAQTERMQKLAKDPPHARSEDVPDHLFFVDTAGLREIVCFCGVLSLRTSEGLMRKETA

SEQ ID NO: 21880 - protein, 155 aa, Homo sapiens
MGGNGSTCKPDTERQGTLSTAAPTTSPAPCLSNHHNKKHLILAFCAGVLLTLLLIAFIFLIIKSYRKYRRERLPISPGPLLRWVPLLSGTMADHSKPQAPDPHSDPPAKLSSIPGESLTYASTTFKLSEEKSNHLAENHSADFDPIVYAQIKVTN

SEQ ID NO: 21881 - protein, 130 aa, Homo sapiens
MGGNGSTCKPDTERQGTLSTAAPTTSPAPCLSNHHNKKHLILAFCAGVLLTLLLIAFIFLIIKSYRKYHSKPQAPDPHSDPPAKLSSIPGESLTYASTTFKLSEEKSNHLAENHSADFDPIVYAQIKVTN

SEQ ID NO: 21882 - protein, 628 aa, Homo sapiens
MEPPDAPAQARGAPRLLLLAVLLAAHPDAQAEVRLSVPPLVEVMRGKSVILDCTPTGTHDHYMLEWFLTDRSGARPRLASAEMQGSELQVTMHDTRGRSPPYQLDSQGRLVLAEAQVGDERDYVCVVRAGAAGTAEATARLNVFAKPEATEVSPNKGTLSVMEDSAQEIATCNSRNGNPAPKITWYRNGQRLEVPVEMNPEGYMTSRTVREASGLLSLTSTLYLRLRKDDRDASFHCAAHYSLPEGRHGRLDSPTFHLTLHYPTEHVQFWVGSPSTPAGWVREGDTVQLLCRGDGSPSPEYTLFRLQDEQEEVLNVNLEGNLTLEGVTRGQSGTYGCRVEDYDAADDVQLSKTLELRVAYLDPLELSEGKVLSLPLNSSAVVNCSVHGLPTPALRWTKDSTPLGDGPMLSLSSITFDSNGTYVCEASLPTVPVLSRTQNFTLLVQGSPELKTAEIEPKADGSWREGDEVTLICSARGHPDPKLSWSQLGGSPAEPIPGRQGWVSSSLTLKVTSALSRDGISCEASNPHGNKRHVFHFGTVSPQTSQAGVAVMAVAVSVGLLLLVVAVFYCVRRKGGPCCRQRREKGAPPPGEPGLSHSGSEQPEQTGLLMGGASGGARGGSGGFGDEC

SEQ ID NO: 21883 - protein, 387 aa, Homo sapiens
MSSKVYSTGSRAKDHQPSGPECLPLPEANAEAIDFLSSLHKEELQMLFFSETLAMVSDTGEPQGELTIEVQRGKYQEKLGMLTYCLFVHASSRGFLDKMLCGNSLLGYLSEKLELMEQHSQDFIKFLILPMERKMSLLKQDDQLAVTRSIKEGEEVKTGVTSFPWSSIKGFISEAANLVLLRVMAWRRMVPSNARFLTLDTEGKLCYLTYQNLGFQTIQVDHQQAEVFIVEQTVHAEEGIPMSCQYYLLSDGHLAKRIQVGSPGCCIITKMPILREEDEIEPRPVFEKKPLVWEEDMELYSKFLDRKEELRLGHASYLRQHPEAHALISDFLLFLLLRQPEDVVTFAAEFFGPFDPWRPSSPALGSSHRPNPFRSLEPEGDARSGAA

SEQ ID NO: 21884 - protein, 463 aa, Homo sapiens
MGAGPSLLLAALLLLLSGDGAVRCDTPANCTYLDLLGTWVFQVGSSGSQRDVNCSVMGPQEKKVVVYLQKLDTAYDDLGNSGHFTIIYNQGFEIVLNDYKWFAFFKYKEEGSKVTTYCNETMTGWVHDVLGRNWACFTGKKVGTASENVYVNIAHLKNSQEKYSNRLYKYDHNFVKAINAIQKSWTATTYMEYETLTLGDMIRRSGGHSRKIPRPKPAPLTAEIQQKILHLPTSWDWRNVHGINFVSPVRNQASCGSCYSFASMGMLEARIRILTNNSQTPILSPQEVVSCSQYAQGCEGGFPYLIAGKYAQDFGLVEEACFPYTGTDSPCKMKEDCFRYYSSEYHYVGGFYGGCNEALMKLELVHHGPMAVAFEVYDDFLHYKKGIYHHTGLRDPFNPFELTNHAVLLVGYGTDSASGMDYWIVKNSWGTGWGENGYFRIRRGTDECAIESIAVAATPIPKL

SEQ ID NO: 21885 - protein, 137 aa, Homo sapiens
MGAGPSLLLAALLLLLSGDGAVRCDTPANCTYLDLLGTWVFQVGSSGSQRDVNCSVMGPQEKKVVVYLQKLDTAYDDLGNSGHFTIIYNQGFEIVLNDYKWFAFFKDVTDFISHLFMQLGTVGIYDLPHLRNKLVIK

SEQ ID NO: 21886 - protein, 141 aa, Homo sapiens
MGAGPSLLLAALLLLLSGDGAVRCDTPANCTYLDLLGTWVFQVGSSGSQRDVNCSVMGPQEKKVVVYLQKLDTAYDDLGNSGHFTIIYNQGFEIVLNDYKWFAFFKDVTDFISHLFMQLGTVGIYDLPHLRNKLAMNRRWG

SEQ ID NO: 21887 - protein, 725 aa, Homo sapiens
MEQSNDSLRVNHNDGEESKTSAQVFEHLICMDSRDSSFGQNDSPTVLPITTREANNSLISQNIPGPLTQTQTLSAEQFHLVDQNGQAIQYELQSLGESNAQMMIVASPTENGQVLRVIPPTQTGMAQVIIPQGQLVDVNSPRDVPEEKPSNRNLPTVRVDTLADNTSNYILHPQTSFPLPKKSVTGMLEEPLLGPLQPLSSNTPIWACRLRSCEKIGDSYRGYCVSETELESVLTFHKQQTQSVWGTRQSPSPAKPATRLMWKSQYVPYDGIPFVNAGSRAVVMECQYGPRRKGFQLKKVSEQESRSCQLYKATCPARIYIKKVQKFPEYRVPTDPKIDKKIIRMEQEKAFNMLKKNLVDAGGVLRWYVQLPTQQAHQYHELETPCLTLSPSPFPVSSLEEEETAVRDENCALPSRLHPQVAHKIQELVSQGIEQVYAVRKQLRKFVERELFKPDEVPERHNLSFFPTVNDIKNHIHEVQKSLRNGDTVYNSEIIPATLQWTTDSGNILKETMTVTFAEGNSPGESITTKVETNQTRGSLSPEPTHLLSSLSSFQPKIFTQLQGLQLQPRYTSPDESPAVVSVNNQPSSSPSGLLDTIGSAVMNNNSLLLGQSHSLQRDTCLTQNNSTASTMGNLPEPDQNLVAMDELVEVGDVEDTGNLEGTVHRILLGDVQTIPIQIIDNHSALIEENPESTISVSQVKQEPKEPALSMEAKKTVDYKKLSAT

SEQ ID NO: 21888 - protein, 207 aa, Homo sapiens
MIVASPTENGQVLRVIPPTQTGMAQVIIPQGQLVDVNSPRDVPEEKPSNRNLPTVRVDTLADNTSNYILHPQTSFPLPKKSVTGMLEEPLLGPLQPLSSNTPIWACRLRSCEKIGDSYRGYCVSETELESVLTFHKQQTQSVWGTRQSPSPAKPATRLMWKSQYVPYDGIPFVNAGTFLKNYFKRFSSSHSPLSKCDFPKVITFLFW

SEQ ID NO: 21889 - protein, 649 aa, Homo sapiens
MEQSNDSLRVNHNDGEESKTSAQVFEMIVASPTENGQVLRVIPPTQTGMAQVIIPQGQLVDVNSPRDVPEEKPSNRNLPTVRVDTLADNTSNYILHPQTSFPLPKKSVTGMLEEPLLGPLQPLSSNTPIWACRLRSCEKIGDSYRGYCVSETELESVLTFHKQQTQSVWGTRQSPSPAKPATRLMWKSQYVPYDGIPFVNAGSRAVVMECQYGPRRKGFQLKKVSEQESRSCQLYKATCPARIYIKKVQKFPEYRVPTDPKIDKKIIRMEQEKAFNMLKKNLVDAGGVLRWYVQLPTQQAHQYHELETPCLTLSPSPFPVSSLEEEETAVRDENCALPSRLHPQVAHKIQELVSQGIEQVYAVRKQLRKFVERELFKPDEVPERHNLSFFPTVNDIKNHIHEVQKSLRNGDTVYNSEIIPATLQWTTDSGNILKETMTVTFAEGNSPGESITTKVETNQTRGSLSPEPTHLLSSLSSFQPKIFTQLQGLQLQPRYTSPDESPAVVSVNNQPSSSPSGLLDTIGSAVMNNNSLLLGQSHSLQRDTCLTQNNSTASTMGNLPEPDQNLVAMDELVEVGDVEDTGNLEGTVHRILLGDVQTIPIQIIDNHSALIEENPESTISVSQVKQEPKEPALSMEAKKTVDYKKLSAT

SEQ ID NO: 21890 - protein, 268 aa, Homo sapiens
MGSAKSVPVTPARPPPHNKHLARVADPRSPSAGILRTPIQVESSPQPGLPAGEQLEGLKHAQDSDPRSPTLGIARTPMKTSSGDPPSPLVKQLSEVFETEDSKSNLPPEPVLPPEAPLSSELDLPLGTQLSVEEQMPPWNQTEFPSKQVFSKEEARQPTETPVASQSSDKPSRDPETPRSSGSMRNRWKPNSSKVLGRSPLTILQDDNSPGTLTLRQGKRPSPLSENVSELKEGAILGTGRLLKTGGRAWEQGQDHDKENQHFPLVES

SEQ ID NO: 21891 - protein, 371 aa, Homo sapiens
MDARRVPQKDLRVKKNLKKFRYVKLISMETSSSSDDSCDSFASDNFANTRLQSVREGCRTRSQCRHSGPLRVAMKFPARSTRGATNKKAESRQPSENSVTDSNSDSEDESGMNFLEKRALNIKQNKAMLAKLMSELESFPGSFRGRHPLPGSDSQSRRPRRRTFPGVASRRNPERRARPLTRSRSRILGSLDALPMEEEEEEDKYMLVRKRKTVDGYMNEDDLPRSRRSRSSVTLPHIIRPVEEITEEELENVCSNSREKIYNRSLGSTCHQCRQKTIDTKTNCRNPDCWGVRGQFCGPCLRNRYGEEVRDALLDPNWHCPPCRGICNCSFCRQRDGRCATGVLVYLAKYHGFGNVHAYLKSLKQEFEMQA

SEQ ID NO: 21892 - protein, 450 aa, Homo sapiens
MDARRVPQKDLRVKKNLKKFRYVKLISMETSSSSDDSCDSFASDNFANTKPKFRSDISEELANVFYEDSDNESFCGFSESEVQDVLDHCGFLQKPRPDVTNELAGIFHADSDDESFCGFSESEIQDGMRLQSVREGCRTRSQCRHSGPLRVAMKFPARSTRGATNKKAESRQPSENSVTDSNSDSEDESGMNFLEKRALNIKQNKAMLAKLMSELESFPGSFRGRHPLPGSDSQSRRPRRRTFPGVASRRNPERRARPLTRSRSRILGSLDALPMEEEEEEDKYMLVRKRKTVDGYMNEDDLPRSRRSRSSVTLPHIIRPVEEITEEELENVCSNSREKIYNRSLGSTCHQCRQKTIDTKTNCRNPDCWGVRGQFCGPCLRNRYGEEVRDALLDPNWHCPPCRGICNCSFCRQRDGRCATGVLVYLAKYHGFGNVHAYLKSLKQEFEMQA

SEQ ID NO: 21893 - protein, 321 aa, Homo sapiens
MDARRVPQKDLRVKKNLKKFRYVKLISMETSSSSDDSCDSFASDNFANTRLQSVREGCRTRSQCRHSGPLRVAMKFPARSTRGATNKKAESRQPSENSVTDSNSDSEDESGMNFLEKRALNIKQNKAMLAKLMSELESFPGSFRGRHPLPGSDSQSRRPRRRTFPGVASRRNPERRARPLTRSRSRILGSLDALPMEEEEEEDKYMLVRKRKTVDGYMNEDDLPRSRRSRSSVTLPHIIRPVEEITEEELENVCSNSREKIYNRSLNWHCPPCRGICNCSFCRQRDGRCATGVLVYLAKYHGFGNVHAYLKSLKQEFEMQA

SEQ ID NO: 21894 - protein, 207 aa, Homo sapiens
MDARRVPQKDLRVKKNLKKFRYVKLISMETSSSSDDSCDSFASDNFANTRLQSVREGCRTRSQCRHSGPLRVAMKFPARSTRGATNKKAESRQPSENSVTDSNSDSEDESGMNFLEKRALNIKQNKAMLAKLMSELESFPGSFRGRHPLPGSDSVSTSSCLYTVVFWAHLRSICVVFKNLISLFVWPSRQTKGTQRKPPDRSLDDPP

SEQ ID NO: 21895 - protein, 329 aa, Homo sapiens
MDARRVPRLQSVREGCRTRSQCRHSGPLRVAMKFPARSTRGATNKKAESRQPSENSVTDSNSDSEDESGMNFLEKRALNIKQNKAMLAKLMSELESFPGSFRGRHPLPGSDSQSRRPRRRTFPGVASRRNPERRARPLTRSRSRILGSLDALPMEEEEEEDKYMLVRKRKTVDGYMNEDDLPRSRRSRSSVTLPHIIRPVEEITEEELENVCSNSREKIYNRSLGSTCHQCRQKTIDTKTNCRNPDCWGVRGQFCGPCLRNRYGEEVRDALLDPNWHCPPCRGICNCSFCRQRDGRCATGVLVYLAKYHGFGNVHAYLKSLKQEFEMQA

SEQ ID NO: 21896 - protein, 406 aa, Homo sapiens
MDARRVPQKDLRVKKNLKKFRYVKLISMETSSSSDDSCDSFASDNFANTKPRPDVTNELAGIFHADSDDESFCGFSESEIQDGMRLQSVREGCRTRSQCRHSGPLRVAMKFPARSTRGATNKKAESRQPSENSVTDSNSDSEDESGMNFLEKRALNIKQNKAMLAKLMSELESFPGSFRGRHPLPGSDSQSRRPRRRTFPGVASRRNPERRARPLTRSRSRILGSLDALPMEEEEEEDKYMLVRKRKTVDGYMNEDDLPRSRRSRSSVTLPHIIRPVEEITEEELENVCSNSREKIYNRSLGSTCHQCRQKTIDTKTNCRNPDCWGVRGQFCGPCLRNRYGEEVRDALLDPNWHCPPCRGICNCSFCRQRDGRCATGVLVYLAKYHGFGNVHAYLKSLKQEFEMQA

SEQ ID NO: 21897 - protein, 836 aa, Homo sapiens
MAGLNCGVSIALLGVLLLGAARLPRGAEAFEIALPRESNITVLIKLGTPTLLAKPCYIVISKRHITMLSIKSGERIVFTFSCQSPENHFVIEIQKNIDCMSGPCPFGEVQLQPSTSLLPTLNRTFIWDVKAHKSIGLELQFSIPRLRQIGPGESCPDGVTHSISGRIDATVVRIGTFCSNGTVSRIKMQEGVKMALHLPWFHPRNVSGFSIANRSSIKRLCIIESVFEGEGSATLMSANYPEGFPEDELMTWQFVVPAHLRASVSFLNFNLSNCERKEERVEYYIPGSTTNPEVFKLEDKQPGNMAGNFNLSLQGCDQDAQSPGILRLQFQVLVQHPQNESNKIYVVDLSNERAMSLTIEPRPVKQSRKFVPGCFVCLESRTCSSNLTLTSGSKHKISFLCDDLTRLWMNVEKTISCTDHRYCQRKSYSLQVPSDILHLPVELHDFSWKLLVPKDRLSLVLVPAQKLQQHTHEKPCNTSFSYLVASAIPSQDLYFGSFCPGGSIKQIQVKQNISVTLRTFAPSFQQEASRQGLTVSFIPYFKEEGVFTVTPDTKSKVYLRTPNWDRGLPSLTSVSWNISVPRDQVACLTFFKERSGVVCQTGRAFMIIQEQRTRAEEIFSLDEDVLPKPSFHHHSFWVNISNCSPTSGKQLDLLFSVTLTPRTVDLTVILIAAVGGGVLLLSALGLIICCVKKKKKKTNKGPAVGIYNDNINTEMPRQPKKFQKGRKDNDSHVYAVIEDTMVYGHLLQDSSGSFLQPEVDTYRPFQGTMGVCPPSPPTICSRAPTAKLATEEPPPRSPPESESEPYTFSHPNNGDVSSKDTDIPLLNTQEPMEPAE

SEQ ID NO: 21898 - protein, 649 aa, Homo sapiens
MQEGVKMALHLPWFHPRNVSGFSIANRSSIKRLCIIESVFEGEGSATLMSANYPEGFPEDELMTWQFVVPAHLRASVSFLNFNLSNCERKEERVEYYIPGSTTNPEVFKLEDKQPGNMAGNFNLSLQGCDQDAQSPGILRLQFQVLVQHPQNESNKIYVVDLSNERAMSLTIEPRPVKQSRKFVPGCFVCLESRTCSSNLTLTSGSKHKISFLCDDLTRLWMNVEKTISCTDHRYCQRKSYSLQVPSDILHLPVELHDFSWKLLVPKDRLSLVLVPAQKLQQHTHEKPCNTSFSYLVASAIPSQDLYFGSFCPGGSIKQIQVKQNISVTLRTFAPSFQQEASRQGLTVSFIPYFKEEGVFTVTPDTKSKVYLRTPNWDRGLPSLTSVSWNISVPRDQVACLTFFKERSGVVCQTGRAFMIIQEQRTRAEEIFSLDEDVLPKPSFHHHSFWVNISNCSPTSGKQLDLLFSVTLTPRTVDLTVILIAAVGGGVLLLSALGLIICCVKKKKKKTNKGPAVGIYNDNINTEMPRQPKKFQKGRKDNDSHVYAVIEDTMVYGHLLQDSSGSFLQPEVDTYRPFQGTMGVCPPSPPTICSRAPTAKLATEEPPPRSPPESESEPYTFSHPNNGDVSSKDTDIPLLNTQEPMEPAE

SEQ ID NO: 21899 - protein, 343 aa, Homo sapiens
MAGLNCGVSIALLGVLLLGAARLPRGAEAFEIALPRESNITVLIKLGTPTLLAKPCYIVISKRHITMLSIKSGERIVFTFSCQSPENHFVIEIQKNIDCMSGPCPFGEVQLQPSTSLLPTLNRTFIWDVKAHKSIGLELQFSIPRLRQIGPGESCPDGVTHSISGRIDATVVRIGTFCSNGTVSRIKMQEGVKMALHLPWFHPRNVSGFSIANRSSIKRLCIIESVFEGEGSATLMSANYPEGFPEDELMTWQFVVPAHLRASVSFLNFNLSNCERKEERVEYYIPGSTTNPEVFKLEDKQPGNMAGNFNLSLQGCDQDAQSPGILRLQFQVLVQHPQNESSE

SEQ ID NO: 21900 - protein, 270 aa, Homo sapiens
MMLRLLSSLLLVAVASGYGPPSSRPSSRVVNGEDAVPYSWPWQVSLQYEKSGSFYHTCGGSLIAPDWVVTAGHCISSSRTYQVVLGEYDRAVKEGPEQVIPINSGDLFVHPLWNRSCVACGNDIALIKLSRSAQLGDAVQLASLPPAGDILPNETPCYITGWGRLYTNGPLPDKLQEALLPVVDYEHCSRWNWWGSSVKKTMVCAGGDIRSGCNGDSGGPLNCPTEDGGWQVHGVTSFVSAFGCNTRRKPTVFTRVSAFIDWIEETIASH

SEQ ID NO: 21901 - protein, 410 aa, Homo sapiens
MPRERRERDAKERDTMKEDGGAEFSARSRKRKANVTVFLQDPDEEMAKIDRTARDQCGSQPWDNNAVCADPCSLIPTPDKEDDDRVYPNSTCKPRIIAPSRGSPLPVLSWANREEVWKIMLNKEKTYLRDQHFLEQHPLLQPKMRAILLDWLMEVCEVYKLHRETFYLAQDFFDRYMATQENVVKTLLQLIGISSLFIAAKLEEIYPPKLHQFAYVTDGACSGDEILTMELMIMKALKWRLSPLTIVSWLNVYMQVAYLNDLHEVLLPQYPQQIFIQIAELLDLCVLDVDCLEFPYGILAASALYHFSSSELMQKVSGYQWCDIENCVKWMVPFAMVIRETGSSKLKHFRGVADEDAHNIQTHRDSLDLLDKARAKKAMLSEQNRASPLPSGLLTPPQSGKKQSSGPEMA

SEQ ID NO: 21902 - protein, 367 aa, Homo sapiens
MPRERRERDAKERDTMKEDGGAEFSARSRKRKANVTVFLQDPDEEMAKIDRTARDQCGSQPWDNNAVCADPCSLIPTPDKEDDDRVYPNSTCKPRIIAPSRGSPLPVLSWANREEVWKIMLNKEKTYLRDQHFLEQHPLLQPKMRAILLDWLMFIAAKLEEIYPPKLHQFAYVTDGACSGDEILTMELMIMKALKWRLSPLTIVSWLNVYMQVAYLNDLHEVLLPQYPQQIFIQIAELLDLCVLDVDCLEFPYGILAASALYHFSSSELMQKVSGYQWCDIENCVKWMVPFAMVIRETGSSKLKHFRGVADEDAHNIQTHRDSLDLLDKARAKKAMLSEQNRASPLPSGLLTPPQSGKKQSSGPEMA

SEQ ID NO: 21903 - protein, 395 aa, Homo sapiens
MKEDGGAEFSARSRKRKANVTVFLQDPDEEMAKIDRTARDQCGSQPWDNNAVCADPCSLIPTPDKEDDDRVYPNSTCKPRIIAPSRGSPLPVLSWANREEVWKIMLNKEKTYLRDQHFLEQHPLLQPKMRAILLDWLMEVCEVYKLHRETFYLAQDFFDRYMATQENVVKTLLQLIGISSLFIAAKLEEIYPPKLHQFAYVTDGACSGDEILTMELMIMKALKWRLSPLTIVSWLNVYMQVAYLNDLHEVLLPQYPQQIFIQIAELLDLCVLDVDCLEFPYGILAASALYHFSSSELMQKVSGYQWCDIENCVKWMVPFAMVIRETGSSKLKHFRGVADEDAHNIQTHRDSLDLLDKARAKKAMLSEQNRASPLPSGLLTPPQSGKKQSSGPEMA

SEQ ID NO: 21904 - protein, 128 aa, Homo sapiens
MGIQGGSVLFGLLLVLAVFCHSGHSLQCYNCPNPTADCKTAVNCSSDFDACLITKAGLQVYNKCWKFEHCNFNDVTTRLRENELTYYCCKKDLCNFNEQLENGGTSLSEKTVLLLVTPFLAAAWSLHP

SEQ ID NO: 21905 - protein, 130 aa, Homo sapiens
MGIQGGSVLFGLLLVLAVFCHSGHSLQCYNCPNPTADCKTAVNCSSDFDACLITKAGLQVYNKCWKFEHCNFNDVTTRLRENELTYYCCKKDLCNFNEQLENDTFLKALKDEKLQGLKTKQPGKKSASLS

SEQ ID NO: 21906 - protein, 3014 aa, Homo sapiens
MAPPPPPVLPVLLLLAAAAALPAMGLRAAAWEPRVPGGTRAFALRPGCTYAVGAACTPRAPRELLDVGRDGRLAGRRRVSGAGRPLPLQVRLVARSAPTALSRRLRARTHLPGCGARARLCGTGARLCGALCFPVPGGCAAAQHSALAAPTTLPACRCPPRPRPRCPGRPICLPPGGSVRLRLLCALRRAAGAVRVGLALEAATAGTPSASPSPSPPLPPNLPEARAGPARRARRGTSGRGSLKFPMPNYQVALFENEPAGTLILQLHAHYTIEGEEERVSYYMEGLFDERSRGYFRIDSATGAVSTDSVLDRETKETHVLRVKAVDYSTPPRSATTYITVLVKDTNDHSPVFEQSEYRERVRENLEVGYEVLTIRASDRDSPINANLRYRVLGGAWDVFQLNESSGVVSTRAVLDREEAAEYQLLVEANDQGRNPGPLSATATVYIEVEDENDNYPQFSEQNYVVQVPEDVGLNTAVLRVQATDRDQGQNAAIHYSILSGNVAGQFYLHSLSGILDVINPLDFEDVQKYSLSIKAQDGGRPPLINSSGVVSVQVLDVNDNEPIFVSSPFQATVLENVPLGYPVVHIQAVDADSGENARLHYRLVDTASTFLGGGSAGPKNPAPTPDFPFQIHNSSGWITVCAELDREEVEHYSFGVEAVDHGSPPMSSSTSVSITVLDVNDNDPVFTQPTYELRLNEDAAVGSSVLTLQARDRDANSVITYQLTGGNTRNRFALSSQRGGGLITLALPLDYKQEQQYVLAVTASDGTRSHTAHVLINVTDANTHRPVFQSSHYTVSVSEDRPVGTSIATLSANDEDTGENARITYVIQDPVPQFRIDPDSGTMYTMMELDYENQVAYTLTIMAQDNGIPQKSDTTTLEILILDANDNAPQFLWDFYQGSIFEDAPPSTSILQVSATDRDSGPNGRLLYTFQGGDDGDGDFYIEPTSGVIRTQRRLDRENVAVYNLWALAVDRGSPTPLSASVEIQVTILDINDNAPMFEKDELELFVEENNPVGSVVAKIRANDPDEGPNAQIMYQIVEGDMRHFFQLDLLNGDLRAMVELDFEVRREYVLVVQATSAPLVSRATVHILLVDQNDNPPVLPDFQILFNNYVTNKSNSFPTGVIGCIPAHDPDVSDSLNYTFVQGNELRLLLLDPATGELQLSRDLDNNRPLEALMEVSVSDGIHSVTAFCTLRVTIITDDMLTNSITVRLENMSQEKFLSPLLALFVEGVAAVLSTTKDDVFVFNVQNDTDVSSNILNVTFSALLPGGVRGQFFPSEDLQEQIYLNRTLLTTISTQRVLPFDDNICLREPCENYMKCVSVLRFDSSAPFLSSTTVLFRPIHPINGLRCRCPPGFTGDYCETEIDLCYSDPCGANGRCRSREGGYTCECFEDFTGEHCEVDARSGRCANGVCKNGGTCVNLLIGGFHCVCPPGEYERPYCEVTTRSFPPQSFVTFRGLRQRFHFTISLTFATQERNGLLLYNGRFNEKHDFIALEIVDEQVQLTFSAGETTTTVAPKVPSGVSDGRWHSVQVQYYNKPNIGHLGLPHGPSGEKMAVVTVDDCDTTMAVRFGKDIGNYSCAAQGTQTGSKKSLDLTGPLLLGGVPNLPEDFPVHNRQFVGCMRNLSVDGKNVDMAGFIANNGTREGCAARRNFCDGRRCQNGGTCVNRWNMYLCECPLRFGGKNCEQAMPHPQLFSGESVVSWSDLNIIISVPWYLGLMFRTRKEDSVLMEATSGGPTSFRLQILNNYLQFEVSHGPSDVESVMLSGLRVTDGEWHHLLIELKNVKEDSEMKHLVTMTLDYGMDQNKADIGGMLPGLTVRSVVVGGASEDKVSVRRGFRGCMQGVRMGGTPTNVATLNMNNALKVRVKDGCDVDDPCTSSPCPPNSRCHDAWEDYSCVCDKGYLGINCVDACHLNPCENMGACVRSPGSPQGYVCECGPSHYGPYCENKLDLPCPRGWWGNPVCGPCHCAVSKGFDPDCNKTNGQCQCKENYYKLLAQDTCLPCDCFPHGSHSRTCDMATGQCACKPGVIGRQCNRCDNPFAEVTTLGCEVIYNGCPKAFEAGIWWPQTKFGQPAAVPCPKGSVGNAVRHCSGEKGWLPPELFNCTTISFVDLRAMNEKLSRNETQVDGARALQLVRALRSATQHTGTLFGNDVRTAYQLLGHVLQHESWQQGFDLAATQDADFHEDVIHSGSALLAPATRAAWEQIQRSEGGTAQLLRRLEGYFSNVARNVRRTYLRPFVIVTANMILAVDIFDKFNFTGARVPRFDTIHEEFPRELESSVSFPADFFRPPEEKEGPLLRPAGRRTTPQTTRPGPGTEREAPISRRRRHPDDAGQFAVALVIIYRTLGQLLPERYDPDRRSLRLPHRPIINTPMVSTLVYSEGAPLPRPLERPVLVEFALLEVEERTKPVCVFWNHSLAVGGTGGWSARGCELLSRNRTHVACQCSHTASFAVLMDISRRENGEVLPLKIVTYAAVSLSLAALLVAFVLLSLVRMLRSNLHSIHKHLAVALFLSQLVFVIGINQTENPFLCTVVAILLHYIYMSTFAWTLVESLHVYRMLTEVRNIDTGPMRFYYVVGWGIPAIVTGLAVGLDPQGYGNPDFCWLSLQDTLIWSFAGPIGAVIIINTVTSVLSAKVSCQRKHHYYGKKGIVSLLRTAFLLLLLISATWLLGLLAVNRDALSFHYLFAIFSGLQGPFVLLFHCVLNQEVRKHLKGVLGGRKLHLEDSATTRATLLTRSLNCNTTFGDGPDMLRTDLGESTASLDSIVRDEGIQKLGVSSGLVRGSHGEPDASLMPRSCKDPPGHDSDSDSELSLDEQSSSYASSHSSDSEDDGVGAEEKWDPARGAVHSTPKGDAVANHVPAGWPDQSLAESDSEDPSGKPRLKVETKVSVELHREEQGSHRGEYPPDQESGGAARLASSQPPEQRKGILKNKVTYPPPLTLTEQTLKGRLREKLADCEQSPTSSRTSSLGSGGPDCAITVKSPGREPGRDHLNGVAMNVRTGSAQADGSDSEKP

SEQ ID NO: 21907 - protein, 1397 aa, Homo sapiens
MAPPPPPVLPVLLLLAAAAALPAMGLRAAAWEPRVPGGTRAFALRPGCTYAVGAACTPRAPRELLDVGRDGRLAGRRRVSGAGRPLPLQVRLVARSAPTALSRRLRARTHLPGCGARARLCGTGARLCGALCFPVPGGCAAAQHSALAAPTTLPACRCPPRPRPRCPGRPICLPPGGSVRLRLLCALRRAAGAVRVGLALEAATAGTPSASPSPSPPLPPNLPEARAGPARRARRGTSGRGSLKFPMPNYQVALFENEPAGTLILQLHAHYTIEGEEERVSYYMEGLFDERSRGYFRIDSATGAVSTDSVLDRETKETHVLRVKAVDYSTPPRSATTYITVLVKDTNDHSPVFEQSEYRERVRENLEVGYEVLTIRASDRDSPINANLRYRVLGGAWDVFQLNESSGVVSTRAVLDREEAAEYQLLVEANDQGRNPGPLSATATVYIEVEDENDNYPQFSEQNYVVQVPEDVGLNTAVLRVQATDRDQGQNAAIHYSILSGNVAGQFYLHSLSGILDVINPLDFEDVQKYSLSIKAQDGGRPPLINSSGVVSVQVLDVNDNEPIFVSSPFQATVLENVPLGYPVVHIQAVDADSGENARLHYRLVDTASTFLGGGSAGPKNPAPTPDFPFQIHNSSGWITVCAELDREEVEHYSFGVEAVDHGSPPMSSSTSVSITVLDVNDNDPVFTQPTYELRLNEDAAVGSSVLTLQARDRDANSVITYQLTGGNTRNRFALSSQRGGGLITLALPLDYKQEQQYVLAVTASDGTRSHTAHVLINVTDANTHRPVFQSSHYTVSVSEDRPVGTSIATLSANDEDTGENARITYVIQDPVPQFRIDPDSGTMYTMMELDYENQVAYTLTIMAQDNGIPQKSDTTTLEILILDANDNAPQFLWDFYQGSIFEDAPPSTSILQVSATDRDSGPNGRLLYTFQGGDDGDGDFYIEPTSGVIRTQRRLDRENVAVYNLWALAVDRGSPTPLSASVEIQVTILDINDNAPMFEKDELELFVEENNPVGSVVAKIRANDPDEGPNAQIMYQIVEGDMRHFFQLDLLNGDLRAMVELDFEVRREYVLVVQATSAPLVSRATVHILLVDQNDNPPVLPDFQILFNNYVTNKSNSFPTGVIGCIPAHDPDVSDSLNYTFVQGNELRLLLLDPATGELQLSRDLDNNRPLEALMEVSVSDGIHSVTAFCTLRVTIITDDMLTNSITVRLENMSQEKFLSPLLALFVEGVAAVLSTTKDDVFVFNVQNDTDVSSNILNVTFSALLPGGVRGQFFPSEDLQEQIYLNRTLLTTISTQRVLPFDDNICLREPCENYMKCVSVLRFDSSAPFLSSTTVLFRPIHPINGLRCRCPPGFTGDYCETEIDLCYSDPCGANGRCRSREGGYTCECFEDFTEIS

SEQ ID NO: 21908 - protein, 283 aa, Homo sapiens
MAGNFWQSSHYLQWILDKQDLLKERQKDLKFLSEEEYWKLQIFFTNVIQALGEHLKLRQQVIATATVYFKRFYARYSLKSIDPVLMAPTCVFLASKVEEFGVVSNTRLIAAATSVLKTRFSYAFPKEFPYRMNHILECEFYLLELMDCCLIVYHPYRPLLQYVQDMGQEDMLLPLAWRIVNDTYRTDLCLLYPPFMIALACLHVACVVQQKDARQWFAELSVDMEKILEIIRVILKLYEQWKNFDERKEMATILSKMPKPKPPPNSEGEQGPNGSQNSSYSQS

SEQ ID NO: 21909 - protein, 198 aa, Homo sapiens
MAPTCVFLASKVEEFGVVSNTRLIAAATSVLKTRFSYAFPKEFPYRMNHILECEFYLLELMDCCLIVYHPYRPLLQYVQDMGQEDMLLPLAWRIVNDTYRTDLCLLYPPFMIALACLHVACVVQQKDARQWFAELSVDMEKILEIIRVILKLYEQWKNFDERKEMATILSKMPKPKPPPNSEGEQGPNGSQNSSYSQS

SEQ ID NO: 21910 - protein, 236 aa, Homo sapiens
MGVEGCTKCIKYLLFVFNFVFWLAGGVILGVALWLRHDPQTTNLLYLELGDKPAPNTFYVGIYILIAVGAVMMFVGFLGCYGAIQESQCLLGTFFTCLVILFACEVAAGIWGFVNKDQIAKDVKQFYDQALQQAVVDDDANNAKAVVKTFHETLDCCGSSTLTALTTSVLKNNLCPSGSNIISNLFKEDCHQKIDDLFSGKLYLIGIAAIVVAVIMIFEMILSMVLCCGIRNSSVY

SEQ ID NO: 21911 - protein, 726 aa, Homo sapiens
MEGERKNNNKRWYFTREQLENSPSRRFGVDPDKELSYRQQAANLLQDMGQRLNVSQLTINTAIVYMHRFYMIQSFTQFPGNSVAPAALFLAAKVEEQPKKLEHVIKVAHTCLHPQESLPDTRSEAYLQQVQDLVILESIILQTLGFELTIDHPHTHVVKCTQLVRASKDLAQTSYFMATNSLHLTTFSLQYTPPVVACVCIHLACKWSNWEIPVSTDGKHWWEYVDATVTLELLDELTHEFLQILEKTPNRLKRIWNWRACEAAKKTKADDRGTDEKTSEQTILNMISQSSSDTTIAGLMSMSTSTTSAVPSLPVSEESSSNLTSVEMLPGKRWLSSQPSFKLEPTQGHRTSENLALTGVDHSLPQDGSNAFISQKQNSKSVPSAKVSLKEYRAKHAEELAAQKRQLENMEANVKSQYAYAAQNLLSHHDSHSSVILKMPIEGSENPERPFLEKADKTALKMRIPVAGGDKAASSKPEEIKMRIKVHAAADKHNSVEDSVTKSREHKEKHKTHPSNHHHHHNHHSHKHSHSQLPVGTGNKRPGDPKHSSQTSNLAHKTYSLSSSFSSSSSTRKRGPSEETGGAVFDHPAKIAKSTKSSSLNFSFPSLPTMGQMPGHSSDTSGLSFSQPSCKTRVPHSKLDKGPTGANGHNTTQTIDYQDTVNMLHSLLSAQGVQPTQPTAFEFVRPYSDYLNPRSGGISSRSGNTDKPRPPPLPSEPPPPLPPLPK

SEQ ID NO: 21912 - protein, 184 aa, Homo sapiens
MEGERKNNNKRWYFTREQLENSPSRRFGVDPDKELSYRQQAANLLQDMGQRLNVSQLTINTAIVYMHRFYMIQSFTQFPGNSVAPAALFLAAKVEEQPKKLEHVIKVAHTCLHPQESLPDTRSEAYLQQVQDLVILESIILQTLGFELTIDHPHTHVVKCTQLVRASKDLAQTSYFMATNRTDT

SEQ ID NO: 21913 - protein, 449 aa, Homo sapiens
MAFARRLLRGPLSGPLLGRRGVCAGAMAPPRRFVLELPDCTLAHFALGADAPGDADAPDPRLAALLGPPERSYSLCVPVTPDAGCGARVRAARLHQRLLHQLRRGPFQRCQLLRLLCYCPGGQAGGAQQGFLLRDPLDDPDTRQALLELLGACQEAPRPHLGEFEADPRGQLWQRLWEVQDGRRLQVGCAQVVPVPEPPLHPVVPDLPSSVVFPDREAARAVLEECTSFIPEARAVLDLVDQCPKQIQKGKFQVVAIEGLDATGKTTVTQSVADSLKAVLLKSPPSCIGQWRKIFDDEPTIIRRAFYSLGNYIVASEIAKESAKSPVIVDRYWHSTATYAIATEVSGGLQHLPPAHHPVYQWPEDLLKPDLILLLTVSPEERLQRLQGRGMEKTREEAELEANSVFRQKVEMSYQRMENPGCHVVDASPSREKVLQTVLSLIQNSFSEP

SEQ ID NO: 21914 - protein, 303 aa, Homo sapiens
MAFARRLLRGPLSGPLLGRRGVCAGAMAPPRRFVLELPDCTLAHFALGADAPGDADAPDPRLAALLGPPERSYSLCVPVTPDAGCGARVRAARLHQRLLHQLRRGPFQRCQLLRLLCYCPGGQAGGAQQGFLLRDPLDDPDTRQALLELLGACQEAPRPHLGEFEADPRGQLWQRLWEVQDGRRLQVGCAQVVPVPEPPLHPVVPDLPSSVVFPDREAARAVLEECTSFIPEARAVLDLVDQCPKQIQKGKFQVVAIEGLDATGKTTVTQSVADSLKAVPQPITLCTSGQRTCSNLTLSCCSL

SEQ ID NO: 21915 - protein, 366 aa, Homo sapiens
MAFARRLLRGPLSGPLLGRRGVCAGAMAPPRRFVLELPDCTLAHFALGADAPGDADAPDPRLAALLGPPERSYSLCVPVTPDAGCGARVRAARLHQRLLHQLRRGPFQRCQLLRLLCYCPGGQAGGAQQGFLLRDPLDDPDTRQALLELLGACQEAPRPHLGEFEADPRGQLWQRLWEVQDGRRLQVGCAQVVPVPEPPLHPVVPDLPSSVVFPDREAARAVLEECTSFIPEARAVLDLVDQCPKQIQKGKFQVVAIEGLDATGKTTVTQSVADSLKAVLLKSPPSCIGQWRKIFDDEPTIIRRAFYSLGNYIVASEIAKESAKSPVIVDRSQLGGTLYHPSLHLLGSEVCGTGILDSSHSSQGLE

SEQ ID NO: 21916 - protein, 409 aa, Homo sapiens
MAFARRLLRGPLSGPLLGRRGVCAGAMAPPRRFVLELPDCTLAHFALGADAPGDADAPDPRLAALLGPPERSYSLCVPVTPDAGCGARVRAARLHQRLLHQLRRGPFQRCQLLRLLCYCPGGQAGGAQQGFLLRDPLDDPDTRQALLELLGACQEAPRPHLGEFEADPRGQLWQRLWEVQDGRRLQVGCAQVVPVPEPPLHPVVPDLPSSVVFPDREAARAVLEECTSFIPEARAVLDLVDQCPKQIQKGKFQVVAIEGLDATGKTTVTQSVADSLKAVLLKSPPSCIGQWRKIFDDEPTIIRRAFYSLGNYIVASEIAKESAKSPVIVDRYWHSTATYAIATEVSGGLQHLPPAHHPVYQWPEDLLKPDLILLLTVSPEERLQRLQGRGMEKTREEAELEANSVFRQK

SEQ ID NO: 21917 - protein, 699 aa, Homo sapiens
MLKLSGEGLRDSYHSRRDQIALKNLQSDVTEAKSDFTKETLASQNTKMISSIVISQMIDENKSRENRASLPLPCAIAQSRAHHAKQSLANRSGVNIHRAFALLPGRLGIPAPSDERGPEAELPPKEERPCGGPRRGFASITITARRVGPPARALVWGTAGDSLCPKCRAEDTLFQAPPALANGAHPGRHQRSFACTEFSRNSSVVRLKVPEAHTGLCERRKYWVTHADDKETSFSPDTPLSGKSPLVFSSCVHLRVSQQCPDSIYYVDKSLSVPIEPPQIASPKMHRSVLSLNLNCSSHRLTADGVDGLVNREPISEALKQELLEGDQDLVGQRWNPGLQESHLKETPSLRRVHLGTGACPWSGSFPLENTELANVGANQVTVRKGEKDHTTHCHASDHANQLSIHIPGWSYRAVHTKVFSGSSKRQQGEVCMTVSAPPVEQKPTRHFLPIGDSSPSDDCLSRDLSEPTERRHQSFLKPRILFPGFLCPLQDVCASLQEDNGVQIESKFPKGDYTCCDLVVKIKECKKSEDPTTPEPSPAAPSPAPRDGAGSPGLSEDCSESQQTPARSLTLQEALEVRKPQFISRSQERLKKLEHMVQQRKAQRKEDLRQKQSLLPIRTSKKQFTIPHPLSDNLFKPKERCISEKEMHMRSKRIYDNLPEVKKKKEEQRKRVILQSNRLRAEVFKKQLLDQLLQRNAV

SEQ ID NO: 21918 - protein, 602 aa, Homo sapiens
MLKLSGEGLRDSYHSRRDQIALKNLQSDVTEAKSDFTKETLASQNTKMISSIVISQMIDENKSRENRASLPLPCAIAQSRAHHAKQSLANRSGVNIHRAFALLPGRLGIPAPSDERGPEAELPPKEERPCGGPRRGFASITITARRVGPPARALVWGTAGDSLCPKCRAEDTLFQAPPALANGAHPGRHQRSFACTEFSRNSSVVRLKVPEAHTGLCERRKYWVTHADDKETSFSPDTPLSGKSPLVFSSCVHLRVSQQCPDSIYYVDKSLSVPIEPPQIASPKMHRSVLSLNLNCSSHRLTADGVDGLVNREPISEALKQELLEGDQDLVGQRWNPGLQESHLKETPSLRRVHLGTGACPWSGSFPLENTELANVGANQVTVRKGEKDHTTHCHASDHANQLSIHIPGWSYRAGDYTCCDLVVKIKECKKSEDPTTPEPSPAAPSPAPRDGAGSPGLSEDCSESQQTPARSLTLQEALEVRKPQFISRSQERLKKLEHMVQQRKAQRKEDLRQKQSLLPIRTSKKQFTIPHPLSDNLFKPKERCISEKEMHMRSKRIYDNLPEVKKKKEEQRKRVILQSNRLRAEVFKKQLLDQLLQRNAV

SEQ ID NO: 21919 - protein, 526 aa, Homo sapiens
MASGPHSTATAAAAASSAAPSAGGSSSGTTTTTTTTTGGILIGDRLYSEVSLTIDHSLIPEERLSPTPSMQDGLDLPSETDLRILGCELIQAAGILLRLPQVAMATGQVLFHRFFYSKSFVKHSFEIVAMACINLASKIEEAPRRIRDVINVFHHLRQLRGKRTPSPLILDQNYINTKNQVIKAERRVLKELGFCVHVKHPHKIIVMYLQVLECERNQTLVQTAWNYMNDSLRTNVFVRFQPETIACACIYLAARALQIPLPTRPHWFLLFGTTEEEIQEICIETLRLYTRKKPNYELLEKEVEKRKVALQEAKLKAKGLNPDGTPALSTLGGFSPASKPSSPREVKAEEKSPISINVKTVKKEPEDRQQASKSPYNGVRKDSKRSRNSRSASRSRSRTRSRSRSHTPRRHYNNRRSRSGTYSSRSRSRSRSHSESPRRHHNHGSPHLKAKHTRDDLKSSNRHGHKRKKSRSRSQSKSRDHSDAAKKHRHERGHHRDRRERSRSFERSHKSKHHGGSRSGHGRHRR

SEQ ID NO: 21920 - protein, 232 aa, Homo sapiens
MASGPHSTATAAAAASSAAPSAGGSSSGTTTTTTTTTGGILIGDRLYSEVSLTIDHSLIPEERLSPTPSMQDGLDLPSETDLRILGCELIQAAGILLRLPQVAMATGQVLFHRFFYSKSFVKHSFEIVAMACINLASKIEEAPRRIRDVINVFHHLRQLRGKRTPSPLILDQNYINTKNQVIKAERRVLKELGFCVHVKHPHKIIVMYLQVLECERNQTLVQTAWVVHDGKS

SEQ ID NO: 21921 - protein, 172 aa, Homo sapiens
MASGPHSTATAAAAASSAAPSAGGSSSGTTTTTTTTTGGILIGDRLYSEVSLTIDHSLIPEERLSPTPSMQDGLDLPSETDLRILGCELIQAAGILLRLPQVAMATGQVLFHRFFYSKSFVKHSFEIVAMACINLASKIEEAPRRIRDVINVFHHLRQLRGKSDQLHLPKPG

SEQ ID NO: 21922 - protein, 428 aa, Homo sapiens
MASGPHSTATAAAAASSAAPSAGGSSSGTTTTTTTTTGGILIGDRLYSEVSLTIDHSLIPEERLSPTPSMQDGLDLPSETDLRILGCELIQAAGILLRLPQVAMATGQVLFHRFFYSKSFVKHSFEIVAMACINLASKIEEAPRRIRDVINVFHHLRQLRGKRTPSPLILDQNYINTKNQVIKAERRVLKELGFCVHVKHPHKIIVMYLQVLECERNQTLVQTAWNYMNDSLRTNVFVRFQPETIACACIYLAARALQIPLPTRPHWFLLFGTTEEEIQEICIETLRLYTRKKPNYELLEKEVEKRKVALQEAKLKAKGLNPDGTPALSTLGGFSPASKPSSPREVKAEEKSPISINVKTVKKEPEDRQQASKSPYNGVRKDSKRSRNSRSASRSRSRTRSRSRSHTPRRQDEVLLRCPGRSRTPGLK

SEQ ID NO: 21923 - protein, 172 aa, Homo sapiens
MNHCIQFSPQSLQRWLILPCYDLKLPIWANTTEFCPHGPRRASQDPQLLAWLPDQSLEVSLELYDWNSMTFTLFLETVEPVAVESEGSGIFSFVWQQLIFPAEARWCFSWAQDCGLDGSFPGSAHTEPFGKAAAGQGSVAGKEAKKAGPGFHRQLLYLQFQKRCLFNYPELL

SEQ ID NO: 21924 - protein, 98 aa, Homo sapiens
MVLAMLGALHPRAGLSLFLHLILAVALLRSQPLRSQRSVPEAFSAPLELSQPLSGLVDDYGILPKHPRPRGPRPLLSRAQQRKRDGPDLAEYYYDAHL

SEQ ID NO: 21925 - protein, 197 aa, Homo sapiens
MSARAPKELRLALPPCLLNRTFASPNASGSGNTGARGPGAVGSGTCITQVGQQLFQSFSSTLVLIVLVTLIFCLIVLSLSTFHIHKRRMKKRKMQRAQEEYERDHCSGSRGGGGLPRPGRQAPTHAKETRLERQPRDSPFCAPSNASSLSSSSPGLPCQGPCAPPPPPPASSPQGAHAASSCLDTAGEGLLQTVVLS

SEQ ID NO: 21926 - protein, 262 aa, Homo sapiens
MTQPVPRLSVPAALALGSAALGAAFATGLFLGRRCPPWRGRREQCLLPPEDSRLWQYLLSRSMREHPALRSLRLLTLEQPQGDSMMTCEQAQLLANLARLIQAKKALDLGTFTGYSALALALALPADGRVVTCEVDAQPPELGRPLWRQAEAEHKIDLRLKPALETLDELLAAGEAGTFDVAVVDADKENCSAYYERCLQLLRPGGILAVLRVLWRGKVLQPPKGDVAAECVRNLNERIRRDVRVYISLLPLGDGLTLAFKI

SEQ ID NO: 21927 - protein, 1047 aa, Homo sapiens
MAEKRPLRTLGPVMYGKLPRLETDSGLEHSLPHSVGNQDPCTYKGSYFSCPMAGTPKAESEQLASWTPYPPLYSTGMAGPPLQADNLLTNCLFYRSPAEGPEKMQDSSPVELLPFSPQAHSYPGPPLAAPKPVYRNPLCYGLSTCLGEGAVKRPLDVDWTLATGPLLPSADPPCSLAPAPSKGQTLDGTFLRGVPAEGSSKDSSGSFSPCQPFLEKYQTIHSTGFLASRYTGPYPRNSKQAMSEGPSSPWTQLAQPLGPPCQDTGPTHYPPPHHPPPHPPQALPCPPACRHPEKQGSYSPALPLQPLGGHKGTGYQAGGLGSPYLRQQAAQAPYIPPLGLDAYPYPSAPLPAPSPGLKLEPPLTPRCPLDFAPQTLSFPYARDDLSLYGASPGLGGTPPSQNNVRAVPQPGAFQRACQPLPASQPCSEPVRPAQEAEEKTWLPSCRKEKLQPRLSEHSGPPIVIRDSPVPCTPPALPPCARECQSLPQKEGARPPSSPPMPVIDNVFSLAPYRDYLDVPAPEATTEPDSATAEPDSAPATSEGQDKGCRGTLPAQEGPSGSKPLRGSLKEEVALDLSVRKPTAEASPVKASRSVEHAKPTAAMDVPDVGNMVSDLPGLKKIDTEAPGLPGVPVTTDAMPRTNFHSSVAFMFRKFKILRPAPLPAAVVPSTPTSAPAPTQPAPTPTSGPIGLRILAQQPLSVTCFSLALPSPPAVAVASPAPAPAPSPAPARAQAPASARDPAPAPAPVAGPAPASTSAPGDSLEQHFTGLHASLCDAISGSVAHSPPEKLREWLETAGPWGQAAWQDCQGVQGLLAKLLSQLQRFDRTHRCPFPHVVRAGAIFVPIHLVKERLFPRLPPASVDHVLQEHRVELRPTTLSEERALRELALPGCTSRMLKLLALRQLPDIYPDLLGLQWRDCVRRQLGDFDTEAGAVSSSEPTVARGEPESLALAQKSPAPKVRKPGRKPPTPGPEKAEAAAGEESCGASPTPATSASPPGPTLKARFRSLLETAWLNGLALPTWGHKSSRPDQPSPCPQLLDSQSHHL

SEQ ID NO: 21928 - protein, 938 aa, Homo sapiens
MAEKRPLRTLGPVMYGKLPRLETDSGLEHSLPHSVGNQDPCTYKGSYFSCPMAGTPKAESEQLASWTPYPPLYSTGMAGPPLQADNLLTNCLFYRSPAEGPEKMQDSSPVELLPFSPQAHSYPGPPLAAPKPVYRNPLCYGLSTCLGEGAVKRPLDVDWTLATGPLLPSADPPCSLAPAPSKGQTLDGTFLRGVPAEGSSKDSSGSFSPCQPFLEKYQTIHSTGFLASRYTGPYPRNSKQAMSEGPSSPWTQLAQPLGPPCQDTGPTHYPPPHHPPPHPPQALPCPPACRHPEKQGSYSPALPLQPLGGHKGTGYQAGGLGSPYLRQQAAQAPYIPPLGLDAYPYPSAPLPAPSPGLKLEPPLTPRCPLDFAPQTLSFPYARDDLSLYGASPGLGGTPPSQNNVRAVPQPGAFQRACQPLPASQPCSEPVRPAQEAEEKTWLPSCRKEKLQPRLSEHSGPPIVIRDSPVPCTPPALPPCARECQSLPQKEGARPPSSPPMPVIDNVFSLAPYRDYLDVPAPEATTEPDSATAEPDSAPATSEGQDKGCRGTLPAQEGPSGSKPLRGSLKEEVALDLSVRKPTAEASPVKASRSVEHAKPTAAMDVPDVGNMVSDLPGLKKIDTEAPGLPGVPVTTDAMPRTNFHSSVAFMFRKFKILRPAPLPAAVVPSTPTSAPAPTQPAPTPTSGPIGLRILAQQPLSVTCFSLALPSPPAVAVASPAPAPAPSPAPARAQAPASARDPAPAPAPVAGPAPASTSAPGDSLEQHFTGLHASLCDAISGSVAHSPPEKLREWLETAGPWGQAAWQDCQGVQGLLAKLLSQLQRFDRTHRCPFPHVVRAGAIFVPIHLVKERLFPRLPPASVDHVLQEHRVELRPTTLSEERALRELALPGCTSRMLKLLALRQLPDIYPDLLGLQWRDCVRRQLGEHGAAPVATGAV

SEQ ID NO: 21929 - protein, 137 aa, Homo sapiens
MGQPQWPPELCEQVTGDFDTEAGAVSSSEPTVARGEPESLALAQKSPAPKVRKPGRKPPTPGPEKAEAAAGEESCGASPTPATSASPPGPTLKARFRSLLETAWLNGLALPTWGHKSSRPDQPSPCPQLLDSQSHHL

SEQ ID NO: 21930 - protein, 153 aa, Homo sapiens
MLRLRSGLRHLRATPNTRGSARLLCAEMPKKAGATTKGKSQSKEPERPLPPLGPVAVDPKGCVTIAIHAKPGSKQNAVTDLTAEAVNVAIAAPPSEGEANAELCRYLSKVLELRKSDVVLDKGGKSREKVVKLLASTTPEEILEKLKKEAKKT

SEQ ID NO: 21931 - protein, 149 aa, Homo sapiens
MLRLRSGLRHLRATPNTRGSARLLCAEMPKKAGATTKGKSQSKEPERPLPPLGPVAVDPKGCVTIAIHAKPGSKQNAVTDLTAEAVNVAIAAPPSEGEANAELCRYLSKVLELRKSDVVLDKLCYSIPQQLEETQEGVSGIPDTPCHFL

SEQ ID NO: 21932 - protein, 167 aa, Homo sapiens
MLRLRSGLRHLRATPNTRGSARLLCAEMPKKAGATTKGKSQSKEPERPLPPLGPVAVDPKGCVTIAIHAKPGSKQNAVTDLTAEAVNVAIAAPPSEGEANAELCRYLSKVLELRKSDVVLDKTGSCYIAQAGLELLASSDLPASASQSAGITGVSHHTQPALLLISL

SEQ ID NO: 21933 - protein, 219 aa, Homo sapiens
MEAARDYAGALIRPLTFMGSQTKRVLFTPLMHPARPFRVSNHDRSSRRGVMASSLQELISKTLDALVIATGLVTLVLEEDGTVVDTEEFFQTLGDNTHFMILEKGQKWMPGSQHVPTCSPPKRSGIARVTFDLYRLNPKDFIGCLNVKATMYEMYSVSYDIRCTGLKGLLRSLLRFLSYSAQVTGQFLIYLGTYMLRVLDDKEERPSLRSQAKGRFTCG

SEQ ID NO: 21934 - protein, 547 aa, Homo sapiens
MTKTDPAPMAPPPRGEEEEEEEEDEPVPEAPSPTQERRQKPVVHPSAPAPLPKDYAFTFFDPNDPACQEILFDPQTTIPELFAIVRQWVPQVQHKIDVIGNEILRRGCHVNDRDGLTDMTLLHYACKAGAHGVGDPAAAVRLSQQLLALGADVTLRSRWTNMNALHYAAYFDVPDLVRVLLKGARPRVVNSTCSDFNHGSALHIAASSLCLGAAKCLLEHGANPALRNRKGQVPAEVVPDPMDMSLDKAEAALVAKELRTLLEEAVPLSCALPKVTLPNYDNVPGNLMLSALGLRLGDRVLLDGQKTGTLRFCGTTEFASGQWVGVELDEPEGKNDGSVGGVRYFICPPKQGLFASVSKISKAVDAPPSSVTSTPRTPRMDFSRVTGKGRREHKGKKKTPSSPSLGSLQQRDGAKAEVGDQVLVAGQKQGIVRFYGKTDFAPGYWYGIELDQPTGKHDGSVFGVRYFTCPPRHGVFAPASRIQRIGGSTDSPGDSVGAKKVHQVTMTQPKRTFTTVRTPKDIASENSISRLLFCCWFPWMLRAEMQS

SEQ ID NO: 21935 - protein, 475 aa, Homo sapiens
MAALTTLFKYIDENQDRYIKKLAKWVAIQSVSAWPEKRGEIRRMMEVAAADVKQLGGSVELVDIGKQKLPDGSEIPLPPILLGRLGSDPQKKTVCIYGHLDVQPAALEDGWDSEPFTLVERDGKLYGRGSTDDKGPVAGWINALEAYQKTGQEIPVNVRFCLEGMEESGSEGLDELIFARKDTFFKDVDYVCISDNYWLGKKKPCITYGLRGICYFFIEVECSNKDLHSGVYGGSVHEAMTDLILLMGSLVDKRGNILIPGINEAVAAVTEEEHKLYDDIDFDIEEFAKDVGAQILLHSHKKDILMHRWRYPSLSLHGIEGAFSGSGAKTVIPRKVVGKFSIRLVPNMTPEVVGEQVTSYLTKKFAELRSPNEFKVYMGHGGKPWVSDFSHPHYLAGRRAMKTVFGVEPDLTREGGSIPVTLTFQEATGKNVMLLPVGSADDGAHSQNEKLNRYNYIEGTKMLAAYLYEVSQLKD

SEQ ID NO: 21936 - protein, 391 aa, Homo sapiens
MAALTTLFKYIDENQDRYIKKLAKWVAIQSVSAWPEKRGEIRRMMEVAAADVKQLGGSVELVDIGKQKEIPVNVRFCLEGMEESGSEGLDELIFARKDTFFKDVDYVCISDNYWLGKKKPCITYGLRGICYFFIEVECSNKDLHSGVYGGSVHEAMTDLILLMGSLVDKRGNILIPGINEAVAAVTEEEHKLYDDIDFDIEEFAKDVGAQILLHSHKKDILMHRWRYPSLSLHGIEGAFSGSGAKTVIPRKVVGKFSIRLVPNMTPEVVGEQVTSYLTKKFAELRSPNEFKVYMGHGGKPWVSDFSHPHYLAGRRAMKTVFGVEPDLTREGGSIPVTLTFQEATGKNVMLLPVGSADDGAHSQNEKLNRYNYIEGTKMLAAYLYEVSQLKD

SEQ ID NO: 21937 - protein, 133 aa, Homo sapiens
MNHTVQTFFSPVNSGQPPNYEMLKEEHKVAVLGVPHNPAPPTSTVIHIRSKTSVPHHVVWSLFNTLFMNPCCLGFIAFAYSVKSRDRKMVGNVTGAQAYASTTKCLNIWALILGILMTILLIIIPVLIFQAHR

SEQ ID NO: 21938 - protein, 527 aa, Homo sapiens
MAPERLRSRALSAFKLRGLLLRGEAIKYLTEALQSISELELEDKLEKIINAVEKQPLSSNMIERSVVEAAVQECSQSVDETIEHVFNIIGAFDIPRFVYNSERKKFLPLLMTNHPAPNLFGTPRDKAEMFRERYTILHQRTHRHELFTPPVIGSHPDESGSKFQLKTIETLLGSTTKIGDAIVLGMITQLKEGKFFLEDPTGTVQLDLSKAQFHSGLYTEACFVLAEGWFEDQVFHVNAFGFPPTEPSSTTRAYYGNINFFGGPSNTSVKTSAKLKQLEEENKDAMFVFLSDVWLDQVEVLEKLRIMFAGYSPAPPTCFILCGNFSSAPYGKNQVQALKDSLKTLADIICEYPDIHQSSRFVFVPGPEDPGFGSILPRPPLAESITNEFRQRVPFSVFTTNPCRIQYCTQEITVFREDLVNKMCRNCVRFPSSNLAIPNHFVKTILSQGHLTPLPLYVCPVYWAYDYALRVYPVPDLLVIADKYDPFTTTNTECLCINPGSFPRSGFSFKVFYPSNKTVEDSKLQGF

SEQ ID NO: 21939 - protein, 501 aa, Homo sapiens
MAPERLRSRALSAFKLRGLLLRGEAIKYLTEALQSISELELEDKLEKIINAVEKQPLSSNMIERSVVEAAVQECSQSVDETILLMTNHPAPNLFGTPRDKAEMFRERYTILHQRTHRHELFTPPVIGSHPDESGSKFQLKTIETLLGSTTKIGDAIVLGMITQLKEGKFFLEDPTGTVQLDLSKAQFHSGLYTEACFVLAEGWFEDQVFHVNAFGFPPTEPSSTTRAYYGNINFFGGPSNTSVKTSAKLKQLEEENKDAMFVFLSDVWLDQVEVLEKLRIMFAGYSPAPPTCFILCGNFSSAPYGKNQVQALKDSLKTLADIICEYPDIHQSSRFVFVPGPEDPGFGSILPRPPLAESITNEFRQRVPFSVFTTNPCRIQYCTQEITVFREDLVNKMCRNCVRFPSSNLAIPNHFVKTILSQGHLTPLPLYVCPVYWAYDYALRVYPVPDLLVIADKYDPFTTTNTECLCINPGSFPRSGFSFKVFYPSNKTVEDSKLQGF

SEQ ID NO: 21940 - protein, 502 aa, Homo sapiens
MAPERLRSRALSAFKLRGLLLRGEAIKYLTEALQSISELELEDKLEKIINAVEKQPLSSNMIERSVVEAAVQECSQSVDETIEHVFNIIGAFDIPRFVYNSERKKFLPLLMTNHPAPNLFGTPRDKAEMFRERYTILHQRTHRHELFTPPVIGSHPDESGSKFQLKTIETLLGSTTKIGDAIVLGMITQLKEGKFFLEDPTGTVQLDLSKAQFHSGLYTEACFVLAEGWFEDQVFHVNAFGFPPTEPSSTTRAYYGNINFFGGPSNTSVKTSAKLKQLEEENKDAMFVFLSDVWLDQVEVLEKLRIMFAGYSPAPPTCFILCGNFSSAPYGKNQVQALKDSLKTLADIICEYPDIHQSSRFVFVPGPEDPGFGSILPRPPLAESITNEFRQRVPFSVFTTNPCRIQYCTQEITVFREDLVNKMCRNCVRFPSSNLAIPNHFVKTILSQGHLTPLPLYVCPVYWAYDYALRVYPVPDLLVIADKYDPFTTTNTECLCINPVRM

SEQ ID NO: 21941 - protein, 297 aa, Homo sapiens
MSSAHFNRGPAYGLSAEVKNKLAQKYDHQREQELREWIEGVTGRRIGNNFMDGLKDGIILCEFINKLQPGSVKKINESTQNWHQLENIGNFIKAITKYGVKPHDIFEANDLFENTNHTQVQSTLLALASMAKTKGNKVNVGVKYAEKQERKFEPGKLREGRNIIGLQMGTNKFASQQGMTAYGTRRHLYDPKLGTDQPLDQATISLQMGTNKGASQAGMTAPGTKRQIFEPGLGMEHCDTLNVSLQMGSNKGASQRGMTVYGLPRQVYDPKYCLTPEYPELGEPAHNHHAHNYYNSA

SEQ ID NO: 21942 - protein, 277 aa, Homo sapiens
MLAQKYDHQREQELREWIEGVTGRRIGNNFMDGLKDGIILCEFINKLQPGSVKKINESTQNWHQLENIGNFIKAITKYGVKPHDIFEANDLFENTNHTQVQSTLLALASMAKTKGNKVNVGVKYAEKQERKFEPGKLREGRNIIGLQMGTNKFASQQGMTAYGTRRHLYDPKLGTDQPLDQATISLQMGTNKGASQAGMTAPGTKRQIFEPGLGMEHCDTLNVSLQMGSNKGASQRGMTVYGLPRQVYDPKYCLTPEYPELGEPAHNHHAHNYYNSA

SEQ ID NO: 21943 - protein, 285 aa, Homo sapiens
MNRLPDDYDPYAVEEPSDEEPALSSSEDEVDVLLHGTPDQKRKLIRECLTGESESSSEDEFEKEMEAELNSTMKTMEDKLSSLGTGSSSGNGKVATAPTRYYDDIYFDSDSEDEDRAVQVTKKKKKKQHKIPTNDELLYDPEKDNRDQAWVDAQRRGYHGLGPQRSRQQQPVPNSDAVLNCPACMTTLCLDCQRHESYKTQYRAMFVMNCSINKEEVLRYKASENRKKRRVHKKMRSNREDAAEKAETDVEEIYHPVMCTECSTEVAVYDKDEVFHFFNVLASHS

SEQ ID NO: 21944 - protein, 707 aa, Homo sapiens
MAAAVAAAGRLGWLFAALCLGNAAGEAAPGPRVLGFCLEEDGAAGAGWVRGGAARDTPDATFLLRLFGPGFANSSWSWVAPEGAGCREEAASPAGEWRALLRLRLRAEAVRPHSALLAVRVEPGGGAAEEAAPPWALGLGAAGLLALAALARGLQLSALALAPAEVQVLRESGSEAERAAARRLEPARRWAGCALGALLLLASLAQAALAVLLYRAAGQRAVPAVLGSAGLVFLVGEVVPAAVSGRWTLALAPRALGLSRLAVLLTLPVALPVGQLLELAARPGRLRERVLELARGGGDPYSDLSKGVLRCRTVEDVLTPLEDCFMLDASTVLDFGVLASIMQSGHTRIPVYEEERSNIVDMLYLKDLAFVDPEDCTPLSTITRFYNHPLHFVFNDTKLDAVLEEFKRGKSHLAIVQKVNNEGEGDPFYEVLGLVTLEDVIEEIIRSEILDESEDYRDTVVKRKPASLMAPLKRKEEFSLFKVSDDEYKVTISPQLLLATQRFLSREVDVFSPLRISEKVLLHLLKHPSVNQEVRFDESNRLATHHYLYQRSQPVDYFILILQGRVEVEIGKEGLKFENGAFTYYGVSALTVPSSVHQSPVSSLQPIRHDLQPDPGDGTHSSAYCPDYTVRALSDLQLIKVTRLQYLNALLATRAQNLPQSPENTDLQVIPGSQTRLLGEKTTTAAGSSHSRPGVPVEGSPGRNPGV

SEQ ID NO: 21945 - protein, 659 aa, Homo sapiens
MAAAVAAAGRLGWLFAALCLGNAAGEAAPGPRVLGFCLEEDGAAGAGWVRGGAARDTPDATFLLRLFGPGFANSSWSWVAPEGAGCREEAASPAGEWRALLRLRLRAEAVRPHSALLAVRVEPGGGAAEEAAPPWALGLGAAGLLALAALARGLQLSALALAPAEVQVLRESGSEAERAAARRLEPARRWAGCALGALLLLASLAQAALAVLLYRAAGQRAVPAVLGSAGLVFLVGEVVPAAVSGRWTLALAPRALGLSRLAVLLTLPVALPVGQLLELAARPGRLRERVLELARGGGDPYSDLSKGVLRCRTVEDVLTPLEDCFMLDASTVLDFGVLASIMQSGHTRIPVYEEERSNIVDMLYLKDLAFVDPEDCTPLSTITRFYNHPLHFVFNDTKLDAVLEEFKRGDTVVKRKPASLMAPLKRKEEFSLFKVSDDEYKVTISPQLLLATQRFLSREVDVFSPLRISEKVLLHLLKHPSVNQEVRFDESNRLATHHYLYQRSQPVDYFILILQGRVEVEIGKEGLKFENGAFTYYGVSALTVPSSVHQSPVSSLQPIRHDLQPDPGDGTHSSAYCPDYTVRALSDLQLIKVTRLQYLNALLATRAQNLPQSPENTDLQVIPGSQTRLLGEKTTTAAGSSHSRPGVPVEGSPGRNPGV

SEQ ID NO: 21946 - protein, 680 aa, Homo sapiens
MAAAVAAAGRLGWLFAALCLGNAAGEAAPGPRVLGFCLEEDGAAGAGWVRGGAARDTPDATFLLRLFGPGFANSSWSWVAPEGAGCREEAASPAGEWRALLRLRLRAEAVRPHSALLAVRVEPGGGAAEEAAPPWALGLGAAGLLALAALARGLQLSALALAPAEVQVLRESGSEAERAAARRLEPARRWAGCALGALLLLASLAQAALAVLLYRAAGQRAVPAVLGSAGLVFLVGEVVPAAVSGRWTLALAPRALGLSRLAVLLTLPVALPVGQLLELAARPGRLRERVLELARGGGDPYSDLSKGVLRCRTVEDVLTPLEDCFMLDASTVLDFGVLASIMQSGHTRIPVYEEERSNIVDMLYLKDLAFVDPEDCTPLSTITRFYNHPLHFVFNDTKLDAVLEEFKRGDTVVKRKPASLMAPLKRKEEFSLFKVSDDEYKVTISPQLLLATQRFLSREVDVFSPLRISEKVLLHLLKHPSVNQEVRFDESNRLATHHYLYQRSQPVDYFILILQGRVEVEIGKEGLKFENGAFTYYGVSALTVPSSVHQSPVSSLQPIRHDLQPDPGDGTHSSAYCPDYTVRALSDLQLIKVTRLQYLNALLATRAQNLPQSPENTDLQVIPGSQTRLLGEKTTTAAGSSHSRPSLPLLPRGRDSAAYSDSDLFGLSHLVSAVTAFVWP

SEQ ID NO: 21947 - protein, 1025 aa, Homo sapiens
MAPVLSKDSADIESILALNPRTQTHATLCSTSAKKLDKKHWKRNPDKNCFNCEKLENNFDDIKHTTLGERGALREAMRCLKCADAPCQKSCPTNLDIKSFITSIANKNYYGAAKMIFSDNPLGLTCGMVCPTSDLCVGGCNLYATEEGPINIGGLQQFATEVFKAMSIPQIRNPSLPPPEKMSEAYSAKIALFGAGPASISCASFLARLGYSDITIFEKQEYVGGLSTSEIPQFRLPYDVVNFEIELMKDLGVKIICGKSLSVNEMTLSTLKEKGYKAAFIGIGLPEPNKDAIFQGLTQDQGFYTSKDFLPLVAKGSKAGMCACHSPLPSIRGVVIVLGAGDTAFDCATSALRCGARRVFIVFRKGFVNIRAVPEEMELAKEEKCEFLPFLSPRKVIVKGGRIVAMQFVRTEQDETGKWNEDEDQMVHLKADVVISAFGSVLSDPKVKEALSPIKFNRWGLPEVDPETMQTSEAWVFAGGDVVGLANTTVESVNDGKQASWYIHKYVQSQYGASVSAKPELPLFYTPIDLVDISVEMAGLKFINPFGLASATPATSTSMIRRAFEAGWGFALTKTFSLDKDIVTNVSPRIIRGTTSGPMYGPGQSSFLNIELISEKTAAYWCQSVTELKADFPDNIVIASIMCSYNKNDWTELAKKSEDSGADALELNLSCPHGMGERGMGLACGQDPELVRNICRWVRQAVQIPFFAKLTPNVTDIVSIARAAKEGGANGVTATNTVSGLMGLKSDGTPWPAVGIAKRTTYGGVSGTAIRPIALRAVTSIARALPGFPILATGGIDSAESGLQFLHSGASVLQVCSAIQNQDFTVIEDYCTGLKALLYLKSIEELQDWDGQSPATVSHQKGKPVPRIAELMDKKLPSFGPYLEQRKKIIAENKIRLKEQNVAFSPLKRNCFIPKRPIPTIKDVIGKALQYLGTFGELSNVEQVVAMIDEEMCINCGKCYMTCNDSGYQAIQFDPETHLPTITDTCTGCTLCLSVCPIVDCIKMVSRTTPYEPKRGVPLSVNPVC

SEQ ID NO: 21948 - protein, 173 aa, Homo sapiens
MAPVLSKDSADIESILALNPRTQTHATLCSTSAKKLDKKHWKRNPDKNCFNCEKLENNFDDIKHTTLGERGALREAMRCLKCADAPCQKSCPTNLDIKSFITSIANKNYYGAAKMIFSDNPLGLTCGMVCPTSDLCVGGCNLYATEEGPINIGGLQQFATETLILAFSLMNHL

SEQ ID NO: 21949 - protein, 1239 aa, Homo sapiens
MSRLLWRKVAGATVGPGPVPAPGRWVSSSVPASDPSDGQRRRQQQQQQQQQQQQQPQQPQVLSSEGGQLRHNPLDIQMLSRGLHEQIFGQGGEMPGEAAVRRSVEHLQKHGLWGQPAVPLPDVELRLPPLYGDNLDQHFRLLAQKQSLPYLEAANLLLQAQLPPKPPAWAWAEGWTRYGPEGEAVPVAIPEERALVFDVEVCLAEGTCPTLAVAISPSAWYSWCSQRLVEERYSWTSQLSPADLIPLEVPTGASSPTQRDWQEQLVVGHNVSFDRAHIREQYLIQGSRMRFLDTMSMHMAISGLSSFQRSLWIAAKQGKHKVQPPTKQGQKSQRKARRGPAISSWDWLDISSVNSLAEVHRLYVGGPPLEKEPRELFVKGTMKDIRENFQDLMQYCAQDVWATHEVFQQQLPLFLERCPHPVTLAGMLEMGVSYLPVNQNWERYLAEAQGTYEELQREMKKSLMDLANDACQLLSGERYKEDPWLWDLEWDLQEFKQKKAKKVKKEPATASKLPIEGAGAPGDPMDQEDLGPCSEEEEFQQDVMARACLQKLKGTTELLPKRPQHLPGHPGWYRKLCPRLDDPAWTPGPSLLSLQMRVTPKLMALTWDGFPLHYSERHGWGYLVPGRRDNLAKLPTGTTLESAGVVCPYRAIESLYRKHCLEQGKQQLMPQEAGLAEEFLLTDNSAIWQTVEELDYLEVEAEAKMENLRAAVPGQPLALTARGGPKDTQPSYHHGNGPYNDVDIPGCWFFKLPHKDGNSCNVGSPFAKDFLPKMEDGTLQAGPGGASGPRALEINKMISFWRNAHKRISSQMVVWLPRSALPRAVIRHPDYDEEGLYGAILPQVVTAGTITRRAVEPTWLTASNARPDRVGSELKAMVQAPPGYTLVGADVDSQELWIAAVLGDAHFAGMHGCTAFGWMTLQGRKSRGTDLHSKTATTVGISREHAKIFNYGRIYGAGQPFAERLLMQFNHRLTQQEAAEKAQQMYAATKGLRWYRLSDEGEWLVRELNLPVDRTEGGWISLQDLRKVQRETARKSQWKKWEVVAERAWKGGTESEMFNKLESIATSDIPRTPVLGCCISRALEPSAVQEEFMTSRVNWVVQSSAVDYLHLMLVAMKWLFEEFAIDGRFCISIHDEVRYLVREEDRYRAALALQITNLLTRCMFAYKLGLNDLPQSVAFFSAVDIDRCLRKEVTMDCKTPSNPTGMERRYGIPQGEALDIYQIIELTKGSLEKRSQPGP

SEQ ID NO: 21950 - protein, 229 aa, Homo sapiens
MADDFGFFSSSESGAPEAAEEDPAAAFLAQQESEIAGIENDEGFGAPAGSHAAPAQPGPTSGAGSEDMGTTVNGDVFQEANGPADGYAAIAQADRLTQEPESIRKWREEQRKRLQELDAASKVTEQEWREKAKKDLEEWNQRQSEQVEKNKINNRIADKAFYQQPDADIIGYVASEEAFVKESKEETPGTEWEKVAQLCDFNPKSSKQCKDVSRLRSVLMSLKQTPLSR

SEQ ID NO: 21951 - protein, 211 aa, Homo sapiens
MADDFGFFSSSESGAPEAAEEDPAAAFLAQQESEIAGIENDEGFGAPAGSHAAPAQPGPTSGAGSEDMGTTVNGDVFQEANGPADGYAAIAQADRLTQEPESIRKWREEQRKRLQELDAASKVTEQEWREKAKKDLEEWNQRQSEQVEKNKINNRASEEAFVKESKEETPGTEWEKVAQLCDFNPKSSKQCKDVSRLRSVLMSLKQTPLSR

SEQ ID NO: 21952 - protein, 425 aa, Homo sapiens
MGEEANDDKKPTTKFELERETELRFEVEASQSVQLELLTGMAEIFGTELTRNKKFTFDAGAKVAVFTWHGCSVQLSGRTEVAYVSKDTPMLLYLNTHTALEQMRRQAEKEEERGPRVMVVGPTDVGKSTVCRLLLNYAVRLGRRPTYVELDVGQGSVSIPGTMGALYIERPADVEEGFSIQAPLVYHFGSTTPGTNIKLYNKITSRLADVFNQRCEVNRRASVSGCVINTCGWVKGSGYQALVHAASAFEVDVVVVLDQERLYNELKRDLPHFVRTVLLPKSGGVVERSKDFRRECRDERIREYFYGFRGCFYPHAFNVKFSDVKIYKVGAPTIPDSCLPLGMSQEDNQLKLVPVTPGRDMVHHLLSVSTAEGTEENLSETSVAGFIVVTSVDLEHQVFTVLSPAPRPLPKNFLLIMDIRFMDLK

SEQ ID NO: 21953 - protein, 361 aa, Homo sapiens
MGEEANDDKKPTTKFELERETELRFEVEASQSVQLELLTGMAEIFGTELTRNKKFTFDAGAKVAVFTWHGCSVQLSGRTEVAYVSKDTPMLLYLNTHTALEQMRRQAEKEEERGPRVMVVGPTDVGKSTVCRLLLNYAITSRLADVFNQRCEVNRRASVSGCVINTCGWVKGSGYQALVHAASAFEVDVVVVLDQERLYNELKRDLPHFVRTVLLPKSGGVVERSKDFRRECRDERIREYFYGFRGCFYPHAFNVKFSDVKIYKVGAPTIPDSCLPLGMSQEDNQLKLVPVTPGRDMVHHLLSVSTAEGTEENLSETSVAGFIVVTSVDLEHQVFTVLSPAPRPLPKNFLLIMDIRFMDLK

SEQ ID NO: 21954 - protein, 575 aa, Homo sapiens
MSRSPDAKEDPVECPLCMEPLEIDDINFFPCTCGYQICRFCWHRIRTDENGLCPACRKPYPEDPAVYKPLSQEELQRIKNEKKQKQNERKQKISENRKHLASVRVVQKNLVFVVGLSQRLADPEVLKRPEYFGKFGKIHKVVINNSTSYAGSQGPSASAYVTYIRSEDALRAIQCVNNVVVDGRTLKASLGTTKYCSYFLKNMQCPKPDCMYLHELGDEAASFTKEEMQAGKHQEYEQKLLQELYKLNPNFLQLSTGSVDKNKNKVTPLQRYDTPIDKPSDSLSIGNGDNSQQISNSDTPSPPPGLSKSNPVIPISSSNHSARSPFEGAVTESQSLFSDNFRHPNPIPSGLPPFPSSPQTSSDWPTAPEPQSLFTSETIPVSSSTDWQAAFGFGSSKQPEDDLGFDPFDVTRKALADLIEKELSVQDQPSLSPTSLQNSSSHTTTAKGPGSGFLHPAAATNANSLNSTFSVLPQRFPQFQQHRAVYNSFSFPGQAARYPWMAFPRNSIMHLNHTANPTSNSNFLDLNLPPQHNTGLGGIPVAGEEEVKVSTMPLSTSSHSLQQGQQPTSLHTTVA

SEQ ID NO: 21955 - protein, 572 aa, Homo sapiens
MSRSPDAKEDPVECPLCMEPLEIDDINFFPCTCGYQICRFCWHRIRTDENGLCPACRKPYPEDPAVYKPLSQEELQRIKNEKKQKQNERKQKISENRKHLASVRVVQKNLVFVVGLSQRLADPEVLKRPEYFGKFGKIHKVVINNSTSYAGSQGPSASAYVTYIRSEDALRAIQCVNNVVVDGRTLKASLGTTKYCSYFLKNMQCPKPDCMYLHELGDEAASFTKEEMQAGKHQEYEQKLLQELYKLNPNFLQLSTGSVDKNKNKVTPLQSPIDKPSDSLSIGNGDNSQQISNSDTPSPPPGLSKSNPVIPISSSNHSARSPFEGAVTESQSLFSDNFRHPNPIPSGLPPFPSSPQTSSDWPTAPEPQSLFTSETIPVSSSTDWQAAFGFGSSKQPEDDLGFDPFDVTRKALADLIEKELSVQDQPSLSPTSLQNSSSHTTTAKGPGSGFLHPAAATNANSLNSTFSVLPQRFPQFQQHRAVYNSFSFPGQAARYPWMAFPRNSIMHLNHTANPTSNSNFLDLNLPPQHNTGLGGIPVAGEEEVKVSTMPLSTSSHSLQQGQQPTSLHTTVA

SEQ ID NO: 21956 - protein, 558 aa, Homo sapiens
MEPLEIDDINFFPCTCGYQICRFCWHRIRTDENGLCPACRKPYPEDPAVYKPLSQEELQRIKNEKKQKQNERKQKISENRKHLASVRVVQKNLVFVVGLSQRLADPEVLKRPEYFGKFGKIHKVVINNSTSYAGSQGPSASAYVTYIRSEDALRAIQCVNNVVVDGRTLKASLGTTKYCSYFLKNMQCPKPDCMYLHELGDEAASFTKEEMQAGKHQEYEQKLLQELYKLNPNFLQLSTGSVDKNKNKVTPLQRYDTPIDKPSDSLSIGNGDNSQQISNSDTPSPPPGLSKSNPVIPISSSNHSARSPFEGAVTESQSLFSDNFRHPNPIPSGLPPFPSSPQTSSDWPTAPEPQSLFTSETIPVSSSTDWQAAFGFGSSKQPEDDLGFDPFDVTRKALADLIEKELSVQDQPSLSPTSLQNSSSHTTTAKGPGSGFLHPAAATNANSLNSTFSVLPQRFPQFQQHRAVYNSFSFPGQAARYPWMAFPRNSIMHLNHTANPTSNSNFLDLNLPPQHNTGLGGIPVAGEEEVKVSTMPLSTSSHSLQQGQQPTSLHTTVA

SEQ ID NO: 21957 - protein, 642 aa, Homo sapiens
MSRSPDAKEDPVECPLCMEPLEIDDINFFPCTCGYQICRFCWHRIRTDENGLCPACRKPYPEDPAVYKPLSQEELQRIKNEKKQKQNERKQKISENRKHLASVRVVQKNLVFVVGLSQRLADPEVLKRPEYFGKFGKIHKVVINNSTSYAGSQGPSASAYVTYIRSEDALRAIQCVNNVVVDGRTLKASLGTTKYCSYFLKNMQCPKPDCMYLHELGDEAASFTKEEMQAGKHQEYEQKLLQELYKLNPNFLQLSTGSVDKNKNKVTPLQRYDTPIDKPSDSLSIGNGDNSQQISNSDTPSPPPGLSKSNPVIPISSSNHSARSPFEGAVTESQSLFSDNFRHPNPIPSGLPPFPSSPQTSSDWPTAPEPQSLFTSETIPVSSSTDWQAAFGFGSSKQPEDDLGFDPFDVTRKALADLIEKELSVQDQPSLSPTSLQNSSSHTTTAKGPGSGFLHPAAATNANSLNSTFSVLPQRFPQFQQHRAVYNSFSFPGQAARYPWMAFPRNSIMHLNHTANPTSNSNFLDLNLPPQHNTGLGGIPVAGIPASSGNSLDSLQDDNPPHWLKSLQALTEMDGPSAAPSQTHHSAPFSTQIPLHRASWNPYPPPSNPSSFHSPPPGFQTAFRPPSKTPTDLLQSSTLDRH

SEQ ID NO: 21958 - protein, 433 aa, Homo sapiens
MSRSPDAKEDPVECPLCMEPLEIDDINFFPCTCGYQICRFCWHRIRTDENGLCPACRKPYPEDPAVYKPLSQEELQRIKNEKKQKQNERKQKISENRKHLASVRVVQKNLVFVVGLSQRLADPEVLKRPEYFGKFGKIHKVVINNSTSYAGSQGPSASAYVTYIRSEDALRAIQCVNNVVVDGRTLKASLGTTKYCSYFLKNMQCPKPDCMYLHELGDEAASFTKEEMQAGKHQEYEQKLLQELYKLNPNFLQLSTGSVDKNKNKVTPLQRYDTPIDKPSDSLSIGNGDNSQQISNSDTPSPPPGLSKSNPVIPISSSNHSARSPFEGAVTESQSLFSDNFRHPNPIPSGLPPFPSSPQTSSDWPTAPEPQSLFTSETIPVSSSTDWQAAFGFGSSKQPEDDLGFDPFDVTRKALADLTEPIERKRLAVLKRR

SEQ ID NO: 21959 - protein, 767 aa, Homo sapiens
MSRSPDAKEDPVECPLCMEPLEIDDINFFPCTCGYQICRFCWHRIRTDENGLCPACRKPYPEDPAVYKPLSQEELQRIKNEKKQKQNERKQKISENRKHLASVRVVQKNLVFVVGLSQRLADPEVLKRPEYFGKFGKIHKVVINNSTSYAGSQGPSASAYVTYIRSEDALRAIQCVNNVVVDGRTLKASLGTTKYCSYFLKNMQCPKPDCMYLHELGDEAASFTKEEMQAGKHQEYEQKLLQELYKLNPNFLQLSTGSVDKNKNKVTPLQRYDTPIDKPSDSLSIGNGDNSQQISNSDTPSPPPGLSKSNPVIPISSSNHSARSPFEGAVTESQSLFSDNFRHPNPIPSGLPPFPSSPQTSSDWPTAPEPQSLFTSETIPVSSSTDWQAAFGFGSSKQPEDDLGFDPFDVTRKALADLIEKELSVQDQPSLSPTSLQNSSSHTTTAKGPGSGFLHPAAATNANSLNSTFSVLPQRFPQFQQHRAVYNSFSFPGQAARYPWMAFPRNSIMHLNHTANPTSNSNFLDLNLPPQHNTGLGGIPVADNSSSIESLNMKEWQDGLRALLPNININFGGLPNSSSPSNANHSAPTSNTATTDSLSWDSPGSWTDPAIITGIPASSGNSLDSLQDDNPPHWLKSLQALTEMDGPSAAPSQTHHSAPFSTQIPLHRASWNPYPPPSNPSSFHSPPPQIYYRVQHWTAIRQRGATIRKCRICPTLFSPSQPTTHSSLLISYVLKNPVPDQFFFSLTPDAMRSQGHYHLFINCKNFC

SEQ ID NO: 21960 - protein, 675 aa, Homo sapiens
MSRSPDAKEDPVECPLCMEPLEIDDINFFPCTCGYQICRFCWHRIRTDENGLCPACRKPYPEDPAVYKPLSQEELQRIKNEKKQKQNERKQKISENRKHLASVRVVQKNLVFVVGLSQRLADPEVLKRPEYFGKFGKIHKVVINNSTSYAGSQGPSASAYVTYIRSEDALRAIQCVNNVVVDGRTLKASLGTTKYCSYFLKNMQCPKPDCMYLHELGDEAASFTKEEMQAGKHQEYEQKLLQELYKLNPNFLQLSTGSVDKNKNKVTPLQRYDTPIDKPSDSLSIGNGDNSQQISNSDTPSPPPGLSKSNPVIPISSSNHSARSPFEGAVTESQSLFSDNFRHPNPIPSGLPPFPSSPQTSSDWPTAPEPQSLFTSETIPVSSSTDWQAAFGFGSSKQPEDDLGFDPFDVTRKALADLIEKELSVQDQPSLSPTSLQNSSSHTTTAKGPGSGFLHPAAATNANSLNSTFSVLPQRFPQFQQHRAVYNSFSFPGQAARYPWMAFPRNSIMHLNHTANPTSNSNFLDLNLPPQHNTGLGGIPVAGIPASSGNSLDSLQDDNPPHWLKSLQALTEMDGQRCSITDPPQRPLQHTDPAAQSQLESLPSSFKPFQLPLPTPRLSDGLQTPQQNPHRFTTEFNTGPPLGKEEQPLENAGFVPLCFLPLSPPPTAPFSSLMF

SEQ ID NO: 21961 - protein, 639 aa, Homo sapiens
MSRSPDAKEDPVECPLCMEPLEIDDINFFPCTCGYQICRFCWHRIRTDENGLCPACRKPYPEDPAVYKPLSQEELQRIKNEKKQKQNERKQKISENRKHLASVRVVQKNLVFVVGLSQRLADPEVLKRPEYFGKFGKIHKVVINNSTSYAGSQGPSASAYVTYIRSEDALRAIQCVNNVVVDGRTLKASLGTTKYCSYFLKNMQCPKPDCMYLHELGDEAASFTKEEMQAGKHQEYEQKLLQELYKLNPNFLQLSTGSVDKNKNKVTPLQSPIDKPSDSLSIGNGDNSQQISNSDTPSPPPGLSKSNPVIPISSSNHSARSPFEGAVTESQSLFSDNFRHPNPIPSGLPPFPSSPQTSSDWPTAPEPQSLFTSETIPVSSSTDWQAAFGFGSSKQPEDDLGFDPFDVTRKALADLIEKELSVQDQPSLSPTSLQNSSSHTTTAKGPGSGFLHPAAATNANSLNSTFSVLPQRFPQFQQHRAVYNSFSFPGQAARYPWMAFPRNSIMHLNHTANPTSNSNFLDLNLPPQHNTGLGGIPVAGIPASSGNSLDSLQDDNPPHWLKSLQALTEMDGPSAAPSQTHHSAPFSTQIPLHRASWNPYPPPSNPSSFHSPPPGFQTAFRPPSKTPTDLLQSSTLDRH

SEQ ID NO: 21962 - protein, 710 aa, Homo sapiens
MSRSPDAKEDPVECPLCMEPLEIDDINFFPCTCGYQICRFCWHRIRTDENGLCPACRKPYPEDPAVYKPLSQEELQRIKNEKKQKQNERKQKISENRKHLASVRVVQKNLVFVVGLSQRLADPEVLKRPEYFGKFGKIHKVVINNSTSYAGSQGPSASAYVTYIRSEDALRAIQCVNNVVVDGRTLKASLGTTKYCSYFLKNMQCPKPDCMYLHELGDEAASFTKEEMQAGKHQEYEQKLLQELYKLNPNFLQLSTGSVDKNKNKVTPLQSPIDKPSDSLSIGNGDNSQQISNSDTPSPPPGLSKSNPVIPISSSNHSARSPFEGAVTESQSLFSDNFRHPNPIPSGLPPFPSSPQTSSDWPTAPEPQSLFTSETIPVSSSTDWQAAFGFGSSKQPEDDLGFDPFDVTRKALADLIEKELSVQDQPSLSPTSLQNSSSHTTTAKGPGSGFLHPAAATNANSLNSTFSVLPQRFPQFQQHRAVYNSFSFPGQAARYPWMAFPRNSIMHLNHTANPTSNSNFLDLNLPPQHNTGLGGIPVADNSSSVESLNMKEWQDGLRALLPNININFGGLPNSSSPSNANHSAPTSNTATTDSLSWDSPGSWTDPAIITGIPASSGNSLDSLQDDNPPHWLKSLQALTEMDGPSAAPSQTHHSAPFSTQIPLHRASWNPYPPPSNPSSFHSPPPGFQTAFRPPSKTPTDLLQSSTLDRH

SEQ ID NO: 21963 - protein, 713 aa, Homo sapiens
MSRSPDAKEDPVECPLCMEPLEIDDINFFPCTCGYQICRFCWHRIRTDENGLCPACRKPYPEDPAVYKPLSQEELQRIKNEKKQKQNERKQKISENRKHLASVRVVQKNLVFVVGLSQRLADPEVLKRPEYFGKFGKIHKVVINNSTSYAGSQGPSASAYVTYIRSEDALRAIQCVNNVVVDGRTLKASLGTTKYCSYFLKNMQCPKPDCMYLHELGDEAASFTKEEMQAGKHQEYEQKLLQELYKLNPNFLQLSTGSVDKNKNKVTPLQRYDTPIDKPSDSLSIGNGDNSQQISNSDTPSPPPGLSKSNPVIPISSSNHSARSPFEGAVTESQSLFSDNFRHPNPIPSGLPPFPSSPQTSSDWPTAPEPQSLFTSETIPVSSSTDWQAAFGFGSSKQPEDDLGFDPFDVTRKALADLIEKELSVQDQPSLSPTSLQNSSSHTTTAKGPGSGFLHPAAATNANSLNSTFSVLPQRFPQFQQHRAVYNSFSFPGQAARYPWMAFPRNSIMHLNHTANPTSNSNFLDLNLPPQHNTGLGGIPVADNSSSVESLNMKEWQDGLRALLPNININFGGLPNSSSPSNANHSAPTSNTATTDSLSWDSPGSWTDPAIITGIPASSGNSLDSLQDDNPPHWLKSLQALTEMDGPSAAPSQTHHSAPFSTQIPLHRASWNPYPPPSNPSSFHSPPPGFQTAFRPPSKTPTDLLQSSTLDRH

SEQ ID NO: 21964 - protein, 277 aa, Homo sapiens
MSLCEDMLLCNYRKCRIKLSGYAWVTACSHIFCDQHGSGEFSRSPAICPACNSTLSGKLDIVRTELSPSEEYKAMVLAGLRPEIVLDISSRALAFWTYQVHQERLYQEYNFSKAEGHLKQMEKIYTQQIQSKDVELTSMKGEVTSMKKVLEEYKKKFSDISEKLMERNRQYQKLQGLYDSLRLRNITIANHEGTLEPSMIAQSGVLGFPLGNNSKFPLDNTPVRNRGDGDGDFQFRPFFAGSPTAPEPSNSFFSFVSPSRELEQQQVSSRAFKVKRI

SEQ ID NO: 21965 - protein, 305 aa, Homo sapiens
MTSRTPLLVTACLYYSYCNSRHLQQGVRKSKRPVFSHCQVPETQKTDTRHLSGARAGVCPCCHPDGLLATMRDLLQYIACFFAFFSAGFLIVATWTDCWMVNADDSLEVSTKCRGLWWECVTNAFDGIRTCDEYDSILAEHPLKLVVTRALMITADILAGFGFLTLLLGLDCVKFLPDEPYIKVRICFVAGATLLIAGTPGIIGSVWYAVDVYVERSTLVLHNIFLGIQYKFGWSCWLGMAGSLGCFLAGAVLTCCLYLFKDVGPERNYPYSLRKAYSAAGVSMAKSYSAPRTETAKMYAVDTRV

SEQ ID NO: 21966 - protein, 1208 aa, Homo sapiens
MDSLPDEFFVRHPAVEDQRKEETENKLEKSSGQLNKQENDIPTDLVPVNLLLEVKKLLNAINTLPKGVVPHIKKFLQEDFSFQTMQREVAANSQNGEEIVPALTLRFLITQLEAALRNIQAGNYTAHQINIGYYLTLLFLYGVALTERGKKEDYTEAENKFLVMKMMIQENEICENFMSLVYFGRGLLRCAQKRYNGGLLEFHKSLQEIGDKNDHWFDIDPTEDEDLPTTFKDLLNNFIKTTESNIMKQTICSYLDCERSCEADILKNTSYKGFFQLMCSKSCCVYFHKICWKKFKNLKYPGENDQSFSGKKCLKEGCTGDMVRMLQCDVPGIVKILFEVVRKDEYITIENLGASYRKLISLKITDTDIRPKISLKFNTKDEMPIFKLDYNYFYHLLHIIIISGTDIVRQIFDEAMPPPLLKKELLIHKNVLESYYNHLWTNHPLGGSWHLLYPPNKELPQSKQFDLCLLLALIKHLNVFPAPKKGWNMEPPSSDISKSADILRLCKYRDILLSEILMNGLTESQFNSIWKKVSDILLRLGMMQEDIDKVKENPIENISLDYHQLSVYLGIPVPEIIQRMLSCYQQGIALQSITGSQRIEIEELQNEEEELSPPLMEYNINVKSHPEIQFAEINKDGTSIPSESSTESLKDLQEVKSKQRKKKKTKNKKNKDSKEDQVPYVVEKEEQLRKEQANPHSVSRLIKDDASDVQEDSAMEDKFYSLDELHILDMIEQGSAGKVTTDYGETEKERLARQRQLYKLHYQCEDFKRQLRTVTFRWQENQMQIKKKDKIIASLNQQVAFGINKVSKLQRQIHAKDNEIKNLKEQLSMKRSQWEMEKHNLESTMKTYVSKLNAETSRALTAEVYFLQCRRDFGLLHLEQTEKECLNQLARVTHMAASNLESLQLKAAVDSWNAIVADVRNKIAFLRTQYNEQINKVKQGFALSTLPPVQLPPPPPSPEILMQQFLGRPLVKESFFRPILTVPQMPAVCPGVVSATGQPRAPLMTGIAWALPAPVGDAVPPSAGLRSDPSIMNWERITDRLKTAFPQQTRKELTDFLRKLKDAYGKSLSELTFDEIVCKISQFIDPKKSQSQGKSVSNVNCVSPSHSPSQPDAAQPPKPAWRPLTSQGPATWEGASNPDEEEEEEEPCVICHENLSPENLSVLPCAHKFHAQCIRPWLMQQGTCPTCRLHVLLPEEFPGHPSRQLPKI

SEQ ID NO: 21967 - protein, 303 aa, Homo sapiens
MDSLPDEFFVRHPAVEDQRKEETENKLEKSSGQLNKQENDIPTDLVPVNLLLEVKKLLNAINTLPKGVVPHIKKFLQEDFSFQTMQREVAANSQNGEEIVPALTLRFLITQLEAALRNIQAGNYTAHQINIGYYLTLLFLYGVALTERGKKEDYTEAENKFLVMKMMIQENEICENFMSLVYFGRGLLRCAQKRYNGGLLEFHKSLQEIGDKNDHWFDIDPTEDEDLPTTFKDLLNNFIKTTESNIMKQTICSYLDCERSCEADILKNTSYKGFFQLMCSKSCCVYFHKICWKKFKNLKYPEF

SEQ ID NO: 21968 - protein, 225 aa, Homo sapiens
MDLRAGDSWGMLACLCTVLWHLPAVPALNRTGDPGPGPSIQKTYDLTRYLEHQLRSLAGTYLNYLGPPFNEPDFNPPRLGAETLPRATVDLEVWRSLNDKLRLTQNYEAYSHLLCYLRGLNRQAATAELRRSLAHFCTSLQGLLGSIAGVMAALGYPLPQPLPGTEPTWTPGPAHSDFLQKMDDFWLLKELQTWLWRSAKDFNRLKKKMQPPAAAVTLHLGAHGF

SEQ ID NO: 21969 - protein, 215 aa, Homo sapiens
MLACLCTVLWHLPAVPALNRTGDPGPGPSIQKTYDLTRYLEHQLRSLAGTYLNYLGPPFNEPDFNPPRLGAETLPRATVDLEVWRSLNDKLRLTQNYEAYSHLLCYLRGLNRQAATAELRRSLAHFCTSLQGLLGSIAGVMAALGYPLPQPLPGTEPTWTPGPAHSDFLQKMDDFWLLKELQTWLWRSAKDFNRLKKKMQPPAAAVTLHLGAHGF

SEQ ID NO: 21970 - protein, 266 aa, Homo sapiens
MVCLKLPGGSSLAALTVTLMVLSSRLAFAGDTRPRFLELRKSECHFFNGTERVRYLDRYFHNQEEFLRFDSDVGEYRAVTELGRPVAESWNSQKDLLEQKRGRVDNYCRHNYGVGESFTVQRRVHPQVTVYPAKTQPLQHHNLLVCSVSGFYPGSIEVRWFRNGQEEKAGVVSTGLIQNGDWTFQTLVMLETVPRSGEVYTCQVEHPSVTSALTVEWRARSESAQSKMLSGVGGFVLGLLFLGAGLFIYFRNQKGHSGLQPTGFLS

SEQ ID NO: 21971 - protein, 209 aa, Homo sapiens
MASMGLQVMGIALAVLGWLAVMLCCALPMWRVTAFIGSNIVTSQTIWEGLWMNCVVQSTGQMQCKVYDSLLALPQDLQAARALVIISIIVAALGVLLSVVGGKCTNCLEDESAKAKTMIVAGVVFLLAGLMVIVPVSWTAHNIIQDFYNPLVASGQKREMGASLYVGWAASGLLLLGGGLLCCNCPPRTDKPYSAKYSAARSAAASNYV

SEQ ID NO: 21972 - protein, 266 aa, Homo sapiens
MVCLKLPGGSCMAALTVTLTVLSSPLALAGDTQPRFLEQAKCECHFLNGTERVWNLIRYIYNQEEYARYNSDLGEYQAVTELGRPDAEYWNSQKDLLERRRAEVDTYCRYNYGVVESFTVQRRVQPKVTVYPSKTQPLQHHNLLVCSVNGFYPGSIEVRWFRNGQEEKAGVVSTGLIQNGDWTFQTLVMLETVPRSGEVYTCQVEHPSMMSPLTVQWSARSESAQSKMLSGVGGFVLGLLFLGTGLFIYFRNQKGHSGLQPTGLLS

SEQ ID NO: 21973 - protein, 4624 aa, Homo sapiens
MFRIGRRQLWKHSVTRVLTQRLKGEKEAKRALLDARHNYLFAIVASCLDLNKTEVEDAILEGNQIERIDQLFAVGGLRHLMFYYQDVEEAETGQLGSLGGVNLVSGKIKKPKVFVTEGNDVALTGVCVFFIRTDPSKAITPDNIHQEVSFNMLDAADGGLLNSVRRLLSDIFIPALRATSHGWGELEGLQDAANIRQEFLSSLEGFVNVLSGAQESLKEKVNLRKCDILELKTLKEPTDYLTLANNPETLGKIEDCMKVWIKQTEQVLAENNQLLKEADDVGPRAELEHWKKRLSKFNYLLEQLKSPDVKAVLAVLAAAKSKLLKTWREMDIRITDATNEAKDNVKYLYTLEKCCDPLYSSDPLSMMDAIPTLINAIKMIYSISHYYNTSEKITSLFVKVTNQIISACKAYITNNGTASIWNQPQDVVEEKILSAIKLKQEYQLCFHKTKQKLKQNPNAKQFDFSEMYIFGKFETFHRRLAKIIDIFTTLKTYSVLQDSTIEGLEDMATKYQGIVATIKKKEYNFLDQRKMDFDQDYEEFCKQTNDLHNELRKFMDVTFAKIQNTNQALRMLKKFERLNIPNLGIDDKYQLILENYGADIDMISKLYTKQKYDPPLARNQPPIAGKILWARQLFHRIQQPMQLFQQHPAVLSTAEAKPIIRSYNRMAKVLLEFEVLFHRAWLRQIEEIHVGLEASLLVKAPGTGELFVNFDPQILILFRETECMAQMGLEVSPLATSLFQKRDRYKRNFSNMKMMLAEYQRVKSKIPAAIEQLIVPHLAKVDEALQPGLAALTWTSLNIEAYLENTFAKIKDLELLLDRVNDLIEFRIDAILEEMSSTPLCQLPQEEPLTCEEFLQMTKDLCVNGAQILHFKSSLVEEAVNELVNMLLDVEVLSEEESEKISNENSVNYKNESSAKREEGNFDTLTSSINARANALLLTTVTRKKKETEMLGEEARELLSHFNHQNMDALLKVTRNTLEAIRKRIHSSHTINFRDSNSASNMKQNSLPIFRASVTLAIPNIVMAPALEDVQQTLNKAVECIISVPKGVRQWSSELLSKKKIQERKMAALQSNEDSDSDVEMGENELQDTLEIASVNLPIPVQTKNYYKNVSENKEIVKLVSVLSTIINSTKKEVITSMDCFKRYNHIWQKGKEEAIKTFITQSPLLSEFESQILYFQNLEQEINAEPEYVCVGSIALYTADLKFALTAETKAWMVVIGRHCNKKYRSEMENIFMLIEEFNKKLNRPIKDLDDIRIAMAALKEIREEQISIDFQVGPIEESYALLNRYGLLIAREEIDKVDTLHYAWEKLLARAGEVQNKLVSLQPSFKKELISAVEVFLQDCHQFYLDYDLNGPMASGLKPQEASDRLIMFQNQFDNIYRKYITYTGGEELFGLPATQYPQLLEIKKQLNLLQKIYTLYNSVIETVNSYYDILWSEVNIEKINNELLEFQNRCRKLPRALKDWQAFLDLKKIIDDFSECCPLLEYMASKAMMERHWERITTLTGHSLDVGNESFKLRNIMEAPLLKYKEEIEDICISAVKERDIEQKLKQVINEWDNKTFTFGSFKTRGELLLRGDSTSEIIANMEDSLMLLGSLLSNRYNMPFKAQIQKWVQYLSNSTDIIESWMTVQNLWIYLEAVFVGGDIAKQLPKEAKRFSNIDKSWVKIMTRAHEVPSVVQCCVGDETLGQLLPHLLDQLEICQKSLTGYLEKKRLCFPRFFFVSDPALLEILGQASDSHTIQAHLLNVFDNIKSVKFHEKIYDRILSISSQEGETIELDKPVMAEGNVEVWLNSLLEESQSSLHLVIRQAAANIQETGFQLTEFLSSFPAQVGLLGIQMIWTRDSEEALRNAKFDKKIMQKTNQAFLELLNTLIDVTTRDLSSTERVKYETLITIHVHQRDIFDDLCHMHIKSPMDFEWLKQCRFYFNEDSDKMMIHITDVAFIYQNEFLGCTDRLVITPLTDRCYITLAQALGMSMGGAPAGPAGTGKTETTKDMGRCLGKYVVVFNCSDQMDFRGLGRIFKGLAQSGSWGCFDEFNRIDLPVLSVAAQQISIILTCKKEHKKSFIFTDGDNVTMNPEFGLFLTMNPGYAGRQELPENLKINFRSVAMMVPDRQIIIRVKLASCGFIDNVVLARKFFTLYKLCEEQLSKQVHYDFGLRNILSVLRTLGAAKRANPMDTESTIVMRVLRDMNLSKLIDEDEPLFLSLIEDLFPNILLDKAGYPELEAAISRQVEEAGLINHPPWKLKVIQLFETQRVRHGMMTLGPSGAGKTTCIHTLMRAMTDCGKPHREMRMNPKAITAPQMFGRLDVATNDWTDGIFSTLWRKTLRAKKGEHIWIILDGPVDAIWIENLNSVLDDNKTLTLANGDRIPMAPNCKIIFEPHNIDNASPATVSRNGMVFMSSSILDWSPILEGFLKKRSPQEAEILRQLYTESFPDLYRFCIQNLEYKMEVLEAFVITQSINMLQGLIPLKEQGGEVSQAHLGRLFVFALLWSAGAALELDGRRRLELWLRSRPTGTLELPPPAGPGDTAFDYYVAPDGTWTHWNTRTQEYLYPSDTTPEYGSILVPNVDNVRTDFLIQTIAKQGKAVLLIGEQGTAKTVIIKGFMSKYDPECHMIKSLNFSSATTPLMFQRTIESYVDKRMGTTYGPPAGKKMTVFIDDVNMPIINEWGDQVTNEIVRQLMEQNGFYNLEKPGEFTSIVDIQFLAAMIHPGGGRNDIPQRLKRQFSIFNCTLPSEASVDKIFGVIGVGHYCTQRGFSEEVRDSVTKLVPLTRRLWQMTKIKMLPTPAKFHYVFNLRDLSRVWQGMLNTTSEVIKEPNDLLKLWKHECKRVIADRFTVSSDVTWFDKALVSLVEEEFGEEKKLLVDCGIDTYFVDFLRDAPEAAGETSEEADAETPKIYEPIESFSHLKERLNMFLQLYNESIRGAGMDMVFFADAMVHLVKISRVIRTPQGNALLVGVGGSGKQSLTRLASFIAGYVSFQITLTRSYNTSNLMEDLKVLYRTAGQQGKGITFIFTDNEIKDESFLEYMNNVLSSGEVSNLFARDEIDEINSDLASVMKKEFPRCLPTNENLHDYFMSRVRQNLHIVLCFSPVGEKFRNRALKFPALISGCTIDWFSRWPKDALVAVSEHFLTSYDIDCSLEIKKEVVQCMGSFQDGVAEKCVDYFQRFRRSTHVTPKSYLSFIQGYKFIYGEKHVEVRTLANRMNTGLEKLKEASESVAALSKELEAKEKELQVANDKADMVLKEVTMKAQAAEKVKAEVQKVKDRAQAIVDSISKDKAIAEEKLEAAKPALEEAEAALQTIRPSDIATVRTLGRPPHLIMRIMDCVLLLFQRKVSAVKIDLEKSCTMPSWQESLKLMTAGNFLQNLQQFPKDTINEEVIEFLSPYFEMPDYNIETAKRVCGNVAGLCSWTKAMASFFSINKEVLPLKANLVVQENRHLLAMQDLQKAQAELDDKQAELDVVQAEYEQAMTEKQTLLEDAERCRHKMQTASTLISGLAGEKERWTEQSQEFAAQTKRLVGDVLLATAFLSYSGPFNQEFRDLLLNDWRKEMKARKIPFGKNLNLSEMLIDAPTISEWNLQGLPNDDLSIQNGIIVTKASRYPLLIDPQTQGKIWIKNKESRNELQITSLNHKYFRNHLEDSLSLGRPLLIEDVGEELDPALDNVLERNFIKTGSTFKVKVGDKEVDVLDGFRLYITTKLPNPAYTPEISARTSIIDFTVTMKGLEDQLLGRVILTEKQELEKERTHLMEDVTANKRRMKELEDNLLYRLTSTQGSLVEDESLIVVLSNTKRTAEEVTQKLEISAETEVQINSAREEYRPVATRGSILYFLITEMRLVNEMYQTSLRQFLGLFDLSLARSVKSPITSKRIANIIEHMTYEVYKYAARGLYEEHKFLFTLLLTLKIDIQRNRVKHEEFLTLIKGGASLDLKACPPKPSKWILDITWLNLVELSKLRQFSDVLDQISRNEKMWKIWFDKENPEEEPLPNAYDKSLDCFRRLLLIRSWCPDRTIAQARKYIVDSMGEKYAEGVILDLEKTWEESDPRTPLICLLSMGSDPTDSIIALGKRLKIETRYVSMGQGQEVHARKLLQQTMANGGWALLQNCHLGLDFMDELMDIIIETELVHDAFRLWMTTEAHKQFPITLLQMSIKFANDPPQGLRAGLKRTYSGVSQDLLDVSSGSQWKPMLYAVAFLHSTVQERRKFGALGWNIPYEFNQADFNATVQFIQNHLDDMDVKKGVSWTTIRYMIGEIQYGGRVTDDYDKRLLNTFAKVWFSENMFGPDFSFYQGYNIPKCSTVDNYLQYIQSLPAYDSPEVFGLHPNADITYQSKLAKDVLDTILGIQPKDTSGGGDETREAVVARLADDMLEKLPPDYVPFEVKERLQKMGPFQPMNIFLRQEIDRMQRVLSLVRSTLTELKLAIDGTIIMSENLRDALDCMFDARIPAWWKKASWISSTLGFWFTELIERNSQFTSWVFNGRPHCFWMTGFFNPQGFLTAMRQEITRANKGWALDNMVLCNEVTKWMKDDISAPPTEGVYVYGLYLEGAGWDKRNMKLIESKPKVLFELMPVIRIYAENNTLRDPRFYSCPIYKKPVRTDLNYIAAVDLRTAQTPEHWVLRGVALLCDVK

SEQ ID NO: 21974 - protein, 484 aa, Homo sapiens
MPKKEKMAKTPLSDEKQLLLFQQKLLAEEEMAKKKERLLSQFLKDKLAKEEHNSALNLNKINTQWRTVLREVKTRELHKDIEILSQTFERVVDCKDNVIKSLAKDLSEAEEQYAHALRSHLHNVDQLLALQRHRLSLLEESYNMELEALTKEFETERKTIIDQHEKEIHYLQDIFMAMEQNYIDSEYESKLEFQSMWNDLKNMNLEEKHFLRLHLENRVEDLWRKFQDVLKNYTDATEDRKAAFETLQVKDEKSSKEIEVQMKKIQKLQDAITISKGKIMIHSRESEDENRYIRNDKELVLVQLRKLKAQRTQARAASQKNLVRLTLESNATLKALRKIVDKGEKILKLAEICRKFETEEEKVLPFYSSVLTPKEQEGIQKNNLEELTEELTKVMVDYIGMENFWKRYNKVKLEQLSLQHRRAQLLDINGKLREMLKQYLDGISVSDEVLSQLNPLFIVNYQSNLLQPLSIRIAHPGDKQHPTT

SEQ ID NO: 21975 - protein, 497 aa, Homo sapiens
MPKKEKMAKTPLSDEKQLLLFQQKLLAEEEMAKKKERLLSQFLKDKLAKEEHNSALNLNKINTQWRTVLREVKTRELHKDIEILSQTFERVVDCKDNVIKSLAKDLSEAEEQYAHALRSHLHNVDQLLALQRHRLSLLEESYNMELEALTKEFETERKTIIDQHEKEIHYLQDIFMAMEQNYIDSEYESKLEFQSMWNDLKNMNLEEKHFLRLHLENRVEDLWRKFQDVLKNYTDATEDRKAAFETLQVKDEKSSKEIEVQMKKIQKLQDAITISKGKIMIHSRESEDENRYIRNDKELVLVQLRKLKAQRTQARAASQKNLVRLTLESNATLKALRKIVDKGEKILKLAEICRKFETEEEKVLPFYSSVLTPKEQEGIQKNNLEELTEELTKVMVDYIGMENFWKRYNKVKLEQLSLQHRRAQLLDINGKLREMLKQYLDGISVSDEVLSQLNPLFIVNYQSNLLQPLSIRIAHPGSTSPSAPWRDQRRSFFLGSS

SEQ ID NO: 21976 - protein, 443 aa, Homo sapiens
MEEDSLEDSNLPPKVWHSEMTVSVTGEPPSTVEEEGIPKETDIEIIPEIPETLEPLSLPDVLRISAVLEDTTDQLSILNYIMPVQYEGRQSICVKSREMNLEGTNLDKLPMASTITKIPSPLITEEGPNLPEIRHRGRFAVEFNKMQDLVFKKPTRQTIMTTETLKKIQIDRQFFSDVIADTIKELQDSATYNSLLQALSKERENKMHFYDIIAREEKGRKQIISLQKQLINVKKEWQFEVQSQNEYIANLKDQLQEMKAKSNLENRYMKTNTELQIAQTQKKCNRTEELLVEEIEKLRMKTEEEARTHTEIEMFLRKEQQKLEERLEFWMEKYDKDTEMKQNELNALKATKASDLAHLQDLAKMIREYEQVIIEDRIEKERSKKKVKQDLLELKSVIKLQAWWRGTMIRREIGGFKMPKDKVDSKDSKGKGKGKDKRRGKKK

SEQ ID NO: 21977 - protein, 345 aa, Homo sapiens
MNLEGTNLDKLPMASTITKIPSPLITEEGPNLPEIRHRGRFAVEFNKMQDLVFKKPTRQTIMTTETLKKIQIDRQFFSDVIADTIKELQDSATYNSLLQALSKERENKMHFYDIIAREEKGRKQIISLQKQLINVKKEWQFEVQSQNEYIANLKDQLQEMKAKSNLENRYMKTNTELQIAQTQKKCNRTEELLVEEIEKLRMKTEEEARTHTEIEMFLRKEQQKLEERLEFWMEKYDKDTEMKQNELNALKATKASDLAHLQDLAKMIREYEQVIIEDRIEKERSKKKVKQDLLELKSVIKLQAWWRGTMIRREIGGFKMPKDKVDSKDSKGKGKGKDKRRGKKK

SEQ ID NO: 21978 - protein, 802 aa, Homo sapiens
MAARGRRAWLSVLLGLVLGFVLASRLVLPRASELKRAGPRRRASPEGCRSGQAAASQAGGARGDARGAQLWPPGSDPDGGPRDRNFLFVGVMTAQKYLQTRAVAAYRTWSKTIPGKVQFFSSEGSDTSVPIPVVPLRGVDDSYPPQKKSFMMLKYMHDHYLDKYEWFMRADDDVYIKGDRLENFLRSLNSSEPLFLGQTGLGTTEEMGKLALEPGENFCMGGPGVIMSREVLRRMVPHIGKCLREMYTTHEDVEVGRCVRRFAGVQCVWSYEMQQLFYENYEQNKKGYIRDLHNSKIHQAITLHPNKNPPYQYRLHSYMLSRKISELRHRTIQLHREIVLMSKYSNTEIHKEDLQLGIPPSFMRFQPRQREEILEWEFLTGKYLYSAVDGQPPRRGMDSAQREALDDIVMQVMEMINANAKTRGRIIDFKEIQYGYRRVNPMYGAEYILDLLLLYKKHKGKKMTVPVRRHAYLQQTFSKIQFVEHEELDAQELAKRINQESGSLSFLSNSLKKLVPFQLPGSKSEHKEPKDKKINILIPLSGRFDMFVRFMGNFEKTCLIPNQNVKLVVLLFNSDSNPDKAKQVELMRDYRIKYPKADMQILPVSGEFSRALALEVGSSQFNNESLLFFCDVDLVFTTEFLQRCRANTVLGQQIYFPIIFSQYDPKIVYSGKVPSDNHFAFTQKTGFWRNYGFGITCIYKGDLVRVGGFDVSIQGWGLEDVDLFNKVVQAGLKTFRSQEVGVVHVHHPVFCDPNLDPKQYKMCLGSKASTYGSTQQLAEMWLEKNDPSYSKSSNNNGSVRTA

SEQ ID NO: 21979 - protein, 1466 aa, Homo sapiens
MMSFVQKGSWLLLALLHPTIILAQQEAVEGGCSHLGQSYADRDVWKPEPCQICVCDSGSVLCDDIICDDQELDCPNPEIPFGECCAVCPQPPTAPTRPPNGQGPQGPKGDPGPPGIPGRNGDPGIPGQPGSPGSPGPPGICESCPTGPQNYSPQYDSYDVKSGVAVGGLAGYPGPAGPPGPPGPPGTSGHPGSPGSPGYQGPPGEPGQAGPSGPPGPPGAIGPSGPAGKDGESGRPGRPGERGLPGPPGIKGPAGIPGFPGMKGHRGFDGRNGEKGETGAPGLKGENGLPGENGAPGPMGPRGAPGERGRPGLPGAAGARGNDGARGSDGQPGPPGPPGTAGFPGSPGAKGEVGPAGSPGSNGAPGQRGEPGPQGHAGAQGPPGPPGINGSPGGKGEMGPAGIPGAPGLMGARGPPGPAGANGAPGLRGGAGEPGKNGAKGEPGPRGERGEAGIPGVPGAKGEDGKDGSPGEPGANGLPGAAGERGAPGFRGPAGPNGIPGEKGPAGERGAPGPAGPRGAAGEPGRDGVPGGPGMRGMPGSPGGPGSDGKPGPPGSQGESGRPGPPGPSGPRGQPGVMGFPGPKGNDGAPGKNGERGGPGGPGPQGPPGKNGETGPQGPPGPTGPGGDKGDTGPPGPQGLQGLPGTGGPPGENGKPGEPGPKGDAGAPGAPGGKGDAGAPGERGPPGLAGAPGLRGGAGPPGPEGGKGAAGPPGPPGAAGTPGLQGMPGERGGLGSPGPKGDKGEPGGPGADGVPGKDGPRGPTGPIGPPGPAGQPGDKGEGGAPGLPGIAGPRGSPGERGETGPPGPAGFPGAPGQNGEPGGKGERGAPGEKGEGGPPGVAGPPGGSGPAGPPGPQGVKGERGSPGGPGAAGFPGARGLPGPPGSNGNPGPPGPSGSPGKDGPPGPAGNTGAPGSPGVSGPKGDAGQPGEKGSPGAQGPPGAPGPLGIAGITGARGLAGPPGMPGPRGSPGPQGVKGESGKPGANGLSGERGPPGPQGLPGLAGTAGEPGRDGNPGSDGLPGRDGSPGGKGDRGENGSPGAPGAPGHPGPPGPVGPAGKSGDRGESGPAGPAGAPGPAGSRGAPGPQGPRGDKGETGERGAAGIKGHRGFPGNPGAPGSPGPAGQQGAIGSPGPAGPRGPVGPSGPPGKDGTSGHPGPIGPPGPRGNRGERGSEGSPGHPGQPGPPGPPGAPGPCCGGVGAAAIAGIGGEKAGGFAPYYGDEPMDFKINTDEIMTSLKSVNGQIESLISPDGSRKNPARNCRDLKFCHPELKSGEYWVDPNQGCKLDAIKVFCNMETGETCISANPLNVPRKHWWTDSSAEKKHVWFGESMDGGFQFSYGNPELPEDVLDVHLAFLRLLSSRASQNITYHCKNSIAYMDQASGNVKKALKLMGSNEGEFKAEGNSKFTYTVLEDGCTKHTGEWSKTVFEYRTRKAVRLPIVDIAPYDIGGPDQEFGVDVGPVCFL

SEQ ID NO: 21980 - protein, 1163 aa, Homo sapiens
MMSFVQKGSWLLLALLHPTIILAQQEAVEGGCSHLGQSYADRDVWKPEPCQICVCDSGSVLCDDIICDDQELDCPNPEIPFGECCAVCPQPPTAPTRPPNGQGPQGPKGDPGPPGIPGRNGDPGIPGQPGSPGSPGPPGICESCPTGPQNYSPQYDSYDVKSGVAVGGLAGYPGPAGPPGPPGPPGTSGHPGSPGSPGYQGPPGEPGQAGPSGPPGPPGAIGPSGPAGKDGESGRPGRPGERGLPGPPGIKGPAGIPGFPGMKGHRGFDGRNGEKGETGAPGLKGENGLPGENGAPGPMGPRGAPGERGRPGLPGAAGARGNDGARGSDGQPGPPGPPGTAGFPGSPGAKGEVGPAGSPGSNGAPGQRGEPGPQGHAGAQGPPGPPGINGSPGGKGEMGPAGIPGAPGLMGARGPPGPAGANGAPGLRGGAGEPGKNGAKGEPGPRGERGEAGIPGVPGAKGEDGKDGSPGEPGANGLPGAAGERGAPGFRGPAGPNGIPGEKGPAGERGAPGPAGPRGAAGEPGRDGVPGGPGMRGMPGSPGGPGSDGKPGPPGSQGESGRPGPPGPSGPRGQPGVMGFPGPKGNDGAPGKNGERGGPGGPGPQGPPGKNGETGPQGPPGPTGPGGDKGDTGPPGPQGLQGLPGTGGPPGENGKPGEPGPKGDAGAPGAPGGKGDAGAPGERGPPGLAGAPGLRGGAGPPGPEGGKGAAGPPGPPGAAGTPGLQGMPGERGGLGSPGPKGDKGEPGGPGADGVPGKDGPRGPTGPIGPPGPAGQPGDKGEGGAPGLPGIAGPRGSPGERGETGPPGPAGFPGAPGQNGEPGGKGERGAPGEKGEGGPPGVAGPPGKDGTSGHPGPIGPPGPRGNRGERGSEGSPGHPGQPGPPGPPGAPGPCCGGVGAAAIAGIGGEKAGGFAPYYGDEPMDFKINTDEIMTSLKSVNGQIESLISPDGSRKNPARNCRDLKFCHPELKSGEYWVDPNQGCKLDAIKVFCNMETGETCISANPLNVPRKHWWTDSSAEKKHVWFGESMDGGFQFSYGNPELPEDVLDVHLAFLRLLSSRASQNITYHCKNSIAYMDQASGNVKKALKLMGSNEGEFKAEGNSKFTYTVLEDGCTKHTGEWSKTVFEYRTRKAVRLPIVDIAPYDIGGPDQEFGVDVGPVCFL

SEQ ID NO: 21981 - protein, 479 aa, Homo sapiens
MEKGLTLPQDCRDFVHSLKMRSKYALFLVFVVIVFVFIEKENKIISRVSDKLKQIPQALADANSTDPALILAENASLLSLSELDSAFSQLQSRLRNLSLQLGVEPAMEAAGEEEEEQRKEEEPPRPAVAGPRRHVLLMATTRTGSSFVGEFFNQQGNIFYLFEPLWHIERTVSFEPGGANAAGSALVYRDVLKQLFLCDLYVLEHFITPLPEDHLTQFMFRRGSSRSLCEDPVCTPFVKKVFEKYHCKNRRCGPLNVTLAAEACRRKEHMALKAVRIRQLEFLQPLAEDPRLDLRVIQLVRDPRAVLASRMVAFAGKYKTWKKWLDDEGQDGLREEEVQRLRGNCESIRLSAELGLRQPAWLRGRYMLVRYEDVARGPLQKAREMYRFAGIPLTPQVEDWIQKNTQAAHDGSGIYSTQKNSSEQFEKWRFSMPFKLAQVVQAACGPAMRLFGYKLARDAAALTNRSVSLLEERGTFWVT

SEQ ID NO: 21982 - protein, 443 aa, Homo sapiens
MQPSEMVMNPKQVFLSVLIFGVAGLLLFMYLQVWIEEQHTGRVEKRREQKVTSGWGPVKYLRPVPRIMSTEKIQEHITNQNPKFHMPEDVREKKENLLLNSERSTRLLTKTSHSQGGDQALSKSTGSPTEKLIEKRQGAKTVFNKFSNMNWPVDIHPLNKSLVKDNKWKKTEETQEKRRSFLQEFCKKYGGVSHHQSHLFHTVSRIYVEDKHKILYCEVPKAGCSNWKRILMVLNGLASSAYNISHNAVHYGKHLKKLDSFDLKGIYTRLNTYTKAVFVRDPMERLVSAFRDKFEHPNSYYHPVFGKAIIKKYRPNACEEALINGSGVKFKEFIHYLLDSHRPVGMDIHWEKVSKLCYPCLINYDFVGKFETLEEDANYFLQMIGAPKELKFPNFKDRHSSDERTNAQVVRQYLKDLTRTERQLIYDFYYLDYLMFNYTTPFL

SEQ ID NO: 21983 - protein, 74 aa, Homo sapiens
MQPSEMVMNPKQVFLSVLIFGVAGLLLFMYLQVWIEEQHTGRVEKRREQKVTSGWGPVKYLRPVPRIKPQVSHA

SEQ ID NO: 21984 - protein, 191 aa, Homo sapiens
MGGSGSRLSKELLAEYQDLTFLTKQEILLAHRRFCELLPQEQRSVESSLRAQVPFEQILSLPELKANPFKERICRVFSTSPAKDSLSFEDFLDLLSVFSDTATPDIKSHYAFRIFDFDDDGTLNREDLSRLVNCLTGEGEDTRLSASEMKQLIDNILEESDIDRDGTINLSEFQHVISRSPDFASSFKIVL

SEQ ID NO: 21985 - protein, 231 aa, Homo sapiens
MGGSGSRLSKELLAEYQDLTFLTKQEILLSVYVVLAPHLVDNEQQARSGNEHTGRPIAENTDSSPLSTRAHRRFCELLPQEQRSVESSLRAQVPFEQILSLPELKANPFKERICRVFSTSPAKDSLSFEDFLDLLSVFSDTATPDIKSHYAFRIFDFDDDGTLNREDLSRLVNCLTGEGEDTRLSASEMKQLIDNILEESDIDRDGTINLSEFQHVISRSPDFASSFKIVL

SEQ ID NO: 21986 - protein, 360 aa, Homo sapiens
MSTVICMKQREEEFLLTIRPFANRMQKSPCYIPIVSSATLWDRSTPSAKHIPCYERTSVPCSRFINHMKNFSESPKFRSLHFLNFPVFPERTQNSMACKRLLHTCQYIVPRCSVSTVSFDEESYEEFRSSPAPSSETDEAPLIFTARGETEERARGAPKQAWNSSFLEQLVKKPNWAHSVNPVHLEAQGIHISRHTRPKGQPLSSPKKNSGSAARPSTAIGLCRRSQTPGALQSTGPSNTELEPEERMAVPAGAQAHPDDIQSRLLGASGNPVGKGAVAMAPEMLPKHPHTPRDRRPQADTSLHGNLAGAPLPLLAGASTHFPSKRLIKVCSSAPPRPTRRFHTVCSQALSRPVVNAHLH

SEQ ID NO: 21987 - protein, 265 aa, Homo sapiens
MACKRLLHTCQYIVPRCSVSTVSFDEESYEEFRSSPAPSSETDEAPLIFTARGETEERARGAPKQAWNSSFLEQLVKKPNWAHSVNPVHLEAQGIHISRHTRPKGQPLSSPKKNSGSAARPSTAIGLCRRSQTPGALQSTGPSNTELEPEERMAVPAGAQAHPDDIQSRLLGASGNPVGKGAVAMAPEMLPKHPHTPRDRRPQADTSLHGNLAGAPLPLLAGASTHFPSKRLIKVCSSAPPRPTRRFHTVCSQALSRPVVNAHLH

SEQ ID NO: 21988 - protein, 107 aa, Homo sapiens
MSTVICMKQREEEFLLTIRPFANRMQKSPCYIPIVSSATLWDRSTPSAKHIPCYERTSVPCSRFINHMKNFSESPKFRSLHFLNFPGSHHGQATQKLQGAMVLHLEE

SEQ ID NO: 21989 - protein, 115 aa, Homo sapiens
MNVCCSSHPVNEKVWKPSSRKWSSKVWSMDEFDLQTACYWFMTRCQKEAGKFGTHRGKPMCFVRSLLRVQLLPRTFPANSFVISFFPSLIYPLQVYQLHFESSDKQRAMQFVTEG

SEQ ID NO: 21990 - protein, 96 aa, Homo sapiens
MNVCCSSHPVNEKVWKPSSRKWSSKVWSMDEFDLQTACYWFMTRSTNCILRAQISREQCNLSQKDDYVYALSCLFPCLTQRRHKEKVSSAWINWRL

SEQ ID NO: 21991 - protein, 85 aa, Homo sapiens
MNVCCSSHPVNEKVWKPSSRKWSSKVWSMDEFDLQTACYWFMTRSTNCILRAQISREQCNLSQKDDYVYALSCVCMCMYIRYFHA

SEQ ID NO: 21992 - protein, 341 aa, Homo sapiens
MGRRCCRRRVLAAACLGAALLLLCAAPRSLRPAFGNRALGSSWLGGEKRSPLQKLYDLDQDPRSTLAKVHRQRRDLLNSACSRHSRRQRLLQPEDLRHVLVDDAHGLLYCYVPKVACTNWKRVLLALSGQARGDPRAISAQEAHAPGRLPSLADFSPAEINRRLRAYLAFLFVREPFERLASAYRNKLARPYSAAFQRRYGARIVQRLRPRALPDARARGHDVRFAEFLAYLLDPRTRREEPFNEHWERAHALCHPCRLRYDVVGKFETLAEDAAFVLGLAGASDLSFPGPPRPRGAAASRDLAARLFRDISPFYQRRLFDLYKMDFLLFNYSAPSYLRLL

SEQ ID NO: 21993 - protein, 225 aa, Homo sapiens
MGRRCCRRRVLAAACLGAALLLLCAAPRSLRPAFGNRALGSSWLGGEKRSPLQKLYDLDQDPRSTLAKVHRQRRDLLNSACSRHSRRQRLLQPEDLRHVLVDDAHGLLYCYVPKVACTNWKRVLLALSGQARGDPRAISAQEAHAPGRLPSLADFSPAEINRRLRAYLAFLFVREPFERLASAYRNKLARTRSATRVASATTSWASSRRWRRTRPSCWAWRAHPT

SEQ ID NO: 21994 - protein, 265 aa, Homo sapiens
MSEEVTYADLQFQNSSEMEKIPEIGKFGEKAPPAPSHVWRPAALFLTLLCLLLLIGLGVLASMFHVTLKIEMKKMNKLQNISEELQRNISLQLMSNMNISNKIRNLSTTLQTIATKLCRELYSKEQEHKCKPCPRRWIWHKDSCYFLSDDVQTWQESKMACAAQNASLLKINNKNALEFIKSQSRSYDYWLGLSPEEDSTRGMRVDNIINSSAWVIRNAPDLNNMYCGYINRLYVQYYHCTYKKRMICEKMANPVQLGSTYFREA

SEQ ID NO: 21995 - protein, 275 aa, Homo sapiens
MWIDFFTYSSMSEEVTYADLQFQNSSEMEKIPEIGKFGEKAPPAPSHVWRPAALFLTLLCLLLLIGLGVLASMFHVTLKIEMKKMNKLQNISEELQRNISLQLMSNMNISNKIRNLSTTLQTIATKLCRELYSKEQEHKCKPCPRRWIWHKDSCYFLSDDVQTWQESKMACAAQNASLLKINNKNALEFIKSQSRSYDYWLGLSPEEDSTRGMRVDNIINSSAWVIRNAPDLNNMYCGYINRLYVQYYHCTYKKRMICEKMANPVQLGSTYFREA

SEQ ID NO: 21996 - protein, 81 aa, Homo sapiens
MSEEVTYADLQFQNSSEMEKIPEIGKFGEKAPPAPSHVWRPAALFLTLLCLLLLIGLGVLASMCMYCPCFGQEEVSRISNI

SEQ ID NO: 21997 - protein, 232 aa, Homo sapiens
MSEEVTYADLQFQNSSEMEKIPEIGKFGEKVHVTLKIEMKKMNKLQNISEELQRNISLQLMSNMNISNKIRNLSTTLQTIATKLCRELYSKEQEHKCKPCPRRWIWHKDSCYFLSDDVQTWQESKMACAAQNASLLKINNKNALEFIKSQSRSYDYWLGLSPEEDSTRGMRVDNIINSSAWVIRNAPDLNNMYCGYINRLYVQYYHCTYKKRMICEKMANPVQLGSTYFREA

SEQ ID NO: 21998 - protein, 213 aa, Homo sapiens
MSEEVTYADLQFQNSSEMEKIPEIGKFGEKAPPAPSHVWRPAALFLTLLCLLLLIGLGVLASMFHVTLKIEMKKMNKLQNISEELQRNISLQLMSNMNISNKIRNLSTTLQTIATKLCRELYSKEQEHKCKPCPRRWIWHKDSCYFLSDDVQTWQESKMACAAQNASLLKINNKNALEFIKSQSRSYDYWLGLSPEEDSTRGMRVDNIINSSA

SEQ ID NO: 21999 - protein, 187 aa, Homo sapiens
MGNKQTIFTEEQLDNYQDCTFFNKKDILKLHSRFYELAPNLVPMDYRKSPIVHVPMSLIIQMPELRENPFKERIVAAFSEDGEGNLTFNDFVDMFSVLCESAPRELKANYAFKIYDFNTDNFICKEDLELTLARLTKSELDEEEVVLVCDKVIEEADLDGDGKLGFADFEDMIAKAPDFLSTFHIRI

SEQ ID NO: 22000 - protein, 210 aa, Homo sapiens
MGNKQTIFTEEQLDNYQDCTFFNKKDILKLHSRFYELAPNLVPMDYRKSPIVHVPMSLIIQMPELRENPFKERIVAAFSEDGEGNLTFNDFVDMFSVLCESAPRELKANYAFKIYDFNTDNFICKEDLELTLARLTKSELDEEEVVLVCDKVIEEADLDGDGKLGFADFEDMIAKAPDFLRCCHYRGRAWAGQSRAGRDVGAEAPITRYL

SEQ ID NO: 22001 - protein, 144 aa, Homo sapiens
MDYRKSPIVHVPMSLIIQMPELRENPFKERIVAAFSEDGEGNLTFNDFVDMFSVLCESAPRELKANYAFKIYDFNTDNFICKEDLELTLARLTKSELDEEEVVLVCDKVIEEADLDGDGKLGFADFEDMIAKAPDFLSTFHIRI

SEQ ID NO: 22002 - protein, 138 aa, Homo sapiens
MGNKQTIFTEEQLDNYQENPFKERIVAAFSEDGEGNLTFNDFVDMFSVLCESAPRELKANYAFKIYDFNTDNFICKEDLELTLARLTKSELDEEEVVLVCDKVIEEADLDGDGKLGFADFEDMIAKAPDFLSTFHIRI

SEQ ID NO: 22003 - protein, 276 aa, Homo sapiens
MSEEVTYATLTFQDSAGARNNRDGNNLRKRGHPAPSPIWRHAALGLVTLCLMLLIGLVTLGMMFLQISNDINSDSEKLSQLQKTIQQQQDNLSQQLGNSNNLSMEEEFLKSQISSVLKRQEQMAIKLCQELIIHTSDHRCNPCPKMWQWYQNSCYYFTTNEEKTWANSRKDCIDKNSTLVKIDSLEEKDFLMSQPLLMFSFFWLGLSWDSSGRSWFWEDGSVPSPSLFSTKELDQINGSKGCAYFQKGNIYISRCSAEIFWICEKTAAPVKTEDLD

SEQ ID NO: 22004 - protein, 232 aa, Homo sapiens
MSEEVTYATLTFQDSAGARNNRDGNNLRKRGHPAPSPIWRHAALGLVTLCLMLLIGLVTLGMMFLQISNDINSDSEKLSQLQKTIQQQQDNLSQQLGNSNNLSMEEEFLKSQISSVLKRQEQMAIKLCQELIIHTSDHRCNPCPKMWQWYQNSCYYFTTNEEKTWANSRKDCIDKNSTLVKIDSLEEKDFLMSQPLLMFSFFWLGLSWDSSGRSWFWEDGSVPSPSLYVSNY

SEQ ID NO: 22005 - protein, 411 aa, Homo sapiens
MGMRARVPKVAHSTRRPPAARMWLPRFSSKTVTVLLLAQTTCLLLFIISRPGPSSPAGGEDRVHVLVLSSWRSGSSFLGQLFSQHPDVFYLMEPAWHVWTTLSQGSAATLHMAVRDLMRSIFLCDMDVFDAYMPQSRNLSAFFNWATSRALCSPPACSAFPRGTISKQDVCKTLCTRQPFSLAREACRSYSHVVLKEVRFFNLQVLYPLLSDPALNLRIVHLVRDPRAVLRSREAAGPILARDNGIVLGTNGKWVEADPHLRLIREVCRSHVRIAEAATLKPPPFLRGRYRLVRFEDLAREPLAEIRALYAFTGLTLTPQLEAWIHNITHGSGIGKPIEAFHTSSRNARNVSQAWRHALPFTKILRVQEVCAGALQLLGYRPVYSADQQRDLTLDLVLPRGPDHFSWASPD

SEQ ID NO: 22006 - protein, 417 aa, Homo sapiens
MSRHLPWICDQRCSSPSSPGRWPPAARMWLPRFSSKTVTVLLLAQTTCLLLFIISRPGPSSPAGGEDRVHVLVLSSWRSGSSFLGQLFSQHPDVFYLMEPAWHVWTTLSQGSAATLHMAVRDLMRSIFLCDMDVFDAYMPQSRNLSAFFNWATSRALCSPPACSAFPRGTISKQDVCKTLCTRQPFSLAREACRSYSHVVLKEVRFFNLQVLYPLLSDPALNLRIVHLVRDPRAVLRSREAAGPILARDNGIVLGTNGKWVEADPHLRLIREVCRSHVRIAEAATLKPPPFLRGRYRLVRFEDLAREPLAEIRALYAFTGLTLTPQLEAWIHNITHGSGIGKPIEAFHTSSRNARNVSQAWRHALPFTKILRVQEVCAGALQLLGYRPVYSADQQRDLTLDLVLPRGPDHFSWASPD

SEQ ID NO: 22007 - protein, 1499 aa, Homo sapiens
MMANWAEARPLLILIVLLGQFVSIKAQEEDEDEGYGEEIACTQNGQMYLNRDIWKPAPCQICVCDNGAILCDKIECQDVLDCADPVTPPGECCPVCSQTPGGGNTNFGRGRKGQKGEPGLVPVVTGIRGRPGPAGPPGSQGPRGERGPKGRPGPRGPQGIDGEPGVPGQPGAPGPPGHPSHPGPDGLSRPFSAQMAGLDEKSGLGSQVGLMPGSVGPVGPRGPQGLQGQQGGAGPTGPPGEPGDPGPMGPIGSRGPEGPPGKPGEDGEPGRNGNPGEVGFAGSPGARGFPGAPGLPGLKGHRGHKGLEGPKGEVGAPGSKGEAGPTGPMGAMGPLGPRGMPGERGRLGPQGAPGQRGAHGMPGKPGPMGPLGIPGSSGFPGNPGMKGEAGPTGARGPEGPQGQRGETGPPGPVGSPGLPGAIGTDGTPGAKGPTGSPGTSGPPGSAGPPGSPGPQGSTGPQGIRGQPGDPGVPGFKGEAGPKGEPGPHGIQGPIGPPGEEGKRGPRGDPGTVGPPGPVGERGAPGNRGFPGSDGLPGPKGAQGERGPVGSSGPKGSQGDPGRPGEPGLPGARGLTGNPGVQGPEGKLGPLGAPGEDGRPGPPGSIGIRGQPGSMGLPGPKGSSGDPGKPGEAGNAGVPGQRGAPGKDGEVGPSGPVGPPGLAGERGEQGPPGPTGFQGLPGPPGPPGEGGKPGDQGVPGDPGAVGPLGPRGERGNPGERGEPGITGLPGEKGMAGGHGPDGPKGSPGPSGTPGDTGPPGLQGMPGERGIAGTPGPKGDRGGIGEKGAEGTAGNDGARGLPGPLGPPGPAGPTGEKGEPGPRGLVGPPGSRGNPGSRGENGPTGAVGFAGPQGPDGQPGVKGEPGEPGQKGDAGSPGPQGLAGSPGPHGPNGVPGLKGGRGTQGPPGATGFPGSAGRVGPPGPAGAPGPAGPLGEPGKEGPPGLRGDPGSHGRVGDRGPAGPPGGPGDKGDPGEDGQPGPDGPPGPAGTTGQRGIVGMPGQRGERGMPGLPGPAGTPGKVGPTGATGDKGPPGPVGPPGSNGPVGEPGPEGPAGNDGTPGRDGAVGERGDRGDPGPAGLPGSQGAPGTPGPVGAPGDAGQRGDPGSRGPIGPPGRAGKRGLPGPQGPRGDKGDHGDRGDRGQKGHRGFTGLQGLPGPPGPNGEQGSAGIPGPFGPRGPPGPVGPSGKEGNPGPLGPIGPPGVRGSVGEAGPEGPPGEPGPPGPPGPPGHLTAALGDIMGHYDESMPDPLPEFTEDQAAPDDKNKTDPGVHATLKSLSSQIETMRSPDGSKKHPARTCDDLKLCHSAKQSGEYWIDPNQGSVEDAIKVYCNMETGETCISANPSSVPRKTWWASKSPDNKPVWYGLDMNRGSQFAYGDHQSPNTAITQMTFLRLLSKEASQNITYICKNSVGYMDDQAKNLKKAVVLKGANDLDIKAEGNIRFRYIVLQDTCSKRNGNVGKTVFEYRTQNVARLPIIDLAPVDVGGTDQEFGVEIGPVCFV

SEQ ID NO: 22008 - protein, 253 aa, Homo sapiens
MALSMPLNGLKEEDKEPLIELFVKAGSDGESIGNCPFSQRLFMILWLKGVVFSVTTVDLKRKPADLQNLAPGTHPPFITFNSEVKTDVNKIEEFLEEVLCPPKYLKLSPKHPESNTAGMDIFAKFSAYIKNSRPEANEALERGLLKTLQKLDEYLNSPLPDEIDENSMEDIKFSTRKFLDGNEMTLADCNLLPKLHIVKVVAKKYRNFDIPKEMTGIWRYLTNAYSRDEFTNTCPSDKEVEIAYSDVAKRLTK

SEQ ID NO: 22009 - protein, 1028 aa, Homo sapiens
MRAARALLPLLLQACWTAAQDEPETPRAVAFQDCPVDLFFVLDTSESVALRLKPYGALVDKVKSFTKRFIDNLRDRYYRCDRNLVWNAGALHYSDEVEIIQGLTRMPGGRDALKSSVDAVKYFGKGTYTDCAIKKGLEQLLVGGSHLKENKYLIVVTDGHPLEGYKEPCGGLEDAVNEAKHLGVKVFSVAITPDHLEPRLSIIATDHTYRRNFTAADWGQSRDAEEAISQTIDTIVDMIKNNVEQVCCSFECQPARGPPGLRGDPGFEGERGKPGLPGEKGEAGDPGRPGDLGPVGYQGMKGEKGSRGEKGSRGPKGYKGEKGKRGIDGVDGVKGEMGYPGLPGCKGSPGFDGIQGPPGPKGDPGAFGLKGEKGEPGADGEAGRPGSSGPSGDEGQPGEPGPPGEKGEAGDEGNPGPDGAPGERGGPGERGPRGTPGTRGPRGDPGEAGPQGDQGREGPVGVPGDPGEAGPIGPKGYRGDEGPPGSEGARGAPGPAGPPGDPGLMGERGEDGPAGNGTEGFPGFPGYPGNRGAPGINGTKGYPGLKGDEGEAGDPGDDNNDIAPRGVKGAKGYRGPEGPQGPPGHQGPPGPDECEILDIIMKMCSCCECKCGPIDLLFVLDSSESIGLQNFEIAKDFVVKVIDRLSRDELVKFEPGQSYAGVVQYSHSQMQEHVSLRSPSIRNVQELKEAIKSLQWMAGGTFTGEALQYTRDQLLPPSPNNRIALVITDGRSDTQRDTTPLNVLCSPGIQVVSVGIKDVFDFIPGSDQLNVISCQGLAPSQGRPGLSLVKENYAELLEDAFLKNVTAQICIDKKCPDYTCPITFSSPADITILLDGSASVGSHNFDTTKRFAKRLAERFLTAGRTDPAHDVRVAVVQYSGTGQQRPERASLQFLQNYTALASAVDAMDFINDATDVNDALGYVTRFYREASSGAAKKRLLLFSDGNSQGATPAAIEKAVQEAQRAGIEIFVVVVGRQVNEPHIRVLVTGKTAEYDVAYGESHLFRVPSYQALLRGVFHQTVSRKVALG

SEQ ID NO: 22010 - protein, 619 aa, Homo sapiens
MLLASAVVVWEWLNEHGRWRPYSPAVSHHIEAVVRAGPRAGGSVVLGQVDSRLAPYIIDLQSMNQFRQDTGTLRPVRRNYYDPSSAPGKGVVWEWENDNGSWTPYDMEVGITIQHAYEKQHPWIDLTSIGFSYVIDFNTMGQINRQTQRQRRVRRRLDLIYPMVTGTLPKAQSWPVSPGPATSPPMSPCSCPQCVLVMSVKAAVVNGSTGPLQLPVTRKNMPPPGVVKLPPLPGSGAKPLDSTGTIRGPLKTAPSQVIRRQASSMPTGTTMGSPASPPGPNSKTGRVALATLNRTNLQRLAIAQSRVLIASGVPTVPVKNLNGSSPVNPALAGITGILMSAAGLPVCLTRPPKLVLHPPPVSKSEIKSIPGVSNTSRKTTKKQAKKGKTPEEVLKKYLQKVRHPPDEDCTICMERLTAPSGYKGPQPTVKPDLVGKLSRCGHVYHIYCLVAMYNNGNKDGSLQCPTCKTIYGVKTGTQPPGKMEYHLIPHSLPGHPDCKTIRIIYSIPPGIQGPEHPNPGKSFSARGFPRHCYLPDSEKGRKVLKLLLVAWDRRLIFAIGTSSTTGESDTVIWNEVHHKTEFGSNLTGHGYPDANYLDNVLAELAAQGISEDSTAQEKD

SEQ ID NO: 22011 - protein, 513 aa, Homo sapiens
MEVGITIQHAYEKQHPWIDLTSIGFSYVIDFNTMGQINRQTQRQRRVRRRLDLIYPMVTGTLPKAQSWPVSPGPATSPPMSPCSCPQCVLVMSVKAAVVNGSTGPLQLPVTRKNMPPPGVVKLPPLPGSGAKPLDSTGTIRGPLKTAPSQVIRRQASSMPTGTTMGSPASPPGPNSKTGRVALATLNRTNLQRLAIAQSRVLIASGVPTVPVKNLNGSSPVNPALAGITGILMSAAGLPVCLTRPPKLVLHPPPVSKSEIKSIPGVSNTSRKTTKKQAKKGKTPEEVLKKYLQKVRHPPDEDCTICMERLTAPSGYKGPQPTVKPDLVGKLSRCGHVYHIYCLVAMYNNGNKDGSLQCPTCKTIYGVKTGTQPPGKMEYHLIPHSLPGHPDCKTIRIIYSIPPGIQGPEHPNPGKSFSARGFPRHCYLPDSEKGRKVLKLLLVAWDRRLIFAIGTSSTTGESDTVIWNEVHHKTEFGSNLTGHGYPDANYLDNVLAELAAQGISEDSTAQEKD

SEQ ID NO: 22012 - protein, 139 aa, Homo sapiens
MRQPYLSSREVSSSRKRWRTFPVDCVAMCGDCVEKEYPNRGNTCLENGSFLLNFTGCAVCSKRDFMLITNKSLKEEDGEEIVTYDHLCKNCHHVIARHEYTFSIMDEFQEYTMLCLLCGKAEDTISILPDDPRQMTLLF

SEQ ID NO: 22013 - protein, 140 aa, Homo sapiens
MRQPYLSSREVSSSRKRWRTFPVDCVAMCGDCVEKEYPNRGNTCLENGSFLLNFTGCAVCSKRDFMLITNKSLKEEDGEEIVTYDPDLCKNCHHVIARHEYTFSIMDEFQEYTMLCLLCGKAEDTISILPDDPRQMTLLF

SEQ ID NO: 22014 - protein, 105 aa, Homo sapiens
MRQPYLSSREVSSSRKRWRTFPVDCVAMCGDCVEKEYPNRGNTCLENGSFLLNFTGCAVCSKRDFMLITNKSLKEEDGEEIVTYDRVYHAVSVMRQSRRYYQYSP

SEQ ID NO: 22015 - protein, 869 aa, Homo sapiens
MGNREMEELIPLVNRLQDAFSALGQSCLLELPQIAVVGGQSAGKSSVLENFVGRDFLPRGSGIVTRRPLVLQLVTSKAEYAEFLHCKGKKFTDFDEVRLEIEAETDRVTGMNKGISSIPINLRVYSPHVLNLTLIDLPGITKVPVGDQPPDIEYQIREMIMQFITRENCLILAVTPANTDLANSDALKLAKEVDPQGLRTIGVITKLDLMDEGTDARDVLENKLLPLRRGYVGVVNRSQKDIDGKKDIKAAMLAERKFFLSHPAYRHIADRMGTPHLQKVLNQQLTNHIRDTLPNFRNKLQGQLLSIEHEVEAYKNFKPEDPTRKTKALLQMVQQFAVDFEKRIEGSGDQVDTLELSGGAKINRIFHERFPFEIVKMEFNEKELRREISYAIKNIHGIRTGLFTPDMAFEAIVKKQIVKLKGPSLKSVDLVIQELINTVKKCTKKLANFPRLCEETERIVANHIREREGKTKDQVLLLIDIQVSYINTNHEDFIGFANAQQRSSQVHKKTTVGNQGTNLPPSRQIVIRKGWLTISNIGIMKGGSKGYWFVLTAESLSWYKDDEEKEKKYMLPLDNLKVRDVEKSFMSSKHIFALFNTEQRNVYKDYRFLELACDSQEDVDSWKASLLRAGVYPDKSVAENDENGQAENFSMDPQLERQVETIRNLVDSYMSIINKCIRDLIPKTIMHLMINNVKDFINSELLAQLYSSEDQNTLMEESAEQAQRRDEMLRMYQALKEALGIIGDISTATVSTPAPPPVDDSWIQHSRRSPPPSPTTQRRPTLSAPLARPTSGRGPAPAIPSPGPHSGAPPVPFRPGPLPPFPSSSDSFGAPPQVPSRPTRAPPSVPSRRPPPSPTRPTIIRPLESSLLD

SEQ ID NO: 22016 - protein, 859 aa, Homo sapiens
MGNREMEELIPLVNRLQDAFSALGQSCLLELPQIAVVGGQSAGKSSVLENFVGRDFLPRGSGIVTRRPLVLQLVTSKAEYAEFLHCKGKKFTDFDEVRLEIEAETDRVTGMNKGISSIPINLRVYSPHVLNLTLIDLPGITKVPVGDQPPDIEYQIREMIMQFITRENCLILAVTPANTDLANSDALKLAKEVDPQGLRTIGVITKLDLMDEGTDARDVLENKLLPLRRGYVGVVNRSQKDIDGKKDIKAAMLAERKFFLSHPAYRHIADRMGTPHLQKVLNQQLTNHIRDTLPNFRNKLQGQLLSIEHEVEAYKNFKPEDPTRKTKALLQMVQQFAVDFEKRIEGSGDQVDTLELSGGAKINRIFHERFPFEIVKMEFNEKELRREISYAIKNIHGIRTGLFTPDMAFEAIVKKQIVKLKGPSLKSVDLVIQELINTVKKCTKKLANFPRLCEETERIVANHIREREGKTKDQVLLLIDIQVSYINTNHEDFIGFANAQQRSSQVHKKTTVGNQVIRKGWLTISNIGIMKGGSKGYWFVLTAESLSWYKDDEEKEKKYMLPLDNLKVRDVEKSFMSSKHIFALFNTEQRNVYKDYRFLELACDSQEDVDSWKASLLRAGVYPDKSVAENDENGQAENFSMDPQLERQVETIRNLVDSYMSIINKCIRDLIPKTIMHLMINNVKDFINSELLAQLYSSEDQNTLMEESAEQAQRRDEMLRMYQALKEALGIIGDISTATVSTPAPPPVDDSWIQHSRRSPPPSPTTQRRPTLSAPLARPTSGRGPAPAIPSPGPHSGAPPVPFRPGPLPPFPSSSDSFGAPPQVPSRPTRAPPSVPSRRPPPSPTRPTIIRPLESSLLD

SEQ ID NO: 22017 - protein, 863 aa, Homo sapiens
MGNREMEELIPLVNRLQDAFSALGQSCLLELPQIAVVGGQSAGKSSVLENFVGRDFLPRGSGIVTRRPLVLQLVTSKAEYAEFLHCKGKKFTDFDEVRLEIEAETDRVTGMNKGISSIPINLRVYSPHVLNLTLIDLPGITKVPVGDQPPDIEYQIREMIMQFITRENCLILAVTPANTDLANSDALKLAKEVDPQGLRTIGVITKLDLMDEGTDARDVLENKLLPLRRGYVGVVNRSQKDIDGKKDIKAAMLAERKFFLSHPAYRHIADRMGTPHLQKVLNQQLTNHIRDTLPNFRNKLQGQLLSIEHEVEAYKNFKPEDPTRKTKALLQMVQQFAVDFEKRIEGSGDQVDTLELSGGAKINRIFHERFPFEIVKMEFNEKELRREISYAIKNIHGIRTGLFTPDMAFEAIVKKQIVKLKGPSLKSVDLVIQELINTVKKCTKKLANFPRLCEETERIVANHIREREGKTKDQVLLLIDIQVSYINTNHEDFIGFANAQQRSSQVHKKTTVGNQVIRKGWLTISNIGIMKGGSKGYWFVLTAESLSWYKDDEEKEKKYMLPLDNLKVRDVEKSFMSSKHIFALFNTEQRNVYKDYRFLELACDSQEDVDSWKASLLRAGVYPDKSVGNNKAENDENGQAENFSMDPQLERQVETIRNLVDSYMSIINKCIRDLIPKTIMHLMINNVKDFINSELLAQLYSSEDQNTLMEESAEQAQRRDEMLRMYQALKEALGIIGDISTATVSTPAPPPVDDSWIQHSRRSPPPSPTTQRRPTLSAPLARPTSGRGPAPAIPSPGPHSGAPPVPFRPGPLPPFPSSSDSFGAPPQVPSRPTRAPPSVPSRRPPPSPTRPTIIRPLESSLLD

SEQ ID NO: 22018 - protein, 873 aa, Homo sapiens
MGNREMEELIPLVNRLQDAFSALGQSCLLELPQIAVVGGQSAGKSSVLENFVGRDFLPRGSGIVTRRPLVLQLVTSKAEYAEFLHCKGKKFTDFDEVRLEIEAETDRVTGMNKGISSIPINLRVYSPHVLNLTLIDLPGITKVPVGDQPPDIEYQIREMIMQFITRENCLILAVTPANTDLANSDALKLAKEVDPQGLRTIGVITKLDLMDEGTDARDVLENKLLPLRRGYVGVVNRSQKDIDGKKDIKAAMLAERKFFLSHPAYRHIADRMGTPHLQKVLNQQLTNHIRDTLPNFRNKLQGQLLSIEHEVEAYKNFKPEDPTRKTKALLQMVQQFAVDFEKRIEGSGDQVDTLELSGGAKINRIFHERFPFEIVKMEFNEKELRREISYAIKNIHGIRTGLFTPDMAFEAIVKKQIVKLKGPSLKSVDLVIQELINTVKKCTKKLANFPRLCEETERIVANHIREREGKTKDQVLLLIDIQVSYINTNHEDFIGFANAQQRSSQVHKKTTVGNQGTNLPPSRQIVIRKGWLTISNIGIMKGGSKGYWFVLTAESLSWYKDDEEKEKKYMLPLDNLKVRDVEKSFMSSKHIFALFNTEQRNVYKDYRFLELACDSQEDVDSWKASLLRAGVYPDKSVGNNKAENDENGQAENFSMDPQLERQVETIRNLVDSYMSIINKCIRDLIPKTIMHLMINNVKDFINSELLAQLYSSEDQNTLMEESAEQAQRRDEMLRMYQALKEALGIIGDISTATVSTPAPPPVDDSWIQHSRRSPPPSPTTQRRPTLSAPLARPTSGRGPAPAIPSPGPHSGAPPVPFRPGPLPPFPSSSDSFGAPPQVPSRPTRAPPSVPSRRPPPSPTRPTIIRPLESSLLD

SEQ ID NO: 22019 - protein, 555 aa, Homo sapiens
MGNREMEELIPLVNRLQDAFSALGQSCLLELPQIAVVGGQSAGKSSVLENFVGRDFLPRGSGIVTRRPLVLQLVTSKAEYAEFLHCKGKKFTDFDEVRLEIEAETDRVTGMNKGISSIPINLRVYSPHVLNLTLIDLPGITKVPVGDQPPDIEYQIREMIMQFITRENCLILAVTPANTDLANSDALKLAKEVDPQGLRTIGVITKLDLMDEGTDARDVLENKLLPLRRGYVGVVNRSQKDIDGKKDIKAAMLAERKFFLSHPAYRHIADRMGTPHLQKVLNQQLTNHIRDTLPNFRNKLQGQLLSIEHEVEAYKNFKPEDPTRKTKALLQMVQQFAVDFEKRIEGSGDQVDTLELSGGAKINRIFHERFPFEIVKMEFNEKELRREISYAIKNIHGIRTGLFTPDMAFEAIVKKQIVKLKGPSLKSVDLVIQELINTVKKCTKKLANFPRLCEETERIVANHIREREGKTKDQVLLLIDIQVSYINTNHEDFIGFANAQQRSSQVHKKTTVGNQVIRKGWLTISNIGIMKGGSKGYWFVLTAESLSWYKDDENI

SEQ ID NO: 22020 - protein, 566 aa, Homo sapiens
MALSVPGYSPGFRKPPEVVRLRRKRARSRGAAASPPRELTEPAARRAALVAGLPLRPFPAAGGRGGGSGGGPAAARRNPFARLDNRPRVAAEPPDGPAREQPEAPVPFLDSNQENDLLWEEKFPERTTVTELPQTSHVSFSEPDIPSSKSTELPVDWSIKTRLLFTSSQPFTWADHLKAQEEAQGLVQHCRATEVTLPKSIQDPKLSSELRCTFQQSLIYWLHPALSWLPLFPRIGADRKMAGKTSPWSNDATLQHVLMSDWSVSFTSLYNLLKTKLCPYFYVCTYQFTVLFRAAGLAGSDLITALISPTTRGLREAMRNEGIEFSLPLIKESGHKKETASGTSLGYGEEQAISDEDEEESFSWLEEMGVQDKIKKPDILSIKLRKEKHEVQMDHRPESVVLVKGINTFTLLNFLINSKSLVATSGPQAGLPPTLLSPVAFRGATMQMLKARSVNVKTQALSGYRDQFSLEITGPIMPHSLHSLTMLLKSSQSGSFSAVLYPHEPTAVFNICLQMDKVLDMEVVHKELTNCGLHPNTLEQLSQIPLLGKSSLRNVVLRDYIYNWRS

SEQ ID NO: 22021 - protein, 263 aa, Homo sapiens
MALSVPGYSPGFRKPPEVVRLRRKRARSRGAAASPPRELTEPAARRAALVAGLPLRPFPAAGGRGGGSGGGPAAARRNPFARLDNRPRVAAEPPDGPAREQPEAPVPFLDSNQENDLLWEEKFPERTTVTELPQTSHVSFSEPDIPSSKSTELPVDWSIKTRLLFTSSQPFTWADHLKAQEEAQGLVQHCRATEVTLPKSIQDPKLSSELRCTFQQSLIYWLHPALSWLPLFPRIGADRKMAGKTSPWSNDATLQHVLMSDWY

SEQ ID NO: 22022 - protein, 265 aa, Homo sapiens
MALSVPGYSPGFRKPPEVVRLRRKRARSRGAAASPPRELTEPAARRAALVAGLPLRPFPAAGGRGGGSGGGPAAARRNPFARLDNRPRVAAEPPDGPAREQPEAPVPFLDSNQENDLLWEEKFPERTTVTELPQTSHVSFSEPDIPSSKSTELPVDWSIKTRLLFTSSQPFTWADHLKAQEEAQGLVQHCRATEVTLPKSIQDPKLSSELRCTFQQSLIYWLHPALSWLPLFPRIGADRKMAGKTSPWSNDATLQHVLMSDWHGV

SEQ ID NO: 22023 - protein, 1019 aa, Homo sapiens
MLQGTCSVLLLWGILGAIQAQQQEVISPDTTERNNNCPEKTDCPIHVYFVLDTSESVTMQSPTDILLFHMKQFVPQFISQLQNEFYLDQVALSWRYGGLHFSDQVEVFSPPGSDRASFIKNLQGISSFRRGTFTDCALANMTEQIRQDRSKGTVHFAVVITDGHVTGSPCGGIKLQAERAREEGIRLFAVAPNQNLKEQGLRDIASTPHELYRNDYATMLPDSTEIDQDTINRIIKVMKHEAYGECYKVSCLEIPGPSGPKGYRGQKGAKGNMGEPGEPGQKGRQGDPGIEGPIGFPGPKGVPGFKGEKGEFGADGRKGAPGLAGKNGTDGQKGKLGRIGPPGCKGDPGNRGPDGYPGEAGSPGERGDQGGKGDPGRPGRRGPPGEIGAKGSKGYQGNSGAPGSPGVKGAKGGPGPRGPKGEPGRRGDPGTKGSPGSDGPKGEKGDPGPEGPRGLAGEVGNKGAKGDRGLPGPRGPQGALGEPGKQGSRGDPGDAGPRGDSGQPGPKGDPGRPGFSYPGPRGAPGEKGEPGPRGPEGGRGDFGLKGEPGRKGEKGEPADPGPPGEPGPRGPRGVPGPEGEPGPPGDPGLTECDVMTYVRETCGCCDCEKRCGALDVVFVIDSSESIGYTNFTLEKNFVINVVNRLGAIAKDPKSETGTRVGVVQYSHEGTFEAIQLDDERIDSLSSFKEAVKNLEWIAGGTWTPSALKFAYDRLIKESRRQKTRVFAVVITDGRHDPRDDDLNLRALCDRDVTVTAIGIGDMFHEKHESENLYSIACDKPQQVRNMTLFSDLVAEKFIDDMEDVLCPDPQIVCPDLPCQTELSVAQCTQRPVDIVFLLDGSERLGEQNFHKARRFVEQVARRLTLARRDDDPLNARVALLQFGGPGEQQVAFPLSHNLTAIHEALETTQYLNSFSHVGAGVVHAINAIVRSPRGGARRHAELSFVFLTDGVTGNDSLHESAHSMRKQNVVPTVLALGSDVDMDVLTTLSLGDRAAVFHEKDYDSLAQPGFFDRFIRWIC

SEQ ID NO: 22024 - protein, 918 aa, Homo sapiens
MLQGTCSVLLLWGILGAIQAQQQEVISPDTTERNNNCPEKTDCPIHVYFVLDTSESVTMQSPTDILLFHMKQFVPQFISQLQNEFYLDQVALSWRYGGLHFSDQVEVFSPPGSDRASFIKNLQGISSFRRGTFTDCALANMTEQIRQDRSKGTVHFAVVITDGHVTGSPCGGIKLQAERAREEGIRLFAVAPNQNLKEQGLRDIASTPHELYRNDYATMLPDSTEIDQDTINRIIKVMKHEAYGECYKVSCLEIPGPSGPKGYRGQKGAKGNMGEPGEPGQKGRQGDPGIEGPIGFPGPKGVPGFKGEKGEFGADGRKGAPGLAGKNGTDGQKGKLGRIGPPGCKGDPGNRGPDGYPGEAGSPGERGDQGGKGDPGRPGRRGPPGEIGAKGSKGYQGNSGAPGSPGVKGAKGGPGPRGPKGEPGRRGDPGTKGSPGSDGPKGEKGDPGPEGPRGLAGEVGNKGAKGDRGLPGPRGPQGALGEPGKQGSRGDPGDAGPRGDSGQPGPKGDPGRPGFSYPGPRGAPGEKGEPGPRGPEGGRGDFGLKGEPGRKGEKGEPADPGPPGEPGPRGPRGVPGPEGEPGPPGDPGLTECDVMTYVRETCGCCDCEKRCGALDVVFVIDSSESIGYTNFTLEKNFVINVVNRLGAIAKDPKSETGTRVGVVQYSHEGTFEAIQLDDERIDSLSSFKEAVKNLEWIAGGTWTPSALKFAYDRLIKESRRQKTRVFAVVITDGRHDPRDDDLNLRALCDRDVTVTAIGIGDMFHEKHESENLYSIACDKPQQVRNMTLFSDLVAEKFIDDMEDVLCPDPQIVCPDLPCQTDAPWPGGEPPVTFLRTEEGPDATFPRTIPLIQQLLNATELTQDPAAYSQLVAVLVYTAERAKFATGVERQDWMELFIDTFKLVHRDIVGDPETALALC

SEQ ID NO: 22025 - protein, 828 aa, Homo sapiens
MLQGTCSVLLLWGILGAIQAQQQEVISPDTTERNNNCPEKTDCPIHVYFVLDTSESVTMQSPTDILLFHMKQFVPQFISQLQNEFYLDQVALSWRYGGLHFSDQVEVFSPPGSDRASFIKNLQGISSFRRGTFTDCALANMTEQIRQDRSKGTVHFAVVITDGHVTGSPCGGIKLQAERAREEGIRLFAVAPNQNLKEQGLRDIASTPHELYRNDYATMLPDSTEIDQDTINRIIKVMKHEAYGECYKVSCLEIPGPSGPKGYRGQKGAKGNMGEPGEPGQKGRQGDPGIEGPIGFPGPKGVPGFKGEKGEFGADGRKGAPGLAGKNGTDGQKGKLGRIGPPGCKGDPGNRGPDGYPGEAGSPGERGDQGGKGDPGRPGRRGPPGEIGAKGSKGYQGNSGAPGSPGVKGAKGGPGPRGPKGEPGRRGDPGTKGSPGSDGPKGEKGDPGPEGPRGLAGEVGNKGAKGDRGLPGPRGPQGALGEPGKQGSRGDPGDAGPRGDSGQPGPKGDPGRPGFSYPGPRGAPGEKGEPGPRGPEGGRGDFGLKGEPGRKGEKGEPADPGPPGEPGPRGPRGVPGPEGEPGPPGDPGLTECDVMTYVRETCGCCDCEKRCGALDVVFVIDSSESIGYTNFTLEKNFVINVVNRLGAIAKDPKSETGTRVGVVQYSHEGTFEAIQLDDERIDSLSSFKEAVKNLEWIAGGTWTPSALKFAYDRLIKESRRQKTRVFAVVITDGRHDPRDDDLNLRALCDRDVTVTAIGIGDMFHEKHESENLYSIACDKPQQVRNMTLFSDLVAEKFIDDMEDVLCPDPQIVCPDLPCQTGLDGAVLC

SEQ ID NO: 22026 - protein, 921 aa, Homo sapiens
MKTCWKIPVFFFVCSFLEPWASAAVKRRPRFPVNSNSNGGNELCPKIRIGQDDLPGFDLISQFQVDKAASRRAIQRVVGSATLQVAYKLGNNVDFRIPTRNLYPSGLPEEYSFLTTFRMTGSTLKKNWNIWQIQDSSGKEQVGIKINGQTQSVVFSYKGLDGSLQTAAFSNLSSLFDSQWHKIMIGVERSSATLFVDCNRIESLPIKPRGPIDIDGFAVLGKLADNPQVSVPFELQWMLIHCDPLRPRRETCHELPARITPSQTTDERGPPGEQGPPGPPGPPGVPGIDGIDGDRGPKGPPGPPGPAGEPGKPGAPGKPGTPGADGLTGPDGSPGSIGSKGQKGEPGVPGSRGFPGRGIPGPPGPPGTAGLPGELGRVGPVGDPGRRGPPGPPGPPGPRGTIGFHDGDPLCPNACPPGRSGYPGLPGMRGHKGAKGEIGEPGRQGHKGEEGDQGELGEVGAQGPPGAQGLRGITGIVGDKGEKGARGLDGEPGPQGLPGAPGDQGQRGPPGEAGPKGDRGAEGARGIPGLPGPKGDTGLPGVDGRDGIPGMPGTKGEPGKPGPPGDAGLQGLPGVPGIPGAKGVAGEKGSTGAPGKPGQMGNSGKPGQQGPPGEVGPRGPQGLPGSRGELGPVGSPGLPGKLGSLGSPGLPGLPGPPGLPGMKGDRGVVGEPGPKGEQGASGEEGEAGERGELGDIGLPGPKGSAGNPGEPGLRGPEGSRGLPGVEGPRGPPGPRGVQGEQGATGLPGVQGPPGRAPTDQHIKQVCMRVIQEHFAEMAASLKRPDSGATGLPGRPGPPGPPGPPGENGFPGQMGIRGLPGIKGPPGALGLRGPKGDLGEKGERGPPGRGPNGLPGAIGLPGDPGPASYGRNGRDGERGPPGVAGIPGVPGPPGPPGLPGFCEPASCTMQAGQRAFNKGPDP

SEQ ID NO: 22027 - protein, 678 aa, Homo sapiens
MAWTARDRGALGLLLLGLCLCAAQRGPPGEQGPPGPPGPPGVPGIDGIDGDRGPKGPPGPPGPAGEPGKPGAPGKPGTPGADGLTGPDGSPGSIGSKGQKGEPGVPGSRGFPGRGIPGPPGPPGTAGLPGELGRVGPVGDPGRRGPPGPPGPPGPRGTIGFHDGDPLCPNACPPGRSGYPGLPGMRGHKGAKGEIGEPGRQGHKGEEGDQGELGEVGAQGPPGAQGLRGITGIVGDKGEKGARGLDGEPGPQGLPGAPGDQGQRGPPGEAGPKGDRGAEGARGIPGLPGPKGDTGLPGVDGRDGIPGMPGTKGEPGKPGPPGDAGLQGLPGVPGIPGAKGVAGEKGSTGAPGKPGQMGNSGKPGQQGPPGEVGPRGPQGLPGSRGELGPVGSPGLPGKLGSLGSPGLPGLPGPPGLPGMKGDRGVVGEPGPKGEQGASGEEGEAGERGELGDIGLPGPKGSAGNPGEPGLRGPEGSRGLPGVEGPRGPPGPRGVQGEQGATGLPGVQGPPGRAPTDQHIKQVCMRVIQEHFAEMAASLKRPDSGATGLPGRPGPPGPPGPPGENGFPGQMGIRGLPGIKGPPGALGLRGPKGDLGEKGERGPPGRGPNGLPGAIGLPGDPGPASYGRNGRDGERGPPGVAGIPGVPGPPGPPGLPGFCEPASCTMQAGQRAFNKGPDP

SEQ ID NO: 22028 - protein, 328 aa, Homo sapiens
MKTCWKIPVFFFVCSFLEPWASAAVKRRPRFPVNSNSNGGNELCPKIRIGQDDLPGFDLISQFQVDKAASRRAIQRVVGSATLQVAYKLGNNVDFRIPTRNLYPSGLPEEYSFLTTFRMTGSTLKKNWNIWQIQDSSGKEQVGIKINGQTQSVVFSYKGLDGSLQTAAFSNLSSLFDSQWHKIMIGVERSSATLFVDCNRIESLPIKPRGPIDIDGFAVLGKLADNPQVSVPFELQWMLIHCDPLRPRRETCHELPARITPSQTTDERGPPGEQGPPGPPGPPGVPGIDGIDGDRGPKGPPGPPGPAGEPGKPGAPGKPGTPGADTSP

SEQ ID NO: 22029 - protein, 843 aa, Homo sapiens
MKVISLFILVGFIGEFQSFSSASSPVNCQWDFYAPWSECNGCTKTQTRRRSVAVYGQYGGQPCVGNAFETQSCEPTRGCPTEEGCGERFRCFSGQCISKSLVCNGDSDCDEDSADEDRCEDSERRPSCDIDKPPPNIELTGNGYNELTGQFRNRVINTKSFGGQCRKVFSGDGKDFYRLSGNVLSYTFQVKINNDFNYEFYNSTWSYVKHTSTEHTSSSRKRSFFRSSSSSSRSYTSHTNEIHKGKSYQLLVVENTVEVAQFINNNPEFLQLAEPFWKELSHLPSLYDYSAYRRLIDQYGTHYLQSGSLGGEYRVLFYVDSEKLKQNDFNSVEEKKCKSSGWHFVVKFSSHGCKELENALKAASGTQNNVLRGEPFIRGGGAGFISGLSYLELDNPAGNKRRYSAWAESVTNLPQVIKQKLTPLYELVKEVPCASVKKLYLKWALEEYLDEFDPCHCRPCQNGGLATVEGTHCLCHCKPYTFGAACEQGVLVGNQAGGVDGGWSCWSSWSPCVQGKKTRSRECNNPPPSGGGRSCVGETTESTQCEDEELEHLRLLEPHCFPLSLVPTEFCPSPPALKDGFVQDEGTMFPVGKNVVYTCNEGYSLIGNPVARCGEDLRWLVGEMHCQKIACVLPVLMDGIQSHPQKPFYTVGEKVTVSCSGGMSLEGPSAFLCGSSLKWSPEMKNARCVQKENPLTQAVPKCQRWEKLQNSRCVCKMPYECGPSLDVCAQDERSKRILPLTVCKMHVLHCQGRNYTLTGRDSCTLPASAEKACGACPLWGKCDAESSKCVCREASECEEEGFSICVEVNGKEQTMSECEAGALRCRGQSISVTSIRPCAAETQ

SEQ ID NO: 22030 - protein, 146 aa, Homo sapiens
MMWQKYAGSRRSMPLGARILFHGVFYAGGFAIVYYLIQKFHSRALYYKLAVEQLQSHPEAQEALGPPLNIHYLKLIDRENFVDIVDAKLKIPVSGSKSEGLLYVHSSRGGPFQRWHLDEVFLELKDGQQIPVFKLSGENGDEVKKE

SEQ ID NO: 22031 - protein, 106 aa, Homo sapiens
MASSGAGDPLDSKRGEAPFAQRIDPTREKLTPEQLHSMRQAELAQWQKVLPRRRTRNIVTGLGIGALVLAIYGYTFYSISQERFLDELEDEAKAARARALARASGS

SEQ ID NO: 22032 - protein, 703 aa, Homo sapiens
MLGTLTPLSSLLLLLLVLVLGCGPRASSGGGAGGAAGYAPVKYIQPMQKGPVGPPFREGKGQYLEMPLPLLPMDLKGEPGPPGKPGPRGPPGPPGFPGKPGMGKPGLHGQPGPAGPPGFSRMGKAGPPGLPGKVGPPGQPGLRGEPGIRGDQGLRGPPGPPGLPGPSGITIPGKPGAQGVPGPPGFQGEPGPQGEPGPPGDRGLKGDNGVGQPGLPGAPGQGGAPGPPGLPGPAGLGKPGLDGLPGAPGDKGESGPPGVPGPRGEPGAVGPKGPPGVDGVGVPGAAGLPGPQGPSGAKGEPGTRGPPGLIGPTGYGMPGLPGPKGDRGPAGVPGLLGDRGEPGEDGEPGEQGPQGLGGPPGLPGSAGLPGRRGPPGPKGEAGPGGPPGVPGIRGDQGPSGLAGKPGVPGERGLPGAHGPPGPTGPKGEPGFTGRPGGPGVAGALGQKGDLGLPGQPGLRGPSGIPGLQGPAGPIGPQGLPGLKGEPGLPGPPGEGRAGEPGTAGPTGPPGVPGSPGITGPPGPPGPPGPPGAPGAFDETGIAGLHLPNGGVEGAVLGKGGKPQFGLGELSAHATPAFTAVLTSPFPASGMPVKFDRTLYNGHSGYNPATGIFTCPVGGVYYFAYHVHVKGTNVWVALYKNNVPATYTYDEYKKGYLDQASGGAVLQLRPNDQVWVQMPSDQANGLYSTEYIHSSFSGFLLCPT

SEQ ID NO: 22033 - protein, 90 aa, Homo sapiens
MKTLPVLVLSLTLLTVFSETSPILTEKQAKQLLRSRRQDRPSKPGFPDEPMREYMHHLLALEHRAEEQFLEHWLNPHCKPHCDRNRIHPV

SEQ ID NO: 22034 - protein, 243 aa, Homo sapiens
MDELALSFSLTCLLPENRASLSPSQPLSFQCLKAPATLTWEDEKQQRWGQPHGPVSSPLLGDHRCLVPFRDLNPSSEVNTANLLESPSSLLLTSCYICSYFSFYILGEKRCHSLKRLRYSVCCKVCPNFCACGKENVSGTGQVCTGVHVGAKEQEEPGGTQALRSCGIYCLEERTDKASHEECRERSTLGRPQCTGLTPSLAGESPCPRLLPGSPTVRHLIASSCPGLSDPLPLPPGTLPLGS

SEQ ID NO: 22035 - protein, 276 aa, Homo sapiens
MGGLWRPGWRCVPFCGWRWIHPGSPTRAAERVEPFLRPEWSGTGGAERGLRWLGTWKRCSLRARHPALQPPRRPKSSNPFTRAQEEERRRQNKTTLTYVAAVAVGMLGASYAAVPLYRLYCQTTGLGGSAVAGHASDKIENMVPVKDRIIKISFNADVHASLQWNFRPQQTEIYVVPGETALAFYRAKNPTDKPVIGISTYNIVPFEAGQYFNKIQCFCFEEQRLNPQEEVDMPVFFYIDPEFAEDPRMIKVDLITLSYTFFEAKEGHKLPVPGYN

SEQ ID NO: 22036 - protein, 231 aa, Homo sapiens
MGGLWRPGWRCVPFCGWRWIHPGSPTRAAERVEPFLRPEWSGTGGAERGLRWLGTWKRCSLRARHPALQPPRRPKSSNPFTRAQEEERRRQNKTTLTYVAAVAVGMLGASYAAVPLYRLYCQTTGLGGSAVAGHASDKIENMVPVKDRIIKISFNADVHASLQWNFRPQQTEIYVVPGETALAFYRAKNPTDKPVIGISTYNIVPFEAGQYFNKIQASKLHRVYVLESWHL

SEQ ID NO: 22037 - protein, 118 aa, Homo sapiens
MASARGAKQSSPRVGTTRYTETSTVRVETSSHRVETSSRRVETSQRRSEGPSLSPSGKRLPRILEASSRHVESSSQRTETTSRHVRASSLRVETSLHCAESPTPRAKPAARQNEKTAR

SEQ ID NO: 22038 - protein, 106 aa, Homo sapiens
MFAPAVMRAFRKNKTLGYGVPMLLLIVGGSFGLREFSQIRYDAVKSKMDPELEKKLKENKISLESEYEKIKDSKFDDWKNIRGPRPWEDPDLLQGRNPESLKTKTT

SEQ ID NO: 22039 - protein, 333 aa, Homo sapiens
MLCRLGGRWLRPLPALQLWARDLPLAPVPTSGAKRPTLPVWAVAPVSAVHANGWYEALAASSPVRVAEEVLLGVHAATGLPWWGSILLSTVALRGAVTLPLAAYQHYILAKVENLQPEIKTIARHLNQEVAVRANQLGWSKRDARLTYLKNMRRLISELYVRDNCHPFKATVLVWIQLPMWIFMSFALRNLSTGAAHSEGFSVQEQLATGGILWFPDLTAPDSTWILPISVGVINLLIVEICALQKIGMSRFQTYITYFVRAMSVLMIPIAATVPSSIVLYWLCSSFVGLSQNLLLRSPGFRQLCRIPSTKSDSETPYKDIFAAFNTKFISRK

SEQ ID NO: 22040 - protein, 127 aa, Homo sapiens
MLCRLGGRWLRPLPALQLWARDLPLAPVPTSGAKRPTLPVWAVAPVSAVHANGWYEALAASSPVRVAEEVLLGVHAATGLPWWGSILLSTVALRGAVTLPLAAYQHYILAKLGGKFAARNKNYCQAS

SEQ ID NO: 22041 - protein, 129 aa, Homo sapiens
MLCRLGGRWLRPLPALQLWARDLPLAPVPTSGAKRPTLPVWAVAPVSAVHANGWYEALAASSPVRVAEEVLLGVHAATGLPWWGSILLSTVALRGAVTLPLAAYQHYILAKAHLSKEYEEANFRAICAR

SEQ ID NO: 22042 - protein, 147 aa, Homo sapiens
MLCRLGGRWLRPLPALQLWARDLPLAPVPTSGAKRPTLPVWAVAPVSAVHANGWYEALAASSPVRVAEEVLLGVHAATGLPWWGSILLSTVALRGAVTLPLAAYQHYILAKVVSMGKKNRKQNRNGISSNIKAVSHFTGRMSTGQEQ

SEQ ID NO: 22043 - protein, 197 aa, Homo sapiens
MSSAPAPGPAPASLTLWDEEDFQGRRCRLLSDCANVCERGGLPRVRSVKVENGVWVAFEYPDFQGQQFILEKGDYPRWSAWSGSSSHNSNQLLSFRPVLCANHNDSRVTLFEGDNFQGCKFDLVDDYPSLPSMGWASKDVGSLKVSSGAWVAYQYPGYRGYQYVLERDRHSGEFCTYGELGTQAHTGQLQSIRRVQH

SEQ ID NO: 22044 - protein, 1661 aa, Homo sapiens
MEEAGGPMARAKARVVSATLTWRQRPPTQEEIKHGFHKVSLVSGAQMEAPQKEMFEFSRREEVEVNGFATQEEETVNCQGPRDTAGSKNFQSHGPIFSKKYIPPPKEKRPEGRLKEAVDQSDGSRQAPRTEPPCVGAMARTELLVPLPGPREPSPHPGVGLTSGSSRSLEEYRVTRTVRTTTVVGGHVDRRMSSSVTVRPVSSGEALPRGRQVSRMVPPVVVGSPPGSPSRSQAVKVLSNLVPAGHSPPASHLPRPTAGGPRSTGLGSTVGAALRQLPETGTAELKDSSALASTGIPASAHLPKNQDAPAACPDRDQGRAPDARACELWQVLGAPSSTELPLQTSQGQASVPSSPRLETHVPSPGLTHPAKQPVVPTHPGARLTPLVLPPKKKDGPVDPPAATVLPMVRSEHVTVPGQPPAPSTTRRKDVPSPGGLSAPSSPRNKFVQNSENVPVLPFTQREVVKGPGAPAASSPTRKEVVQGSSASAASSPTWKEVVKGPGAPAASSPTQKEVVQGSSAPAALFPTWKEVVKGPGAPDASFPTWKEVVKGPGAPAASSPTQKEVVQGSGAPAALSTTPKEVVKGPGAPAASSPTQKEVVKGPCAPAASSPTQKEVVQGSGAPAALSPKSTEVVQGPKGSSSIQKEAVQGIAGSLAPPLTKEETVQGPIAPATSLPKQDKGVQDSEGSPISSLTQKEVVQDPDALPAPSSSVDRVSPSPGGTPAPVPTGAEASTESQLVSDPTEGKTCTETSREEDEVALAADLEIFLDTLRSMEPPEILRTHRLPRAPRSSYLSMYATLPAIEEDQLGPWVLGPGPQEVPSLEEKEEEEEEEPENPYLSDDEKLQRRQEKAGPSPSRDLHPARPTQVSCSPLEMMKKHVAGTKGPHSELGLELQGGSRPTSRLGGSLLFGSLVPTAKEASTPEPLGTKLSALLPHGAPGLRKVPGQLPLLCSERSSPTEKLACSLPLEGWSPALKTQGKLNTRPGKVIFFSESGCQGSGREVWGDIVDASGWAPVASIRVVRGCWVLYEEPEFRGQKLVLPEGDMELRTPGTKWSPQGIGSLRRVVWDYSTPEISLFSEEGLKGEQVKLTEALKNSQGLEKPLQVASATVSAGLWLLYPKPLFEDTPYILEPGEYPTSEAWGTSDPSVGSLKPMRLGCPSVEKPGEPRAVVYEAPGFQGRSWEVSRDIYNLQQPEDSQSPHLASVGSLRVLGGCWVGYEKEGFRGHQYLLEEGEYPDWSHWGGYDELLTSLRVIRTDFGDPAVVLFEAMDFEGHGVEVSKALPDVELVQHGPSTQAIHVLSGVWVAYQEVGFSGEQYVLEKGVYRNCEDWGAGNSTLASLQPVLQVGEHDLHFVSKIQLFSRPDFLGDHFSFEDDQAALPASFRPQSCRVHGGSWILFDETNFEGDQHILSEGEFPTLTAMGCLASTVLGSLQKVSLHFSEPSIFLYGLECFEGKEIELSREVRSLQAEGFNNHVLSVRIKGGIWVLCEHSDFRGRQWLVGSCEITNWLTYSGTQRVGSLYPIKQRRVYFRLWNAALGGFLAVPDHVEDMKAGRVVVADPQAGGSCIWYYEDGLLKNQMAPTMSLQVIGPPSPGSKVVLWAESRLPRQTWSISESGHICSQMFEGQILDVKGGRGYDRDHVVLWEPDEDRASQIWTIHVL

SEQ ID NO: 22045 - protein, 190 aa, Homo sapiens
MAAGELEGGKPLSGLLNALAQDTFHGYPGITEELLRSQLYPEVPPEEFRPFLAKMRGILKSIASADMDFNQLEAFLTAQTKKQGGITSDQAAVISKFWKSHKTKIRESLMNQSRWNSGLRGLSWRVDGKSQSRHSAQIHTPVAIIELELGKYGQESEFLCLEFDEVKVNQILKTLSEVEESISTLISQPN

SEQ ID NO: 22046 - protein, 159 aa, Homo sapiens
MAAGELEGGKPLSGLLNALAQDTFHGYPGITEELLRSQLYPEVPPEEFRPFLAKMRGILKSIASADMDFNQLEAFLTAQTKKQGGITSDQAAVISKFWKSHKTKIRESLMNQSRWNSGLRGLSWRVDGKSQSRHSAQIHTPVAIIELELGKYGQVHCNQ

SEQ ID NO: 22047 - protein, 519 aa, Homo sapiens
MSVSVLSPSRRLGGVSGILQVTSLLILLLLLIKAAQLYLHRQWLLKALQQFPCPPSHWLFGHIQEFQHDQELQRIQERVKTFPSACPYWIWGGKVRVQLYDPDYMKVILGRSDPKSHGSYKFLAPRIGYGLLLLNGQTWFQHRRMLTPAFHNDILKPYVGLMADSVRVMLDKWEELLGQDSPLEVFQHVSLMTLDTIMKSAFSHQGSIQVDRNSQSYIQAISDLNSLVFCCMRNAFHENDTIYSLTSAGRWTHRACQLAHQHTDQVIQLRKAQLQKEGELEKIKRKRHLDFLDILLLAKMENGSILSDKDLRAEVDTFMFEGHDTTASGISWILYALATHPKHQERCREEIHGLLGDGASITWNHLDQMPYTTMCIKEALRLYPPVPGIGRELSTPVTFPDGRSLPKGIMVLLSIYGLHHNPKVWPNLEVFDPSRFAPGSAQHSHAFLPFSGGSRNCIGKQFAMNQLKVARALTLLRFELLPDPTRIPIPMARLVLKSKNGIHLRLRRLPNPCEDKDQL

SEQ ID NO: 22048 - protein, 355 aa, Homo sapiens
MSVSVLSPSRRLGGVSGILQVTSLLILLLLLIKAAQLYLHRQWLLKALQQFPCPPSHWLFGHIQEFQHDQELQRIQERVKTFPSACPYWIWGGKVRVQLYDPDYMKVILGRSDPKSHGSYKFLAPRIGYGLLLLNGQTWFQHRRMLTPAFHNDILKPYVGLMADSVRVMLDKWEELLGQDSPLEVFQHVSLMTLDTIMKSAFSHQGSIQVDRNSQSYIQAISDLNSLVFCCMRNAFHENDTIYSLTSAGRWTHRACQLAHQHTDQVIQLRKAQLQKEGELEKIKRKRHLDFLDILLLAKMENGSILSDKDLRAEVDTFMFEGHDTTASGISWILYALATHPKHQERCREEIHGLL

SEQ ID NO: 22049 - protein, 602 aa, Homo sapiens
MFPAQDALPRSGLNLKEEPLLPAGLGSVRSWMQGAGILDASTAAQSGVGLARAHFEKQPPSNLRKSNFFHFVLAMYDRQGQPVEVERTAFIDFVEKDREPGAEKTNNGIHYRLRLVYNNGLRTEQDLYVRLIDSMSKQAIIYEGQDKNPEMCRVLLTHEIMCSRCCDRKSCGNRNETPSDPVIIDRFFLKFFLKCNQNCLKNAGNPRDMRRFQVVVSTTVSVDGHVLAVSDNMFVHNNSKHGRRARRLDPSEAATPCIKAISPGEGWTTGGATVIVIGDNFFDGLQVVFGNVLVWSELITPHAIRVQTPPRHIPGVVEVTLSYKSKQFCKGCPGRFVYTALNEPTIDYGFQRLQKVIPRHPGDPERLPKEVLLKRAADLAEALYGVPGSNQELLLKRAADVAEALYSTPRAPGPLAPLAPSHPHPAVVGINAFSSPLAIAVGDATPGPEPGYARSCSSASPRGFAPSPGSQQSGYGGGLGAGLGGYGAPGVAGLGVPGSPSFLNGSTATSPFAIMPSSPPLAAASSMSLPAAAPTTSVFSFSPVNMISAVKQRSAFAPVLRPPSSPPQACPRAHGEGLPDQSFEDSDKFHSPARGLQGLAYS

SEQ ID NO: 22050 - protein, 642 aa, Homo sapiens
MARARGQAPGSGGRRRPRRGGAGTGPRGESAGLLLLLLQVLPPGATAGPGRRGTRGAGGGGVCWPGAAPAFPRDARLLLLLPPLPPLSPPPPSSAPAASASRMDALPRSGLNLKEEPLLPAGLGSVRSWMQGAGILDASTAAQSGVGLARAHFEKQPPSNLRKSNFFHFVLAMYDRQGQPVEVERTAFIDFVEKDREPGAEKTNNGIHYRLRLVYNNGLRTEQDLYVRLIDSMSKQAIIYEGQDKNPEMCRVLLTHEIMCSRCCDRKSCGNRNETPSDPVIIDRFFLKFFLKCNQNCLKNAGNPRDMRRFQVVVSTTVSVDGHVLAVSDNMFVHNNSKHGRRARRLDPSEAATPCIKAISPGEGWTTGGATVIVIGDNFFDGLQVVFGNVLVWSELITPHAIRVQTPPRHIPGVVEVTLSYKSKQFCKGCPGRFVYTALNEPTIDYGFQRLQKVIPRHPGDPERLPKEVLLKRAADLAEALYGVPGSNQELLLKRAADVAEALYSTPRAPGPLAPLAPSHPHPAVVGINAFSSPLAIAVGDATPGPEPGYARSCSSASPRGFAPSPGSQQSGYGGGLGAGLGGYGAPGVAGLGVPGSPSFLNGSTATSPFAKERLRPRAAPPKLPTPGLPQSPRRGASRPVF

SEQ ID NO: 22051 - protein, 1443 aa, Homo sapiens
MYAVYKQAHPPTGLEFSMYCNFFNNSERNLVVAGTSQLYVYRLNRDAEALTKNDRSTEGKAHREKLELAASFSFFGNVMSMASVQLAGAKRDALLLSFKDAKLSVVEYDPGTHDLKTLSLHYFEEPELRDGFVQNVHTPRVRVDPDGRCAAMLVYGTRLVVLPFRRESLAEEHEGLVGEGQRSSFLPSYIIDVRALDEKLLNIIDLQFLHGYYEPTLLILFEPNQTWPGRVAVRQDTCSIVAISLNITQKVHPVIWSLTSLPFDCTQALAVPKPIGGVVVFAVNSLLYLNQSVPPYGVALNSLTTGTTAFPLRTQEGVRITLDCAQATFISYDKMVISLKGGEIYVLTLITDGMRSVRAFHFDKAAASVLTTSMVTMEPGYLFLGSRLGNSLLLKYTEKLQEPPASAVREAADKEEPPSKKKRVDATAGWSAAGKSVPQDEVDEIEVYGSEAQSGTQLATYSFEVCDSILNIGPCANAAVGEPAFLSEEFQNSPEPDLEIVVCSGHGKNGALSVLQKSIRPQVVTTFELPGCYDMWTVIAPVRKEEEDNPKGEGTEQEPSTTPEADDDGRRHGFLILSREDSTMILQTGQEIMELDTSGFATQGPTVFAGNIGDNRYIVQVSPLGIRLLEGVNQLHFIPVDLGAPIVQCAVADPYVVIMSAEGHVTMFLLKSDSYGGRHHRLALHKPPLHHQSKVITLCLYRDLSGMFTTESRLGGARDELGGRSGPEAEGLGSETSPTVDDEEEMLYGDSGSLFSPSKEEARRSSQPPADRDPAPFRAEPTHWCLLVRENGTMEIYQLPDWRLVFLVKNFPVGQRVLVDSSFGQPTTQGEARREEATRQGELPLVKEVLLVALGSRQSRPYLLVHVDQELLIYEAFPHDSQLGQGNLKVRFKKVPHNINFREKKPKPSKKKAEGGGAEEGAGARGRVARFRYFEDIYGYSGVFICGPSPHWLLVTGRGALRLHPMAIDGPVDSFAPFHNVNCPRGFLYFNRQGELRISVLPAYLSYDAPWPVRKIPLRCTAHYVAYHVESKVYAVATSTNTPCARIPRMTGEEKEFETIERDERYIHPQQEAFSIQLISPVSWEAIPNARIELQEWEHVTCMKTVSLRSEETVSGLKGYVAAGTCLMQGEEVTCRGRILIMDVIEVVPEPGQPLTKNKFKVLYEKEQKGPVTALCHCNGHLVSAIGQKIFLWSLRASELTGMAFIDTQLYIHQMISVKNFILAADVMKSISLLRYQEESKTLSLVSRDAKPLEVYSVDFMVDNAQLGFLVSDRDRNLMVYMYLPEAKESFGGMRLLRRADFHVGAHVNTFWRTPCRGATEGLSKKSVVWENKHITWFATLDGGIGLLLPMQEKTYRRLLMLQNALTTMLPHHAGLNPRAFRMLHVDRRTLQNAVRNVLDGELLNRYLYLSTMERSELAKKIGTTPDIILDDLLETDRVTAHF

SEQ ID NO: 22052 - protein, 435 aa, Homo sapiens
MGDWSFLGRLLENAQEHSTVIGKVWLTVLFIFRILVLGAAAEDVWGDEQSDFTCNTQQPGCENVCYDRAFPISHIRFWALQIIFVSTPTLIYLGHVLHIVRMEEKKKEREEEEQLKRESPSPKEPPQDNPSSRDDRGRVRMAGALLRTYVFNIIFKTLFEVGFIAGQYFLYGFELKPLYRCDRWPCPNTVDCFISRPTEKTIFIIFMLAVACASLLLNMLEIYHLGWKKLKQGVTSRLGPDASEAPLGTADPPPLPPSSRPPAVAIGFPPYYAHTAAPLGQARAVGYPGAPPPAADFKLLALTEARGKGQSAKLYNGHHHLLMTEQNWANQAAERQPPALKAYPAASTPAAPSPVGSSSPPLAHEAEAGAAPLLLDGSGSSLEGSALAGTPEEEEQAVTTAAQMHQPPLPLGDPGRASKASRASSGRARPEDLAI

SEQ ID NO: 22053 - protein, 1698 aa, Homo sapiens
MVGELRYREFRVPLGPGLHAYPDELIRQRVGHDGHPEYQIRWLILRRGDEGDGGSGQVDCKAEHILLWMSKDEIYANCHKMLGEDGQVIGPSQESAGEVGALDKSVLEEMETDVKSLIQRALRQLEECVGTIPPAPLLHTVHVLSAYASIEPLTGVFKDPRVLDLLMHMLSSPDYQIRWSAGRMIQALSSHDAGTRTQILLSLSQQEAIEKHLDFDSRCALLALFAQATLSEHPMSFEGIQLPQVPGRVLFSLVKRYLHVTSLLDQLNDSAAEPGAQNTSAPEELSGERGQLELEFSMAMGTLISELVQAMRWDQASDRPRSSARSPGSIFQPQLADVSPGLPAAQAQPSFRRSRRFRPRSEFASGNTYALYVRDTLQPGMRVRMLDDYEEISAGDEGEFRQSNNGVPPVQVFWESTGRTYWVHWHMLEILGFEEDIEDMVEADEYQGAVASRVLGRALPAWRWRPMTELYAVPYVLPEDEDTEECEHLTLAEWWELLFFIKKLDGPDHQEVLQILQENLDGEILDDEILAELAVPIELAQDLLLTLPQRLNDSALRDLINCHVYKKYGPEALAGNQAYPSLLEAQEDVLLLDAQAQAKDSEDAAKVEAKEPPSQSPNTPLQRLVEGYGPAGKILLDLEQALSSEGTQENKVKPLLLQLQRQPQPFLALMQSLDTPETNRTLHLTVLRILKQLVDFPEALLLPWHEAVDACMACLRSPNTDREVLQELIFFLHRLTSVSRDYAVVLNQLGARDAISKALEKHLGKLELAQELRDMVFKCEKHAHLYRKLITNILGGCIQMVLGQIEDHRRTHQPINIPFFDVFLRYLCQGSSVEVKEDKCWEKVEVSSNPHRASKLTDHNPKTYWESNGSAGSHYITLHMRRGILIRQLTLLVASEDSSYMPARVVVCGGDSTSSLHTELNSVNVMPSASRVILLENLTRFWPIIQIRIKRCQQGGIDTRIRGLEILGPKPTFWPVFREQLCRHTRLFYMVRAQAWSQDMAEDRRSLLHLSSRLNGALRQEQNFADRFLPDDEAAQALGKTCWEALVSPVVQNITSPDEDGISPLGWLLDQYLECQEAVFNPQSRGPAFFSRVRRLTHLLVHVEPCEAPPPVVATPRPKGRNRSHDWSSLATRGLPSSIMRNLTRCWRAVVEKQVNNFLTSSWRDDDFVPRYCEHFNILQNSSSELFGPRAAFLLALQNGCAGALLKLPFLKAAHVSEQFARHIDQQIQGSRIGGAQEMERLAQLQQCLQAVLIFSGLEIATTFEHYYQHYMADRLLGVVSSWLEGAVLEQIGPCFPNRLPQQMLQSLSTSKELQRQFHVYQLQQLDQELLKLEDTEKKIQVGLGASGKEHKSEKEEEAGAAAVVDVAEGEEEEEENEDLYYEGAMPEVSVLVLSRHSWPVASICHTLNPRTCLPSYLRGTLNRYSNFYNKSQSHPALERGSQRRLQWTWLGWAELQFGNQTLHVSTVQMWLLLYLNDLKAVSVESLLAFSGLSADMLNQAIGPLTSSRGPLDLHEQKDIPGGVLKIRDGSKEPRSRWDIVRLIPPQTYLQAEGEDGQNLEKRRNLLNCLIVRILKAHGDEGLHIDQLVCLVLEAWQKGPCPPRGLVSSLGKGSACSSTDVLSCILHLLGKGTLRRHDDRPQVLSYAVPVTVMEPHTESLNPGSSGPNPPLTFHTLQIRSRGVPYASCTATQSFSTFR

SEQ ID NO: 22054 - protein, 1782 aa, Homo sapiens
MSRGFWLAEPLAGTGPHPAPVAADSRGCSSVPRRHAPSRLSVSTPSRGPGARMVGELRYREFRVPLGPGLHAYPDELIRQRVGHDGHPEYQIRWLILRRGDEGDGGSGQVDCKAEHILLWMSKDEIYANCHKMLGEDGQVIGPSQESAGEVGALDKSVLEEMETDVKSLIQRALRQLEECVGTIPPAPLLHTVHVLSAYASIEPLTGVFKDPRVLDLLMHMLSSPDYQIRWSAGRMIQALSSHDAGEGQCGEEGKAGEGLGRLRDSQDTVAGASDLIRTRTQILLSLSQQEAIEKHLDFDSRCALLALFAQATLSEHPMSFEGIQLPQVPGRVLFSLVKRYLHVTSLLDQLNDSAAEPGAQNTSAPEELSGERGQLELEFSMAMGTLISELVQAMRWDQASDRPRSSARSPGSIFQPQLADVSPGLPAAQAQPSFRRSRRFRPRSEFASGNTYALYVRDTLQPGMRVRMLDDYEEISAGDEGEFRQSNNGVPPVQVFWESTGRTYWVHWHMLEILGFEEDIEDMVEADEYQGAVASRVLGRALPAWRWRPMTELYAVPYVLPEDEDTEECEHLTLAEWWELLFFIKKLDGPDHQEVLQILQENLDGEILDDEILAELAVPIELAQDLLLTLPQRLNDSALRDLINCHVYKKYGPEALAGNQAYPSLLEAQEDVLLLDAQAQAKDSEDAAKVEAKEPPSQSPNTPLQRLVEGYGPAGKILLDLEQALSSEGTQENKVKPLLLQLQRQPQPFLALMQSLDTPETNRTLHLTVLRILKQLVDFPEALLLPWHEAVDACMACLRSPNTDREVLQELIFFLHRLTSVSRDYAVVLNQLGARDAISKALEKHLGKLELAQELRDMVFKCEKHAHLYRKLITNILGGCIQMVLGQIEDHRRTHQPINIPFFDVFLRYLCQGSSVEVKEDKCWEKVEVSSNPHRASKLTDHNPKTYWESNGSAGSHYITLHMRRGILIRQLTLLVASEDSSYMPARVVVCGGDSTSSLHTELNSVNVMPSASRVILLENLTRFWPIIQIRIKRCQQGGIDTRIRGLEILGPKPTFWPVFREQLCRHTRLFYMVRAQAWSQDMAEDRRSLLHLSSRLNGALRQEQNFADRFLPDDEAAQALGKTCWEALVSPVVQNITSPDEDGISPLGWLLDQYLECQEAVFNPQSRGPAFFSRVRRLTHLLVHVEPCEAPPPVVATPRPKGRNRSHDWSSLATRGLPSSIMRNLTRCWRAVVEKQVNNFLTSSWRDDDFVPRYCEHFNILQNSSSELFGPRAAFLLALQNGCAGALLKLPFLKAAHVSEQFARHIDQQIQGSRIGGAQEMERLAQLQQCLQAVLIFSGLEIATTFEHYYQHYMADRLLGVVSSWLEGAVLEQIGPCFPNRLPQQMLQSLSTSKELQRQFHVYQLQQLDQELLKLEDTEKKIQVGLGASGKEHKSEKEEEAGAAAVVDVAEGEEEEEENEDLYYEGAMPEVSVLVLSRHSWPVASICHTLNPRTCLPSYLRGTLNRYSNFYNKSQSHPALERGSQRRLQWTWLGWAELQFGNQTLHVSTVQMWLLLYLNDLKAVSVESLLAFSGLSADMLNQAIGPLTSSRGPLDLHEQKDIPGGVLKIRDGSKEPRSRWDIVRLIPPQTYLQAEGEDGQNLEKRRNLLNCLIVRILKAHGDEGLHIDQLVCLVLEAWQKGPCPPRGLVSSLGKGSACSSTDVLSCILHLLGKGTLRRHDDRPQVLSYAVPVTVMEPHTESLNPGSSGPNPPLTFHTLQIRSRGVPYASCTATQSFSTFR

SEQ ID NO: 22055 - protein, 368 aa, Homo sapiens
MVLEVSDHQVLNDAEVAALLENFSSSYDYGENESDSCCTSPPCPQDFSLNFDRAFLPALYSLLFLLGLLGNGAVAAVLLSRRTALSSTDTFLLHLAVADTLLVLTLPLWAVDAAVQWVFGSGLCKVAGALFNINFYAGALLLACISFDRYLNIVHATQLYRRGPPARVTLTCLAVWGLCLLFALPDFIFLSAHHDERLNATHCQYNFPQVGRTALRVLQLVAGFLLPLLVMAYCYAHILAVLLVSRGQRRLRAMRLVVVVVVAFALCWTPYHLVVLVDILMDLGALARNCGRESRVDVAKSVTSGLGYMHCCLNPLLYAFVGVKFRERMWMLLLRLGCPNQRGLQRQPSSSRRDSSWSETSEASYSGL

SEQ ID NO: 22056 - protein, 415 aa, Homo sapiens
MELRKYGPGRLAGTVIGGAAQSKSQTKSDSITKEFLPGLYTAPSSPFPPSQVSDHQVLNDAEVAALLENFSSSYDYGENESDSCCTSPPCPQDFSLNFDRAFLPALYSLLFLLGLLGNGAVAAVLLSRRTALSSTDTFLLHLAVADTLLVLTLPLWAVDAAVQWVFGSGLCKVAGALFNINFYAGALLLACISFDRYLNIVHATQLYRRGPPARVTLTCLAVWGLCLLFALPDFIFLSAHHDERLNATHCQYNFPQVGRTALRVLQLVAGFLLPLLVMAYCYAHILAVLLVSRGQRRLRAMRLVVVVVVAFALCWTPYHLVVLVDILMDLGALARNCGRESRVDVAKSVTSGLGYMHCCLNPLLYAFVGVKFRERMWMLLLRLGCPNQRGLQRQPSSSRRDSSWSETSEASYSGL

SEQ ID NO: 22057 - protein, 267 aa, Homo sapiens
MVLEVSDHQVLNDAEVAALLENFSSSYDYGENESDSCCTSPPCPQDFSLNFDRAFLPALYSLLFLLGLLGNGAVAAVLLSRRTALSSTDTFLLHLAVADTLLVLTLPLWAVDAAVQWVFGSGLCKVAGALFNINFYAGALLLACISFDRYLNIVHATQLYRRGPPARVTLTCLAVWGLCLLFALPDFIFLSAHHDERLNATHCQYNFPQGSSSGSGCGCCSCAWAAPTREGSRGSHRLPAGIHPGLRPQRPPTRACEAGIRAPLSPI

SEQ ID NO: 22058 - protein, 204 aa, Homo sapiens
MGWDCRRTTVENPSPIRNCVNQEWPEGSSPGLTEGNTGLVRDLRPAHQDRSGTREDPAGQETTAITNPSPSLAADLAGDALPGCLGAAAHQGPLLDRSSESTLGPQALELEHCHERGCCRGCASFSPFPAPRCPSERLGAHSSRWAIRGRSKINPPPWAPACLPGGFPACLPAPKSSTDSASSCFKGGREFSDPLDIPGAGAMG

SEQ ID NO: 22059 - protein, 82 aa, Homo sapiens
MGWDCRRTTVENPSPIRNCVNQEWPEGSSPGLTEGNTGLVRDLRPAHQDRSGTREDPAGQETTAITNPSPSCTSGASAGQKL

SEQ ID NO: 22060 - protein, 218 aa, Homo sapiens
MARNRLIAASTSRTRAILPPQPLEKEWPEGSSPGLTEGNTGLVRDLRPAHQDRSGTREDPAGQETTAITNPSPSLAADLAGDALPGCLGAAAHQGPLLDRSSESTLGPQALELEHCHERGCCRGCASFSPFPAPRCPSERLGAHSSRWAIRGRSKINPPPWAPACLPGFPVSWRTRMRAFHLSLPGGAQLLTYLVKVLKRRTWRRNVDNNPGCLCVPS

SEQ ID NO: 22061 - protein, 324 aa, Homo sapiens
MKNVDSDDLVTGTLPKLKSSKEWLEPKPLCFMEVLAKEDTEAAIQSILYKENSVIKELDKYLQHHAFLNARRKEMLYKRWVDCVADPLQKKIIEKVCSHKKIKKRRQGELDGFLKHVNKKGNAFIEHYDPKEYDPFYMSKKDPNFLKVTIPPFHDPLKKAQYDKDNEKRTLLQCETGKIYSIKEFKEVEKVQLHSRFPQISNSRHFITPNEWLKLPTRYIESEFCRRRRLKVKVNFNDCSFDLKPLARAPYLLESQEEEKTVIYKNKGSSFLEREPLCYQEGNNPSAKEAISEGYFSSLSLSQEREEDQDGSPSPRLGLLKLEL

SEQ ID NO: 22062 - protein, 127 aa, Homo sapiens
MLPSSTPGPGHATETCPAPPGPERSPAARAPAAASSLGPVSTAGRAPRGLDMSAQEPPQGRRFPIEAGDSRGLAAAPESQDSPEAVATEHNPVRPLRRCPGCHCLTLLHVPIDVYLAMGGSPRARAT

SEQ ID NO: 22063 - protein, 543 aa, Homo sapiens
MDAFTGSGLKRKFDDVDVGSSVSNSDDEISSSDSADSCDSLNPPTTASFTPTSILKRQKQLRRKNVRFDQVTVYYFARRQGFTSVPSQGGSSLGMAQRHNSVRSYTLCEFAQEQEVNHREILREHLKEEKLHAKKMKLTKNGTVESVEADGLTLDDVSDEDIDVENVEVDDYFFLQPLPTKRRRALLRASGVHRIDAEEKQELRAIRLSREECGCDCRLYCDPEACACSQAGIKCQVDRMSFPCGCSRDGCGNMAGRIEFNPIRVRTHYLHTIMKLELESKRQVSRPAAPDEEPSPTASCSLTGAQGSETQDFQEFIAENETAVMHLQSAEELERLKAEEDSSGSSASLDSSIESLGVCILEEPLAVPEELCPGLTAPILIQAQLPPGSSVLCFTENSDHPTASTVNSPSYLNSGPLVYYQVEQRPVLGVKGEPGTEEGSASFPKEKDLNVFSLPVTSLVACSSTDPAALCKSEVGKTPTLEALLPEDCNPEEPENEDFHPSWSPSSLPFRTDNEEGCGMVKTSQQNEDRPPEDSSLELPLAV

SEQ ID NO: 22064 - protein, 396 aa, Homo sapiens
MSWSFLTRLLEEIHNHSTFVGKIWLTVLIVFRIVLTAVGGESIYYDEQSKFVCNTEQPGCENVCYDAFAPLSHVRFWVFQIILVATPSVMYLGYAIHKIAKMEHGEADKKAARSKPYAMRWKQHRALEETEEDNEEDPMMYPEMELESDKENKEQSQPKPKHDGRRRIREDGLMKIYVLQLLARTVFEVGFLIGQYFLYGFQVHPFYVCSRLPCPHKIDCFISRPTEKTIFLLIMYGVTGLCLLLNIWEMLHLGFGTIRDSLNSKRRELEDPGAYNYPFTWNTPSAPPGYNIAVKPDQIQYTELSNAKIAYKQNKANTAQEQQYGSHEENLPADLEALQREIRMAQERLDLAVQAYSHQNNPHGPREKKAKVGSKAGSNKSTASSKSGDGKTSVWI

SEQ ID NO: 22065 - protein, 189 aa, Homo sapiens
MTDKTEKVAVDPETVFKRPRECDSPSYQKRQRMALLARKQGAGDSLIAGSAMSKAKKLMTGHAIPPSQLDSQIDDFTGFSKDRMMQKPGSNAPVGGNVTSSFSGDDLECRETASSPKSQREINADIKRKLVKELRCVGQKYEKIFEMLEGVQGPTAVRKRFFESIIKEAARCMRRDFVKHLKKKLKRMI

SEQ ID NO: 22066 - protein, 163 aa, Homo sapiens
MSLGLLKFQAVGEEDEEDEEGESLDSVKALTAKLQLQTRRPSYLEWTAQVQSQAWRRAQAKPGPGGPGDICGFDSMDSALEWLRRELREMQAQDRQLAGQLLRLRAQLHRLKMDQACHLHQELLDEAELELELEPGAGLALAPLLRHLGLTRMNISARRFTLC

SEQ ID NO: 22067 - protein, 189 aa, Homo sapiens
MVPPKPALWALLLALLGTAPSRAYSPACSVPDVLRHYRAIIFEDLQAAVKWGGAGAEKTRPGSRHFHFIQKNLTRPGSSGRRGRPRASCGAQKEHSILLSISSLGRTLRGAVAGGRRGALERAAWTVAVRTEAVMRRHCRTLRQRSRRPKMRPARRRGGRRQLLLRALDAVATCWEKLFALRAPASRDS

SEQ ID NO: 22068 - protein, 483 aa, Homo sapiens
MSTARTENPVIMGLSSQNGQLRGPVKPTGGPGGGGTQTQQQMNQLKNTNTINNGTQQQAQSMTTTIKPGDDWKKTLKLPPKDLRIKTSDVTSTKGNEFEDYCLKRELLMGIFEMGWEKPSPIQEESIPIALSGRDILARAKNGTGKSGAYLIPLLERLDLKKDNIQAMVIVPTRELALQVSQICIQVSKHMGGAKVMATTGGTNLRDDIMRLDDTVHVVIATPGRILDLIKKGVAKVDHVQMIVLDEADKLLSQDFVQIMEDIILTLPKNRQILLYSATFPLSVQKFMNSHLQKPYEINLMEELTLKGVTQYYAYVTERQKVHCLNTLFSRLQINQSIIFCNSSQRVELLAKKISQLGYSCFYIHAKMRQEHRNRVFHDFRNGLCRNLVCTDLFTRGIDIQAVNVVINFDFPKLAETYLHRIGRSGRFGHLGLAINLITYDDRFNLKSIEEQLGTEIKPIPSNIDKSLYVAEYHSEPVEDEKP

SEQ ID NO: 22069 - protein, 740 aa, Homo sapiens
MSFGRDMELEHFDERDKAQRYSRGSRVNGLPSPTHSAHCSFYRTRTLQTLSSEKKAKKVRFYRNGDRYFKGIVYAISPDRFRSFEALLADLTRTLSDNVNLPQGVRTIYTIDGLKKISSLDQLVEGESYVCGSIEPFKKLEYTKNVNPNWSVNVKTTSASRAVSSLATAKGSPSEVRENKDFIRPKLVTIIRSGVKPRKAVRILLNKKTAHSFEQVLTDITDAIKLDSGVVKRLYTLDGKQVMCLQDFFGDDDIFIACGPEKFRYQDDFLLDESECRVVKSTSYTKIASSSRRSTTKSPGPSRRSKSPASTSSVNGTPGSQLSTPRSGKSPSPSPTSPGSLRKQRSSQHGGSSTSLASTKVCSSMDENDGPGEEVSEEGFQIPATITERYKVGRTIGDGNFAVVKECVERSTAREYALKIIKKSKCRGKEHMIQNEVSILRRVKHPNIVLLIEEMDVPTELYLVMELVKGGDLFDAITSTNKYTERDASGMLYNLASAIKYLHSLNIVHRDIKPENLLVYEHQDGSKSLKLGDFGLATIVDGPLYTVCGTPTYVAPEIIAETGYGLKVDIWAAGVITYILLCGFPPFRGSGDDQEVLFDQILMGQVDFPSPYWDNVSDSAKELITMMLLVDVDQRFSAVQVLEHPWVNDDGLPENEHQLSVAGKIKKHFNTGPKPNSTAAGVSVIATTALDKERQVFRRRRNQDVRSRYKAQPAPPELNSESEDYSPSSSETVRSPNSPF

SEQ ID NO: 22070 - protein, 729 aa, Homo sapiens
MSFGRDMELEHFDERDKAQRYSRGSRVNGLPSPTHSAHCSFYRTRTLQTLSSEKKAKKVRFYRNGDRYFKGIVYAISPDRFRSFEALLADLTRTLSDNVNLPQGVRTIYTIDGLKKISSLDQLVEGESYVCGSIEPFKKLEYTKNVNPNWSVNVKTTSASRAVSSLATAKGSPSEVRENKDFIRPKLVTIIRSGVKPRKAVRILLNKKTAHSFEQVLTDITDAIKLDSGVVKRLYTLDGKQVMCLQDFFGDDDIFIACGPEKFRYQDDFLLDESECRVVKSTSYTKIASSSRRSTTKSPGPSRRSKSPASTSSVNGTPGSQLSTPRSGKSPSPSPTSPGSLRKQRSSQHGGSSTSLASTKVCSSMDENDGPGEEVSEEGFQIPATITERYKVGRTIGDGNFAVVKECVERSTAREYALKIIKKSKCRGKEHMIQNEVSILRRVKHPNIVLLIEEMDVPTELYLVMELVKGGDLFDAITSTNKYTERDASGMLYNLASAIKYLHSLNIVHRDIKPENLLVYEHQDGSKSLKLGDFGLATIVDGPLYTVCGTPTYVAPEIIAETGYGLKVDIWAAGVITYILLCGFPPFRGSGDDQEVLFDQILMGQVDFPSPYWDNVSDSAKELITMMLLVDVDQRFSAVQVLEHPWVNDDGLPENEHQLSVAGKIKKHFNTGPKPNSTAAGVSVIALDHGFTIKRSGSLDYYQQPGMYWIRPPLLIRRGRFSDEDATRM

SEQ ID NO: 22071 - protein, 422 aa, Homo sapiens
MLELIEVNGTPGSQLSTPRSGKSPSPSPTSPGSLRKQRSSQHGGSSTSLASTKVCSSMDENDGPGEEVSEEGFQIPATITERYKVGRTIGDGNFAVVKECVERSTAREYALKIIKKSKCRGKEHMIQNEVSILRRVKHPNIVLLIEEMDVPTELYLVMELVKGGDLFDAITSTNKYTERDASGMLYNLASAIKYLHSLNIVHRDIKPENLLVYEHQDGSKSLKLGDFGLATIVDGPLYTVCGTPTYVAPEIIAETGYGLKVDIWAAGVITYILLCGFPPFRGSGDDQEVLFDQILMGQVDFPSPYWDNVSDSAKELITMMLLVDVDQRFSAVQVLEHPWVNDDGLPENEHQLSVAGKIKKHFNTGPKPNSTAAGVSVIALDHGFTIKRSGSLDYYQQPGMYWIRPPLLIRRGRFSDEDATRM

SEQ ID NO: 22072 - protein, 433 aa, Homo sapiens
MLELIEVNGTPGSQLSTPRSGKSPSPSPTSPGSLRKQRSSQHGGSSTSLASTKVCSSMDENDGPGEEVSEEGFQIPATITERYKVGRTIGDGNFAVVKECVERSTAREYALKIIKKSKCRGKEHMIQNEVSILRRVKHPNIVLLIEEMDVPTELYLVMELVKGGDLFDAITSTNKYTERDASGMLYNLASAIKYLHSLNIVHRDIKPENLLVYEHQDGSKSLKLGDFGLATIVDGPLYTVCGTPTYVAPEIIAETGYGLKVDIWAAGVITYILLCGFPPFRGSGDDQEVLFDQILMGQVDFPSPYWDNVSDSAKELITMMLLVDVDQRFSAVQVLEHPWVNDDGLPENEHQLSVAGKIKKHFNTGPKPNSTAAGVSVIATTALDKERQVFRRRRNQDVRSRYKAQPAPPELNSESEDYSPSSSETVRSPNSPF

SEQ ID NO: 22073 - protein, 907 aa, Homo sapiens
MANETQKVGAIHFPFPFTPYSIQEDFMAELYRVLEAGKIGIFESPTGTGKSLSLICGALSWLRDFEQKKREEEARLLETGTGPLHDEKDESLCLSSSCEGAAGTPRPAGEPAWVTQFVQKKEERDLVDRLKVEQARRKQREERLQQLQHRVQLKYAAKRLRQEEEETENLLRLSREMLETGPEAERLEQLESGEEELVLAEYESDEEKKVASGHRVDEDEDDLEEEHITKIYHCSRTHSQLAQFVHEVKKSPFGKDVRLVSLGSRQNLCVNEDVRSLGSVQLINDRCVDMQRSRHEKKKGAEEEKPKRRRQEKQAACPFYNHEQMGLLRDEALAEVKDMEQLLALGKEARACPYYRSRLAIPAAKLVVLPYQMLLHAATRQAAGIRLQDQVVIIDEAHNLIDTITGMHSVEVSGSQLCQAHSQLLQYMERYGKRLKAKNLMYLKQILYLLEKFVAVLGGNIKQNPNTQSLSQTGTELKTINDFLFQSQIDNINLFKVQRYCEKSMISRKLFGFTERYGAVFSSREQPKLAGFQQFLQSLQPRTTEALAAPADESQASVPQPASPLMHIEGFLAALTTANQDGRVILSRQGSLSESTLKFLLLNPAVHFAQVVKECRAVVIAGGTMQPVSDFRQQLLACAGVEAERVVEFSCGHVIPPDNIPLVICSGISNQPLEFTFQKRDLPQMMDEVGRILCNLCGVVSGGVVCFFSSYEYLRQVHAHWEKGGLLGRLAARKKIFQEPKSAHQVEQVLLAYSRCIQACGQERGQVTEALLLSVVGGKMSEGINFSDNLGRCVVMVGMPFPNIRSAELQEKMAYLDQTLPRAPGQAPPGKALVENLCMKAVNQSIGRAIRHQKDFASIVLLDQRYARPPVLAKLPAWIRASVEVKATFGPAIAAVQKFHREKSASS

SEQ ID NO: 22074 - protein, 70 aa, Homo sapiens
MPGAMKIFVFILAALILLAQIFQARTAIHRALISKRMEGHCEAECLTFEVKIGGCRAELAPFCCKNRKKH

SEQ ID NO: 22075 - protein, 2413 aa, Homo sapiens
MGISTVILEMCLLWGQVLSTGGWIPRTTDYASLIPSEVPLDPTVAEGSPFPSESTLESTVAEGSPISLESTLESTVAEGSLIPSESTLESTVAEGSDSGLALRLVNGDGRCQGRVEILYRGSWGTVCDDSWDTNDANVVCRQLGCGWAMSAPGNAWFGQGSGPIALDDVRCSGHESYLWSCPHNGWLSHNCGHGEDAGVICSAAQPQSTLRPESWPVRISPPVPTEGSESSLALRLVNGGDRCRGRVEVLYRGSWGTVCDDYWDTNDANVVCRQLGCGWAMSAPGNAQFGQGSGPIVLDDVRCSGHESYLWSCPHNGWLTHNCGHSEDAGVICSAPQSRPTPSPDTWPTSHASTAGPESSLALRLVNGGDRCQGRVEVLYRGSWGTVCDDSWDTSDANVVCRQLGCGWATSAPGNARFGQGSGPIVLDDVRCSGYESYLWSCPHNGWLSHNCQHSEDAGVICSAAHSWSTPSPDTLPTITLPASTVGSESSLALRLVNGGDRCQGRVEVLYRGSWGTVCDDSWDTNDANVVCRQLGCGWAMLAPGNARFGQGSGPIVLDDVRCSGNESYLWSCPHNGWLSHNCGHSEDAGVICSGPESSLALRLVNGGDRCQGRVEVLYRGSWGTVCDDSWDTNDANVVCRQLGCGWATSAPGNARFGQGSGPIVLDDVRCSGHESYLWSCPNNGWLSHNCGHHEDAGVICSAAQSRSTPRPDTLSTITLPPSTVGSESSLTLRLVNGSDRCQGRVEVLYRGSWGTVCDDSWDTNDANVVCRQLGCGWATSAPGNARFGQGSGPIVLDDVRCSGHESYLWSCPHNGWLSHNCGHHEDAGVICSVSQSRPTPSPDTWPTSHASTAGPESSLALRLVNGGDRCQGRVEVLYRGSWGTVCDDSWDTSDANVVCRQLGCGWATSAPGNARFGQGSGPIVLDDVRCSGYESYLWSCPHNGWLSHNCQHSEDAGVICSAAHSWSTPSPDTLPTITLPASTVGSESSLALRLVNGGDRCQGRVEVLYQGSWGTVCDDSWDTNDANVVCRQLGCGWAMSAPGNARFGQGSGPIVLDDVRCSGHESYLWSCPHNGWLSHNCGHSEDAGVICSASQSRPTPSPDTWPTSHASTAGSESSLALRLVNGGDRCQGRVEVLYRGSWGTVCDDYWDTNDANVVCRQLGCGWAMSAPGNARFGQGSGPIVLDDVRCSGHESYLWSCPHNGWLSHNCGHHEDAGVICSASQSQPTPSPDTWPTSHASTAGSESSLALRLVNGGDRCQGRVEVLYRGSWGTVCDDYWDTNDANVVCRQLGCGWATSAPGNARFGQGSGPIVLDDVRCSGHESYLWSCPHNGWLSHNCGHHEDAGVICSASQSQPTPSPDTWPTSHASTAGSESSLALRLVNGGDRCQGRVEVLYRGSWGTVCDDYWDTNDANVVCRQLGCGWATSAPGNARFGQGSGPIVLDDVRCSGHESYLWSCPHNGWLSHNCGHHEDAGVICSASQSQPTPSPDTWPTSRASTAGSESTLALRLVNGGDRCRGRVEVLYQGSWGTVCDDYWDTNDANVVCRQLGCGWAMSAPGNAQFGQGSGPIVLDDVRCSGHESYLWSCPHNGWLSHNCGHHEDAGVICSAAQSQSTPRPDTWLTTNLPALTVGSESSLALRLVNGGDRCRGRVEVLYRGSWGTVCDDSWDTNDANVVCRQLGCGWAMSAPGNARFGQGSGPIVLDDVRCSGNESYLWSCPHKGWLTHNCGHHEDAGVICSATQINSTTTDWWHPTTTTTARPSSNCGGFLFYASGTFSSPSYPAYYPNNAKCVWEIEVNSGYRINLGFSNLKLEAHHNCSFDYVEIFDGSLNSSLLLGKICNDTRQIFTSSYNRMTIHFRSDISFQNTGFLAWYNSFPSDATLRLVNLNSSYGLCAGRVEIYHGGTWGTVCDDSWTIQEAEVVCRQLGCGRAVSALGNAYFGSGSGPITLDDVECSGTESTLWQCRNRGWFSHNCNHREDAGVICSGNHLSTPAPFLNITRPNTDYSCGGFLSQPSGDFSSPFYPGNYPNNAKCVWDIEVQNNYRVTVIFRDVQLEGGCNYDYIEVFDGPYRSSPLIARVCDGARGSFTSSSNFMSIRFISDHSITRRGFRAEYYSSPSNDSTNLLCLPNHMQASVSRSYLQSLGFSASDLVISTWNGYYECRPQITPNLVIFTIPYSGCGTFKQADNDTIDYSNFLTAAVSGGIIKRRTDLRIHVSCRMLQNTWVDTMYIANDTIHVANNTIQVEEVQYGNFDVNISFYTSSSFLYPVTSRPYYVDLNQDLYVQAEILHSDAVLTLFVDTCVASPYSNDFTSLTYDLIRSGCVRDDTYGPYSSPSLRIARFRFRAFHFLNRFPSVYLRCKMVVCRAYDPSSRCYRGCVLRSKRDVGSYQEKVDVVLGPIQLQTPPRREEEPR

SEQ ID NO: 22076 - protein, 1785 aa, Homo sapiens
MGISTVILEMCLLWGQVLSTGGWIPRTTDYASLIPSEVPLDPTVAEGSPFPSESTLESTVAEGSPISLESTLESTVAEGSLIPSESTLESTVAEGSDSGLALRLVNGDGRCQGRVEILYRGSWGTVCDDSWDTNDANVVCRQLGCGWAMSAPGNAWFGQGSGPIALDDVRCSGHESYLWSCPHNGWLSHNCGHGEDAGVICSAAQPQSTLRPESWPVRISPPVPTEGSESSLALRLVNGGDRCRGRVEVLYRGSWGTVCDDYWDTNDANVVCRQLGCGWAMSAPGNAQFGQGSGPIVLDDVRCSGHESYLWSCPHNGWLTHNCGHSEDAGVICSAPQSRPTPSPDTWPTSHASTAGPESSLALRLVNGGDRCQGRVEVLYRGSWGTVCDDSWDTSDANVVCRQLGCGWATSAPGNARFGQGSGPIVLDDVRCSGYESYLWSCPHNGWLSHNCQHSEDAGVICSAAHSWSTPSPDTLPTITLPASTVGSESSLALRLVNGGDRCQGRVEVLYQGSWGTVCDDSWDTNDANVVCRQLGCGWAMSAPGNARFGQGSGPIVLDDVRCSGHESYLWSCPHNGWLSHNCGHSEDAGVICSASQSRPTPSPDTWPTSHASTAGSESSLALRLVNGGDRCQGRVEVLYRGSWGTVCDDYWDTNDANVVCRQLGCGWAMSAPGNARFGQGSGPIVLDDVRCSGHESYLWSCPHNGWLSHNCGHHEDAGVICSASQSQPTPSPDTWPTSHASTAGSESSLALRLVNGGDRCQGRVEVLYRGSWGTVCDDYWDTNDANVVCRQLGCGWATSAPGNARFGQGSGPIVLDDVRCSGHESYLWSCPHNGWLSHNCGHHEDAGVICSASQSQPTPSPDTWPTSRASTAGSESTLALRLVNGGDRCRGRVEVLYQGSWGTVCDDYWDTNDANVVCRQLGCGWAMSAPGNAQFGQGSGPIVLDDVRCSGHESYLWSCPHNGWLSHNCGHHEDAGVICSAAQSQSTPRPDTWLTTNLPALTVGSESSLALRLVNGGDRCRGRVEVLYRGSWGTVCDDSWDTNDANVVCRQLGCGWAMSAPGNARFGQGSGPIVLDDVRCSGNESYLWSCPHKGWLTHNCGHHEDAGVICSATQINSTTTDWWHPTTTTTARPSSNCGGFLFYASGTFSSPSYPAYYPNNAKCVWEIEVNSGYRINLGFSNLKLEAHHNCSFDYVEIFDGSLNSSLLLGKICNDTRQIFTSSYNRMTIHFRSDISFQNTGFLAWYNSFPSDATLRLVNLNSSYGLCAGRVEIYHGGTWGTVCDDSWTIQEAEVVCRQLGCGRAVSALGNAYFGSGSGPITLDDVECSGTESTLWQCRNRGWFSHNCNHREDAGVICSGNHLSTPAPFLNITRPNTDYSCGGFLSQPSGDFSSPFYPGNYPNNAKCVWDIEVQNNYRVTVIFRDVQLEGGCNYDYIEVFDGPYRSSPLIARVCDGARGSFTSSSNFMSIRFISDHSITRRGFRAEYYSSPSNDSTNLLCLPNHMQASVSRSYLQSLGFSASDLVISTWNGYYECRPQITPNLVIFTIPYSGCGTFKQADNDTIDYSNFLTAAVSGGIIKRRTDLRIHVSCRMLQNTWVDTMYIANDTIHVANNTIQVEEVQYGNFDVNISFYTSSSFLYPVTSRPYYVDLNQDLYVQAEILHSDAVLTLFVDTCVASPYSNDFTSLTYDLIRSGCVRDDTYGPYSSPSLRIARFRFRAFHFLNRFPSVYLRCKMVVCRAYDPSSRCYRGCVLRSKRDVGSYQEKVDVVLGPIQLQTPPRREEEPR

SEQ ID NO: 22077 - protein, 2403 aa, Homo sapiens
MGISTVILEMCLLWGQVLSTGGWIPRTTDYASLIPSEVPLDPTVAEGSPFPSESTLESTVAEGSPISLESTLESTVAEGSLIPSESTLESTVAEGSDSGLALRLVNGDGRCQGRVEILYRGSWGTVCDDSWDTNDANVVCRQLGCGWAMSAPGNAWFGQGSGPIALDDVRCSGHESYLWSCPHNGWLSHNCGHGEDAGVICSAAQPQSTLRPESWPVRISPPVPTEGSESSLALRLVNGGDRCRGRVEVLYRGSWGTVCDDYWDTNDANVVCRQLGCGWAMSAPGNAQFGQGSGPIVLDDVRCSGHESYLWSCPHNGWLTHNCGHSEDAGVICSAPQSRPTPSPDTWPTSHASTAGPESSLALRLVNGGDRCQGRVEVLYRGSWGTVCDDSWDTSDANVVCRQLGCGWATSAPGNARFGQGSGPIVLDDVRCSGYESYLWSCPHNGWLSHNCQHSEDAGVICSDTLPTITLPASTVGSESSLALRLVNGGDRCQGRVEVLYRGSWGTVCDDSWDTNDANVVCRQLGCGWAMLAPGNARFGQGSGPIVLDDVRCSGNESYLWSCPHNGWLSHNCGHSEDAGVICSGPESSLALRLVNGGDRCQGRVEVLYRGSWGTVCDDSWDTNDANVVCRQLGCGWATSAPGNARFGQGSGPIVLDDVRCSGHESYLWSCPNNGWLSHNCGHHEDAGVICSAAQSRSTPRPDTLSTITLPPSTVGSESSLTLRLVNGSDRCQGRVEVLYRGSWGTVCDDSWDTNDANVVCRQLGCGWATSAPGNARFGQGSGPIVLDDVRCSGHESYLWSCPHNGWLSHNCGHHEDAGVICSVSQSRPTPSPDTWPTSHASTAGPESSLALRLVNGGDRCQGRVEVLYRGSWGTVCDDSWDTSDANVVCRQLGCGWATSAPGNARFGQGSGPIVLDDVRCSGYESYLWSCPHNGWLSHNCQHSEDAGVICSAAHSWSTPSPDTLPTITLPASTVGSESSLALRLVNGGDRCQGRVEVLYQGSWGTVCDDSWDTNDANVVCRQLGCGWAMSAPGNARFGQGSGPIVLDDVRCSGHESYLWSCPHNGWLSHNCGHSEDAGVICSASQSRPTPSPDTWPTSHASTAGSESSLALRLVNGGDRCQGRVEVLYRGSWGTVCDDYWDTNDANVVCRQLGCGWAMSAPGNARFGQGSGPIVLDDVRCSGHESYLWSCPHNGWLSHNCGHHEDAGVICSASQSQPTPSPDTWPTSHASTAGSESSLALRLVNGGDRCQGRVEVLYRGSWGTVCDDYWDTNDANVVCRQLGCGWATSAPGNARFGQGSGPIVLDDVRCSGHESYLWSCPHNGWLSHNCGHHEDAGVICSASQSQPTPSPDTWPTSHASTAGSESSLALRLVNGGDRCQGRVEVLYRGSWGTVCDDYWDTNDANVVCRQLGCGWATSAPGNARFGQGSGPIVLDDVRCSGHESYLWSCPHNGWLSHNCGHHEDAGVICSASQSQPTPSPDTWPTSRASTAGSESTLALRLVNGGDRCRGRVEVLYQGSWGTVCDDYWDTNDANVVCRQLGCGWAMSAPGNAQFGQGSGPIVLDDVRCSGHESYLWSCPHNGWLSHNCGHHEDAGVICSAAQSQSTPRPDTWLTTNLPALTVGSESSLALRLVNGGDRCRGRVEVLYRGSWGTVCDDSWDTNDANVVCRQLGCGWAMSAPGNARFGQGSGPIVLDDVRCSGNESYLWSCPHKGWLTHNCGHHEDAGVICSATQINSTTTDWWHPTTTTTARPSSNCGGFLFYASGTFSSPSYPAYYPNNAKCVWEIEVNSGYRINLGFSNLKLEAHHNCSFDYVEIFDGSLNSSLLLGKICNDTRQIFTSSYNRMTIHFRSDISFQNTGFLAWYNSFPSDATLRLVNLNSSYGLCAGRVEIYHGGTWGTVCDDSWTIQEAEVVCRQLGCGRAVSALGNAYFGSGSGPITLDDVECSGTESTLWQCRNRGWFSHNCNHREDAGVICSGNHLSTPAPFLNITRPNTDYSCGGFLSQPSGDFSSPFYPGNYPNNAKCVWDIEVQNNYRVTVIFRDVQLEGGCNYDYIEVFDGPYRSSPLIARVCDGARGSFTSSSNFMSIRFISDHSITRRGFRAEYYSSPSNDSTNLLCLPNHMQASVSRSYLQSLGFSASDLVISTWNGYYECRPQITPNLVIFTIPYSGCGTFKQADNDTIDYSNFLTAAVSGGIIKRRTDLRIHVSCRMLQNTWVDTMYIANDTIHVANNTIQVEEVQYGNFDVNISFYTSSSFLYPVTSRPYYVDLNQDLYVQAEILHSDAVLTLFVDTCVASPYSNDFTSLTYDLIRSGCVRDDTYGPYSSPSLRIARFRFRAFHFLNRFPSVYLRCKMVVCRAYDPSSRCYRGCVLRSKRDVGSYQEKVDVVLGPIQLQTPPRREEEPR

SEQ ID NO: 22078 - protein, 1527 aa, Homo sapiens
MGISTVILEMCLLWGQVLSTGGWIPRTTDYASLIPSEVPLDPTVAEGSPFPSESTLESTVAEGSPISLESTLESTVAEGSLIPSESTLESTVAEGSDSGLALRLVNGDGRCQGRVEILYRGSWGTVCDDSWDTNDANVVCRQLGCGWAMSAPGNAWFGQGSGPIALDDVRCSGHESYLWSCPHNGWLSHNCGHGEDAGVICSAAQPQSTLRPESWPVRISPPVPTEGSESSLALRLVNGGDRCRGRVEVLYRGSWGTVCDDYWDTNDANVVCRQLGCGWAMSAPGNAQFGQGSGPIVLDDVRCSGHESYLWSCPHNGWLTHNCGHSEDAGVICSAPQSRPTPSPDTWPTSHASTAGPESSLALRLVNGGDRCQGRVEVLYRGSWGTVCDDSWDTSDANVVCRQLGCGWATSAPGNARFGQGSGPIVLDDVRCSGYESYLWSCPHNGWLSHNCQHSEDAGVICSAAHSWSTPSPDTLPTITLPASTVGSESSLALRLVNGGDRCQGRVEVLYRGSWGTVCDDSWDTNDANVVCRQLGCGWATSAPGNARFGQGSGPIVLDDVRCSGHESYLWSCPHNGWLSHNCGHHEDAGVICSASQSQPTPSPDTWPTSRASTAGSESTLALRLVNGGDRCRGRVEVLYQGSWGTVCDDYWDTNDANVVCRQLGCGWAMSAPGNAQFGQGSGPIVLDDVRCSGHESYLWSCPHNGWLSHNCGHHEDAGVICSAAQSQSTPRPDTWLTTNLPALTVGSESSLALRLVNGGDRCRGRVEVLYRGSWGTVCDDSWDTNDANVVCRQLGCGWAMSAPGNARFGQGSGPIVLDDVRCSGNESYLWSCPHKGWLTHNCGHHEDAGVICSATQINSTTTDWWHPTTTTTARPSSNCGGFLFYASGTFSSPSYPAYYPNNAKCVWEIEVNSGYRINLGFSNLKLEAHHNCSFDYVEIFDGSLNSSLLLGKICNDTRQIFTSSYNRMTIHFRSDISFQNTGFLAWYNSFPSDATLRLVNLNSSYGLCAGRVEIYHGGTWGTVCDDSWTIQEAEVVCRQLGCGRAVSALGNAYFGSGSGPITLDDVECSGTESTLWQCRNRGWFSHNCNHREDAGVICSGNHLSTPAPFLNITRPNTDYSCGGFLSQPSGDFSSPFYPGNYPNNAKCVWDIEVQNNYRVTVIFRDVQLEGGCNYDYIEVFDGPYRSSPLIARVCDGARGSFTSSSNFMSIRFISDHSITRRGFRAEYYSSPSNDSTNLLCLPNHMQASVSRSYLQSLGFSASDLVISTWNGYYECRPQITPNLVIFTIPYSGCGTFKQADNDTIDYSNFLTAAVSGGIIKRRTDLRIHVSCRMLQNTWVDTMYIANDTIHVANNTIQVEEVQYGNFDVNISFYTSSSFLYPVTSRPYYVDLNQDLYVQAEILHSDAVLTLFVDTCVASPYSNDFTSLTYDLIRSGCVRDDTYGPYSSPSLRIARFRFRAFHFLNRFPSVYLRCKMVVCRAYDPSSRCYRGCVLRSKRDVGSYQEKVDVVLGPIQLQTPPRREEEPR

SEQ ID NO: 22079 - protein, 2542 aa, Homo sapiens
MGISTVILEMCLLWGQVLSTGGWIPRTTDYASLIPSEVPLDPTVAEGSPFPSESTLESTVAEGSPISLESTLESTVAEGSLIPSESTLESTVAEGSDSGLALRLVNGDGRCQGRVEILYRGSWGTVCDDSWDTNDANVVCRQLGCGWAMSAPGNAWFGQGSGPIALDDVRCSGHESYLWSCPHNGWLSHNCGHGEDAGVICSAAQPQSTLRPESWPVRISPPVPTEGSESSLALRLVNGGDRCRGRVEVLYRGSWGTVCDDYWDTNDANVVCRQLGCGWAMSAPGNAQFGQGSGPIVLDDVRCSGHESYLWSCPHNGWLTHNCGHSEDAGVICSAPQSRPTPSPDTWPTSHASTAGPESSLALRLVNGGDRCQGRVEVLYRGSWGTVCDDSWDTSDANVVCRQLGCGWATSAPGNARFGQGSGPIVLDDVRCSGYESYLWSCPHNGWLSHNCQHSEDAGVICSAAHSWSTPSPDTLPTITLPASTVGSESSLALRLVNGGDRCQGRVEVLYRGSWGTVCDDSWDTNDANVVCRQLGCGWAMLAPGNARFGQGSGPIVLDDVRCSGNESYLWSCPHNGWLSHNCGHSEDAGVICSGPESSLALRLVNGGDRCQGRVEVLYRGSWGTVCDDSWDTNDANVVCRQLGCGWATSAPGNARFGQGSGPIVLDDVRCSGHESYLWSCPNNGWLSHNCGHHEDAGVICSAAQSRSTPRPDTLSTITLPPSTVGSESSLTLRLVNGSDRCQGRVEVLYRGSWGTVCDDSWDTNDANVVCRQLGCGWATSAPGNARFGQGSGPIVLDDVRCSGHESYLWSCPHNGWLSHNCGHHEDAGVICSVSQSRPTPSPDTWPTSHASTAGPESSLALRLVNGGDRCQGRVEVLYRGSWGTVCDDSWDTSDANVVCRQLGCGWATSAPGNARFGQGSGPIVLDDVRCSGYESYLWSCPHNGWLSHNCQHSEDAGVICSAAHSWSTPSPDTLPTITLPASTVGSESSLALRLVNGGDRCQGRVEVLYQGSWGTVCDDSWDTNDANVVCRQLGCGWAMSAPGNARFGQGSGPIVLDDVRCSGHESYLWSCPHNGWLSHNCGHSEDAGVICSASQSRPTPSPDTWPTSHASTAGSESSLALRLVNGGDRCQGRVEVLYRGSWGTVCDDYWDTNDANVVCRQLGCGWAMSAPGNARFGQGSGPIVLDDVRCSGHESYLWSCPHNGWLSHNCGHHEDAGVICSASQSQPTPSPDTWPTSHASTAGSESSLALRLVNGGDRCQGRVEVLYRGSWGTVCDDYWDTNDANVVCRQLGCGWATSAPGNARFGQGSGPIVLDDVRCSGHESYLWSCPHNGWLSHNCGHHEDAGVICSASQSQPTPSPDTWPTSHASTAGSESSLALRLVNGGDRCQGRVEVLYRGSWGTVCDDYWDTNDANVVCRQLGCGWATSAPGNARFGQGSGPIVLDDVRCSGHESYLWSCPHNGWLSHNCGHHEDAGVICSASQSQPTPSPDTWPTSHASTAGSESSLALRLVNGGDRCQGRVEVLYRGSWGTVCDDYWDTNDANVVCRQLGCGWATSAPGNARFGQGSGPIVLDDVRCSGHESYLWSCPHNGWLSHNCGHHEDAGVICSASQSQPTPSPDTWPTSRASTAGSESTLALRLVNGGDRCRGRVEVLYQGSWGTVCDDYWDTNDANVVCRQLGCGWAMSAPGNAQFGQGSGPIVLDDVRCSGHESYLWSCPHNGWLSHNCGHHEDAGVICSAAQSQSTPRPDTWLTTNLPALTVGSESSLALRLVNGGDRCRGRVEVLYRGSWGTVCDDSWDTNDANVVCRQLGCGWAMSAPGNARFGQGSGPIVLDDVRCSGNESYLWSCPHKGWLTHNCGHHEDAGVICSATQINSTTTDWWHPTTTTTARPSSNCGGFLFYASGTFSSPSYPAYYPNNAKCVWEIEVNSGYRINLGFSNLKLEAHHNCSFDYVEIFDGSLNSSLLLGKICNDTRQIFTSSYNRMTIHFRSDISFQNTGFLAWYNSFPSDATLRLVNLNSSYGLCAGRVEIYHGGTWGTVCDDSWTIQEAEVVCRQLGCGRAVSALGNAYFGSGSGPITLDDVECSGTESTLWQCRNRGWFSHNCNHREDAGVICSGNHLSTPAPFLNITRPNTDYSCGGFLSQPSGDFSSPFYPGNYPNNAKCVWDIEVQNNYRVTVIFRDVQLEGGCNYDYIEVFDGPYRSSPLIARVCDGARGSFTSSSNFMSIRFISDHSITRRGFRAEYYSSPSNDSTNLLCLPNHMQASVSRSYLQSLGFSASDLVISTWNGYYECRPQITPNLVIFTIPYSGCGTFKQADNDTIDYSNFLTAAVSGGIIKRRTDLRIHVSCRMLQNTWVDTMYIANDTIHVANNTIQVEEVQYGNFDVNISFYTSSSFLYPVTSRPYYVDLNQDLYVQAEILHSDAVLTLFVDTCVASPYSNDFTSLTYDLIRSGCVRDDTYGPYSSPSLRIARFRFRAFHFLNRFPSVYLRCKMVVCRAYDPSSRCYRGCVLRSKRDVGSYQEKVDVVLGPIQLQTPPRREEEPR

SEQ ID NO: 22080 - protein, 2532 aa, Homo sapiens
MGISTVILEMCLLWGQVLSTGGWIPRTTDYASLIPSEVPLDPTVAEGSPFPSESTLESTVAEGSPISLESTLESTVAEGSLIPSESTLESTVAEGSDSGLALRLVNGDGRCQGRVEILYRGSWGTVCDDSWDTNDANVVCRQLGCGWAMSAPGNAWFGQGSGPIALDDVRCSGHESYLWSCPHNGWLSHNCGHGEDAGVICSAAQPQSTLRPESWPVRISPPVPTEGSESSLALRLVNGGDRCRGRVEVLYRGSWGTVCDDYWDTNDANVVCRQLGCGWAMSAPGNAQFGQGSGPIVLDDVRCSGHESYLWSCPHNGWLTHNCGHSEDAGVICSAPQSRPTPSPDTWPTSHASTAGPESSLALRLVNGGDRCQGRVEVLYRGSWGTVCDDSWDTSDANVVCRQLGCGWATSAPGNARFGQGSGPIVLDDVRCSGYESYLWSCPHNGWLSHNCQHSEDAGVICSDTLPTITLPASTVGSESSLALRLVNGGDRCQGRVEVLYRGSWGTVCDDSWDTNDANVVCRQLGCGWAMLAPGNARFGQGSGPIVLDDVRCSGNESYLWSCPHNGWLSHNCGHSEDAGVICSGPESSLALRLVNGGDRCQGRVEVLYRGSWGTVCDDSWDTNDANVVCRQLGCGWATSAPGNARFGQGSGPIVLDDVRCSGHESYLWSCPNNGWLSHNCGHHEDAGVICSAAQSRSTPRPDTLSTITLPPSTVGSESSLTLRLVNGSDRCQGRVEVLYRGSWGTVCDDSWDTNDANVVCRQLGCGWATSAPGNARFGQGSGPIVLDDVRCSGHESYLWSCPHNGWLSHNCGHHEDAGVICSVSQSRPTPSPDTWPTSHASTAGPESSLALRLVNGGDRCQGRVEVLYRGSWGTVCDDSWDTSDANVVCRQLGCGWATSAPGNARFGQGSGPIVLDDVRCSGYESYLWSCPHNGWLSHNCQHSEDAGVICSAAHSWSTPSPDTLPTITLPASTVGSESSLALRLVNGGDRCQGRVEVLYQGSWGTVCDDSWDTNDANVVCRQLGCGWAMSAPGNARFGQGSGPIVLDDVRCSGHESYLWSCPHNGWLSHNCGHSEDAGVICSASQSRPTPSPDTWPTSHASTAGSESSLALRLVNGGDRCQGRVEVLYRGSWGTVCDDYWDTNDANVVCRQLGCGWAMSAPGNARFGQGSGPIVLDDVRCSGHESYLWSCPHNGWLSHNCGHHEDAGVICSASQSQPTPSPDTWPTSHASTAGSESSLALRLVNGGDRCQGRVEVLYRGSWGTVCDDYWDTNDANVVCRQLGCGWATSAPGNARFGQGSGPIVLDDVRCSGHESYLWSCPHNGWLSHNCGHHEDAGVICSASQSQPTPSPDTWPTSHASTAGSESSLALRLVNGGDRCQGRVEVLYRGSWGTVCDDYWDTNDANVVCRQLGCGWATSAPGNARFGQGSGPIVLDDVRCSGHESYLWSCPHNGWLSHNCGHHEDAGVICSASQSQPTPSPDTWPTSHASTAGSESSLALRLVNGGDRCQGRVEVLYRGSWGTVCDDYWDTNDANVVCRQLGCGWATSAPGNARFGQGSGPIVLDDVRCSGHESYLWSCPHNGWLSHNCGHHEDAGVICSASQSQPTPSPDTWPTSRASTAGSESTLALRLVNGGDRCRGRVEVLYQGSWGTVCDDYWDTNDANVVCRQLGCGWAMSAPGNAQFGQGSGPIVLDDVRCSGHESYLWSCPHNGWLSHNCGHHEDAGVICSAAQSQSTPRPDTWLTTNLPALTVGSESSLALRLVNGGDRCRGRVEVLYRGSWGTVCDDSWDTNDANVVCRQLGCGWAMSAPGNARFGQGSGPIVLDDVRCSGNESYLWSCPHKGWLTHNCGHHEDAGVICSATQINSTTTDWWHPTTTTTARPSSNCGGFLFYASGTFSSPSYPAYYPNNAKCVWEIEVNSGYRINLGFSNLKLEAHHNCSFDYVEIFDGSLNSSLLLGKICNDTRQIFTSSYNRMTIHFRSDISFQNTGFLAWYNSFPSDATLRLVNLNSSYGLCAGRVEIYHGGTWGTVCDDSWTIQEAEVVCRQLGCGRAVSALGNAYFGSGSGPITLDDVECSGTESTLWQCRNRGWFSHNCNHREDAGVICSGNHLSTPAPFLNITRPNTDYSCGGFLSQPSGDFSSPFYPGNYPNNAKCVWDIEVQNNYRVTVIFRDVQLEGGCNYDYIEVFDGPYRSSPLIARVCDGARGSFTSSSNFMSIRFISDHSITRRGFRAEYYSSPSNDSTNLLCLPNHMQASVSRSYLQSLGFSASDLVISTWNGYYECRPQITPNLVIFTIPYSGCGTFKQADNDTIDYSNFLTAAVSGGIIKRRTDLRIHVSCRMLQNTWVDTMYIANDTIHVANNTIQVEEVQYGNFDVNISFYTSSSFLYPVTSRPYYVDLNQDLYVQAEILHSDAVLTLFVDTCVASPYSNDFTSLTYDLIRSGCVRDDTYGPYSSPSLRIARFRFRAFHFLNRFPSVYLRCKMVVCRAYDPSSRCYRGCVLRSKRDVGSYQEKVDVVLGPIQLQTPPRREEEPR

SEQ ID NO: 22081 - protein, 1662 aa, Homo sapiens
MGISTVILEMCLLWGQVLSTGGWIPRTTDYASLIPSEVPLDPTVAEGSPFPSESTLESTVAEGSPISLESTLESTVAEGSLIPSESTLESTVAEGSDSGLALRLVNGDGRCQGRVEILYRGSWGTVCDDSWDTNDANVVCRQLGCGWAMSAPGNAWFGQGSGPIALDDVRCSGHESYLWSCPHNGWLSHNCGHGEDAGVICSAAQPQSTLRPESWPVRISPPVPTEGSESSLALRLVNGGDRCRGRVEVLYRGSWGTVCDDYWDTNDANVVCRQLGCGWAMSAPGNAQFGQGSGPIVLDDVRCSGHESYLWSCPHNGWLTHNCGHSEDAGVICSAPQSRPTPSPDTWPTSHASTAGPESSLALRLVNGGDRCQGRVEVLYRGSWGTVCDDSWDTSDANVVCRQLGCGWATSAPGNARFGQGSGPIVLDDVRCSGYESYLWSCPHNGWLSHNCQHSEDAGVICSAAHSWSTPRPGERPRPDTLPTITLPASTVGSESSLALRLVNGGDRCQGRVEVLYQGSWGTVCDDSWDTNDANVVCRQLGCGWAMSAPGNARFGQGSGPIVLDDVRCSGHESYLWSCPHNGWLSHNCGHSEDAGVICSASQSRPTPSPDTWPTSHASTAGSESSLALRLVNGGDRCQGRVEVLYRGSWGTVCDDYWDTNDANVVCRQLGCGWATSAPGNARFGQGSGPIVLDDVRCSGHESYLWSCPHNGWLSHNCGHHEDAGVICSASQSQPTPSPDTWPTSRASTAGSESTLALRLVNGGDRCRGRVEVLYQGSWGTVCDDYWDTNDANVVCRQLGCGWAMSAPGNAQFGQGSGPIVLDDVRCSGHESYLWSCPHNGWLSHNCGHHEDAGVICSAAQSQSTPRPDTWLTTNLPALTVGSESSLALRLVNGGDRCRGRVEVLYRGSWGTVCDDSWDTNDANVVCRQLGCGWAMSAPGNARFGQGSGPIVLDDVRCSGNESYLWSCPHKGWLTHNCGHHEDAGVICSATQINSTTTDWWHPTTTTTARPSSNCGGFLFYASGTFSSPSYPAYYPNNAKCVWEIEVNSGYRINLGFSNLKLEAHHNCSFDYVEIFDGSLNSSLLLGKICNDTRQIFTSSYNRMTIHFRSDISFQNTGFLAWYNSFPSDATLRLVNLNSSYGLCAGRVEIYHGGTWGTVCDDSWTIQEAEVVCRQLGCGRAVSALGNAYFGSGSGPITLDDVECSGTESTLWQCRNRGWFSHNCNHREDAGVICSGNHLSTPAPFLNITRPNTDYSCGGFLSQPSGDFSSPFYPGNYPNNAKCVWDIEVQNNYRVTVIFRDVQLEGGCNYDYIEVFDGPYRSSPLIARVCDGARGSFTSSSNFMSIRFISDHSITRRGFRAEYYSSPSNDSTNLLCLPNHMQASVSRSYLQSLGFSASDLVISTWNGYYECRPQITPNLVIFTIPYSGCGTFKQADNDTIDYSNFLTAAVSGGIIKRRTDLRIHVSCRMLQNTWVDTMYIANDTIHVANNTIQVEEVQYGNFDVNISFYTSSSFLYPVTSRPYYVDLNQDLYVQAEILHSDAVLTLFVDTCVASPYSNDFTSLTYDLIRSGCVRDDTYGPYSSPSLRIARFRFRAFHFLNRFPSVYLRCKMVVCRAYDPSSRCYRGCVLRSKRDVGSYQEKVDVVLGPIQLQTPPRREEEPR

SEQ ID NO: 22082 - protein, 2393 aa, Homo sapiens
MGISTVILEMCLLWGQVLSTGGWIPRTTDYASLIPSEVPLDPTVAEGSPFPSESTLESTVAEGSPISLESTLESTVAEGSLIPSESTLESTVAEGSDSGLALRLVNGDGRCQGRVEILYRGSWGTVCDDSWDTNDANVVCRQLGCGWAMSAPGNAWFGQGSGPIALDDVRCSGHESYLWSCPHNGWLSHNCGHGEDAGVICSAAQPQSTLRPESWPVRISPPVPTEGSESSLALRLVNGGDRCRGRVEVLYRGSWGTVCDDYWDTNDANVVCRQLGCGWAMSAPGNAQFGQGSGPIVLDDVRCSGHESYLWSCPHNGWLTHNCGHSEDAGVICSAPQSRPTPSPDTWPTSHASTAGPESSLALRLVNGGDRCQGRVEVLYRGSWGTVCDDSWDTSDANVVCRQLGCGWATSAPGNARFGQGSGPIVLDDVRCSGYESYLWSCPHNGWLSHNCQHSEDAGVICSAAHSWSTPSPDTLPTITLPASTVGSESSLALRLVNGGDRCQGRVEVLYRGSWGTVCDDSWDTNDANVVCRQLGCGWAMLAPGNARFGQGSGPIVLDDVRCSGNESYLWSCPHNGWLSHNCGHSEDAGVICSGPESSLALRLVNGGDRCQGRVEVLYRGSWGTVCDDSWDTNDANVVCRQLGCGWATSAPGNARFGQGSGPIVLDDVRCSGHESYLWSCPNNGWLSHNCGHHEDAGVICSAAQSRSTPRPDTLSTITLPPSTVGSESSLTLRLVNGSDRCQGRVEVLYRGSWGTVCDDSWDTNDANVVCRQLGCGWATSAPGNARFGQGSGPIVLDDVRCSGHESYLWSCPHNGWLSHNCGHHEDAGVICSVSQSRPTPSPDTWPTSHASTAGPESSLALRLVNGGDRCQGRVEVLYRGSWGTVCDDSWDTSDANVVCRQLGCGWATSAPGNARFGQGSGPIVLDDVRCSGYESYLWSCPHNGWLSHNCQHSEDAGVICSAAHSWSTPSPDTLPTITLPASTVGSESSLALRLVNGGDRCQGRVEVLYQGSWGTVCDDSWDTNDANVVCRQLGCGWAMSAPGNARFGQGSGPIVLDDVRCSGHESYLWSCPHNGWLSHNCGHSEDAGVICSASQSRPTPSPDTWPTSHASTAGSESSLALRLVNGGDRCQGRVEVLYRGSWGTVCDDYWDTNDANVVCRQLGCGWAMSAPGNARFGQGSGPIVLDDVRCSGHESYLWSCPHNGWLSHNCGHHEDAGVICSASQSQPTPSPDTWPTSHASTAGSESSLALRLVNGGDRCQGRVEVLYRGSWGTVCDDYWDTNDANVVCRQLGCGWATSAPGNARFGQGSGPIVLDDVRCSGHESYLWSCPHNGWLSHNCGHHEDAGVICSASQSQPTPSPDTWPTSHASTAGSESSLALRLVNGGDRCQGRVEVLYRGSWGTVCDDYWDTNDANVVCRQLGCGWATSAPGNARFGQGSGPIVLDDVRCSGHESYLWSCPHNGWLSHNCGHHEDAGVICSASQSQPTPSPDTWPTSRASTAGSESTLALRLVNGGDRCRGRVEVLYQGSWGTVCDDYWDTNDANVVCRQLGCGWAMSAPGNAQFGQGSGPIVLDDVRCSGHESYLWSCPHNGWLSHNCGHHEDAGVICSAAQSQSTPRPDTWLTTNLPALTVGSESSLALRLVNGGDRCRGRVEVLYRGSWGTVCDDSWDTNDANVVCRQLGCGWAMSAPGNARFGQGSGPIVLDDVRCSGNESYLWSCPHKGWLTHNCGHHEDAGVICSGPSSNCGGFLFYASGTFSSPSYPAYYPNNAKCVWEIEVNSGYRINLGFSNLKLEAHHNCSFDYVEIFDGSLNSSLLLGKICNDTRQIFTSSYNRMTIHFRSDISFQNTGFLAWYNSFPSDATLRLVNLNSSYGLCAGRVEIYHGGTWGTVCDDSWTIQEAEVVCRQLGCGRAVSALGNAYFGSGSGPITLDDVECSGTESTLWQCRNRGWFSHNCNHREDAGVICSGNHLSTPAPFLNITRPNTDYSCGGFLSQPSGDFSSPFYPGNYPNNAKCVWDIEVQNNYRVTVIFRDVQLEGGCNYDYIEVFDGPYRSSPLIARVCDGARGSFTSSSNFMSIRFISDHSITRRGFRAEYYSSPSNDSTNLLCLPNHMQASVSRSYLQSLGFSASDLVISTWNGYYECRPQITPNLVIFTIPYSGCGTFKQADNDTIDYSNFLTAAVSGGIIKRRTDLRIHVSCRMLQNTWVDTMYIANDTIHVANNTIQVEEVQYGNFDVNISFYTSSSFLYPVTSRPYYVDLNQDLYVQAEILHSDAVLTLFVDTCVASPYSNDFTSLTYDLIRSGCVRDDTYGPYSSPSLRIARFRFRAFHFLNRFPSVYLRCKMVVCRAYDPSSRCYRGCVLRSKRDVGSYQEKVDVVLGPIQLQTPPRREEEPR

SEQ ID NO: 22083 - protein, 1133 aa, Homo sapiens
MGISTVILEMCLLWGQVLSTGGWIPRTTDYASLIPSEVPLDPTVAEGSPFPSESTLESTVAEGSPISLESTLESTVAEGSLIPSESTLESTVAEGSDSGLALRLVNGDGRCQGRVEILYRGSWGTVCDDSWDTNDANVVCRQLGCGWAMSAPGNAWFGQGSGPIALDDVRCSGHESYLWSCPHNGWLSHNCGHGEDAGVICSAPQSRPTPSPDTWPTSHASTAGSESSLALRLVNGGDRCQGRVEVLYRGSWGTVCDDYWDTNDANVVCRQLGCGWATSAPGNARFGQGSGPIVLDDVRCSGHESYLWSCPHNGWLSHNCGHHEDAGVICSASQSQPTPSPDTWPTSRASTAGSESTLALRLVNGGDRCRGRVEVLYQGSWGTVCDDYWDTNDANVVCRQLGCGWAMSAPGNAQFGQGSGPIVLDDVRCSGHESYLWSCPHNGWLSHNCGHHEDAGVICSATQINSTTTDWWHPTTTTTARPSSNCGGFLFYASGTFSSPSYPAYYPNNAKCVWEIEVNSGYRINLGFSNLKLEAHHNCSFDYVEIFDGSLNSSLLLGKICNDTRQIFTSSYNRMTIHFRSDISFQNTGFLAWYNSFPSDATLRLVNLNSSYGLCAGRVEIYHGGTWGTVCDDSWTIQEAEVVCRQLGCGRAVSALGNAYFGSGSGPITLDDVECSGTESTLWQCRNRGWFSHNCNHREDAGVICSGNHLSTPAPFLNITRPNTDYSCGGFLSQPSGDFSSPFYPGNYPNNAKCVWDIEVQNNYRVTVIFRDVQLEGGCNYDYIEVFDGPYRSSPLIARVCDGARGSFTSSSNFMSIRFISDHSITRRGFRAEYYSSPSNDSTNLLCLPNHMQASVSRSYLQSLGFSASDLVISTWNGYYECRPQITPNLVIFTIPYSGCGTFKQADNDTIDYSNFLTAAVSGGIIKRRTDLRIHVSCRMLQNTWVDTMYIANDTIHVANNTIQVEEVQYGNFDVNISFYTSSSFLYPVTSRPYYVDLNQDLYVQAEILHSDAVLTLFVDTCVASPYSNDFTSLTYDLIRSGCVRDDTYGPYSSPSLRIARFRFRAFHFLNRFPSVYLRCKMVVCRAYDPSSRCYRGCVLRSKRDVGSYQEKVDVVLGPIQLQTPPRREEEPR

SEQ ID NO: 22084 - protein, 257 aa, Homo sapiens
MAAPWASLRLVAPMWNGRIRGIHRLGAAVAPEGNQKKKRTILQFLTNYFYDVEALRDYLLQREMYKVHEKNRSYTWLEKQHGPYGAGAFFILKQGGAVKFRDKEWIRPDKYGHFSQEFWNFCEVPVEAVDAGDCDINYEGLDNLLRLKELQSLSLQRCCHVDDWCLSRLYPLADSLQELSLAGCPRISERGLACLHHLQNLRRLDISDLPAVSNPGLTQILVEEMLPNCEVVGVDWAEGLKSGPEEQPRDTASPVPA

SEQ ID NO: 22085 - protein, 158 aa, Homo sapiens
MAAPWASLRLVAPMWNGRIRGIHRLGAAVAPEGNQKKKRTILQFLTNYFYDVEALRDYLLQREMYKVHEKNRFRDKEWIRPDKYGHFSQEFWNFCEVPVEAVDAGDCDINYEGLDNLRTSAGWTSRTSLPCPTLASLRYWWRRCCPIARLWESTGLRA

SEQ ID NO: 22086 - protein, 191 aa, Homo sapiens
MWDLVLEDRRMNSLRLVAPMWNGRIRGIHRLGAAVAPEGNQKKKRTILQFLTNYFYDVEALRDYLLQREMYKVHEKNRSYTWLEKQHGPYGAGAFFILKQGGAVKFRDKEWIRPDKYGHFSQEFWNFCEVPVEAVDAGDCDINYEGLDNLRTSAGWTSRTSLPCPTLASLRYWWRRCCPIARLWESTGLRA

SEQ ID NO: 22087 - protein, 263 aa, Homo sapiens
MWDLVLEDRRMNSLRLVAPMWNGRIRGIHRLGAAVAPEGNQKKKRTILQFLTNYFYDVEALRDYLLQREMYKVHEKNRSYTWLEKQHGPYGAGAFFILKQGGAVKFRDKEWIRPDKYGHFSQEFWNFCEVPVEAVDAGDCDINYEGLDNLLRLKELQSLSLQRCCHVDDWCLSRLYPLADSLQELSLAGCPRISERGLACLHHLQNLRRLDISDLPAVSNPGLTQILVEEMLPNCEVVGVDWAEGLKSGPEEQPRDTASPVPA

SEQ ID NO: 22088 - protein, 230 aa, Homo sapiens
MAAPWASLRLVAPMWNGRIRGIHRLGAAVAPEGNQKKKRTILQFLTNYFYDVEALRDYLLQREMYKVHEKNRFRDKEWIRPDKYGHFSQEFWNFCEVPVEAVDAGDCDINYEGLDNLLRLKELQSLSLQRCCHVDDWCLSRLYPLADSLQELSLAGCPRISERGLACLHHLQNLRRLDISDLPAVSNPGLTQILVEEMLPNCEVVGVDWAEGLKSGPEEQPRDTASPVPA

SEQ ID NO: 22089 - protein, 185 aa, Homo sapiens
MAAPWASLRLVAPMWNGRIRGIHRLGAAVAPEGNQKKKRTILQFLTNYFYDVEALRDYLLQREMYKVHEKNRSYTWLEKQHGPYGAGAFFILKQGGAVKFRDKEWIRPDKYGHFSQEFWNFCEVPVEAVDAGDCDINYEGLDNLRTSAGWTSRTSLPCPTLASLRYWWRRCCPIARLWESTGLRA

SEQ ID NO: 22090 - protein, 309 aa, Homo sapiens
MVDYYEVLGLQRYASPEDIKKAYHKVALKWHPDKNPENKEEAERKFKEVAEAYEVLSNDEKRDIYDKYGTEGLNGGGSHFDDECEYGFTFHKPDDVFKEIFHERDPFSFHFFEDSLEDLLNRPGSSYGNRNRDAGYFFSTASEYPIFEKFSSYDTGYTSQGSLGHEGLTSFSSLAFDNSGMDNYISVTTSDKIVNGRNINTKKIIESDQEREAEDNGELTFFLVNSVANEEGFAKECSWRTQSFNNYSPNSHSSKHVSQYTFVDNDEGGISWVTSNRDPPIFSAGVKEGGKRKKKKRKEVQKKSTKRNC

SEQ ID NO: 22091 - protein, 554 aa, Homo sapiens
MTAPCSQPAQLPGRRQLGLVPFPPPPPRTPLLWLLLLLLAAVAPARGWESGDLELFDLVEEVQLNFYQFLGVQQDASSADIRKAYRKLSLTLHPDKNKDENAETQFRQLVAIYEVLKDDERRQRYDDILINGLPDWRQPVFYYRRVRKMSNAELALLLFIILTVGHYAVVWSIYLEKQLDELLSRKKREKKKKTGSKSVDVSKLGASEKNERLLMKPQWHDLLPCKLGIWFCLTLKALPHLIQDAGQFYAKYKETRLKEKEDALTRTELETLQKQKKVKKPKPEFPVYTPLETTYIQSYDHGTSIEEIEEQMDDWLENRNRTQKKQAPEWTEEDLSQLTRSMVKFPGGTPGRWEKIAHELGRSVTDVTTKAKQLKDSVTCSPGMVRLSELKSTVQNSRPIKTATTLPDDMITQREDAEGVAAEEEQEGDSGEQETGATDARPRRRKPARLLEATAKPEPEEKSRAKRQKDFDIAEQNESSDEESLRKERARSAEEPWTQNQQKLLELALQQYPRGSSDRWDKIARCVPSKSKEDCIARYKLLVELVQKKKQAKS

SEQ ID NO: 22092 - protein, 326 aa, Homo sapiens
MVDYYEVLGVQRHASPEDIKKAYRKLALKWHPDKNPENKEEAERKFKQVAEAYEVLSDAKKRDIYDKYGKEGLNGGGGGGSHFDSPFEFGFTFRNPDDVFREFFGGRDPFSFDFFEDPFEDFFGNRRGPRGSRSRGTGSFFSAFSGFPSFGSGFSSFDTGFTSFGSLGHGGLTSFSSTSFGGSGMGNFKSISTSTKMVNGRKITTKRIVENGQERVEVEEDGQLKSLTINGVADDDALAEERMRRGQNALPAQPAGLRPPKPPRPASLLRHAPHCLSEEEGEQDRPRAPGPWDPLASAAGLKEGGKRKKQKQREESKKKKSTKGNH

SEQ ID NO: 22093 - protein, 241 aa, Homo sapiens
MVDYYEVLGVQRHASPEDIKKAYRKLALKWHPDKNPENKEEAERKFKQVAEAYEVLSDAKKRDIYDKYGKEGLNGGGGGGSHFDSPFEFGFTFRNPDDVFREFFGGRDPFSFDFFEDPFEDFFGNRRGPRGSRSRGTGSFFSAFSGFPSFGSGFSSFDTGFTSFGSLGHGGLTSFSSTSFGGSGMGNFKSISTSTKMVNGRKITTKRIVENGQERVEVEEDGQLKSLTINGKEQLLRLDNK

SEQ ID NO: 22094 - protein, 325 aa, Homo sapiens
MVDYYEVLGVQRHASPEDIKKAYRKLALKWHPDKNPENKEEAERKFKQVAEAYEVLSDAKKRDIYDKYGKEGLNGGGGGGSHFDSPFEFGFTFRNPDDVFREFFGGRDPFSFDFFEDPFEDFFGNRRGPRGSRSRGTGSFFSAFSGFPSFGSGFSSFDTGFTSFGSLGHGGLTSFSSTSFGGSGMGNFKSISTSTKMVNGRKITTKRIVENGQERVEVEEDGQLKSLTINGVADDDALAEERMRRGQNALPAQPAGLRPPKPPRPASLLRHAPHCLSEEEGEQDRPRAPGPWDPLASAAGVQREAAVEQAQSETSLGARGQRGHK

SEQ ID NO: 22095 - protein, 277 aa, Homo sapiens
MPHPRILKRPKKRDIYDKYGKEGLNGGGGGGSHFDSPFEFGFTFRNPDDVFREFFGGRDPFSFDFFEDPFEDFFGNRRGPRGSRSRGTGSFFSAFSGFPSFGSGFSSFDTGFTSFGSLGHGGLTSFSSTSFGGSGMGNFKSISTSTKMVNGRKITTKRIVENGQERVEVEEDGQLKSLTINGVADDDALAEERMRRGQNALPAQPAGLRPPKPPRPASLLRHAPHCLSEEEGEQDRPRAPGPWDPLASAAGLKEGGKRKKQKQREESKKKKSTKGNH

SEQ ID NO: 22096 - protein, 1009 aa, Homo sapiens
MSLAFKIFFPQTLRALSRKELCLFRKHHWRDVRQFSQWSETDLLHGHPLFLRRKPVLSFQGSHLRSRATYLVFLPGLHVGLCSGPCEMAEQRFCVDYAKRGTAGCKKCKEKIVKGVCRIGKVVPNPFSESGGDMKEWYHIKCMFEKLERARATTKKIEDLTELEGWEELEDNEKEQITQHIADLSSKAAGTPKKKAVVQAKLTTTGQVTSPVKGASFVTSTNPRKFSGFSAKPNNSGEAPSSPTPKRSLSSSKCDPRHKDCLLREFRKLCAMVADNPSYNTKTQIIQDFLRKGSAGDGFHGDVYLTVKLLLPGVIKTVYNLNDKQIVKLFSRIFNCNPDDMARDLEQGDVSETIRVFFEQSKSFPPAAKSLLTIQEVDEFLLRLSKLTKEDEQQQALQDIASRCTANDLKCIIRLIKHDLKMNSGAKHVLDALDPNAYEAFKASRNLQDVVERVLHNAQEVEKEPGQRRALSVQASLMTPVQPMLAEACKSVEYAMKKCPNGMFSEIKYDGERVQVHKNGDHFSYFSRSLKPVLPHKVAHFKDYIPQAFPGGHSMILDSEVLLIDNKTGKPLPFGTLGVHKKAAFQDANVCLFVFDCIYFNDVSLMDRPLCERRKFLHDNMVEIPNRIMFSEMKRVTKALDLADMITRVIQEGLEGLVLKDVKGTYEPGKRHWLKVKKDYLNEGAMADTADLVVLGAFYGQGSKGGMMSIFLMGCYDPGSQKWCTVTKCAGGHDDATLARLQNELDMVKISKDPSKIPSWLKVNKIYYPDFIVPDPKKAAVWEITGAEFSKSEAHTADGISIRFPRCTRIRDDKDWKSATNLPQLKELYQLSKEKADFTVVAGDEGSSTTGGSSEENKGPSGSAVSRKAPSKPSASTKKAEGKLSNSNSKDGNMQTAKPSAMKVGEKLATKSSPVKVGEKRKAADETLCQTKVLLDIFTGVRLYLPPSTPDFSRLRRYFVAFDGDLVQEFDMTSATHVLGSRDKNPAAQQVSPEWIWACIRKRRLVAPC

SEQ ID NO: 22097 - protein, 949 aa, Homo sapiens
MSLAFKIFFPQTLRALSRKELCLFRKHHWRDVRQFSQWSETDLLHGHPLFLRRKPVLSFQGSHLRSRATYLVFLPGLHVGLCSGPCEMAEQRFCVDYAKRGTAGCKKCKEKIVKGVCRIGKVVPNPFSESGGDMKEWYHIKCMFEKLERARATTKKIEDLTELEGWEELEDNEKEQITQHIADLSSKAAGTPKKKAVVQAKLTTTGQVTSPVKGASFVTSTNPRKFSGFSAKPNNSGEAPSSPTPKRSLSSSKCDPRHKDCLLREFRKLCAMVADNPSYNTKTQIIQDFLRKGSAGDGFHGDVYLTVKLLLPGVIKTVYNLNDKQIVKLFSRIFNCNPDDMARDLEQGDVSETIRVFFEQSKSFPPAAKSLLTIQEVDEFLLRLSKLTKEDEQQQALQDIASRCTANDLKCIIRLIKHDLKMNSGAKHVLDALDPNAYEAFKASRNLQDVVERVLHNAQEVEKEPGQRRALSVQASLMTPVQPMLAEACKSVEYAMKKCPNGMFSEIKYDGERVQVHKNGDHFSYFSRSLKPVLPHKVAHFKDYIPQAFPGGHSMILDSEVLLIDNKTGKPLPFGTLGVHKKAAFQDANVCLFVFDCIYFNDVSLMDRPLCERRKFLHDNMVEIPNRIMFSEMKRVTKALDLADMITRVIQEGLEGLVLKDVKGTYEPGKRHWLKVKKDYLNEGAMADTADLVVLGAFYGQGSKGGMMSIFLMGCYDPGSQKWCTVTKCAGGHDDATLARLQNELDMVKISKDPSKIPSWLKVNKIYYPDFIVPDPKKAAVWEITGAEFSKSEAHTADGISIRFPRCTRIRDDKDWKSATNLPQLKELYQLSKEKADFTVVAGDEGSSTTGGSSEENKGPSGSAVSRKAPSKPSASTKKAEGKLSNSNSKDGNMQTAKPSAMKVGEKLATKSSPVKVGEKRKAADETLCQTKRRPASEQRGRTVPAGRR

SEQ ID NO: 22098 - protein, 922 aa, Homo sapiens
MAEQRFCVDYAKRGTAGCKKCKEKIVKGVCRIGKVVPNPFSESGGDMKEWYHIKCMFEKLERARATTKKIEDLTELEGWEELEDNEKEQITQHIADLSSKAAGTPKKKAVVQAKLTTTGQVTSPVKGASFVTSTNPRKFSGFSAKPNNSGEAPSSPTPKRSLSSSKCDPRHKDCLLREFRKLCAMVADNPSYNTKTQIIQDFLRKGSAGDGFHGDVYLTVKLLLPGVIKTVYNLNDKQIVKLFSRIFNCNPDDMARDLEQGDVSETIRVFFEQSKSFPPAAKSLLTIQEVDEFLLRLSKLTKEDEQQQALQDIASRCTANDLKCIIRLIKHDLKMNSGAKHVLDALDPNAYEAFKASRNLQDVVERVLHNAQEVEKEPGQRRALSVQASLMTPVQPMLAEACKSVEYAMKKCPNGMFSEIKYDGERVQVHKNGDHFSYFSRSLKPVLPHKVAHFKDYIPQAFPGGHSMILDSEVLLIDNKTGKPLPFGTLGVHKKAAFQDANVCLFVFDCIYFNDVSLMDRPLCERRKFLHDNMVEIPNRIMFSEMKRVTKALDLADMITRVIQEGLEGLVLKDVKGTYEPGKRHWLKVKKDYLNEGAMADTADLVVLGAFYGQGSKGGMMSIFLMGCYDPGSQKWCTVTKCAGGHDDATLARLQNELDMVKISKDPSKIPSWLKVNKIYYPDFIVPDPKKAAVWEITGAEFSKSEAHTADGISIRFPRCTRIRDDKDWKSATNLPQLKELYQLSKEKADFTVVAGDEGSSTTGGSSEENKGPSGSAVSRKAPSKPSASTKKAEGKLSNSNSKDGNMQTAKPSAMKVGEKLATKSSPVKVGEKRKAADETLCQTKVLLDIFTGVRLYLPPSTPDFSRLRRYFVAFDGDLVQEFDMTSATHVLGSRDKNPAAQQVSPEWIWACIRKRRLVAPC

SEQ ID NO: 22099 - protein, 862 aa, Homo sapiens
MAEQRFCVDYAKRGTAGCKKCKEKIVKGVCRIGKVVPNPFSESGGDMKEWYHIKCMFEKLERARATTKKIEDLTELEGWEELEDNEKEQITQHIADLSSKAAGTPKKKAVVQAKLTTTGQVTSPVKGASFVTSTNPRKFSGFSAKPNNSGEAPSSPTPKRSLSSSKCDPRHKDCLLREFRKLCAMVADNPSYNTKTQIIQDFLRKGSAGDGFHGDVYLTVKLLLPGVIKTVYNLNDKQIVKLFSRIFNCNPDDMARDLEQGDVSETIRVFFEQSKSFPPAAKSLLTIQEVDEFLLRLSKLTKEDEQQQALQDIASRCTANDLKCIIRLIKHDLKMNSGAKHVLDALDPNAYEAFKASRNLQDVVERVLHNAQEVEKEPGQRRALSVQASLMTPVQPMLAEACKSVEYAMKKCPNGMFSEIKYDGERVQVHKNGDHFSYFSRSLKPVLPHKVAHFKDYIPQAFPGGHSMILDSEVLLIDNKTGKPLPFGTLGVHKKAAFQDANVCLFVFDCIYFNDVSLMDRPLCERRKFLHDNMVEIPNRIMFSEMKRVTKALDLADMITRVIQEGLEGLVLKDVKGTYEPGKRHWLKVKKDYLNEGAMADTADLVVLGAFYGQGSKGGMMSIFLMGCYDPGSQKWCTVTKCAGGHDDATLARLQNELDMVKISKDPSKIPSWLKVNKIYYPDFIVPDPKKAAVWEITGAEFSKSEAHTADGISIRFPRCTRIRDDKDWKSATNLPQLKELYQLSKEKADFTVVAGDEGSSTTGGSSEENKGPSGSAVSRKAPSKPSASTKKAEGKLSNSNSKDGNMQTAKPSAMKVGEKLATKSSPVKVGEKRKAADETLCQTKRRPASEQRGRTVPAGRR

SEQ ID NO: 22100 - protein, 220 aa, Homo sapiens
MLQLAGVSNSTCGGVRNVSVETRNVKPQGKDSKAEENGSHSFMHSMDPQLERQMETTQNLVDSYMAIVNKTVWDLMVGAKPKTTMHIMIYNVHAPPHGDQGVHLLGAAVQPALAWEREDTHGGVGRVGTAARRDAASQSCCPTCTRLGTRRHSWRSRQSRHSGATRLAWEEIDTPGGVGRAGTAARRDSRGNEKTLLEESAEQADQGVHLLGAAVQPALA

SEQ ID NO: 22101 - protein, 478 aa, Homo sapiens
MGSRWSSEEERQPLLGPGLGPGLGASWRSREAAAAALPAAVPGPGRVYGRRWLVLLLFSLLAFVQGLVWNTWGPIQNSARQAYGFSSWDIALLVLWGPIGFLPCFAFMWLLDKRGLRITVLLTSFLMVLGTGLRCIPISDLILKRRLIHGGQMLNGLAGPTVMNAAPFLSTTWFSADERATATAIASMLSYLGGACAFLVGPLVVPAPNGTSPLLAAESSRAHIKDRIEAVLYAEFGVVCLIFSATLAYFPPRPPLPPSVAAASQRLSYRRSVCRLLSNFRFLMIALAYAIPLGVFAGWSGVLDLILTPAHVSQVDAGWIGFWSIVGGCVVGIAMARFADFIRGMLKLILLLLFSGATLSSTWFTLTCLNSITHLPLTTVTLYASCILLGVFLNSSVPIFFELFVETVYPVPEGITCGVVTFLSNMFMGVLLFFLTFYHTELSWFNWCLPGSCLLSLLLILCFRESYDRLYLDVVVSV

SEQ ID NO: 22102 - protein, 411 aa, Homo sapiens
MGSRWSSEEERQPLLGPGLGPGLGASWRSREAAAAALPAAVPGPGRVYGRRWLVLLLFSLLAFVQGLVWNTWGPIQNSARQAYGFSSWDIALLVLWGPIGFLPCFAFMWLLDKRGLRITVLLTSFLMVLGTGLRCIPISDLILKRRLIHGGQMLNGLAGPTVMNAAPFLSTTWFSADERATATAIASMLSYLGGACAFLVGPLVVPAPNGTSPLLAAESSRAHIKDRIEAVLYAEFGVVCLIFSATLAYFPPRPPLPPSVAAASQRLSYRRSVCRLLSNFRFLMIALAYAIPLGVFAGWSGVLDLILTPAHVSQVDAGWIGFWSIVGGCVVGIAMARFADFIRGMLKLILLLLFSGATLSSTWFTLTCLNSITHLPLTTEMGFRHVVQAGLELLSLSDSPTLASQNVGIAD

SEQ ID NO: 22103 - protein, 558 aa, Homo sapiens
MYRYLAKALLPSRAGPAALGSAANHSAALLGRGRGQPAAASQPGLALAARRHYSELVADREDDPNFFKMVEGFFDRGASIVEDKLVKDLRTQESEEQKRNRVRGILRIIKPCNHVLSLSFPIRRDDGSWEVIEGYRAQHSQHRTPCKGGIRYSTDVSVDEVKALASLMTYKCAVVDVPFGGAKAGVKINPKNYTENELEKITRRFTMELAKKGFIGPGVDVPAPDMNTGEREMSWIADTYASTIGHYDINAHACVTGKPISQGGIHGRISATGRGVFHGIENFINEASYMSILGMTPGFRDKTFVVQGFGNVGLHSMRYLHRFGAKCIAVGESDGSIWNPDGIDPKELEDFKLQHGSILGFPKAKPYEGSILEVDCDILIPAATEKQLTKSNAPRVKAKIIAEGANGPTTPEADKIFLERNILVIPDLYLNAGGVTVSYFEWLKNLNHVSYGRLTFKYERDSNYHLLLSVQESLERKFGKHGGTIPIVPTAEFQDSISGASEKDIVHSALAYTMERSARQIMHTAMKYNLGLDLRTAAYVNAIEKVFKVYSEAGVTFT

SEQ ID NO: 22104 - protein, 760 aa, Homo sapiens
MSTVEEDSDTVTVETVNSVTLTQDTEGNLILHCPQNEADEIDSEDSIEPPHKRLCLSSEDDQSIDDSTPCISVVALPLSENDQSFEVTMTATTEVADDEVTEGTVTQIQILQNEQLDEISPLGNEEVSAVSQAWFTTKEDKDSLTNKGHKWKQGMWSKEEIDILMNNIERYLKARGIKDATEIIFEMSKDERKDFYRTIAWGLNRPLFAVYRRVLRMYDDRNHVGKYTPEEIEKLKELRIKHGNDWATIGAALGRSASSVKDRCRLMKDTCNTGKWTEEEEKRLAEVVHELTSTEPGDIVTQGVSWAAVAERVGTRSEKQCRSKWLNYLNWKQSGGTEWTKEDEINLILRIAELDVADENDINWDLLAEGWSSVRSPQWLRSKWWTIKRQIANHKDVSFPVLIKGLKQLHENQKNNPTLLENKSGSGVPNSNTNSSVQHVQIRVARLEDNTAISSSPMAALQIPVQITHVSSADSPATVDSETITLNSGTLQTFEILPSFHLQPTGTPGTYLLQTSSSQGLPLTLTASPTVTLTAAAPASPEQIIVHALSPEHLLNTSDNVTVQCHTPRVIIQTVATEDITSSISQAELTVDSDIQSSDFPEPPDALEADTFPDEIHHPKMTVEPSFNDAHVSKFSDQNSTELMNSVMVRTEEEISDTDLKQEESPSDLASAYVTEGLESPTIEEQVDQTIDDETILIVPSPHGFIQASDVIDTESVLPLTTLTDPILQHHQEESNIIGSSLGSPVSEDSKDVEDLVNCH

SEQ ID NO: 22105 - protein, 272 aa, Homo sapiens
MSTVEEDSDTVTVETVNSVTLTQDTEGNLILHCPQNEADEIDSEDSIEPPHKRLCLSSEDDQSIDDSTPCISVVALPLSENDQSFEVTMTATTEVADDEVTEGTVTQIQILQNEQLDEISPLGNEEVSAVSQAWFTTKEDKDSLTNKGHKWKQGMWSKEEIDILMNNIERYLKARGIKDATEIIFEMSKDERKDFYRTIAWGLNRPLFAVYRRVLRMYDDRNHVGKYTPEEIEKLKEQLWTPKKGHTFKLWLSKYCCPQLPNQSNGKKKNEE

SEQ ID NO: 22106 - protein, 285 aa, Homo sapiens
MSTVEEDSDTVTVETVNSVTLTQDTEGNLILHCPQNEADEIDSEDSIEPPHKRLCLSSEDDQSIDDSTPCISVVALPLSENDQSFEVTMTATTEVADDEVTEGTVTQIQILQNEQLDEISPLGNEEVSAVSQAWFTTKEDKDSLTNKGHKWKQGMWSKEEIDILMNNIERYLKARGIKDATEIIFEMSKDERKDFYRTIAWGLNRPLFAVYRRVLRMYDDRNHVGKYTPEEIEKLKEKKAIAACFFFTHRQLWTPKKGHTFKLWLSKYCCPQLPNQSNGKKKNEE

SEQ ID NO: 22107 - protein, 244 aa, Homo sapiens
MSTVEEDSDTVTVETVNSVTLTQDTEGNLILHCPQNVSENDQSFEVTMTATTEVADDEVTEGTVTQIQILQNEQLDEISPLGNEEVSAVSQAWFTTKEDKDSLTNKGHKWKQGMWSKEEIDILMNNIERYLKARGIKDATEIIFEMSKDERKDFYRTIAWGLNRPLFAVYRRVLRMYDDRNHVGKYTPEEIEKLKEKKAIAACFFFTHRQLWTPKKGHTFKLWLSKYCCPQLPNQSNGKKKNEE

SEQ ID NO: 22108 - protein, 672 aa, Homo sapiens
MTATTEVADDEVTEGTVTQIQILQNEQLDEISPLGNEEVSAVSQAWFTTKEDKDSLTNKGHKWKQGMWSKEEIDILMNNIERYLKARGIKDATEIIFEMSKDERKDFYRTIAWGLNRPLFAVYRRVLRMYDDRNHVGKYTPEEIEKLKELRIKHGNDWATIGAALGRSASSVKDRCRLMKDTCNTGKWTEEEEKRLAEVVHELTSTEPGDIVTQGVSWAAVAERVGTRSEKQCRSKWLNYLNWKQSGGTEWTKEDEINLILRIAELDVADENDINWDLLAEGWSSVRSPQWLRSKWWTIKRQIANHKDVSFPVLIKGLKQLHENQKNNPTLLENKSGSGVPNSNTNSSVQHVQIRVARLEDNTAISSSPMAALQIPVQITHVSSADSPATVDSETITLNSGTLQTFEILPSFHLQPTGTPGTYLLQTSSSQGLPLTLTASPTVTLTAAAPASPEQIIVHALSPEHLLNTSDNVTVQCHTPRVIIQTVATEDITSSISQAELTVDSDIQSSDFPEPPDALEADTFPDEIHHPKMTVEPSFNDAHVSKFSDQNSTELMNSVMVRTEEEISDTDLKQEESPSDLASAYVTEGLESPTIEEQVDQTIDDETILIVPSPHGFIQASDVIDTESVLPLTTLTDPILQHHQEESNIIGSSLGSPVSEDSKDVEDLVNCH

SEQ ID NO: 22109 - protein, 290 aa, Homo sapiens
METDLAEMPEKGVLSSQDSPHFQEKSTEEGEVAALRLTARSQAAAAAAAPGSRSLRGVHVPPPLHPAPAREESARTPAAAGRAAKMAEAPASPAPLSPLEVELDPEFEPQSRPRSCTWPLQRPELQASPAKPSGETAADSMIPEEEDDEDDEDGGGRAGSAMAIGGGGGSRTLVSGLLLEDSVRVLAPGGQDPGSGPATAAGGLSGGTQALLQPQQPLPPPQPGAAGGSGQPRKCSSRRNAWGNLSYADLITRAIESSPDRRLTLSQIYEWMVSCVPYFKDKGNSNSSAG

SEQ ID NO: 22110 - protein, 105 aa, Homo sapiens
MGETEGKKDEADYKRLQTFPLVRHSDMPEEMRVETMELCVTACEKFSNNNESAAKMIKETMDKKFGSSWHVVIGEGFGFEITHEVKNLLYLYFGGTLAVCVWKCS

SEQ ID NO: 22111 - protein, 292 aa, Homo sapiens
MAFMKKYLLPILGLFMAYYYYSANEEFRPEMLQGKKVIVTGASKGIGREMAYHLAKMGAHVVVTARSKETLQKVVSHCLELGAASAHYIAGTMEDMTFAEQFVAQAGKLMGGLDMLILNHITNTSLNLFHDDIHHVRKSMEVNFLSYVVLTVAALPMLKQSNGSIVVVSSLAGKVAYPMVAAYSASKFALDGFFSSIRKEYSVSRVNVSITLCVLGLIDTETAMKAVSGIVHMQAAPKEECALEIIKGGALRQEEVYYDSSLWTTLLIRNPCRKILEFLYSTSYNMDRFINK

SEQ ID NO: 22112 - protein, 1060 aa, Homo sapiens
MEQLNELELLMEKSFWEEAELPAELFQKKVVASFPRTVLSTGMDNRYLVLAVNTVQNKEGNCEKRLVITASQSLENKELCILRNDWCSVPVEPGDIIHLEGDCTSDTWIIDKDFGYLILYPDMLISGTSIASSIRCMRRAVLSETFRSSDPATRQMLIGTVLHEVFQKAINNSFAPEKLQELAFQTIQEIRHLKEMYRLNLSQDEIKQEVEDYLPSFCKWAGDFMHKNTSTDFPQMQLSLPSDNSKDNSTCNIEVVKPMDIEESIWSPRFGLKGKIDVTVGVKIHRGYKTKYKIMPLELKTGKESNSIEHRSQVVLYTLLSQERRADPEAGLLLYLKTGQMYPVPANHLDKRELLKLRNQMAFSLFHRISKSATRQKTQLASLPQIIEEEKTCKYCSQIGNCALYSRAVEQQMDCSSVPIVMLPKIEEETQHLKQTHLEYFSLWCLMLTLESQSKDNKKNHQNIWLMPASEMEKSGSCIGNLIRMEHVKIVCDGQYLHNFQCKHGAIPVTNLMAGDRVIVSGEERSLFALSRGYVKEINMTTVTCLLDRNLSVLPESTLFRLDQEEKNCDIDTPLGNLSKLMENTFVSKKLRDLIIDFREPQFISYLSSVLPHDAKDTVACILKGLNKPQRQAMKKVLLSKDYTLIVGMPGTGKTTTICTLVRILYACGFSVLLTSYTHSAVDNILLKLAKFKIGFLRLGQIQKVHPAIQQFTEQEICRSKSIKSLALLEELYNSQLIVATTCMGINHPIFSRKIFDFCIVDEASQISQPICLGPLFFSRRFVLVGDHQQLPPLVLNREARALGMSESLFKRLEQNKSAVVQLTVQYRMNSKIMSLSNKLTYEGKLECGSDKVANAVINLRHFKDVKLELEFYADYSDNPWLMGVFEPNNPVCFLNTDKVPAPEQVEKGGVSNVTEAKLIVFLTSIFVKAGCSPSDIGIIAPYRQQLKIINDLLARSIGMVEVNTVDKYQGRDKSIVLVSFVRSNKDGTVGELLKDWRRLNVAITRAKHKLILLGCVPSLNCYPPLEKLLNHLNSEKLIIDLPSREHESLCHILGDFQRE

SEQ ID NO: 22113 - protein, 687 aa, Homo sapiens
MEQLNELELLMEKSFWEEAELPAELFQKKVVASFPRTVLSTGMDNRYLVLAVNTVQNKEGNCEKRLVITASQSLENKELCILRNDWCSVPVEPGDIIHLEGDCTSDTWIIDKDFGYLILYPDMLISGTSIASSIRCMRRAVLSETFRSSDPATRQMLIGTVLHEVFQKAINNSFAPEKLQELAFQTIQEIRHLKEMYRLNLSQDEIKQEVEDYLPSFCKWAGDFMHKNTSTDFPQMQLSLPSDNSKDNSTCNIEVVKPMDIEESIWSPRFGLKGKIDVTVGVKIHRGYKTKYKIMPLELKTGKESNSIEHRSQVVLYTLLSQERRADPEAGLLLYLKTGQMYPVPANHLDKRELLKLRNQMAFSLFHRISKSATRQKTQLASLPQIIEEEKTCKYCSQIGNCALYSRAVEQQMDCSSVPIVMLPKIEEETQHLKQTHLEYFSLWCLMLTLESQSKDNKKNHQNIWLMPASEMEKSGSCIGNLIRMEHVKIVCDGQYLHNFQCKHGAIPVTNLMAGDRVIVSGEERSLFALSRGYVKEINMTTVTCLLDRNLSVLPESTLFRLDQEEKNCDIDTPLGNLSKLMENTFVSKKLRDLIIDFREPQFISYLSSVLPHDAKDTVACILKGLNKPQRQAMKKVLLSKDYTLIVGMPGTGKTTTICTLVRFRRFIQLSSNLQSKKFADQSPLNP

SEQ ID NO: 22114 - protein, 822 aa, Homo sapiens
MEQLNELELLMEKSFWEEAELPAELFQKKVVASFPRTVLSTGMDNRYLVLAVNTVQNKEGNCEKRLVITASQSLENKELCILRNDWCSVPVEPGDIIHLEGDCTSDTWIIDKDFGYLILYPDMLISGTSIASSIRCMRRAVLSETFRSSDPATRQMLIGTVLHEVFQKAINNSFAPEKLQELAFQTIQEIRHLKEMYRLNLSQDEIKQEVEDYLPSFCKWAGDFMHKNTSTDFPQMQLSLPSDNSKDNSTCNIEVVKPMDIEESIWSPRFGLKGKIDVTVGVKIHRGYKTKYKIMPLELKTGKESNSIEHRSQVVLYTLLSQERRADPEAGLLLYLKTGQMYPVPANHLDKRELLKLRNQMAFSLFHRISKSATRQKTQLASLPQIIEEEKTCKYCSQIGNCALYSRAVEQQMDCSSVPIVMLPKIEEETQHLKQTHLEYFSLWCLMLTLESQSKDNKKNHQNIWLMPASEMEKSGSCIGNLIRMEHVKIVCDGQYLHNFQCKHGAIPVTNLMAGDRVIVSGEERSLFALSRGYVKEINMTTVTCLLDRNLSVLPESTLFRLDQEEKNCDIDTPLGNLSKLMENTFVSKKLRDLIIDFREPQFISYLSSVLPHDAKDTVACILKGLNKPQRQAMKKVLLSKDYTLIVGMPGTGKTTTICTLVPAPEQVEKGGVSNVTEAKLIVFLTSIFVKAGCSPSDIGIIAPYRQQLKIINDLLARSIGMVEVNTVDKYQGRDKSIVLVSFVRSNKDGTVGELLKDWRRLNVAITRAKHKLILLGCVPSLNCYPPLEKLLNHLNSEKLIIDLPSREHESLCHILGDFQRE

SEQ ID NO: 22115 - protein, 1052 aa, Homo sapiens
MEQLNELELLMEKSFWEEAELPAELFQKKVVASFPRTVLSTGMDNRYLVLAVNTVQNKEGNCEKRLVITASQSLENKELCILRNDWCSVPVEPGDIIHLEGDCTSDTWIIDKDFGYLILYPDMLISGTSIASSIRCMRRAVLSETFRSSDPATRQMLIGTVLHEVFQKAINNSFAPEKLQELAFQTIQEIRHLKEMYRLNLSQDEIKQEVEDYLPSFCKWAGDFMHKNTSTDFPQMQLSLPSDNSKDNSTCNIEVVKPMDIEESIWSPRFGLKGKIDVTVGVKIHRGYKTKYKIMPLELKTGKESNSIEHRSQVVLYTLLSQERRADPEAGLLLYLKTGQMYPVPANHLDKRELLKLRNQMAFSLFHRISKSATRQKTQLASLPQIIEEEKTCKYCSQIGNCALYSRAVEQQMDCSSVPIVMLPKIEEETQHLKQTHLEYFSLWCLMLTLESQSKDNKKNHQNIWLMPASEMEKSGSCIGNLIRMEHVKIVCDGQYLHNFQCKHGAIPVTNLMAGDRVIVSGEERSLFALSRGYVKEINMTTVTCLLDRNLSVLPESTLFRLDQEEKNCDIDTPLGNLSKLMENTFVSKKLRDLIIDFREPQFISYLSSVLPHDAKDTVACILKGLNKPQRQAMKKVLLSKDYTLIVGMPGTGKTTTICTLVRILYACGFSVLLTSYTHSAVDNILLKLAKFKIGFLRLGQIQKVHPAIQQFTEQEICRSKSIKSLALLEELYNSQLIVATTCMGINHPIFSRKIFDFCIVDEASQISQPICLGPLFFSRRFVLVGDHQQLPPLVLNREARALGMSESLFKRLEQNKSAVVQLTVQYRMNSKIMSLSNKLTYEGKLECGSDKVANAVINLRHFKDVKLELEFYADYSDNPWLMGVFEPNNPVCFLNTDKVPAPEQVEKGGVSNVTEAKLIVFLTSIFVKAGCSPSDIGIIAPYRQQLKIINDLLARSIGMVEVNTVDKYQGRDKSIVLVSFVRSNKDGTVGELLKDWRRLNVAITRAKHKLILLGCVPSLNCYPPLEKLLNHLNSEKLISFFFCIWSHLIAL

SEQ ID NO: 22116 - protein, 367 aa, Homo sapiens
MSSTLAKIAEIEAEMARTQKNKATAHHLGLLKARLAKLRRELITPKGGGGGGPGEGFDVAKTGDARIGFVGFPSVGKSTLLSNLAGVYSEVAAYEFTTLTTVPGVIRYKGAKIQLLDLPGIIEGAKDGKGRGRQVIAVARTCNLILIVLDVLKPLGHKKIIENELEGFGIRLNSKPPNIGFKKKDKGGINLTATCPQSELDAETVKSILAEYKIHNADVTLRSDATADDLIDVVEGNRVYIPCIYVLNKIDQISIEELDIIYKVPHCVPISAHHRWNFDDLLEKIWDYLKLVRIYTKPKGQLPDYTSPVVLPYSRTTVEDFCMKIHKNLIKEFKYALVWGLSVKHNPQKVGKDHTLEDEDVIQIVKK

SEQ ID NO: 22117 - protein, 328 aa, Homo sapiens
MAAGIVASRRLRDLLTRRLTGSNYPGLSISLRLTGSSAQEEASGVALGEAPDHSYESLRVTSAQKHVLHVQLNRPNKRNAMNKVFWREMVECFNKISRDADCRAVVISGAGKMFTAGIDLMDMASDILQPKGDDVARISWYLRDIITRYQETFNVIERCPKPVIAAVHGGCIGGGVDLVTACDIRYCAQDAFFQVKEVDVGLAADVGTLQRLPKVIGNQSLVNELAFTARKMMADEALGSGLVSRVFPDKEVMLDAALALAAEISSKSPVAVQSTKVNLLYSRDHSVAESLNYVASWNMSMLQTQDLVKSVQATTENKELKTVTFSKL

SEQ ID NO: 22118 - protein, 695 aa, Homo sapiens
MAETKIIYHMDEEETPYLVKLPVAPERVTLADFKNVLSNRPVHAYKFFFKSMDQDFGVVKEEIFDDNAKLPCFNGRVVSWLVLAEGAHSDAGSQGTDSHTDLPPPLERTGGIGDSRPPSFHPNVASSRDGMDNETGTESMVSHRRERARRRNREEAARTNGHPRGDRRRDVGLPPDSASTALSSELESSSFVDSDEDGSTSRLSSSTEQSTSSRLIRKHKRRRRKQRLRQADRASSFSSITDSTMSLNIVTVTLNMERHHFLGISIVGQSNDRGDGGIYIGSIMKGGAVAADGRIEPGDMLLQVNDVNFENMSNDDAVRVLREIVSQTGPISLTVAKCWDPTPRSYFTVPRADPVRPIDPAAWLSHTAALTGALPRYGTSPCSSAVTRTSSSSLTSSVPGAPQLEEAPLTVKSDMSAVVRVMQLPDSGLEIRDRMWLKITIANAVIGADVVDWLYTHVEGFKERREARKYASSLLKHGFLRHTVNKITFSEQCYYVFGDLCSNLATLNLNSGSSGTSDQDTLAPLPHPAAPWPLGQGYPYQYPGPPPCFPPAYQDPGFSYGSGSTGSQQSEGSKSSGSTRSSRRAPGREKERRAAGAGGSGSESDHTAPSGVGSSWRERPAGQLSRGSSPRSQASATAPGLPPPHPTTKAYTVVGGPPGGPPVRELAAVPPELTGSRQSFQKAMGNPCEFFVDIM

SEQ ID NO: 22119 - protein, 670 aa, Homo sapiens
MAETKIIYHMDEEETPYLVKLPVAPERVTLADFKNVLSNRPVHAYKFFFKSMDQDFGVVKEEIFDDNAKLPCFNGRVVSWLVLAEGAHSDAGSQGTDSHTDLPPPLERTGGIGDSRPPSFHPNVASSRDGMDNETGTESMVSHRRERARRRNREEAARTNGHPRGDRRRDVGLPPDSASTALSSELESSSFVDSDEDGSTSRLSSSTEQSTSSRLIRKHKRRRRKQRLRQADRASSFSSITDSTMSLNIVTVTLNMERHHFLGISIVGQSNDRGDGGIYIGSIMKGGAVAADGRIEPGDMLLQVNDVNFENMSNDDAVRVLREIVSQTGPISLTVAKCWDPTPRSYFTVPRADPVRPIDPAAWLSHTAALTGALPRYELEEAPLTVKSDMSAVVRVMQLPDSGLEIRDRMWLKITIANAVIGADVVDWLYTHVEGFKERREARKYASSLLKHGFLRHTVNKITFSEQCYYVFGDLCSNLATLNLNSGSSGTSDQDTLAPLPHPAAPWPLGQGYPYQYPGPPPCFPPAYQDPGFSYGSGSTGSQQSEGSKSSGSTRSSRRAPGREKERRAAGAGGSGSESDHTAPSGVGSSWRERPAGQLSRGSSPRSQASATAPGLPPPHPTTKAYTVVGGPPGGPPVRELAAVPPELTGSRQSFQKAMGNPCEFFVDIM

SEQ ID NO: 22120 - protein, 263 aa, Homo sapiens
MFYFHCPPQLEGTATFGNHSSGDFDDGFLRRKQRRNRTTFTLQQLEALEAVFAQTHYPDVFTREELAMKINLTEARVQVWFQNRRAKWRKTERGASDQEPGAKEPMAEVTPPPVRNINSPPPGDQARSKKEALEAQQSLGRTVGPAGPFFPSCLPGTLLNTATYAQALSHVASLKGGPLCSCCVPDPMGLSFLPTYGCQSNRTASVATLRMKAREHSEAVLQSANLLPSTSSSPGPVAKPAPPDGSQEKTSPTKEQSEAEKSV

SEQ ID NO: 22121 - protein, 542 aa, Homo sapiens
MTKSNGEEPKMGGRMERFQQGVRKRTLLAKKKVQNITKEDVKSYLFRNAFVLLTVTAVIVGTILGFTLRPYRMSYREVKYFSFPGELLMRMLQMLVLPLIISSLVTGMAALDSKASGKMGMRAVVYYMTTTIIAVVIGIIIVIIIHPGKGTKENMHREGKIVRVTAADAFLDLIRNMFPPNLVEACFKQFKTNYEKRSFKVPIQANETLVGAVINNVSEAMETLTRITEELVPVPGSVNGVNALGLVVFSMCFGFVIGNMKEQGQALREFFDSLNEAIMRLVAVIMWYAPVGILFLIAGKIVEMEDMGVIGGQLAMYTVTVIVGLLIHAVIVLPLLYFLVTRKNPWVFIGGLLQALITALGTSSSSATLPITFKCLEENNGVDKRVTRFVLPVGATINMDGTALYEALAAIFIAQVNNFELNFGQIITISITATAASIGAAGIPQAGLVTMVIVLTSVGLPTDDITLIIAVDWFLDRLRTTTNVLGDSLGAGIVEHLSRHELKNRDVEMGNSVIEENEMKKPYQLIAQDNETEKPIDSETKM

SEQ ID NO: 22122 - protein, 497 aa, Homo sapiens
MTKSNGEEPKMGGRMERFQQGVRKRTLLAKKKVQNITKEDVKSYLFRNAFVLLTVTAVIVGTILGFTLRPYRMSYREVKYFSFPGELLMRMLQMLVLPLIISSLVTGMAALDSKASGKMGMRAVVYYMTTTIIAVVIGIIIVIIIHPGKGTKENMHREGKIVRVTAADAFLDLIRNMFPPNLVEACFKQFKTNYEKRSFKVPIQANETLVGAVINNVSEAMETLTRITEELVPVPGSVNGVNALGLVVFSMCFGFVIGNMKEQGQALREFFDSLNEAIMRLVAVIMWYAPVGILFLIAGKIVEMEDMGVIGGQLAMYTVTVIVGLLIHAVIVLPLLYFLVTRKNPWVFIGGLLQALITALGTSSSSATLPITFKCLEENNGVDKRVTRFVLPVGATINMDGTALYEALAAIFIAQVNNFELNFGQIITIRDRLRTTTNVLGDSLGAGIVEHLSRHELKNRDVEMGNSVIEENEMKKPYQLIAQDNETEKPIDSETKM

SEQ ID NO: 22123 - protein, 1548 aa, Homo sapiens
MLRARPEALMLLGALLTGSLGPSGNQDALSLPWEVQRYDGWFNNLRHHERGAVGCRLQRRVPANYADGVYQALEEPQLPNPRRLSNAATRGIAGLPSLHNRTVLGVFFGYHVLSDVVSVETPGCPAEFLNIRIPPGDPVFDPDQRGDVVLPFQRSRWDPETGRSPSNPRDLANQVTGWLDGSAIYGSSHSWSDALRSFSGGQLASGPDPAFPRDSQNPLLMWAAPDPATGQNGPRGLYAFGAERGNREPFLQALGLLWFRYHNLWAQRLARQHPDWEDEELFQHARKRVIATYQNIAVYEWLPSFLQKTLPEYTGYRPFLDPSISPEFVVASEQFFSTMVPPGVYMRNASCHFRKVLNKGFQSSQALRVCNNYWIRENPNLNSTQEVNELLLGMASQISELEDNIVVEDLRDYWPGPGKFSRTDYVASSIQRGRDMGLPSYSQALLAFGLDIPRNWSDLNPNVDPQVLEATAALYNQDLSQLELLLGGLLESHGDPGPLFSAIVLDQFVRLRDGDRYWFENTRNGLFSKKEIEDIRNTTLRDVLVAVINIDPSALQPNVFVWHKGAPCPQPKQLTTDGLPQCAPLTVLDFFEGSSPGFAITIIALCCLPLVSLLLSGVVAYFRGREHKKLQKKLKESVKKEAAKDGVPAMEWPGPKERSSPIIIQLLSDRCLQVLNRHLTVLRVVQLQPLQQVNLILSNNRGCRTLLLKIPKEYDLVLLFSSEEERGAFVQQLWDFCVRWALGLHVAEMSEKELFRKAVTKQQRERILEIFFRHLFAQVLDINQADAGTLPLDSSQKVREALTCELSRAEFAESLGLKPQDMFVESMFSLADKDGNGYLSFREFLDILVVFMKGSPEDKSRLMFTMYDLDENGFLSKDEFFTMMRSFIEISNNCLSKAQLAEVVESMFRESGFQDKEELTWEDFHFMLRDHDSELRFTQLCVKGGGGGGNGIRDIFKQNISCRVSFITRTPGERSHPQGLGPPAPEAPELGGPGLKKRFGKKAAVPTPRLYTEALQEKMQRGFLAQKLQQYKRFVENYRRHIVCVAIFSAICVGVFADRAYYYGFASPPSDIAQTTLVGIILSRGTAASVSFMFSYILLTMCRNLITFLRETFLNRYVPFDAAVDFHRWIAMAAVVLAILHSAGHAVNVYIFSVSPLSLLACIFPNVFVNDGSKLPQKFYWWFFQTVPGMTGVLLLLVLAIMYVFASHHFRRRSFRGFWLTHHLYILLYALLIIHGSYALIQLPTFHIYFLVPAIIYGGDKLVSLSRKKVEISVVKAELLPSGVTYLQFQRPQGFEYKSGQWVRIACLALGTTEYHPFTLTSAPHEDTLSLHIRAVGPWTTRLREIYSSPKGNGCAGYPKLYLDGPFGEGHQEWHKFEVSVLVGGGIGVTPFASILKDLVFKSSLGSQMLCKKIYFIWVTRTQRQFEWLADIIQEVEENDHQDLVSVHIYVTQLAEKFDLRTTMLYICERHFQKVLNRSLFTGLRSITHFGRPPFEPFFNSLQEVHPQVRKIGVFSCGPPGMTKNVEKACQLVNRQDRAHFMHHYENF

SEQ ID NO: 22124 - protein, 907 aa, Homo sapiens
MATPDQKSPNVLLQNLCCRILGRSEADVAQQFQYAVRVIGSNFAPTVERDEFLVAEKIKKELIRQRREADAALFSELHRKLHSQGVLKNKWSILYLLLSLSEDPRRQPSKVSSYATLFAQALPRDAHSTPYYYARPQTLPLSYQDRSAQSAQSSGSVGSSGISSIGLCALSGPAPAPQSLLPGQSNQAPGVGDCLRQQLGSRLAWTLTANQPSSQATTSKGVPSAVSRNMTRSRREGDTGGTMEITEAALVRDILYVFQGIDGKNIKMNNTENCYKVEGKANLSRSLRDTAVRLSELGWLHNKIRRYTDQRSLDRSFGLVGQSFCAALHQELREYYRLLSVLHSQLQLEDDQGVNLGLESSLTLRRLLVWTYDPKIRLKTLAALVDHCQGRKGGELASAVHAYTKTGDPYMRSLVQHILSLVSHPVLSFLYRWIYDGELEDTYHEFFVASDPTVKTDRLWHDKYTLRKSMIPSFMTMDQSRKVLLIGKSINFLHQVCHDQTPTTKMIAVTKSAESPQDAADLFTDLENAFQGKIDAAYFETSKYLLDVLNKKYSLLDHMQAMRRYLLLGQGDFIRHLMDLLKPELVRPATTLYQHNLTGILETAVRATNAQFDSPEILRRLDVRLLEVSPGDTGWDVFSLDYHVDGPIATVFTRECMSHYLRVFNFLWRAKRMEYILTDIRKGHMCNAKLLRNMPEFSGVLHQCHILASEMVHFIHQMQYYITFEVLECSWDELWNKVQQAQDLDHIIAAHEVFLDTIISRCLLDSDSRALLNQLRAVFDQIIELQNAQDAIYRAALEELQRRLQFEEKKKQREIEGQWGVTAAEEEEENKRIGEFKESIPKMCSQLRILTHFYQGIVQQFLVLLTTSSDESLRFLSFRLDFNEHYKAREPRLRVSLGTRGRRSSHT

SEQ ID NO: 22125 - protein, 824 aa, Homo sapiens
MATPDQKSPNVLLQNLCCRILGRSEADVAQQFQYAVRVIGSNFAPTVERDEFLVAEKIKKELIRQRREADAALFSELHRKLHSQGVLKNKWSILYLLLSLSEDPRRQPSKVSSYATLFAQALPRDAHSTPYYYARPQTLPLSYQDRSAQSAQSSGSVGSSGISSIGLCALSGPAPAPQSLLPGQSNQAPGVGDCLRQQLGSRLAWTLTANQPSSQATTSKGVPSAVSRNMTRSRREGDTGGTMEITEAALVRDILYVFQGIDGKNIKMNNTENCYKVEGKANLSRSLRDTAVRLSELGWLHNKIRRYTDQRSLDRSFGLVGQSFCAALHQELREYYRLLSVLHSQLQLEDDQGVNLGLESSLTLRRLLVWTYDPKIRLKTLAALVDHCQGRKGGELASAVHAYTKTGDPYMRSLVQHILSLVSHPVLSFLYRWIYDGELEDTYHEFFVASDPTVKTDRLWHDKYTLRKSMIPSFMTMDQSRKVLLIGKSINFLHQVCHDQTPTTKMIAVTKSAESPQDAADLFTDLENAFQGKIDAAYFETSKYLLDVLNKKYSLLDHMQAMRRYLLLGQGDFIRHLMDLLKPELVRPATTLYQHNLTGILETAVRATNAQFDSPEILRRLDVRLLEVSPGDTGWDVFSLDYHVDGPIATVFTRECMSHYLRVFNFLWRAKRMEYILTDIRKGHMCNAKLLRNMPEFSGVLHQCHILASEMVHFIHQMQYYITFEVLECSWDELWNKVQQAQDLDHIIAAHEVFLDTIISRCLLDSDSRALLNQLRAVFDQIIELQNAQDAIYRAALEELQRRLQFEEKKKQREIEVEMCLYCV

SEQ ID NO: 22126 - protein, 434 aa, Homo sapiens
MATPDQKSPNVLLQNLCCRILGRSEADVAQQFQYAVRVIGSNFAPTVERDEFLVAEKIKKELIRQRREADAALFSELHRKLHSQGVLKNKWSILYLLLSLSEDPRRQPSKVSSYATLFAQALPRDAHSTPYYYARPQTLPLSYQDRSAQSAQSSGSVGSSGISSIGLCALSGPAPAPQSLLPGQSNQAPGVGDCLRQQLGSRLAWTLTANQPSSQATTSKGVPSAVSRNMTRSRREGDTGGTMEITEAALVRDILYVFQGIDGKNIKMNNTENCYKVEGKANLSRSLRDTAVRLSELGWLHNKIRRYTDQRSLDRSFGLVGQSFCAALHQELREYYRLLSVLHSQLQLEDDQGVNLGLESSLTLRRLLVWTYDPKIRLKTLAALVDHCQGPTRVFPTHVFPTRDFPTRDFPMHVFPTRVFPTRVWHSLCFRTRL

SEQ ID NO: 22127 - protein, 900 aa, Homo sapiens
MENYEALVGFDLCNTPLSSVAQKIMSAMHSGDLVDSKTWGKSTETMEVINKSSVKYSVQLEDRKTQSPEKKDLKSLRSQTSRGSAKLSPQSFSVRLTDQLSADQKQKSISSLTLSSCLIPQYNQEASVLQKKGHKRKHFLMENINNENKGSINLKRKHITYNNLSEKTSKQMALEEDTDDAEGYLNSGNSGALKKHFCDIRHLDDWAKSQLIEMLKQAAALVITVMYTDGSTQLGADQTPVSSVRGIVVLVKRQAEGGHGCPDAPACGPVLEGFVSDDPCIYIQIEHSAIWDQEQEAHQQFARNVLFQTMKCKCPVICFNAKDFVRIVLQFFGNDGSWKHVADFIGLDPRIAAWLIDPSDATPSFEDLVEKYCEKSITVKVNSTYGNSSRNIVNQNVRENLKTLYRLTMDLCSKLKDYGLWQLFRTLELPLIPILAVMESHAIQVNKEEMEKTSALLGARLKELEQEAHFVAGERFLITSNNQLREILFGKLKLHLLSQRNSLPRTGLQKYPSTSEAVLNALRDLHPLPKIILEYRQVHKIKSTFVDGLLACMKKGSISSTWNQTGTVTGRLSAKHPNIQGISKHPIQITTPKNFKGKEDKILTISPRAMFVSSKGHTFLAADFSQIELRILTHLSGDPELLKLFQESERDDVFSTLTSQWKDVPVEQVTHADREQTKKVVYAVVYGAGKERLAACLGVPIQEAAQFLESFLQKYKKIKDFARAAIAQCHQTGCVVSIMGRRRPLPRIHAHDQQLRAQAERQAVNFVVQGSAADLCKLAMIHVFTAVAASHTLTARLVAQIHDELLFEVEDPQIPECAALVRRTMESLEQVQALELQLQVPLKVSLSAGRSWGHLVPLQEAWGPPPGPCRTESPSNSLAAPGSPASTQPPPLHFSPSFCL

SEQ ID NO: 22128 - protein, 611 aa, Homo sapiens
MENYEALVGFDLCNTPLSSVAQKIMSAMHSGDLVDSKTWGKSTETMEVINKSSVKYSVQLEDRKTQSPEKKDLKSLRSQTSRGSAKLSPQSFSVRLTDQLSADQKQKSISSLTLSSCLIPQYNQEASVLQKKGHKRKHFLMENINNENKGSINLKRKHITYNNLSEKTSKQMALEEDTDDAEGYLNSGNSGALKKHFCDIRHLDDWAKSQLIEMLKQAAALVITVMYTDGSTQLGADQTPVSSVRGIVVLVKRQAEGGHGCPDAPACGPVLEGFVSDDPCIYIQIEHSAIWDQEQEAHQQFARNVLFQTMKCKCPVICFNAKDFVRIVLQFFGNDGSWKHVADFIGLDPRIAAWLIDPSDATPSFEDLVEKYCEKSITVKVNSTYGNSSRNIVNQNVRENLKTLYRLTMDLCSKLKDYGLWQLFRTLELPLIPILAVMESHAIQVNKEEMEKTSALLGARLKELEQEAHFVAGERFLITSNNQLREILFGKLKLHLLSQRNSLPRTGLQKYPSTSEAVLNALRDLHPLPKIILEYRQVHKIKSTFVDGLLACMKKGSISSTWNQTGTVTGRLSAKHPICARQVASDFQKCVEVSDAMMNSSIFWWLLKLYL

SEQ ID NO: 22129 - protein, 575 aa, Homo sapiens
MDPRGILKAFPKRQKIHADASSKVLAKIPRREEGEEAEEWLSSLRAHVVRTGIGRARAELFEKQIVQHGGQLCPAQGPGVTHIVVDEGMDYERALRLLRLPQLPPGAQLVKSAWLSLCLQERRLVDVAGFSIFIPSRYLDHPQPSKAEQDASIPPGTHEALLQTALSPPPPPTRPVSPPQKAKEAPNTQAQPISDDEASDGEETQVSAADLEALISGHYPTSLEGDCEPSPAPAVLDKWVCAQPSSQKATNHNLHITEKLEVLAKAYSVQGDKWRALGYAKAINALKSFHKPVTSYQEACSIPGIGKRMAEKIIEILESGHLRKLDHISESVPVLELFSNIWGAGTKTAQMWYQQGFRSLEDIRSQASLTTQQAIGLKHYSDFLERMPREEATEIEQTVQKAAQAFNSGLLCVACGSYRRGKATCGDVDVLITHPDGRSHRGIFSRLLDSLRQEGFLTDDLVSQEENGQQQKYLGVCRLPGPGRRHRRLDIIVVPYSEFACALLYFTGSAHFNRSMRALAKTKGMSLSEHALSTAVVRNTHGCKVGPGRVLPTPTEKDVFRLLGLPYREPAERDW

SEQ ID NO: 22130 - protein, 300 aa, Homo sapiens
MLMHHQKYLQRFLGGKREKKQKEACSIPGIGKRMAEKIIEILESGHLRKLDHISESVPVLELFSNIWGAGTKTAQMWYQQGFRSLEDIRSQASLTTQQAIGLKHYSDFLERMPREEATEIEQTVQKAAQAFNSGLLCVACGSYRRGKATCGDVDVLITHPDGRSHRGIFSRLLDSLRQEGFLTDDLVSQEENGQQQKYLGVCRLPGPGRRHRRLDIIVVPYSEFACALLYFTGSAHFNRSMRALAKTKGMSLSEHALSTAVVRNTHGCKVGPGRVLPTPTEKDVFRLLGLPYREPAERDW

SEQ ID NO: 22131 - protein, 179 aa, Homo sapiens
MMMSDNAKGRAAHSWKKRGSISSLSNHEFWRKEIHGRIKDSMSTVSYMEEPSQRDDISRLTVQMENTYQLGPPKHFPVVTVNHILKDVVTSYLQVEEYEPELCRQMTKTISEVIKAQVKDLMIPRYKLIVIVHIGQLNRQSILIGSRCLWDPKSDTFSSYVFRNSSLFALANVYAVYLE

SEQ ID NO: 22132 - protein, 898 aa, Homo sapiens
MWKRSEQMKIKSGKCNMAAAMETEQLGVEIFETADCEENIESQDRPKLEPFYVERYSWSQLKKLLADTRKYHGYMMAKAPHDFMFVKRNDPDGPHSDRIYYLAMSGENRENTLFYSEIPKTINRAAVLMLSWKPLLDLFQATLDYGMYSREEELLRERKRIGTVGIASYDYHQGSGTFLFQAGSGIYHVKDGGPQGFTQQPLRPNLVETSCPNIRMDPKLCPADPDWIAFIHSNDIWISNIVTREERRLTYVHNELANMEEDARSAGVATFVLQEEFDRYSGYWWCPKAETTPSGGKILRILYEENDESEVEIIHVTSPMLETRRADSFRYPKTGTANPKVTFKMSEIMIDAEGRIIDVIDKELIQPFEILFEGVEYIARAGWTPEGKYAWSILLDRSQTRLQIVLISPELFIPVEDDVMERQRLIESVPDSVTPLIIYEETTDIWINIHDIFHVFPQSHEEEIEFIFASECKTGFRHLYKITSILKESKYKRSSGGLPAPSDFKCPIKEEIAITSGEWEVLGRHGSNIQVDEVRRLVYFEGTKDSPLEHHLYVVSYVNPGEVTRLTDRGYSHSCCISQHCDFFISKYSNQKNPHCVSLYKLSSPEDDPTCKTKEFWATILDSAGPLPDYTPPEIFSFESTTGFTLYGMLYKPHDLQPGKKYPTVLFIYGGPQVQLVNNRFKGVKYFRLNTLASLGYVVVVIDNRGSCHRGLKFEGAFKYKMGQIEIDDQVEGLQYLASRYDFIDLDRVGIHGWSYGGYLSLMALMQRSDIFRVAIAGAPVTLWIFYDTGYTERYMGHPDQNEQGYYLGSVAMQAEKFPSEPNRLLLLHGFLDENVHFAHTSILLSFLVRAGKPYDLQIYPQERHSIRVPESGEHYELHLLHYLQENLGSRIAALKVI

SEQ ID NO: 22133 - protein, 847 aa, Homo sapiens
MWKRSEQMKIKSGKCNMAAAMETEQLGVEIFETADCEENIESQDRPKLEPFYVERYSWSQLKKLLADTRKYHGYMMAKAPHDFMFVKRNDPDGPHSDRIYYLAMSGENRENTLFYSEIPKTINRAAVLMLSWKPLLDLFQATLDYGMYSREEELLRERKRIGTVGIASYDYHQGSGTFLFQAGSGIYHVKDGGPQGFTQQPLRPNLVETSCPNIRMDPKLCPADPDWIAFIHSNDIWISNIVTREERRLTYVHNELANMEEDARSAGVATFVLQEEFDRYSGYWWCPKAETTPSGGKILRILYEENDESEVEIIHVTSPMLETRRADSFRYPKTGTANPKVTFKMSEIMIDAEGRIIDVIDKELIQPFEILFEGVEYIARAGWTPEGKYAWSILLDRSQTRLQIVLISPELFIPVEDDVMERQRLIESVPDSVTPLIIYEETTDIWINIHDIFHVFPQSHEEEIEFIFASECKTGFRHLYKITSILKESKYKRSSGGLPAPSDFKCPIKEEIAITSGEWEVLGRHGSNIQVDEVRRLVYFEGTKDSPLEHHLYVVSYVNPGEVTRLTDRGYSHSCCISQHCDFFISKYSNQKNPHCVSLYKLSSPEDDPTCKTKEFWATILDSAGPLPDYTPPEIFSFESTTGFTLYGMLYKPHDLQPGKKYPTVLFIYGGPQVQLVNNRFKGVKYFRLNTLASLGYVVVVIDNRGSCHRGLKFEGAFKYKMVAIAGAPVTLWIFYDTGYTERYMGHPDQNEQGYYLGSVAMQAEKFPSEPNRLLLLHGFLDENVHFAHTSILLSFLVRAGKPYDLQIYPQERHSIRVPESGEHYELHLLHYLQENLGSRIAALKVI

SEQ ID NO: 22134 - protein, 882 aa, Homo sapiens
MAAAMETEQLGVEIFETADCEENIESQDRPKLEPFYVERYSWSQLKKLLADTRKYHGYMMAKAPHDFMFVKRNDPDGPHSDRIYYLAMSGENRENTLFYSEIPKTINRAAVLMLSWKPLLDLFQATLDYGMYSREEELLRERKRIGTVGIASYDYHQGSGTFLFQAGSGIYHVKDGGPQGFTQQPLRPNLVETSCPNIRMDPKLCPADPDWIAFIHSNDIWISNIVTREERRLTYVHNELANMEEDARSAGVATFVLQEEFDRYSGYWWCPKAETTPSGGKILRILYEENDESEVEIIHVTSPMLETRRADSFRYPKTGTANPKVTFKMSEIMIDAEGRIIDVIDKELIQPFEILFEGVEYIARAGWTPEGKYAWSILLDRSQTRLQIVLISPELFIPVEDDVMERQRLIESVPDSVTPLIIYEETTDIWINIHDIFHVFPQSHEEEIEFIFASECKTGFRHLYKITSILKESKYKRSSGGLPAPSDFKCPIKEEIAITSGEWEVLGRHGSNIQVDEVRRLVYFEGTKDSPLEHHLYVVSYVNPGEVTRLTDRGYSHSCCISQHCDFFISKYSNQKNPHCVSLYKLSSPEDDPTCKTKEFWATILDSAGPLPDYTPPEIFSFESTTGFTLYGMLYKPHDLQPGKKYPTVLFIYGGPQVQLVNNRFKGVKYFRLNTLASLGYVVVVIDNRGSCHRGLKFEGAFKYKMGQIEIDDQVEGLQYLASRYDFIDLDRVGIHGWSYGGYLSLMALMQRSDIFRVAIAGAPVTLWIFYDTGYTERYMGHPDQNEQGYYLGSVAMQAEKFPSEPNRLLLLHGFLDENVHFAHTSILLSFLVRAGKPYDLQIYPQERHSIRVPESGEHYELHLLHYLQENLGSRIAALKVI

SEQ ID NO: 22135 - protein, 782 aa, Homo sapiens
MAAAMETEQLGVEIFETADCEENIESQDRPKLEPFYVERYSWSQLKKLLADTRKYHGYMMAKAPHDFMFVKRNDPDGPHSDRIYYLAMSGENRENTLFYSEIPKTINRAAVLMLSWKPLLDLFQATLDYGMYSREEELLRERKRIGTVGIASYDYHQGSGTFLFQAGSGIYHVKDGGPQGFTQQPLRPNLVETSCPNIRMDPKLCPADPDWIAFIHSNDIWISNIVTREERRLTYVHNELANMEEDARSAGVATFVLQEEFDRYSGYWWCPKAETTPSGGKILRILYEENDESEVEIIHVTSPMLETRRADSFRYPKTGTANPKVTFKMSEIMIDAEGRIIDVIDKELIQPFEILFEGVEYIARAGWTPEGKYAWSILLDRSQTRLQIVLISPELFIPVEDDVMERQRLIESVPDSVTPLIIYEETTDIWINIHDIFHVFPQSHEEEIEFIFASECKTGFRHLYKITSILKESKYKRSSGGLPAPSDFKCPIKEEIAITSGEWEVLGRHGSNIQVDEVRRLVYFEGTKDSPLEHHLYVVSYVNPGEVTRLTDRGYSHSCCISQHCDFFISKYSNQKNPHCVSLYKLSSPEDDPTCKTKEFWATILDSAGPLPDYTPPEIFSFESTTGFTLYGMLYKPHDLQPGKKYPTVLFIYGGPQVAIAGAPVTLWIFYDTGYTERYMGHPDQNEQGYYLGSVAMQAEKFPSEPNRLLLLHGFLDENVHFAHTSILLSFLVRAGKPYDLQIYPQERHSIRVPESGEHYELHLLHYLQENLGSRIAALKVI

SEQ ID NO: 22136 - protein, 849 aa, Homo sapiens
MWKRSEQMKIKSGKCNMAAAMETEQLGVEIFETADCEENIESQDRPKLEPFYVERYSWSQLKKLLADTRKYHGYMMAKAPHDFMFVKRNDPDGPHSDRIYYLAMSGENRENTLFYSEIPKTINRAAVLMLSWKPLLDLFQATLDYGMYSREEELLRERKRIGTVGIASYDYHQGSGTFLFQAGSGIYHVKDGGPQGFTQQPLRPNLVETSCPNIRMDPKLCPADPDWIAFIHSNDIWISNIVTREERRLTYVHNELANMEEDARSAGVATFVLQEEFDRYSGYWWCPKAETTPSGGKILRILYEENDESEVEIIHVTSPMLETRRADSFRYPKTGTANPKVTFKMSEIMIDAEGRIIDVIDKELIQPFEILFEGVEYIARAGWTPEGKYAWSILLDRSQTRLQIVLISPELFIPVEDDVMERQRLIESVPDSVTPLIIYEETTDIWINIHDIFHVFPQSHEEEIEFIFASECKTGFRHLYKITSILKESKYKRSSGGLPAPSDFKCPIKEEIAITSGEWEVLGRHGSNIQVDEVRRLVYFEGTKDSPLEHHLYVVSYVNPGEVTRLTDRGYSHSCCISQHCDFFISKYSNQKNPHCVSLYKLSSPEDDPTCKTKEFWATILDSAGPLPDYTPPEIFSFESTTGFTLYGMLYKPHDLQPGKKYPTVLFIYGGPQGQIEIDDQVEGLQYLASRYDFIDLDRVGIHGWSYGGYLSLMALMQRSDIFRVAIAGAPVTLWIFYDTGYTERYMGHPDQNEQGYYLGSVAMQAEKFPSEPNRLLLLHGFLDENVHFAHTSILLSFLVRAGKPYDLQIYPQERHSIRVPESGEHYELHLLHYLQENLGSRIAALKVI

SEQ ID NO: 22137 - protein, 725 aa, Homo sapiens
MWKRSEQMKIKSGKCNMAAAMETEQLGVEIFETADCEENIESQDRPKLEPFYVERYSWSQLKKLLADTRKYHGYMMAKAPHDFMFVKRNDPDGPHSDRIYYLAMSGENRENTLFYSEIPKTINRAAVLMLSWKPLLDLFQATLDYGMYSREEELLRERKRIGTVGIASYDYHQGSGTFLFQAGSGIYHVKDGGPQGFTQQPLRPNLVETSCPNIRMDPKLCPADPDWIAFIHSNDIWISNIVTREERRLTYVHNELANMEEDARSAGVATFVLQEEFDRYSGYWWCPKAETTPSGGKILRILYEENDESEVEIIHVTSPMLETRRADSFRYPKTGTANPKVTFKMSEIMIDAEGRIIVDEVRRLVYFEGTKDSPLEHHLYVVSYVNPGEVTRLTDRGYSHSCCISQHCDFFISKYSNQKNPHCVSLYKLSSPEDDPTCKTKEFWATILDSAGPLPDYTPPEIFSFESTTGFTLYGMLYKPHDLQPGKKYPTVLFIYGGPQVQLVNNRFKGVKYFRLNTLASLGYVVVVIDNRGSCHRGLKFEGAFKYKMGQIEIDDQVEGLQYLASRYDFIDLDRVGIHGWSYGGYLSLMALMQRSDIFRVAIAGAPVTLWIFYDTGYTERYMGHPDQNEQGYYLGSVAMQAEKFPSEPNRLLLLHGFLDENVHFAHTSILLSFLVRAGKPYDLQIYPQERHSIRVPESGEHYELHLLHYLQENLGSRIAALKVI

SEQ ID NO: 22138 - protein, 477 aa, Homo sapiens
MLPPGSNGTAYPGQFALYQQLAQGNAVGGSAGAPPLGPSQVVTACLLTLLIIWTLLGNVLVCAAIVRSRHLRANMTNVFIVSLAVSDLFVALLVMPWKAVAEVAGYWPFGAFCDVWVAFDIMCSTASILNLCVISVDRYWAISRPFRYKRKMTQRMALVMVGLAWTLSILISFIPVQLNWHRDQAASWGGLDLPNNLANWTPWEEDFWEPDVNAENCDSSLNRTYAISSSLISFYIPVAIMIVTYTRIYRIAQVQIRRISSLERAAEHAQSCRSSAACAPDTSLRASIKKETKVLKTLSVIMGVFVCCWLPFFILNCMVPFCSGHPEGPPAGFPCVSETTFDVFVWFGWANSSLNPVIYAFNADFQKVFAQLLGCSHFCSRTPVETVNISNELISYNQDIVFHKEIAAAYIHMMPNAVTPGNREVDNDEEEGPFDRMFQIYQTSPDGDPVAESVWELDCEGEISLDKITPFTPNGFH

SEQ ID NO: 22139 - protein, 664 aa, Homo sapiens
MPAVDKLLLEEALQDSPQTRSLLSVFEEDAGTLTDYTNQLLQAMQRVYGAQNEMCLATQQLSKQLLAYEKQNFALGKGDEEVISTLHYFSKVVDELNLLHTELAKQLADTMVLPIIQFREKDLTEVSTLKDLFGLASNEHDLSMAKYSRLPKKKENEKVKTEVGKEVAAARRKQHLSSLQYYCALNALQYRKQMAMMEPMIGFAHGQINFFKKGAEMFSKRMDSFLSSVADMVQSIQVELEAEAEKMRVSQQELLSVDESVYTPDSDVAAPQINRNLIQKAGYLNLRNKTGLVTTTWERLYFFTQGGNLMCQPRGAVAGGLIQDLDNCSVMAVDCEDRRYCFQITTPNGKSGIILQAESRKENEEWICAINNISRQIYLTDNPEAVAIKLNQTALQAVTPITSFGKKQESSCPSQNLKNSEMENENDKIVPKATASLPEAEELIAPGTPIQFDIVLPATEFLDQNRGSRRTNPFGETEDESFPEAEDSLLQQMFIVRFLGSMAVKTDSTTEVIYEAMRQVLAARAIHNIFRMTESHLMVTSQSLRLIDPQTQVSRANFELTSVTQFAAHQENKRLVGFVIRVPESTGEESLSTYIFESNSEGEKICYAINLGKEIIEVQKDPEALAQLMLSIPLTNDGKYVLLNDQPDDDDGNPNEHRGAESEA

SEQ ID NO: 22140 - protein, 621 aa, Homo sapiens
MQRVYGAQNEMCLATQQLSKQLLAYEKQNFALGKGDEEVISTLHYFSKVVDELNLLHTELAKQLADTMVLPIIQFREKDLTEVSTLKDLFGLASNEHDLSMAKYSRLPKKKENEKVKTEVGKEVAAARRKQHLSSLQYYCALNALQYRKQMAMMEPMIGFAHGQINFFKKGAEMFSKRMDSFLSSVADMVQSIQVELEAEAEKMRVSQQELLSVDESVYTPDSDVAAPQINRNLIQKAGYLNLRNKTGLVTTTWERLYFFTQGGNLMCQPRGAVAGGLIQDLDNCSVMAVDCEDRRYCFQITTPNGKSGIILQAESRKENEEWICAINNISRQIYLTDNPEAVAIKLNQTALQAVTPITSFGKKQESSCPSQNLKNSEMENENDKIVPKATASLPEAEELIAPGTPIQFDIVLPATEFLDQNRGSRRTNPFGETEDESFPEAEDSLLQQMFIVRFLGSMAVKTDSTTEVIYEAMRQVLAARAIHNIFRMTESHLMVTSQSLRLIDPQTQVSRANFELTSVTQFAAHQENKRLVGFVIRVPESTGEESLSTYIFESNSEGEKICYAINLGKEIIEVQKDPEALAQLMLSIPLTNDGKYVLLNDQPDDDDGNPNEHRGAESEA

SEQ ID NO: 22141 - protein, 670 aa, Homo sapiens
MPAVDKLLLEEALQDSPQTRSLLSVFEEDAGTLTDYTNQLLQAMQRVYGAQNEMCLATQQLSKQLLAYEKQNFALGKGDEEVISTLHYFSKVVDELNLLHTELAKQLADTMVLPIIQFREKDLTEVSTLKDLFGLASNDVCLFLEHDLSMAKYSRLPKKKENEKVKTEVGKEVAAARRKQHLSSLQYYCALNALQYRKQMAMMEPMIGFAHGQINFFKKGAEMFSKRMDSFLSSVADMVQSIQVELEAEAEKMRVSQQELLSVDESVYTPDSDVAAPQINRNLIQKAGYLNLRNKTGLVTTTWERLYFFTQGGNLMCQPRGAVAGGLIQDLDNCSVMAVDCEDRRYCFQITTPNGKSGIILQAESRKENEEWICAINNISRQIYLTDNPEAVAIKLNQTALQAVTPITSFGKKQESSCPSQNLKNSEMENENDKIVPKATASLPEAEELIAPGTPIQFDIVLPATEFLDQNRGSRRTNPFGETEDESFPEAEDSLLQQMFIVRFLGSMAVKTDSTTEVIYEAMRQVLAARAIHNIFRMTESHLMVTSQSLRLIDPQTQVSRANFELTSVTQFAAHQENKRLVGFVIRVPESTGEESLSTYIFESNSEGEKICYAINLGKEIIEVQKDPEALAQLMLSIPLTNDGKYVLLNDQPDDDDGNPNEHRGAESEA

SEQ ID NO: 22142 - protein, 546 aa, Homo sapiens
MAAGSTTLRAVGKLQVRLATKTEPKKLEKYLQKLSALPMTADILAETGIRKTVKRLRKHQHVGDFARDLAARWKKLVLVDRNTGPDPQDPEESASRQRFGEALQEREKAWGFPENATAPRSPSHSPEHRRTARRTPPGQQRPHPRSPSREPRAERKRPRMAPADSGPHRDPPTRTAPLPMPEGPEPAVPGEQPGRGHAHAAQGGPLLGQGCQGQPQGEAVGSHSKGHKSSRGASAQKSPPVQESQSERLQAAGADSAGPKTVPSHVFSELWDPSEAWMQANYDLLSAFEAMTSQANPEALCAPALQEEAAFPGRRVNAKMPVYSGSRPACQLQVPTLRQQCLRVPRNNPDALGDVEGVPYSVLEPVLEGWTPDQLYRTEKDNAALARETDELWRIHCLQDFKEEKPQEHESWRELYLRLRDAREQRLRVVTTKIRSARENKPSGRQTKMICFNSVAKTPYDASRRQEKSAGAADPGNGEMEPAPKPAGSSQAPSGLGDGDGGSVSGGGSSNRHAAPADKTRKQAAKKVAPLMAKAIRDYKGRFSRR

SEQ ID NO: 22143 - protein, 161 aa, Homo sapiens
MAEPTGLLEMSELPGDSSVPQVGTASGVSDVLRGAVGGGVRVQEAREGPVAEAARSMARMPGPVPGPIPSSVPGLASAPDPHQQLAFLEINRQLLFREYLDGSSMIPVRLLRDFEERRRLFVEGCKAREAAFDADPPQMDFAAVAFTVALTASEALSPLAD

SEQ ID NO: 22144 - protein, 392 aa, Homo sapiens
MITLITEQLQKQTLDELKCTRFSISLPLPDHADISNCGNSFQLVSEGASWRGLPHCSCAEFQDSLNFSYHPSGLSLHLRPPSRGNSPKEQPFSQVLRPEPPDPEKLPVPPAPPSKRHCRSLSVPVDLSRWQPVWRPAPSKLWTPIKHRGSGGGGGPQVPHQSPPKRVSSLRFLQAPSASSQCAPAHRPYSPPFFSLALAQDSSRPCAASPQSGSWESDAESLSPCPPQRRFSLSPSLGPQASRFLPSARSSPASSPELPWRPRGLRNLPRSRSQPCDLDARKTGVKRRHEEDPRRLRPSLDFDKMNQKPYSGGLCLQETAREGSSISPPWFMACSPPPLSASCSPTGGSSQVLSESEEEEEGAVRWGRQALSKRTLCQRDFGDLDLNLIEEN

SEQ ID NO: 22145 - protein, 423 aa, Homo sapiens
MLPWKKHKFELLAEAPPRQASKPKGYAVSLHYSALSSLARACPEGALSRVGSMFRSKRKKLHITSEDPTYTVLYLGNATTIQARGDGCTDLAVGKIWSKSEAGRQGTKMKLTVSAQGIRMVHAEERALRRPGHLYLLHRVTYCVADARLPKVFAWVYRHELKHKAVMLRCHAVLVSKPEKAQAMALLLYQTSANALAEFKRLKRRDDARHQQQELVGAHTIPLVPLRKLLLHGPCCYKPPVERSRSAPKLGSITEDLLGEQLEQELQEEEEEEQPEGCPEEEENRAAEGDPAEEEAEAQRALVVAMHFECGDLLDTLENGRGEALGGGGGSLGPGAGPPPLLLGSASDMKAELSQLISDLGELSFGNDVRTLQADLRVTRLLSGDSTGSESSIEGGGPDATSATAGDSSRQADGASADEPHSG

SEQ ID NO: 22146 - protein, 5088 aa, Homo sapiens
MSGHTLPPLPVPGTNSTEQASVPRAMAATLGAGTPPRPQARSIAGVYVEASGQAQSVYAAMEQGLLPAGLGQALLEAQAATGGLVDLARGQLLPVSKALQQGLVGLELKEKLLAAERATTGYPDPYGGEKLALFQAIGKEVVDRALGQSWLEVQLATGGLVDPAQGVLVAPEPACHQGLLDRETWHKLSELEPGTGDLRFLDPNTLERLTYHQLLERCVRAPGSGLALLPLKITFRSMGGAVSAAELLEVGILDEQAVQGLREGRLAAVDVSARAEVRRYLEGTGSVAGVVLLPEGHKKSFFQAATEHLLPMGTALPLLEAQAATHTLVDPITGQRLWVDEAVRAGLVSPELHEQLLVAEQAVTGHHDPFSGSQIPLFQAMKKGLVDRPLALRLLDAQLATGGLVCPARRLRLPLEAALRCGCLDEDTQRQLSQAGSFSDGTHGGLRYEQLLALCVTDPETGLAFLPLSGGPRGGEPQGPPFIKYSTRQALSTATATVSVGKFRGRPVSLWELLFSEAISSEQRAMLAQQYQEGTLSVEKLAAKLSATLEQAAATARVTFSGLRDTVTPGELLKAEIIDQDLYERLEHGQATAKDVGSLASVQRYLQGTGCIAGLLLPGSQERLSIYEARCKGLLRPGTALILLEAQAATGFIIDPKANKGHSVEEALRAAVIGPDVFAKLLSAERAVTGYTDPYTGQQISLFQAMQKGLIVREHGIRLLEAQIATGGVIDPVHSHRVPVDVAYRRGYFDQMLNLILLDPSDDTKGFFDPNTHENLTYLQLLERCVRDPETGLYLLPLSSTQSPLVDSATQQAFQNLLLSVKYGRFQGQRVSAWELINSEYFSEGRRRQLLRRYRQREVTLGQVAKLLEAETQRQADIMLPALRSRVTVHQLLEAGIIDQQLLDQVLAGTISPEALLLMDGVRRYLCGLGAVGGVRLLPSGQRLSLYQAMRQKLLGPRVALALLEAQAATGTIMDPHSPESLSVDEAVRRGVVGPELYGRLKRAEGAIAGFRDPFSGKQVSVFQAMKKGLIPWEQAARLLEAQVATGGIIDPTSHHHLPMPVAIQRGYVDQEMETALSSSSETFPTPDGQGRTSYAQLLEECPRDETSGLHLLPLPESAPALPTEEQVQRSLQAVPGAKDGTSLWDLLSSCHFTEEQRRGLLEDVQEGRTTVPQLLASVQRWVQETKLLAQARVMVPGPRGEVPAVWLLDAGIITQETLEALAQGTQSPAQVAEQPAVKACLWGTGCVAGVLLQPSGAKASIAQAVRDGLLPTGLGQRLLEAQVASGFLVDPLNNQRLSVEDAVKVGLVGRELSEQLGQAERAAAGYPDPYSRASLSLWQAMEKGLVPQNEGLPLLQVQLATGGVVDPVHGVHLPQAAACRLGLLDTQTSQVLTAVDKDNKFFFDPSARDQVTYQQLRERCVCDSETGLLLLPLPSDTVLEVDDHTAVALRAMKVPVSTGRFKGCSVSLWDLLLSEYVGADKRRELVALCRSGRAAALRQVVSAVTTLVEAAERQPLQATFRGLRKQVSARDLFRAQLISRKTLDELSQGTTTVKEVAEMDSVKRSLEGGNFIAGVLIQGTQERMSIPEALRRHILRPGTALVLLEAQAATGFIIDPVENRKLTVEEAFKAGMFGKETYVKLLSAERAVTGYTDPYTGQQISLFQAMQKDLIVREHGIRLLEAQIATGGIIDPVHSHRVPVDVAYRCGYFDEEMNRILADPSDDTKGFFDPNTHENLTYLQLLERCVEDPETGLYLLQIIKKGENYVYINEATRHVLQSRTAKMRVGRFADQVVSFWDLLSSPYFTEDRKRELIQEYGAQSGGLEKLLEIITTTIEETETQNQGIKVAAIRGEVTAADLFNSRVIDQKTLHTLRVGRTGGQALSTLECVKPYLEGSGCIAGVTVPSTREVMSLHEASRKELIPAAFATWLLEAQAATGFLLDPCTRQKLSVDEAVDVGLVNEELRERLLKAERAATGYRDPATGDTIPLFQAMQKQLIEKAEALRLLEVQVATGGVIDPQHHHRLPLETAYRRGCLHKDIYALISDQKHMRKRFVDPNTQEKVSYRELQERCRPQEDTGWLLFPVNKAARDSEHIDDETRRALEAEQVEITVGRFRGQKPTLWALLNSEYVTEEKKLQLVRMYRTHTRRALQTVAQLILELIEKQETSNKHLWFQGIRRQITASELLSSAIITEEMLQDLETGRSTTQELMEDDRVKRYLEGTSCIAGVLVPAKDQPGRQEKMSIYQAMWKGVLRPGTALVLLEAQAATGFVIDPVRNLRLSVEEAVAAGVVGGEIQEKLLSAERAVTGYTDPYTGQQISLFQAMQKDLIVREHGIRLLEAQIATGGVIDPVHSHRVPVDVAYRRGYFDEEMNRVLADPSDDTKGFFDPNTHENLTYVQLLRRCVPDPDTGLYMLQLAGRGSAVHQLSEELRCALRDARVTPGSGALQGQSVSVWELLFYREVSEDRRQDLLSRYRAGTLTVEELGATLTSLLAQAQAQARAEAEAGSPRPDPREALRAATMEVKVGRLRGRAVPVWDVLASGYVSRAAREELLAEFGSGTLDLPALTRRLTAIIEEAEEAPGARPQLQDAWRGPREPGPAGRGDGDSGRSQREGQGEGETQEAAAAAAAAAARRQEQTLRDATMEVQRGQFQGRPVSVWDVLFSSYLSEARRDELLAQHAAGALGLPDLVAVLTRVIEETEERLSKVSFRGLRRQVSASELHTSGILGPETLRDLAQGTKTLQEVTEMDSVKRYLEGTSCIAGVLVPAKDQPGRQEKMSIYQAMWKGVLRPGTALVLLEAQAATGFVIDPVRNLRLSVEEAVAAGVVGGEIQEKLLSAERAVTGYTDPYTGQQISLFQAMQKDLIVREHGIRLLEAQIATGGVIDPVHSHRVPVDVAYQRGYFDEEMNRVLADPSDDTKGFFDPNTHENLTYVQLLRRCVPDPDTGLYMLQLAGRGSAVHQLSEELRCALRDARVTPGSGALQGQSVSVWELLFYREVSEDRRQDLLSRYRAGTLTVEELGATLTSLLAQAQAQARAEAEAGSPRPDPREALRAATMEVKVGRLRGRAVPVWDVLASGYVSRAAREELLAEFGSGTLDLPALTRRLTAIIEEAEEAPGARPQLQDAWRGPREPGPAGRGDGDSGRSQREGQGEGETQEAAAAARRQEQTLRDATMEVQRGQFQGRPVSVWDVLFSSYLSEARRDELLAQHAAGALGLPDLVAVLTRVIEETEERLSKVSFRGLRCQVSASELHTSGILGPETLRDLAQGTKTLQEVTEMDSVKRYLEGTSCIAGVLVPAKDQPGRQEKMSIYQAMWKGVLRPGTALVLLEAQAATGFVIDPVRNLRLSVEEAVAAGVVGGEIQEKLLSAERAVTGYTDPYTGQQISLFQAMQKDLIVREHGIRLLEAQIATGGVIDPVHSHRVPVDVAYRRGYFDEEMNRVLADPSDDTKGFFDPNTHENLTYVQLLRRCVPDPDTGLYMLQLAGRGSAVHQLSEELRCALRDARVTPGSGALQGQSVSVWELLFYREVSEDRRQDLLSRYRAGTLTVEELGATLTSLLAQAQAQARAEAEAGSPRPDPREALRAATMEVKVGRLRGRAVPVWDVLASGYVSRAAREELLAEFGSGTLDLPALTRRLTAIIEEAEEAPGARPQLQDAWRGPREPGPAGRGDGDSGRSQREGQGEGETQEAAAATAAARRQEQTLRDATMEVQRGQFQGRPVSVWDVLFSSYLSEARRDELLAQHAAGALGLPDLVAVLTRVIEETEERLSKVSFRGLRRQVSASELHTSGILGPETLRDLAQGTKTLQEVTEMDSVKRYLEGTSCIAGVLVPAKDQPGRQEKMSIYQAMWKGVLRPGTALVLLEAQAATGFVIDPVRNLRLSVEEAVAAGVVGGEIQEKLLSAERAVTGYTDPYTGQQISLFQAMQKDLIVREHGIRLLEAQIATGGVIDPVHSHRVPVDVAYRRGYFDEEMNRVLADPSDDTKGFFDPNTHENLTYVQLLRRCVPDPDTGLYMLQLAGRGSAVHQLSEELRCALRDARVTPGSGALQGQSVSVWELLFYREVSEDRRQDLLSRYRAGTLTVEELGATLTSLLAQAQAQARAEAEAGSPRPDPREALRAATMEVKVGRLRGRAVPVWDVLASGYVSRAAREELLAEFGSGTLDLPALTRRLTAIIEEAEEAPGARPQLQDAWRGPREPGPAGRGDGDSGRSQREGQGEGETQEAAAATAAARRQEQTLRDATMEVQRGQFQGRPVSVWDVLFSSYLSEARRDELLAQHAAGALGLPDLVAVLTRVIEETEERLSKVSFRGLRRQVSASELHTSGILGPETLRDLAQGTKTLQEVTEMDSVKRYLEGTSCIAGVLVPAKDQPGHQEKMSIYQAMWKGVLRPGTALVLLEAQAATGFVIDPVRNLRLSVEEAVAAGVVGGEIQEKLLSAERAVTGYTDPYTGQQISLFQAMQKDLIVREHGIRLLEAQIATGGVIDPVHSHRVPVDVAYRRGYFDEEMNRVLAHPSDDTKGFFDPNTHENLTYVQLLRRCVPDPDTGLYMLQLAGRGSAVHQLSEELRCALRDARVMPGSGALQGQSVSVWELLFYREVSEDRRQDLLSRYRAGTLTVEELGATLTSLLAQAQAQARAEAEAEAGSPRPDPREALRAATMEVKVGRLRGRAVPVWDVLASGYVSGAAREELLAEFGSGTLDLPALTRRLTAIIEEAEEAPGARPQLQDAWRGPREPGPAGRGDGDSGRSQREGQGEGETQEAAAAARRQEQTLRDATMEVQRGQFQGRPVSVWDVLFSSYLSEAHRDELLAQHAAGALGLPDLVAVLTRVIEETEERLSKVSFRGLRRQVSASELHTSGILGPETLRDLAQGTKTLQEVTEMDSVKRYLEGTSCIAGVLVPAKDQPGRQEKMSIYQAMWKGVLRPGTALVLLEAQAATGFVIDPVRNLRLSVEEAVAAGVVGGEIQEKLLSAERAVTGYTDPYTGQQISLFQAMQKDLIVREHGIRLLEAQIATGGVIDPVHSHRVPVDVAYRRGYFDEEMNRVLADPSDDTKGFFDPNTHENLTYLQLLQRATLDPETGLLFLSLSLQ

SEQ ID NO: 22147 - protein, 639 aa, Homo sapiens
MEDSQDLNEQSVKKTCTESDVSQSQNSRSMEMQDLASPHTLVGGGDTPGSSKLEKSNLSSTSVTTNGTGGENMTVLNTADWLLSCNTPSSATMSLLAVKTEPLNSSETTATTGDGALDTFTGSVITSSGYSPRSAHQYSPQLYPSKPYPHILSTPAAQTMSAYAGQTQYSGMQQPAVYTAYSQTGQPYSLPTYDLGVMLPAIKTESGLSQTQSPLQSGCLSYSPGFSTPQPGQTPYSYQMPGSSFAPSSTIYANNSVSNSTNFSGSQQDYPSYTAFGQNQYAQYYSASTYGAYMTSNNTADGTPSSTSTYQLQESLPGLTNQPGEFDTMQSPSTPIKDLDERTCRSSGSKSRGRGRKNNPSPPPDSDLERVFVWDLDETIIVFHSLLTGSYAQKYGKDPPMAVTLGLRMEEMIFNLADTHLFFNDLEECDQVHIDDVSSDDNGQDLSTYSFATDGFHAAASSANLCLPTGVRGGVDWMRKLAFRYRRVKELYNTYKNNVGGLLGPAKRDAWLQLRAEIEGLTDSWLTNALKSLSIISTRSNCINVLVTTTQLIPALAKVLLYSLGGAFPIENIYSATKIGKESCFERIMQRFGRKVVYVVIGDGVEEEQAAKKHNMPFWRISSHSDLLALHQALELEYL

SEQ ID NO: 22148 - protein, 616 aa, Homo sapiens
MEDSQDLNEQSVKKTCTESDVSQSQNSRSMEMQDLASPHTLVGGGDTPGSSKLEKSNLSSTSVTTNGTGVSLLAVKTEPLNSSETTATTGDGALDTFTGSVITSSGYSPRSAHQYSPQLYPSKPYPHILSTPAAQTMSAYAGQTQYSGMQQPAVYTAYSQTGQPYSLPTYDLGVMLPAIKTESGLSQTQSPLQSGCLSYSPGFSTPQPGQTPYSYQMPGSSFAPSSTIYANNSVSNSTNFSGSQQDYPSYTAFGQNQYAQYYSASTYGAYMTSNNTADGTPSSTSTYQLQESLPGLTNQPGEFDTMQSPSTPIKDLDERTCRSSGSKSRGRGRKNNPSPPPDSDLERVFVWDLDETIIVFHSLLTGSYAQKYGKDPPMAVTLGLRMEEMIFNLADTHLFFNDLEECDQVHIDDVSSDDNGQDLSTYSFATDGFHAAASSANLCLPTGVRGGVDWMRKLAFRYRRVKELYNTYKNNVGGLLGPAKRDAWLQLRAEIEGLTDSWLTNALKSLSIISTRSNCINVLVTTTQLIPALAKVLLYSLGGAFPIENIYSATKIGKESCFERIMQRFGRKVVYVVIGDGVEEEQAAKKHNMPFWRISSHSDLLALHQALELEYL

SEQ ID NO: 22149 - protein, 452 aa, Homo sapiens
MEDSQDLNEQSVKKTCTESDVSQSQNSRSMEMQDLASPHTLVGGGDTPGSSKLEKSNLSSTSVTTNGTGGENMTVLNTADWLLSCNTPSSATMSLLAVKTEPLNSSETTATTGDGALDTFTGSVITSSGYSPRSAHQYSPQLYPSKPYPHILSTPAAQTMSAYAGQTQYSGMQQPAVYTAYSQTGQPYSLPTYDLGVMLPAIKTESGLSQTQSPLQSGCLSYSPGFSTPQPGQTPYSYQMPGSSFAPSSTIYANNSVSNSTNFSGSQQDYPSYTAFGQNQYAQYYSASTYGAYMTSNNTADGTPSSTSTYQLQESLPGLTNQPGEFDTMQSPSTPIKDLDERTCRSSGSKSRGRGRKNNPSPPPDSDLERVFVWDLDETIIVFHSLLTGSYAQKYGKDPPMAVTLGLRMEEMIFNLADTHLFFNDLEECDQVHIDDVSSDDNGQDLRCKRRG

SEQ ID NO: 22150 - protein, 639 aa, Homo sapiens
MEDSQDLNEQSVKKTCTESDVSQSQNSRSMEMQDLASPHTLVGGGDTPGSSKLEKSNLSSTSVTTNGTGGENMTVLNTADWLLSCNTPSSATMSLLAVKTEPLNSSETTATTGDGALDTFTGSVITSSGYSPRSAHQYSPQLYPSKPYPHILSTPAAQTMSAYAGQTQYSGMQQPAVYTAYSQTGQPYSLPTYDLGVMLPAIKTESGLSQTQSPLQSGCLSYSPGFSTPQPGQTPYSYQMPGSSFAPSSTIYANNSVSNSTNFSGSQQDYPSYTAFGQNQYAQYYSASTYGAYMTSNNTADGTPSSTSTYQLQESLPGLTNQPGEFDTMQSPSTPIKDLDERTCRSSGSKSRGRGRKNNPSPPPDSDLERVFVWDLDETIIVFHSLLTGSYAQKYGKDPPMAVTLGLRMEEMIFNLADTHLFFNDLEECDQVHIDDVSSDDNGQDLSTYSFATDGFHAAASSANLCLPTGVRGGVDWMRKLAFRYRRVKELYNTYKNNVGGLLGPAKRDAWLQLRAEIEGLTDSWLTNALKSLSIISTRSNCINVLVTTTQLIPALAKVLLYSLGGAFPIENIYSATKIGKESCFERIVSRFGTNITYVVIGDGRDEEHAANQHNMPFWRISSHSDLLALHQALELEYL

SEQ ID NO: 22151 - protein, 585 aa, Homo sapiens
MEDSQDLNEQSVKKTCTESDVSQSQNSRSMEMQDLASPHTLVGGGDTPGSSKLEKSNLSSTSVTTNGTGVITSSGYSPRSAHQYSPQLYPSKPYPHILSTPAAQTMSAYAGQTQYSGMQQPAVYTAYSQTGQPYSLPTYDLGVMLPAIKTESGLSQTQSPLQSGCLSYSPGFSTPQPGQTPYSYQMPGSSFAPSSTIYANNSVSNSTNFSGSQQDYPSYTAFGQNQYAQYYSASTYGAYMTSNNTADGTPSSTSTYQLQESLPGLTNQPGEFDTMQSPSTPIKDLDERTCRSSGSKSRGRGRKNNPSPPPDSDLERVFVWDLDETIIVFHSLLTGSYAQKYGKDPPMAVTLGLRMEEMIFNLADTHLFFNDLEECDQVHIDDVSSDDNGQDLSTYSFATDGFHAAASSANLCLPTGVRGGVDWMRKLAFRYRRVKELYNTYKNNVGGLLGPAKRDAWLQLRAEIEGLTDSWLTNALKSLSIISTRSNCINVLVTTTQLIPALAKVLLYSLGGAFPIENIYSATKIGKESCFERIVSRFGTNITYVVIGDGRDEEHAANQHNMPFWRISSHSDLLALHQALELEYL

SEQ ID NO: 22152 - protein, 998 aa, Homo sapiens
MARARPPPPPSPPPGLLPLLPPLLLLPLLLLPAGCRALEETLMDTKWVTSELAWTSHPESGWEEVSGYDEAMNPIRTYQVCNVRESSQNNWLRTGFIWRRDVQRVYVELKFTVRDCNSIPNIPGSCKETFNLFYYEADSDVASASSPFWMENPYVKVDTIAPDESFSRLDAGRVNTKVRSFGPLSKAGFYLAFQDQGACMSLISVRAFYKKCASTTAGFALFPETLTGAEPTSLVIAPGTCIPNAVEVSVPLKLYCNGDGEWMVPVGACTCATGHEPAAKESQCRPCPPGSYKAKQGEGPCLPCPPNSRTTSPAASICTCHNNFYRADSDSADSACTTVPSPPRGVISNVNETSLILEWSEPRDLGGRDDLLYNVICKKCHGAGGASACSRCDDNVEFVPRQLGLTERRVHISHLLAHTRYTFEVQAVNGVSGKSPLPPRYAAVNITTNQAAPSEVPTLRLHSSSGSSLTLSWAPPERPNGVILDYEMKYFEKSEGIASTVTSQMNSVQLDGLRPDARYVVQVRARTVAGYGQYSRPAEFETTSERGSGAQQLQEQLPLIVGSATAGLVFVVAVVVIAIVCLRKQRHGSDSEYTEKLQQYIAPGMKVYIDPFTYEDPNEAVREFAKEIDVSCVKIEEVIGAGEFGEVCRGRLKQPGRREVFVAIKTLKVGYTERQRRDFLSEASIMGQFDHPNIIRLEGVVTKSRPVMILTEFMENCALDSFLRLNDGQFTVIQLVGMLRGIAAGMKYLSEMNYVHRDLAARNILVNSNLVCKVSDFGLSRFLEDDPSDPTYTSSLGGKIPIRWTAPEAIAYRKFTSASDVWSYGIVMWEVMSYGERPYWDMSNQDVINAVEQDYRLPPPMDCPTALHQLMLDCWVRDRNLRPKFSQIVNTLDKLIRNAASLKVIASAQSGMSQPLLDRTVPDYTTFTTVGDWLDAIKMGRYKESFVSAGFASFDLVAQMTAEDLLRIGVTLAGHQKKILSSIQDMRLQMNQTLPVQV

SEQ ID NO: 22153 - protein, 152 aa, Homo sapiens
MQEMVRELWMWNVEEEEHEVGICTWGGQHCGCPAKSLPGPHPGGVSAPQSASQLMVKLLVWQKSVHKLRKVSATSSIAVYPCPGQSSGGAESPAPGPGLAGWSHLCGAALAEVQAAPVSQAAVSDASLGPEWSQEGCRPGLTSGQHGGRDGR

SEQ ID NO: 22154 - protein, 80 aa, Homo sapiens
MQEMVRELWMWNVEEEEHEVGICTWGGQHCGCPAKSLPGPHPGGVSAPQSASQLMVKLLVWQKSVHKLRKNRNAYSCGPL

SEQ ID NO: 22155 - protein, 2351 aa, Homo sapiens
MFFKMKNEIDNDPESEKCIKDSTIMRREPQNILSPLMLPNLEIPFSVKDIISRIERAQLHRAREDIDMQLSEIMNNVHRIMTRYTLVFNSSSERNVSLTEHKKKQRTNFLEKMATYAKTIEIREKTLANILAWLEEWNDVLSEMTLMDVDEHHHWIAQMELLPDTLKAIENNVKILSRFSTSFLDEKKKQKKKILSRGTLWKSWKERVIKRPSTARALRPDQMISDQLATNTKVSEIQGMLQELIGTTMFSTLENNAIKYISSTIVNLSTALSMLNDELKCVNFQSSTVYAHETSEAEKELSLKIIRDLSNENEMLQQKLQDAEEKCEQLIRSKIVIEQLYAKLSTSSTLKVLPGPSPQSSRAIIKVGDTEDNMDNILDKELENIVDEVQRKETKDSGIKWDSTISYTAQAERTPDLTELRQQPVASEDISEDSTKDNVSLKKGDFYQEDETDEYQSWKRSHKKATYVYETSGPNLSDNKSGQKVSEAKPSQYYELQVLKKKRKEMKSFSEDKSKSPTEAKRKHLSLTETKSQGGKSGTSMMMLEQFRKVKRESPFDKRPTAAEIKVEPTTESLDKEGKGEIRSLVEPLSMIQFDDTAEPQKGKIKGKKHHISSGTITSKEEKTEEKEELTKQVKSHQLVKSLSRVAKETSESTRVLESPDGKSEQSNLEEFQEAIMAFLKQKIDNIGKAFDKKTVPKEEELLKRAEAEKLGIIKAKMEEYFQKVAETVTKILRKYKDTKKEEQVGEKPIKQKKVVSFMPGLHFQKSPISAKSESSTLLSYESTDPVINNLIQMILAEIESERDIPTVSTVQKDHKEKEKQRQEQYLQEGQEQMSGMSLKQQLLGERNLLKEHYEKISENWEEKKAWLQMKEGKQEQQSQKQWQEEEMWKEEQKQATPKQAEQEEKQKQRGQEEEELPKSSLQRLEEGTQKMKTQGLLLEKENGQMRQIQKEAKHLGPHRRREKGKEKQKPERGLEDLERQIKTKDQMQMKETQPKELEKMVIQTPMTLSPRWKSVLKDVQRSYEGKEFQRNLKTLENLPDEKEPISITPPPSLQYSLPGALPISGQPLTKCIHLTPQQAQEVGITLTPQQAQAQGITLTLQQAQELGIPLTPQQAQALEILFTPQQAQALGIPLTPQQTQVQGITLTPQQDQAPGISLTTQQAQKLGIPLTPQQAQALGIPLTPQQAQELGIPLTPQQAQALRVSLTPQQAQELGIPLTPQQAQALGITLTLQQAQQLGIPLTPQQAQALGITLTPKQVQELGIPLTPQQAQALGITLTPKQAQELGIPLNPQQAQTLGIPLTPKQAQALGIPFTPQQAQALGIPLTPQQAQTQEITLTPQQAQALGMPLTTQQAQELGIPLTPQHAQALGMPLTTQQAQELGIPLTPQQAQALGMPLTTQQAQELGIPLTPQQAQELGIPFTPQQAQAQEITLTPQQAQALGMPLTAQQAQELGITLTPQQAQELGIPLTPQQAQALGIPLIPPQAQELGIPLTPQQAQALGILLIPPQAQELGIPLTPQQAQALGIPLIPPQAQELGIPLTPQQVQALGIPLIPPQAQELEIPLTPQQAQALGIPLTPQQAQELGIPLTPQQAQELGIPLTPQQAQAQGIPLTPQQAQALGISLTPQQAQAQGITLTPQQAQALGVPITPVNAWVSAVTLTSEQTHALESPMNLEQAQEQLLKLGVPLTLDKAHTLGSPLTLKQVQWSHRPFQKSKASLPTGQSIISRLSPSLRLSLASSAPTAEKSSIFGVSSTPLQISRVPLNQGPFAPGKPLEMGILSEPGKLGAPQTLRSSGQTLVYGGQSTSAQFPAPQAPPSPGQLPISRAPPTPGQPFIAGVPPTSGQIPSLWAPLSPGQPLVPEASSIPGDLLESGPLTFSEQLQEFQPPATAEQSPYLQAPSTPGQHLATWTLPGRASSLWIPPTSRHPPTLWPSPAPGKPQKSWSPSVAKKRLAIISSLKSKSVLIHPSAPDFKVAQVPFTTKKFQMSEVSDTSEETQILRDTFAIESFRTFQSHFTKYRTPVYQTPYTDERALLTLMKPTTSPSSLTTLLRTSQISPLEWYQKSRFPPIDKPWILSSVSDTKKPKVMVPPSSPQELEEKRYFVDVEAQKKNLILLNQAIKTCGLPSQLHTMARTLIIEILHMDTVQLGYLFRKYIAYRLIQHARNNIMKRLKAIQNTGKGYEARNLHMMLSRLDDYGKKVMQVWTEKQKSLGQKRNQCLKKMIHVFNQLKKIHELNLSQPIPLIIEEKQIPASTTFVQKPFLKLLMEEDRTSDICKKFRQQEDQTEAIWNVDLSTSSYPIAEKTSMHSLWAQLGGYPDIPRLLQLEVQSTFRKSLASLQSRVKKIPK

SEQ ID NO: 22156 - protein, 589 aa, Homo sapiens
MSQRVRRNGSPTPAGSLGGGAVATAGGPGSRLQPMRATVPFQLKQQQQQQHGSPTRSGGGGGGNNNGGCCGGASGPAGGGGGGGPRTASRSTSPTRGGGNAAARTSPTVATQTGASATSTRGTSPTRSAAPGARGSPPRPPPPPPLLGTVSSPSSSPTHLWTGEVSAAPPPARVRHRRRSPEQSRSSPEKRSPSAPVCKAGDKTRQPSSSPSSIIRRTSSLDTLAAPYLAGHWPRDSHGQAAPCMRDKATQTESAWAEEYSEKKKGSHKRSASWGSTDQLKEIAKLRQQLQRSKHSSRHHRDKERQSPFHGNHAAINQCQAPVPKSALIPVIPITKSTGSRFRNSVEGLNQEIEIIIKETGEKEEQLIPQDIPDGHRAPPPLVQRSSSTRSIDTQTPGGADRGSNNSSRSQSVSPTSFLTISNEGSEESPCSADDLLVDPRDKENGNNSPLPKYATSPKPNNSYMFKREPPEGCERVKVFEECSPKQLHEIPAFYCPDKNKVNFIPKSGSAFCLVSILKPLLPTPDLTLKGSGHSLTVTTGMTTTLLQPIAVASLSTNTEQDRVSRGTSTVMPSASLLPPPEPIEEAEG

SEQ ID NO: 22157 - protein, 289 aa, Homo sapiens
MSQRVRRNGSPTPAGSLGGGAVATAGGPGSRLQPMRATVPFQLKQQQQQQHGSPTRSGGGGGGNNNGGCCGGASGPAGGGGGGGPRTASRSTSPTRGGGNAAARTSPTVATQTGASATSTRGTSPTRSAAPGARGSPPRPPPPPPLLGTVSSPSSSPTHLWTGEVSAAPPPARVRHRRRSPEQSRSSPEKRSPSAPVCKAGDKTRQPSSSPSSIIRRTSSLDTLAAPYLAGHWPRDSHGQAAPCMRDKATQTESAWAEEYSEKKKGSHKRSASWGSTDQLKEVRKMVLR

SEQ ID NO: 22158 - protein, 419 aa, Homo sapiens
MSFIPVAEDSDFPIHNLPYGVFSTRGDPRPRIGVAIGDQILDLSIIKHLFTGPVLSKHQDVFNQPTLNSFMGLGQAAWKEARVFLQNLLSVSQARLRDDTELRKCAFISQASATMHLPATIGDYTDFYSSRQHATNVGIMFRDKENALMPNWLHLPVGYHGRASSVVVSGTPIRRPMGQMKPDDSKPPVYGACKLLDMELEMAFFVGPGNRLGEPIPISKAHEHIFGMVLMNDWSARDIQKWEYVPLGPFLGKSFGTTVSPWVVPMDALMPFAVPNPKQDPRPLPYLCHDEPYTFDINLSVNLKGEGMSQAATICKSNFKYMYWTMLQQLTHHSVNGCNLRPGDLLASGTISGPEPENFGSMLELSWKGTKPIDLGNGQTRKFLLDGDEVIITGYCQGDGYRIGFGQCAGKVLPALLPS

SEQ ID NO: 22159 - protein, 349 aa, Homo sapiens
MGLGQAAWKEARVFLQNLLSVSQARLRDDTELRKCAFISQASATMHLPATIGDYTDFYSSRQHATNVGIMFRDKENALMPNWLHLPVGYHGRASSVVVSGTPIRRPMGQMKPDDSKPPVYGACKLLDMELEMAFFVGPGNRLGEPIPISKAHEHIFGMVLMNDWSARDIQKWEYVPLGPFLGKSFGTTVSPWVVPMDALMPFAVPNPKQDPRPLPYLCHDEPYTFDINLSVNLKGEGMSQAATICKSNFKYMYWTMLQQLTHHSVNGCNLRPGDLLASGTISGPEPENFGSMLELSWKGTKPIDLGNGQTRKFLLDGDEVIITGYCQGDGYRIGFGQCAGKVLPALLPS

SEQ ID NO: 22160 - protein, 773 aa, Homo sapiens
MKAAVLDLGSLLAKLFETSTAPPAGPSSRPSGGAAAAGSGGSRAGTPLGTAPTLLRALAPDSPSASRRSPAPLLSSPYSRGSAASRAAGAVGTLLSWPSSPRAGKAPPQPPTPSGGGCSPARLVVPARPPSGPGGVWAALPRNPLQPGPGERELGACVAPGAGPRTLFLTLPDIGEEGASDGDSGDGEARGLSEGRRRHGFTVRSKDSLPTHFTRNVQKAIDKYTCKSLSSFSSSGSHTPTGAHTSWSGSATQSSTTGSSTERGSVYSWRDDEFDEASSQSVQRLLWEVEEMLFEGKVNPQTQSLLAECGEWTRRSLHLRVLGRQLILPTDKGVQHFQGSTPASAVHRPPLSACGHSSNIRELCISGSQIVPAALSASALPGPDDTGVADLTARSSLEEEVYHVDGKIEEYFAFDRKEDDDECLEQKPAQPGRKWRKLGLPPVSPRDCVKDAVAAEVFDHVWTNMVELLEELIRKHWETTLTEGKKQRETLKVAGNRFPHVLVPHAHADGASGPPSGHAEAHGISLASRLNPPQIHHFSSSFYSDMNGVMTIQAKPLQRRPAYFADRTQNEKEDKASGGGAGALSSAPHRLGRASDTHGLSPSAKKTPVPWRLPSLASDSQRLKTPNIYSDEVLRGTKLPTGVDHMASPLVQTSRSRFPPLVTETRGQNTAVPGCRLVSYRGRHLQNRVLSAMPDGTERSRLRERTATLERLSRPSTTHTFRQSDTPRKSSLTQMEFAAHTWTGQSILTGSQYVPKSFQRTTLTFKRRFQVTS

SEQ ID NO: 22161 - protein, 482 aa, Homo sapiens
MLFEGKVNPQTQSLLAECGEWTRRSLHLRVLGRQLILPTDKGVQHFQGSTPASAVHRPPLSACGHSSNIRELCISGSQIVPAALSASALPGPDDTGVADLTARSSLEEEVYHVDGKIEEYFAFDRKEDDDECLEQKPAQPGRKWRKLGLPPVSPRDCVKDAVAAEVFDHVWTNMVELLEELIRKHWETTLTEGKKQRETLKVAGNRFPHVLVPHAHADGASGPPSGHAEAHGISLASRLNPPQIHHFSSSFYSDMNGVMTIQAKPLQRRPAYFADRTQNEKEDKASGGGAGALSSAPHRLGRASDTHGLSPSAKKTPVPWRLPSLASDSQRLKTPNIYSDEVLRGTKLPTGVDHMASPLVQTSRSRFPPLVTETRGQNTAVPGCRLVSYRGRHLQNRVLSAMPDGTERSRLRERTATLERLSRPSTTHTFRQSDTPRKSSLTQMEFAAHTWTGQSILTGSQYVPKSFQRTTLTFKRRFQVTS

SEQ ID NO: 22162 - protein, 772 aa, Homo sapiens
MKAAVLDLGSLLAKLFETSTAPPAGPSSRPSGGAAAAGSGGSRAGTPLGTAPTLLRALAPDSPSASRRSPAPLLSSPYSRGSAASRAAGAVGTLLSWPSSPRAGKAPPQPPTPSGGGCSPARLVVPARPPSGPGGVWAALPRNPLQPGPGERELGACVAPGAGPRTLFLTLPDIGEEGASDGDSGDGEARGLSEGRRRHGFTVRSKDSLPTHFTRNVQKAIDKYTCKSLSSFSSSGSHTPTGAHTSWSGSATQSSTTGSSTERGSVYSWRDDEFDEASSQSVQRLLWEVEEMLFEGKVNPQTQSLLAECGEWTRRSLHLRVLGRQLILPTDKGVQHFQGSTPASAVHRPPLSACGHSSNIRELCISGSQIVPAALSASALPGPDDTGVADLTARSSLEEEVYHVDGKIEEYFAFDRKEDDDECLEQKPAQPGRKWRKLGLPPVSPRDCVKDAVAAEVFDHVWTNMVELLEELIRKHWETTLTEGKKQRETLKVAGNRFPHVLVPHAHADGASGPPSGHAEAHGISLASRLNPPQIHHFSSSFYSDMNGVMTIQAKPLQRRPAYFADRTQNEKEDKASGGGAGALSSAPHRLGRASDTHGLSPSAKKTPVPWRLPSLASDSQRLKTPNIYSDEVLRGTKLPTGVDHMASPLVQTSRSRFPPLVTETRGQNTAVPGCRLVSYRGRHLQNRVLSAMPDGTERSRLRERTATLERLSRPSTTHTFRSDTPRKSSLTQMEFAAHTWTGQSILTGSQYVPKSFQRTTLTFKRRFQVTS

SEQ ID NO: 22163 - protein, 764 aa, Homo sapiens
MKAAVLDLGSLLAKLFETSTAPPAGPSSRPSGGAAAAGSGGSRAGTPLGTAPTLLRALAPDSPSASRRSPAPLLSSPYSRGSAASRAAGAVGTLLSWPSSPRAGKAPPQPPTPSGGGCSPARLVVPARPPSGPGGVWAALPRNPLQPGPGERELGACVAPGAGPRTLFLTLPDIGEEGASDGDSGDGEARGLSEGRRRHGFTVRSKDSLPTHFTRNVQKAIDKYTCGSHTPTGAHTSWSGSATQSSTTGSSTERGSVYSWRDDEFDEASSQSVQRLLWEVEEMLFEGKVNPQTQSLLAECGEWTRRSLHLRVLGRQLILPTDKGVQHFQGSTPASAVHRPPLSACGHSSNIRELCISGSQIVPAALSASALPGPDDTGVADLTARSSLEEEVYHVDGKIEEYFAFDRKEDDDECLEQKPAQPGRKWRKLGLPPVSPRDCVKDAVAAEVFDHVWTNMVELLEELIRKHWETTLTEGKKQRETLKVAGNRFPHVLVPHAHADGASGPPSGHAEAHGISLASRLNPPQIHHFSSSFYSDMNGVMTIQAKPLQRRPAYFADRTQNEKEDKASGGGAGALSSAPHRLGRASDTHGLSPSAKKTPVPWRLPSLASDSQRLKTPNIYSDEVLRGTKLPTGVDHMASPLVQTSRSRFPPLVTETRGQNTAVPGCRLVSYRGRHLQNRVLSAMPDGTERSRLRERTATLERLSRPSTTHTFRQSDTPRKSSLTQMEFAAHTWTGQSILTGSQYVPKSFQRTTLTFKRRFQVTS

SEQ ID NO: 22164 - protein, 104 aa, Homo sapiens
MGRSPCFFKSFKGKLHKDRSPDPSTLASPHPSTEARRPVEAGSAEWTWGWMKRLPPASLSPGIAMSCYSGDSMLQKYKVKNAYRLHWQGREEPGASTFASLVFQ

SEQ ID NO: 22165 - protein, 532 aa, Homo sapiens
MAPSFTARIQLFLLRALGFLIGLVGRAALVLGGPKFASKTPRPVTEPLLLLSGMQLAKLIRQRKVKCIDVVQAYINRIKDVNPMINGIVKYRFEEAMKEAHAVDQKLAEKQEDEATLENKWPFLGVPLTVKEAFQLQGMPNSSGLMNRRDAIAKTDATVVALLKGAGAIPLGITNCSELCMWYESSNKIYGRSNNPYDLQHIVGGSSGGEGCTLAAACSVIGVGSDIGGSIRMPAFFNGIFGHKPSPGVVPNKGQFPLAVGAQELFLCTGPMCRYAEDLAPMLKVMAGPGIKRLKLDTKVHLKDLKFYWMEHDGGSFLMSKVDQDLIMTQKKVVVHLETILGASVQHVKLKKMKYSFQLWIAMMSAKGHDGKEPVKFVDLLGDHGKHVSPLWELIKWCLGLSVYTIPSIGLALLEEKLRYSNEKYQKFKAVEESLRKELVDMLGDDGVFLYPSHPTVAPKHHVPLTRPFNFAYTGVFSALGLPVTQCPLGLNAKGLPLGIQVVAGPFNDHLTLAVAQYLEKTFGGWVCPGKF

SEQ ID NO: 22166 - protein, 464 aa, Homo sapiens
MMARRDPTSWAKRLVRAQTLQKQRRAPVGPRAPPPDEEDPRLKCKNCGAFGHTARSTRCPMKCWKAALVPATLGKKEGKENLKPWKPRVEANPGPLNKDKGEKEERPRQQDPQRKALLHMFSGKPPEKPLPNGKGSTEPSDYLRVASGPMPVHTTSKRPRVDPVLADGSATEMSDRGSVLASLSPLRKASLSSSSSLGPKERQTGAAADMPQPAVRHQGREPLLVVKPTHSRPEGGCREVPQAASKTHGLLQAARPQAQDKRPAVTSQPCPPAATHSLGLGSNLSFGPGAKRPAQAPIQACLNFPKKPRLGPFQIPESAIQGGELGAPENLQPPPAATELGPSTSPQMGRRTPAQVPSVDRQPPHSRPCLPTAQACTMSHHPAASHDGAQPLRVLFRRLENGRWSSSLLAAPSFHSPEKPGAFLAQSPHVSEKSEAPCVRVPPSVLYEDLQVSSSSEDSDSDLE

SEQ ID NO: 22167 - protein, 159 aa, Homo sapiens
MWRELRGCPGGDVETAQRLSRRRRGKSSEAVPEKTWRAQRMSQTRESSEAVPEKTWREFRGCPGEDVERAQKLRDCPGEDMETAQTLSARRRAESSEAVPEKTWRELKGCPQEDVERVQRLSLLLHLAVFLWIIIAINFSNSGVKSQSSTYLPSGKILK

SEQ ID NO: 22168 - protein, 418 aa, Homo sapiens
MAPTQGPRAPLEFGGPLGAAALLLLLPATMFHLLLAARSGPARLLGPPASLPGLEVLWSPRALLLWLAWLGLQAALYLLPARKVAEGQELKDKSRLRYPINGFQALVLTALLVGLGMSAGLPLGALPEMLLPLAFVATLTAFIFSLFLYMKAQVAPVSALAPGGNSGNPIYDFFLGRELNPRICFFDFKYFCELRPGLIGWVLINLALLMKEAELRGSPSLAMWLVNGFQLLYVGDALWHEEAVLTTMDITHDGFGFMLAFGDMAWVPFTYSLQAQFLLHHPQPLGLPMASVICLINATGYYIFRGANSQKNTFRKNPSDPRVAGLETISTATGRKLLVSGWWGMVRHPNYLGDLIMALAWSLPCGVSHLLPYFYLLYFTALLVHREARDERQCLQKYGLAWQEYCRRVPYRIMPYIY

SEQ ID NO: 22169 - protein, 391 aa, Homo sapiens
MAPTQGPRAPLEFGGPLGAAALLLLLPATMFHLLLAARSGPARLLGPPASLPGLEVLWSPRALLLWLAWLGLQAALYLLPARKVAEGQELKDKSRLRYPINGFQALVLTALLVGLGMSAGLPLGALPEMLLPLAFVATLTAFIFSLFLYMKAQVAPVSALAPGGNSGNPIYDFFLGRELNPRICFFDFKYFCELRPGLIGWVLINLALLMKEAELRGSPSLAMWLVNGFQLLYVGDALWHEEAVLTTMDITHDGFGFMLAFGDMAWVPFTYSLQAQFLLHHPQPLGLPMASVICLINGLETISTATGRKLLVSGWWGMVRHPNYLGDLIMALAWSLPCGVSHLLPYFYLLYFTALLVHREARDERQCLQKYGLAWQEYCRRVPYRIMPYIY

SEQ ID NO: 22170 - protein, 838 aa, Homo sapiens
MNIDVEFHIRHNYPWNKLPANVRQSLGNSQREYEKQVVLYSIRNQLRYRNNLVKHVKKDERRYYEELLKYSRDHLMLYPYHLSDIMVKGLRITPFSYYTGIMEDIMNSEKSYDSLPNFTAADCLRLLGIGRNQYIDLMNQCRSSKKFFRRKTARDLLPIKPVEIAIEAWWVVQAGYITEDDIKICTLPEKCAVDKIIDSGPQLSGSLDYNVVHSLYNKGFIYLDVPISDDSCIAVPPLEGFVMNRVQGDYFETLLYKIFVSIDEHTNVAELANVLEIDLSLVKNAVSMYCRLGFAHKKGQVINLDQLHSSWKNVPSVNRLKSTLDPQKMLLSWDGGESRSPVQEASSATDTDTNSQEDPADTASVSSLSLSTGHTKRIAFLFDSTLTAFLMMGNLSPNLKSHAVTMFEVGKLSDESLDSFLIELEKVQSTGEGEAQRYFDHALTLRNTILFLRHNKDLVAQTAQPDQPNYGFPLDLLRCESLLGLDPATCSRVLNKNYTLLVSMAPLTNEIRPVSSCTPQHIGPAIPEVSSVWFKLYIYHVTGQGPPSLLLSKGTRLRKLPDIFQSYDRLLITSWGHDPGVVPTSNVLTMLNDALTHSAVLIQGHGLHGIGETVHVPFPFDETELQGEFTRVNMGVHKALQILRNRVDLQHLCGYVTMLNASSQLADRKLSDASDERGEPDLASGSDVNGSTESFEMVIEEATIDSATKQTSGATTEADWVPLELCFGIPLFSSELNRKVCRKIAAHGLCRKESLQNLLHSSRKLSLQVLNFVHSFQEGASILDIHTEPSFSSLLSQSSCADMGVPLPAKNLIFKDGVLSEWSGRSPSSLLIANLHLQ

SEQ ID NO: 22171 - protein, 158 aa, Homo sapiens
MKFGCLSFRQPYAGFVLNGIKTVETRWRPLLSSQRNCTIAVHIAHRDWEGDAWRELLVERLGMTPAQIQALLRKGEKFGRGVIAGLVDIGETLQCPEDLTPDEVVELENQAVLTNLKQKYLTVISNPRWLLEPIPRKGGKDVFQVDIPEHLIPLGHEV

SEQ ID NO: 22172 - protein, 146 aa, Homo sapiens
MKFGCLSFRQPYAGFVLNGIKTVETRWRPLLSSQRNCTIAVHIAHRDWEGDAWRELLVERLGMTPAQIQALLRKGEKFGRGVIAGLVDIGETLQCPEDLTPDEVVELENQAVLTNLKQKYLTVISNPRWLLEPIPRKGGKDVFQNP

SEQ ID NO: 22173 - protein, 464 aa, Homo sapiens
MMARRDPKPGAKRLVRAQTLQKQRRAPVGPRAPPPDEEDPRLKCKNCEAFGHTARSTRCPMKCWKAALVPPNFGEKEGKENLKPWKPQVEANPGPLNKDKGEKEERPRPQDPQRKALLHIFSRKPPEKPLPNQKGSTESSDYLRVASGPMPVHTTSKRPRVDPVLSDRSATEMSDRGSVLASLSPLRKASLSSSSSLGPKERQTGAAADIPQTAVRHQGPEPLLVVKPTHSSPAGGCREVPQAASKTHGLLQAVSPQAQDKRPAVTSQPCPPAATHSLGLGSNLSFGPGAKRSAPAPIQACLNFPKKPRLGPFQIPESAIQGGELGAPENLQPPPAATELGPRTSPQTGTRTPAQVLSGDRQPPHSRPCLPTAQACTMSHHPAASHDGAQPLRVLFRRLENGRWSSSLLTAPSFHSPEKPGAFLAQSPHVSEKSEGPCVRVPPSVLYEDLQVPSSSEDSDSDLE

SEQ ID NO: 22174 - protein, 464 aa, Homo sapiens
MMARRDPKSWAKRLVRAQTLQKQRRAPVGPRAPPPDEEDPRLKCKNCGAFGHTARSTRCPMKCWKAALVPATLGKKEGKENLKPWKPRAEANPGPLNKDKGEKEERPRQQDPQRKALLHMFSGKPPEKPLPNGKGSTESSDYLRVASGPMPVHTSSKRPRLDPILADRSATAMSGRGSVLASLSPLRKASLSSSSSLGPKERQTGAAADMPQPAVRHEGREPLLVVKPTHSRPEGGCREVPQAASKTHGLPQAARPQAQDKRPAVTSLPCPPAATHSLGLGSNLSFGPGAKRPAQAPIQACLNFPKKPRLGPFQIPESAIQGGELGAPENLQPPPAATELGPSTSPQMGRRTPAQVPSVDRQPPHSRPCLPTAQACTMSHHSAASHDGAQPLRVLFRRLENGRWSSSLLAAPSFHSPEKPGAFLAQSPHVSEKSEAPCVRVPPSVLYEDLQVSSSSEDSDSDLE

SEQ ID NO: 22175 - protein, 130 aa, Homo sapiens
MELWRQLNQAGLVPPGLGPPPQALREVSPVEIPGQTLRTAGADTGGACDSLLWIREELGNLRRVDVQLLGQLCSLGLEMGALREELVTILEEEEESSKEEEEDQEPQRKQEEEHLEACPAPHPPDFEMMI

SEQ ID NO: 22176 - protein, 604 aa, Homo sapiens
MLGMNMLLITLFLLLPLSMLKGEPWEGCLHCTHTTWSGNIMTKTLLYHTYYECAGTCLGTCTHNQTTYSVCDPGRGQPYVCYDPKSSPGTWFEIHVGSKEGDLLNQTKVFPSGKDVVSLYFDVCQIVSMGSLFPVIFSSMEYYSSCHKNRYAHPACSTDSPVTTCWDCTTWSTNQQSLGPIMLTKIPLEPDCKTSTCNSVNLTILEPDQPIWTTGLKAPLGARVSGEEIGPGAYVYLYIIKKTRTRSTQQFRVFESFYEHVNQKLPEPPPLASNLFAQLAENIASSLHVASCYVCGGMNMGDQWPWEARELMPQDNFTLTASSLEPAPSSQSIWFLKTSIIGKFCIARWGKAFTDPVGELTCLGQQYYNETLGKTLWRGKSNNSESPHPSPFSRFPSLNHSWYQLEAPNTWQAPSGLYWICGPQAYRQLPAKWSGACVLGTIRPSFFLMPLKQGEALGYPIYDETKRKSKRGITIGDWKDNEWPPERIIQYYGPATWAEDGMWGYRTPVYMLNRIIRLQAVLEIITNETAGALNLLAQQATKMRNVIYQNRLALDYLLAQEEGVCGKFNLTNCCLELDDEGKVIKEITAKIQKLAHIPVQTWKG

SEQ ID NO: 22177 - protein, 314 aa, Homo sapiens
MAPPQVLAFGLLLAAATATFAAAQEECVCENYKLAVNCFVNNNRQCQCTSVGAQNTVICSKLAAKCLVMKAEMNGSKLGRRAKPEGALQNNDGLYDPDCDESGLFKAKQCNGTSMCWCVNTAGVRRTDKDTEITCSERVRTYWIIIELKHKAREKPYDSKSLRTALQKEITTRYQLDPKFITSILYENNVITIDLVQNSSQKTQNDVDIADVAYYFEKDVKGESLFHSKKMDLTVNGEQLDLDPGQTLIYYVDEKAPEFSMQGLKAGVIAVIVVVVIAVVAGIVVLVISRKKRMAKYEKAEIKEMGEMHRELNA

SEQ ID NO: 22178 - protein, 147 aa, Homo sapiens
MTSSLKIWGILLALLCILCRLCVYSNNIYWREFIKLHYLSPSREFKEYKCDVLMREKEALKGKSFHMFIYSLWFKIQRACINEKGSDRYRNAYVWAPGALKVLECHWEKYNNRYTESRSFSYIEFHCGVDGYVDNIEDLRIIEPISN

SEQ ID NO: 22179 - protein, 346 aa, Homo sapiens
MDTGPDQSYFSGNHWFVFSVYLLTFLVGLPLNLLALVVFVGKLQRRPVAVDVLLLNLTASDLLLLLFLPFRMVEAANGMHWPLPFILCPLSGFIFFTTIYLTALFLAAVSIERFLSVAHPLWYKTRPRLGQAGLVSVACWLLASAHCSVVYVIEFSGDISHSQGTNGTCYLEFRKDQLAILLPVRLEMAVVLFVVPLIITSYCYSRLVWILGRGGSHRRQRRVAGLLAATLLNFLVCFGPYNVSHVVGYICGESPAWRIYVTLLSTLNSCVDPFVYYFSSSGFQADFHELLRRLCGLWGQWQQESSMELKEQKGGEEQRADRPAERKTSEHSQGCGTGGQVACAES

SEQ ID NO: 22180 - protein, 374 aa, Homo sapiens
MWFLTTLLLWVPVDGQVDTTKAVITLQPPWVSVFQEETVTLHCEVLHLPGSSSTQWFLNGTATQTSTPSYRITSASVNDSGEYRCQRGLSGRSDPIQLEIHRGWLLLQVSSRVFTEGEPLALRCHAWKDKLVYNVLYYRNGKAFKFFHWNSNLTILKTNISHNGTYHCSGMGKHRYTSAGISVTVKELFPAPVLNASVTSPLLEGNLVTLSCETKLLLQRPGLQLYFSFYMGSKTLRGRNTSSEYQILTARREDSGLYWCEAATEDGNVLKRSPELELQVLGLQLPTPVWFHVLFYLAVGIMFLVNTVLWVTIRKELKRKKKWDLEISLDSGHEKKVISSLQEDRHLEEELKCQEQKEEQLQEGVHRKEPQGAT

SEQ ID NO: 22181 - protein, 344 aa, Homo sapiens
MWFLTTLLLWVPVDGQVDTTKAVITLQPPWVSVFQEETVTLHCEVLHLPGSSSTQWFLNGTATQTSTPSYRITSASVNDSGEYRCQRGLSGRSDPIQLEIHRGWLLLQVSSRVFTEGEPLALRCHAWKDKLVYNVLYYRNGKAFKFFHWNSNLTILKTNISHNGTYHCSGMGKHRYTSAGISVTVKELFPAPVLNASVTSPLLEGNLVTLSCETKLLLQRPGLQLYFSFYMGSKTLRGRNTSSEYQILTARREDSGLYWCEAATEDGNVLKRSPELELQVLGLQLPTPVWFHVLFYLAVGIMFLVNTVLWVTIRKELKRKKKWDLEISLDSGGQALEAPTQGCA

SEQ ID NO: 22182 - protein, 1722 aa, Homo sapiens
MGNQDGKLKRSAGDALHEGGGGAEDALGPRDVEATKKGSGGKKALGKHGKGGGGGGGGGESGKKKSKSDSRASVFSNLRIRKNLSKGKGAGGSREDVLDSQALQTGELDSAHSLLTKTPDLSLSADEAGLSDTECADPFEVTGPGGPGPAEARVGGRPIAEDVETAAGAQDGQRTSSGSDTDIYSFHSATEQEDLLSDIQQAIRLQQQQQQQLQLQLQQQQQQQQLQGAEEPAAPPTAVSPQPGAFLGLDRFLLGPSGGAGEAPGSPDTEQALSALSDLPESLAAEPREPQQPPSPGGLPVSEAPSLPAAQPAAKDSPSSTAFPFPEAGPGEEAAGAPVRGAGDTDEEGEEDAFEDAPRGSPGEEWAPEVGEDAPQRLGEEPEEEAQGPDAPAAASLPGSPAPSQRCFKPYPLITPCYIKTTTRQLSSPNHSPSQSPNQSPRIKRRPEPSLSRGSRTALASVAAPAKKHRADGGLAAGLSRSADWTEELGARTPRVGGSAHLLERGVASDSGGGVSPALAAKASGAPAAADGFQNVFTGRTLLEKLFSQQENGPPEEAEKFCSRIIAMGLLLPFSDCFREPCNQNAQTNAASFDQDQLYTWAAVSQPTHSLDYSEGQFPRRVPSMGPPSKPPDEEHRLEDAETESQSAVSETPQKRSDAVQKEVVDMKSEGQATVIQQLEQTIEDLRTKIAELERQYPALDTEVASGHQGLENGVTASGDVCLEALRLEEKEVRHHRILEAKSIQTSPTEEGGVLTLPPVDGLPGRPPCPPGAESGPQTKFCSEISLIVSPRRISVQLDSHQPTQSISQPPPPPSLLWSAGQGQPGSQPPHSISTEFQTSHEHSVSSAFKNSCNIPSPPPLPCTESSSSMPGLGMVPPPPPPLPGMTVPTLPSTAIPQPPPLQGTEMLPPPPPPLPGAGIPPPPPLPGAGILPLPPLPGAGIPPPPPLPGAAIPPPPPLPGAGIPLPPPLPGAGIPPPPPLPGAGIPPPPPLPGAGIPPPPPLPGAGIPPPPPLPGAGIPPPPPLPGAGIPPPPPLPGAGIPPPPPLPGAGIPPPPPLPGAGIPPPPPLPGAGIPPPPPLPGAGIPPPPPLPGAGIPPPPPLPGVGIPPPPPLPGAGIPPPPPLPGAGIPPPPPLPGAGIPPPPPLPRVGIPPPPPLPGAGIPPPPPLPGAGIPPPPPLPGVGIPPPPPLPGVGIPPPPPLPGAGIPPPPPLPGMGIPPAPAPPLPPPGTGIPPPPLLPVSGPPLLPQVGSSTLPTPQVCGFLPPPLPSGLFGLGMNQDKGSRKQPIEPCRPMKPLYWTRIQLHSKRDSSTSLIWEKIEEPSIDCHEFEELFSKTAVKERKKPISDTISKTKAKQVVKLLSNKRSQAVGILMSSLHLDMKDIQHAVVNLDNSVVDLETLQALYENRAQSDELEKIEKHGRSSKDKENAKSLDKPEQFLYELSLIPNFSERVFCILFQSTFSESICSIRRKLELLQKLCETLKNGPGVMQVLGLVLAFGNYMNGGNKTRGQADGFGLDILPKLKDVKSSDNSRSLLSYIVSYYLRNFDEDAGKEQCLFPLPEPQDLFQASQMKFEDFQKDLRKLKKDLKACEVEAGKVYQVSSKEHMQPFKENMEQFIIQAKIDQEAEENSLTETHKCFLETTAYFFMKPKLGEKEVSPNAFFSIWHEFSSDFKDFWKKENKLLLQERVKEAEEVCRQKKGKSLYKIKPRHDSGIKAKISMKT

SEQ ID NO: 22183 - protein, 318 aa, Homo sapiens
MRAQSDELEKIEKHGRSSKDKENAKSLDKPEQFLYELSLIPNFSERVFCILFQSTFSESICSIRRKLELLQKLCETLKNGPGVMQVLGLVLAFGNYMNGGNKTRGQADGFGLDILPKLKDVKSSDNSRSLLSYIVSYYLRNFDEDAGKEQCLFPLPEPQDLFQASQMKFEDFQKDLRKLKKDLKACEVEAGKVYQVSSKEHMQPFKENMEQFIIQAKIDQEAEENSLTETHKCFLETTAYFFMKPKLGEKEVSPNAFFSIWHEFSSDFKDFWKKENKLLLQERVKEAEEVCRQKKGKSLYKIKPRHDSGIKAKISMKT

SEQ ID NO: 22184 - protein, 142 aa, Homo sapiens
MRLSWFRVLTVLSICLSAVATATGAEGKRKLQIGVKKRVDHCPIKSRKGDVLHMHYTGKLEDGTEFDSSLPQNQPFVFSLGTGQVIKGWDQGLLGMCEGEKRKLVIPSELGYGERGAPPKIPGGATLVFEVELLKIERRTEL

SEQ ID NO: 22185 - protein, 365 aa, Homo sapiens
MGVPRPQPWALGLLLFLLPGSLGAESHLSLLYHLTAVSSPAPGTPAFWVSGWLGPQQYLSYNSLRGEAEPCGAWVWENQVSWYWEKETTDLRIKEKLFLEAFKALGGKGPYTLQGLLGCELGPDNTSVPTAKFALNGEEFMNFDLKQGTWGGDWPEALAISQRWQQQDKAANKELTFLLFSCPHRLREHLERGRGNLEWKEPPSMRLKARPSSPGFSVLTCSAFSFYPPELQLRFLRNGLAAGTGQGDFGPNSDGSFHASSSLTVKSGDEHHYCCIVQHAGLAQPLRVELESPAKSSVLVVGIVIGVLLLTAAAVGGALLWRRMRSGLPAPWISLRGDDTGVLLPTPGEAQDADLKDVNVIPATA

SEQ ID NO: 22186 - protein, 1462 aa, Homo sapiens
MFRGPKPPIAPKPRLTAPNEWRASVYLNDSLNKCSNGRLPCVDRGLDEGPRSIPKCSESETDEDYIVVPRVPLREDEPKDEGSVGNKALVSPESSAEEEEEREEGGEACGLEGTGAGEDSVAPAAPGAGALSREGEEGTDLALEDEGEGCADEPGTLEQVSRSEEEEKLVQPHRECSLEDSGPWAGEGVFQSDLLLPHIHGEDQEPPDTPGEAEEDDEEGCASTDPAGADEGSGPDRPTEDMGQDAEDTSEEPPEKEELAGVQEAETATDCPEVLEEGCEEATGVTGGEQVDLSEPPDHEKKTNQEVAAATLEDHAQDESAEESCQIVPFENDCMEDFVTSLTGSPYEFFPTESTSFCSESCSPLSESAKGLESEQAPKLGLRAEENPMVGALCGQCGSLQGGAAEGPAAPDVVVVLEEEALDDALANPYVMGVGLPGQAAPGEGGQAASDALGGYGSKEELNCEAEGGLVPADRKNTSTRVRPHSGKVAGYVPETVPEETGPEAGSSAPGIGGAAEEVGKTLLSLEGKPLEASRALPAKPRAFTLYPRSFSVEGREIPVSVYQEPEGSGLDDHRIKRKEDNLSLSCVIGSSGSFSQRNHLPSSGTSTPSSMVDIPPPFDLACITKKPITKSSPSLLIESDSPDKYKKKKSSFKRFLALTFKKKTENKLHVDVNVSSSRSSSESSYHGPSRILEVDRRSLSNSPQLKSRTGKLRASESPSSLIFYRDGKRKGVPFSRTVSRVESFEDRSRPPFLPLPLTKPRSISFPSADTSDYENIPAMNSDYENIQIPPRRPARAGAFTKLFEDQSRALSTANENDGYVDMSSFNAFESKQQSADQDAESAYTEPYKVCPISSAAPKEDLTSDEEQRSSEEEDSASRDPSVTHKVEGQSRALVIAQELLSSEKAYVEMLQHLNLDFHGAVMRALDDMDHEGRDTLAREELRQGLSELPAIHDLHQGILEELEERLSNWESQQKVADVFLAREQGFDHHATHILQFDRYLGLLSENCLHSPRLAAAVREFEQSVQGGSQTAKHRLLRVVQRLFQYQVLLTDYLNNLCPDSAEYDNTQGALSLISKVTDRANDSMEQGENLQKLVHIEHSVRGQGDLLQPGREFLKEGTLMKVTGKNRRPRHLFLMNDVLLYTYPQKDGKYRLKNTLAVANMKVSRPVMEKVPYALKIETSESCLMLSASSCAERDEWYGCLSRALPEDYKAQALAAFHHSVEIRERLGVSLGERPPTLVPVTHVMMCMNCGCDFSLTLRRHHCHACGKIVCRNCSRNKYPLKYLKDRMAKVCDGCFGELKKRGRAVPGLMRERPVSMSFPLSSPRFSGSAFSSVFQSINPSTFKKQKKVPSALTEVAASGEGSAISGYLSRCKRGKRHWKKLWFVIKGKVLYTYMASEDKVALESMPLLGFTIAPEKEEGSSEVGPIFHLYHKKTLFYSFKAEDTNSAQRWIEAMEDASVL

SEQ ID NO: 22187 - protein, 540 aa, Homo sapiens
MRALDDMDHEGRDTLAREELRQGLSELPAIHDLHQGILEELEERLSNWESQQKVADVFLAREQGFDHHATHILQFDRYLGLLSENCLHSPRLAAAVREFEQSVQGGSQTAKHRLLRVVQRLFQYQVLLTDYLNNLCPDSAEYDNTQGALSLISKVTDRANDSMEQGENLQKLVHIEHSVRGQGDLLQPGREFLKEGTLMKVTGKNRRPRHLFLMNDVLLYTYPQKDGKYRLKNTLAVANMKVSRPVMEKVPYALKIETSESCLMLSASSCAERDEWYGCLSRALPEDYKAQALAAFHHSVEIRERLGVSLGERPPTLVPVTHVMMCMNCGCDFSLTLRRHHCHACGKIVCRNCSRNKYPLKYLKDRMAKVCDGCFGELKKRGRAVPGLMRERPVSMSFPLSSPRFSGSAFSSVFQSINPSTFKKQKKVPSALTEVAASGEGSAISGYLSRCKRGKRHWKKLWFVIKGKVLYTYMASEDKVALESMPLLGFTIAPEKEEGSSEVGPIFHLYHKKTLFYSFKAEDTNSAQRWIEAMEDASVL

SEQ ID NO: 22188 - protein, 1430 aa, Homo sapiens
MTSAAEIKKPPVAPKPKFVVANNKPAPPPIAPKPDIVISSVPQSTKKMKPAIAPKPKVLKTSPVREIGQSPSRKIMLNLEGHKQELAESTDNFNCKYEGNQSNDYISPMCSCSSECIHKLGHRENLCVKQLVLEPLEMNENLENSKIDETLTIKTRSKCDLYGEKAKNQGGVVLKASVLEEELKDALIHQMPPFISAQKHRPTDSPEMNGGCNSNGQFRIEFADLSPSPSSFEKVPDHHSCHLQLPSDECEHFETCQDDSEKSNNCFQSSELEALENGKRSTLISSDGVSKKSEVKDLGPLEIHLVPYTPKFPTPKPRKTRTARLLRQKCVDTPSESTEEPGNSDSSSSCLTENSLKINKISVLHQNVLCKQEQVDKMKLGNKSELNMESNSDAQDLVNSQKAMCNETTSFEKMAPSFDKDSNLSSDSTTVDGSSMSLAVDEGTGFIRCTVSMSLPKQLKLTCNEHLQSGRNLGVSAPQMQKESVIKEENSLRIVPKKPQRHSLPATGVLKKAASEELLEKSSYPSSEEKSSEKSLERNHLQHLCAQNRGVSSSFDMPKRASEKPVWKLPHPILPFSGNPEFLKSVTVSSNSEPSTALTKPRAKSLSAMDVEKCTKPCKDSTKKNSFKKLLSMKLSICFMKSDFQKFWSKSSQLGDTTTGHLSSGEQKGIESDWQGLLVGEEKRSKPIKAYSTENYSLESQKKRKKSRGQTSAANGLRAESLDDQMLSRESSSQAPYKSVTSLCAPEYENIRHYEEIPEYENLPFIMAIRKTQELEWQNSSSMEDADANVYEVEEPYEAPDGQLQLGPRHQHSSSGASQEEQNDLGLGDLPSDEEEIINSSDEDDVSSESSKGEPDPLEDKQDEDNGMKSKVHHIAKEIMSSEKVFVDVLKLLHIDFRDAVAHASRQLGKPVIEDRILNQILYYLPQLYELNRDLLKELEERMLHWTEQQRIADIFVKKGPYLKMYSTYIKEFDKNIALLDEQCKKNPGFAAVVREFEMSPRCANLALKHYLLKPVQRIPQYRLLLTDYLKNLIEDAGDYRDTQDALAVVIEVANHANDTMKQGDNFQKLMQIQYSLNGHHEIVQPGRVFLKEGILMKLSRKVMQPRMFFLFNDALLYTTPVQSGMYKLNNMLSLAGMKVRKPTQEAYQNELKIESVERSFILSASSATERDEWLEAISRAIEEYAKKRITFCPSRSLDEADSENKEEVSPLGSKAPIWIPDTRATMCMICTSEFTLTWRRHHCRACGKIVCQACSSNKYGLDYLKNQPARVCEHCFQELQKLDHQHSPRIGSPGNHKSPSSALSSVLHSIPSGRKQKKIPAALKEVSANTEDSSMSGYLYRSKGNKKPWKHFWFVIKNKVLYTYAASEDVAALESQPLLGFTVIQVKDENSESKVFQLLHKNMLFYVFKAEDAHSAQKWIEAFQEGTIL

SEQ ID NO: 22189 - protein, 1374 aa, Homo sapiens
MTSAAEIKKPPVAPKPKFVVANNKPAPPPIAPKPDIVISSVPQSTKKMKPAIAPKPKVLKTSPVREIGQSPSRKIMLNLEGHKQELAESTDNFNCKYEGNQSNDYISPMCSCSSECIHKLGHRENLCVKQLVLEPLEMNENLENSKIDETLTIKTRSKCDLYGEKAKNQGGVVLKASVLEEELKDALIHQMPPFISAQKHRPTDSPEMNGGCNSNGQFRIEFADLSPSPSSFEKVPDHHSCHLQLPSDECEHFETCQDDSEKSNNCFQSSELEALENGKRSTLISSDGVSKKSEVKDLGPLEIHLVPYTPKFPTPKPRKTRTARLLRQKCVDTPSESTEEPGNSDSSSSCLTENSLKINKISVLHQNVLCKQEQVDKMKLGNKSELNMESNSDAQDLVNSQKAMCNETTSFEKMAPSFDKDSNLSSDSTTVDGSSMSLAVDEGTGFIRCTVSMSLPKQLKLTCNEHLQSGRNLGVSAPQMQKESVIKEENSLRIVPKKPQRHSLPATGVLKKAASEELLEKSSYPSSEEKSSEKSLERNHLQHLCAQNRGVSSSFDMPKRASEKPVWKLPHPILPFSGNPEFLKSVTVSSNSEPSTALTKPRAKSLSAMDVEKCTKPCKDSTKKNSFKKLLSMKLSICFMKSDFQKFWSKSSQLGDTTTGHLSSGEQKGIESDWQGLLVGEEKRSKPIKAYSTENYSLESQKKRKKSRGQTSAANGLRAESLDDQMLSRESSSQAPYKSVTSLCAPEYENIRHYEEIPEYENLPFIMAIRKTQELEWQNSSSMEDADANVYEVEEPYEAPDGQLQLGPRHQHSSSGASQEEQNDLGLGDLPSDEEEIINSSDEDDVSSESSKGEPDPLEDKQDEDNGMKSKVHHIAKEIMSSEKVFVDVLKLLHIDFRDAVAHASRQLGKPVIEDRILNQILYYLPQLYELNRDLLKELEERMLHWTEQQRIADIFVKKGPYLKMYSTYIKEFDKNIALLDEQCKKNPGFAAVVREFEMSPRCANLALKHYLLKPVQRIPQYRLLLTDYLKNLIEDAGDYRDTQDALAVVIEVANHANDTMKQGDNFQKLMQIQYSLNGHHEIVQPGRVFLKEGILMKLSRKVMQPRMFFLFNDALLYTTPVQSGMYKLNNMLSLAGMKVRKPTQEAYQNELKIESVERSFILSASSATERDEWLEAISRAIEEYAKKRITFCPSRSLDEADSENKEEVSPLGSKAPIWIPDTRATMCMICTSEFTLTWRRHHCRACGKIVCQACSSNKYGLDYLKNQPARVCEHCFQELQKLDHQHSPRIGSPGNHKSPSSALSSVLHSIPSGRKQKKIPAALKEVSANTEDSSMSGYLYRSKGNKKPWKHFWFVIKNKVLYTYAASEVRSEI

SEQ ID NO: 22190 - protein, 313 aa, Homo sapiens
MELDRAVGVLGAATLLLSFLGMAWALQAADTCPEVKMVGLEGSDKLTILRGCPGLPGAPGPKGEAGTNGKRGERGPPGPPGKAGPPGPNGAPGEPQPCLTGPRTCKDLLDRGHFLSGWHTIYLPDCRPLTVLCDMDTDGGGWTVFQRRVDGSVDFYRDWATYKQGFGSRLGEFWLGNDNIHALTAQGTSELRVDLVDFEDNYQFAKYRSFKVADEAEKYNLVLGAFVEGSAGDSLTFHNNQSFSTKDQDNDLNTGNCAVMFQGAWWYKNCHVSNLNGRYLRGTHGSFANGINWKSGKGYNYSYKVSEMKVRPA

SEQ ID NO: 22191 - protein, 275 aa, Homo sapiens
MELDRAVGVLGAATLLLSFLGMAWALQAADTCPGERGPPGPPGKAGPPGPNGAPGEPQPCLTGPRTCKDLLDRGHFLSGWHTIYLPDCRPLTVLCDMDTDGGGWTVFQRRVDGSVDFYRDWATYKQGFGSRLGEFWLGNDNIHALTAQGTSELRVDLVDFEDNYQFAKYRSFKVADEAEKYNLVLGAFVEGSAGDSLTFHNNQSFSTKDQDNDLNTGNCAVMFQGAWWYKNCHVSNLNGRYLRGTHGSFANGINWKSGKGYNYSYKVSEMKVRPA

SEQ ID NO: 22192 - protein, 570 aa, Homo sapiens
MAFRGWRPPPPPLLLLLLWVTGQAAPVAGLGSDAELQIERRFVPDECPRTVRSGDFVRYHYVGTFPDGQKFDSSYDRDSTFNVFVGKGQLITGMDQALVGMCVNERRFVKIPPKLAYGNEGVSGVIPPNSVLHFDVLLMDIWNSEDQVQIHTYFKPPSCPRTIQVSDFVRYHYNGTFLDGTLFDSSHNRMKTYDTYVGIGWLIPGMDKGLLGMCVGEKRIITIPPFLAYGEDGDGKDIPGQASLVFDVALLDLHNPKDSISIENKVVPENCERISQSGDFLRYHYNGTLLDGTLFDSSYSRNRTFDTYIGQGYVIPGMDEGLLGVCIGEKRRIVVPPHLGYGEEGRGNIPGSAVLVFDIHVIDFHNPSDSISITSHYKPPDCSVLSKKGDYLKYHYNASLLDGTLLDSTWNLGKTYNIVLGSGQVVLGMDMGLREMCVGEKRTVIIPPHLGYGEAGVDGEVPGSAVLVFDIELLELVAGLPEGYMFIWNGEVSPNLFEEIDKDGNGEVLLEEFSEYIHAQVASGKGKLAPGFDAELIVKNMFTNQDRNGDGKVTAEEFKLKDQEAKHDEL

SEQ ID NO: 22193 - protein, 338 aa, Homo sapiens
MAGKDIPGQASLVFDVALLDLHNPKDSISIENKVVPENCERISQSGDFLRYHYNGTLLDGTLFDSSYSRNRTFDTYIGQGYVIPGMDEGLLGVCIGEKRRIVVPPHLGYGEEGRGNIPGSAVLVFDIHVIDFHNPSDSISITSHYKPPDCSVLSKKGDYLKYHYNASLLDGTLLDSTWNLGKTYNIVLGSGQVVLGMDMGLREMCVGEKRTVIIPPHLGYGEAGVDGEVPGSAVLVFDIELLELVAGLPEGYMFIWNGEVSPNLFEEIDKDGNGEVLLEEFSEYIHAQVASGKGKLAPGFDAELIVKNMFTNQDRNGDGKVTAEEFKLKDQEAKHDEL

SEQ ID NO: 22194 - protein, 623 aa, Homo sapiens
MAFRGWRPPPPPLLLLLLWVTGQAAPVAGLGSDAELQIERRFVPDECPRTVRSGDFVRYHYVGTFPDGQKFDSRYWDTAEDKADKSPCPQVRVGVNTSPSCRLKQKGVGIYWKDLQFLVRVQNHGLSYDRDSTFNVFVGKGQLITGMDQALVGMCVNERRFVKIPPKLAYGNEGVSGVIPPNSVLHFDVLLMDIWNSEDQVQIHTYFKPPSCPRTIQVSDFVRYHYNGTFLDGTLFDSSHNRMKTYDTYVGIGWLIPGMDKGLLGMCVGEKRIITIPPFLAYGEDGDGKDIPGQASLVFDVALLDLHNPKDSISIENKVVPENCERISQSGDFLRYHYNGTLLDGTLFDSSYSRNRTFDTYIGQGYVIPGMDEGLLGVCIGEKRRIVVPPHLGYGEEGRGNIPGSAVLVFDIHVIDFHNPSDSISITSHYKPPDCSVLSKKGDYLKYHYNASLLDGTLLDSTWNLGKTYNIVLGSGQVVLGMDMGLREMCVGEKRTVIIPPHLGYGEAGVDGEVPGSAVLVFDIELLELVAGLPEGYMFIWNGEVSPNLFEEIDKDGNGEVLLEEFSEYIHAQVASGKGKLAPGFDAELIVKNMFTNQDRNGDGKVTAEEFKLKDQEAKHDEL

SEQ ID NO: 22195 - protein, 349 aa, Homo sapiens
METPPVNTIGEKDTSQPQQEWEKNLRENLDSVIQIRQQPRDPPTETLELEVSPDPASQILEHTQGAEKLVAELEGDSHKSHGSTSQMPEALQASDLWYCPDGSFVKKIVIRGHGLDKPKLGSCCRVLALGFPFGSGPPEGWTELTMGVGPWREETWGELIEKCLESMCQGEEAELQLPGHSGPPVRLTLASFTQGRDSWELETSEKEALAREERARGTELFRAGNPEGAARCYGRALRLLLTLPPPGPPERTVLHANLAACQLLLGQPQLAAQSCDRVLEREPGHLKALYRRGVAQAALGNLEKATADLKKVLAIDPKNRAAQEELGKVVIQGKNQDAGLAQGLRKMFG

SEQ ID NO: 22196 - protein, 461 aa, Homo sapiens
MSRINKNVVLALLTLTSSAFLLFQLYYYKHYLSTKNGAGLSKSKGSRIGFDSTQWRAVKKFIMLTSNQNVPVFLIDPLILELINKNFEQVKNTSHGSTSQCKFFCVPRDFTAFALQYHLWKNEEGWFRIAENMGFQCLKIESKDPRLDGIDSLSGTEIPLHYICKLATHAIHLVVFHERSGNYLWHGHLRLKEHIDRKFVPFRKLQFGRYPGAFDRPELQQVTVDGLEVLIPKDPMHFVEEVPHSRFIECRYKEARAFFQQYLDDNTVEAVAFRKSAKELLQLAAKTLNKLGVPFWLSSGTCLGWYRQCNIIPYSKDVDLGIFIQDYKSDIILAFQDAGLPLKHKFGKVEDSLELSFQGKDDVKLDVFFFYEETDHMWNGGTQAKTGKKFKYLFPKFTLCWTEFVDMKVHVPCETLEYIEANYGKTWKIPVKTWDWKRSPPNVQPNGIWPISEWDEVIQLY

SEQ ID NO: 22197 - protein, 430 aa, Homo sapiens
MSRINKNVVLALLTLTSSAFLLFQLYYYKHYLSTKNGAGLSKSKGSRIGFDSTQWRAVKKFIMLTSNQNVPVFLIDPLILELINKNFEQVKNTSHGSTSQCKFFCVPRDFTAFALQYHLWKNEEGWFRIAENMGFQCLKIESKDPRLDGIDSLSGTEIPLHYICKLATHAIHLVVFHERSGNYLWHGHLRLKEHIDRKFVPFRKLQFGRYPGAFDRPELQQVTVDGLEVLIPKDPMHFVEEVPHSRFIECRYKEARAFFQQYLDDNTVEAVAFRKSAKELLQLAAKTLNKLGVPFWLSSGTCLGWYRQCNIIPYSKDVDLGIFIQDYKSDIILAFQDAGLPLKHKFGKVEDSLELSFQGKDDVKLDVFFFYEETDHMWNGGTQAKTGKKFKYLFPKFTLCWTEFVDMKVHVPCETLEYIEANYGKNQQGA

SEQ ID NO: 22198 - protein, 251 aa, Homo sapiens
MLGARLRLWVCALCSVCSMSVLRAYPNASPLLGSSWGGLIHLYTATARNSYHLQIHKNGHVDGAPHQTIYSALMIRSEDAGFVVITGVMSRRYLCMDFRGNIFGSHYFDPENCRFQHQTLENGYDVYHSPQYHFLVSLGRAKRAFLPGMNPPPYSQFLSRRNEIPLIHFNTPIPRRHTRSAEDDSERDPLNVLKPRARMTPAPASCSQELPSAEDNSPMASDPLGVVRGGRVNTHAGGTGPEGCRPFAKFI

SEQ ID NO: 22199 - protein, 437 aa, Homo sapiens
MGRRMRGAAATAGLWLLALGSLLALWGGLLPPRTELPASRPPEDRLPRRPARSGGPAPAPRFPLPPPLAWDARGGSLKTFRALLTLAAGADGPPRQSRSEPRWHVSARQPRPEESAAVHGGVFWSRGLEEQVPPGFSEAQAAAWLEAARGARMVALERGGCGRSSNRLARFADGTRACVRYGINPEQIQGEALSYYLARLLGLQRHVPPLALARVEARGAQWAQVQEELRAAHWTEGSVVSLTRWLPNLTDVVVPAPWRSEDGRLRPLRDAGGELANLSQAELVDLVQWTDLILFDYLTANFDRLVSNLFSLQWDPRVMQRATSNLHRGPGGALVFLDNEAGLVHGYRVAGMWDKYNEPLLQSVCVFRERTARRVLELHRGQDAAARLLRLYRRHEPRFPELAALADPHAQLLQRRLDFLAKHILHCKAKYGRRSGT

SEQ ID NO: 22200 - protein, 170 aa, Homo sapiens
MRRRLWLGLAWLLLARAPDAAGTPSASRGPRSYPHLEGDVRWRRLFSSTHFFLRVDPGGRVQGTRWRHGQDSILEIRSVHVGVVVIKAVSSGFYVAMNRRGRLYGSRLYTVDCRFRERIEENGHNTYASQRWRRRGQPMFLALDRRGGPRPGGRTRRYHLSAHFLPVLVS

SEQ ID NO: 22201 - protein, 690 aa, Homo sapiens
MQPPPRKVKPAQEVKLRFLEQLSILQTWQQREADLLEDIRSYSKQRAAIEREYGQALQKLAGPFLKREGHRSGEMDSRGRTVFGAWRCLLDATVAGGQTRLQASDRYRDLAGGTGRSAKEQVLRKGTENLQRAQAEVLQSVRELSRSRKLYGQRERVWALAQEKAADVQARLNRSDHGIFHSRTSLQKLSTKLSAQSAQYSQQLQAARNEYLLNLVATNAHLDHYYQEELPALLKALVSELSEHLRDPLTSLSHTELEAAEVILEHAHRGEQTTSQVSWEQDLKLFLQEPGVFSPTPPQQFQPAGTDQVCVLEWGAEGVAGKSGLEKEVQRLTSRAARDYKIQNHGHRVLQRLEQRRQQASEREAPSIEQRLQEVRESIRRAQVSQVKGAARLALLQGAGLDVERWLKPAMTQAQDEVEQERRLSEARLSQRDLSPTAEDAELSDFEECEETGELFEEPAPQALATRALPCPAHVVFRYQAGREDELTITEGEWLEVIEEGDADEWVKARNQHGEVGFVPERYLNFPDLSLPESSQDSDNPCGAEPTAFLAQALYSYTGQSAEELSFPEGALIRLLPRAQDGVDDGFWRGEFGGRVGVFPSLLVEELLGPPGPPELSDPEQMLPSPSPPSFSPPAPTSVLDGPPAPVLPGDKALDFPGFLDMMAPRLRPMRPPPPPPAKAPDPGHPDPLT

SEQ ID NO: 22202 - protein, 370 aa, Homo sapiens
MQLAKYQSHSKSCPTVFPPTPVLCLPNQVLQRLEQRRQQASEREAPSIEQRLQEVRESIRRAQVSQVKGAARLALLQGAGLDVERWLKPAMTQAQDEVEQERRLSEARLSQRDLSPTAEDAELSDFEECEETGELFEEPAPQALATRALPCPAHVVFRYQAGREDELTITEGEWLEVIEEGDADEWVKARNQHGEVGFVPERYLNFPDLSLPESSQDSDNPCGAEPTAFLAQALYSYTGQSAEELSFPEGALIRLLPRAQDGVDDGFWRGEFGGRVGVFPSLLVEELLGPPGPPELSDPEQMLPSPSPPSFSPPAPTSVLDGPPAPVLPGDKALDFPGFLDMMAPRLRPMRPPPPPPAKAPDPGHPDPLT

SEQ ID NO: 22203 - protein, 409 aa, Homo sapiens
MDSRTVFGAWRCLLDATVAGGQTRLQASDRYRDLAGGTGRSAKEQVLRKGTENLQRAQAEVLQSVRELSRSRKLYGQRERVWALAQEKAADVQARLNRSDHGIFHSRTSLQKLSTKLSAQSAQYSQQLQAARNEYLLNLVATNAHLDHYYQEELPALLKALVSELSEHLRDPLTSLSHTELEAAEVILEHAHRGEQTTSQVSWEQDLKLFLQEPGVFSPTPPQQFQPAGTDQVCVLEWGAEGVAGKSGLEKEVQRLTSRAARDYKIQNHGHRVLQRLEQRRQQASEREAPSIEQRLQEVRESIRRAQVSQVKGAARLALLQGAGLDVERWLKPAMTQAQDEVEQERRLSEARLSQRDLSPTAEDAELSDFEECEETGELFEEPAPQALATRALPCPAHVVFRYQGVRMS

SEQ ID NO: 22204 - protein, 417 aa, Homo sapiens
MEFVKCLGHPEEFYNLVRFRIGGKRKVMPKMDQDSLSSSLKTCYKYLNQTSRSFAAVIQALDGEMRNAVCIFYLVLRALDTLEDDMTISVEKKVPLLHNFHSFLYQPDWRFMESKEKDRQVLEDFPTISLEFRNLAEKYQTVIADICRRMGIGMAEFLDKHVTSEQEWDKYCHYVAGLVGIGLSRLFSASEFEDPLVGEDTERANSMGLFLQKTNIIRDYLEDQQGGREFWPQEVWSRYVKKLGDFAKPENIDLAVQCLNELITNALHHIPDVITYLSRLRNQSVFNFCAIPQVMAIATLAACYNNQQVFKGAVKIRKGQAVTLMMDATNMPAVKAIIYQYMEEIYHRIPDSDPSSSKTRQIISTIRTQNLPNCQLISRSHYSPIYLSFVMLLAALSWQYLTTLSQVTEDYVQTGEH

SEQ ID NO: 22205 - protein, 353 aa, Homo sapiens
MRNAVCIFYLVLRALDTLEDDMTISVEKKVPLLHNFHSFLYQPDWRFMESKEKDRQVLEDFPTISLEFRNLAEKYQTVIADICRRMGIGMAEFLDKHVTSEQEWDKYCHYVAGLVGIGLSRLFSASEFEDPLVGEDTERANSMGLFLQKTNIIRDYLEDQQGGREFWPQEVWSRYVKKLGDFAKPENIDLAVQCLNELITNALHHIPDVITYLSRLRNQSVFNFCAIPQVMAIATLAACYNNQQVFKGAVKIRKGQAVTLMMDATNMPAVKAIIYQYMEEIYHRIPDSDPSSSKTRQIISTIRTQNLPNCQLISRSHYSPIYLSFVMLLAALSWQYLTTLSQVTEDYVQTGEH

SEQ ID NO: 22206 - protein, 332 aa, Homo sapiens
MTISVEKKVPLLHNFHSFLYQPDWRFMESKEKDRQVLEDFPTISLEFRNLAEKYQTVIADICRRMGIGMAEFLDKHVTSEQEWDKYCHYVAGLVGIGLSRLFSASEFEDPLVGEDTERANSMGLFLQKTNIIRDYLEDQQGGREFWPQEVWSRYVKKLGDFAKPENIDLAVQCLNELITNALHHIPDVITYLSRLRNQSVFNFCAIPQVMAIATLAACYNNQQVFKGAVKIRKGQAVTLMMDATNMPAVKAIIYQYMEEIYHRIPDSDPSSSKTRQIISTIRTQNLPNCQLISRSHYSPIYLSFVMLLAALSWQYLTTLSQVTEDYVQTGEH

SEQ ID NO: 22207 - protein, 306 aa, Homo sapiens
MESKEKDRQVLEDFPTISLEFRNLAEKYQTVIADICRRMGIGMAEFLDKHVTSEQEWDKYCHYVAGLVGIGLSRLFSASEFEDPLVGEDTERANSMGLFLQKTNIIRDYLEDQQGGREFWPQEVWSRYVKKLGDFAKPENIDLAVQCLNELITNALHHIPDVITYLSRLRNQSVFNFCAIPQVMAIATLAACYNNQQVFKGAVKIRKGQAVTLMMDATNMPAVKAIIYQYMEEIYHRIPDSDPSSSKTRQIISTIRTQNLPNCQLISRSHYSPIYLSFVMLLAALSWQYLTTLSQVTEDYVQTGEH

SEQ ID NO: 22208 - protein, 374 aa, Homo sapiens
MEFVKCLGHPEEFYNLVRFRIGGKRKVMPKMDQDSLSSSLKTCYKYLNQTSRSFAAVIQALDGEMRNAVCIFYLVLRALDTLEDDMTISVEKKVPLLHNFHSFLYQPDWRFMESKEKDRQVLEDFPTYCHYVAGLVGIGLSRLFSASEFEDPLVGEDTERANSMGLFLQKTNIIRDYLEDQQGGREFWPQEVWSRYVKKLGDFAKPENIDLAVQCLNELITNALHHIPDVITYLSRLRNQSVFNFCAIPQVMAIATLAACYNNQQVFKGAVKIRKGQAVTLMMDATNMPAVKAIIYQYMEEIYHRIPDSDPSSSKTRQIISTIRTQNLPNCQLISRSHYSPIYLSFVMLLAALSWQYLTTLSQVTEDYVQTGEH

SEQ ID NO: 22209 - protein, 927 aa, Homo sapiens
MNSVRAANRRPRRVSRPRPVQQQQQQPPQQPPPQPPQQQPPQQQPPPPPQQQQQQQPPPPPPPPPPLPQERNNVGERDDDVPADMVAEESGPGAQNSPYQLRRKTLLPKRTACPTKNSMEGASTSTTENFGHRAKRARVSGKSQDLSAAPAEQYLQEKLPDEVVLKIFSYLLEQDLCRAACVCKRFSELANDPILWKRLYMEVFEYTRPMMHPEPGKFYQINPEEYEHPNPWKESFQQLYKGAHVKPGFAEHFYSNPARYKGRENMLYYDTIEDALGGVQEAHFDGLIFVHSGIYTDEWIYIESPITMIGAAPGKVADKVIIENTRDSTFVFMEGSEDAYVGYMTIRFNPDDKSAQHHNAHHCLEITVNCSPIIDHCIIRSTCTVGSAVCVSGQGACPTIKHCNISDCENVGLYITDHAQGIYEDNEISNNALAGIWVKNHGNPIIRRNHIHHGRDVGVFTFDHGMGYFESCNIHRNRIAGFEVKAYANPTVVRCEIHHGQTGGIYVHEKGRGQFIENKIYANNFAGVWITSNSDPTIRGNSIFNGNQGGVYIFGDGRGLIEGNDIYGNALAGIQIRTNSCPIVRHNKIHDGQHGGIYVHEKGQGVIEENEVYSNTLAGVWVTTGSTPVLRRNRIHSGKQVGVYFYDNGHGVLEDNDIYNHMYSGVQIRTGSNPKIRRNKIWGGQNGGILVYNSGLGCIEDNEIFDNAMAGVWIKTDSNPTLRRNKIHDGRDGGICIFNGGRGLLEENDIFRNAQAGVLISTNSHPILRKNRIFDGFAAGIEITNHATATLEGNQIFNNRFGGLFLASGVNVTMKDNKIMNNQDAIEKAVSRGQCLYKISSYTSYPMHDFYRCHTCNTTDRNAICVNCIKKCHQGHDVEFIRHDRFFCDCGAGTLSNPCTLAGEPTHDTDTLYDSAPPIESNTLQHN

SEQ ID NO: 22210 - protein, 561 aa, Homo sapiens
MMHPEPGKFYQINPEEYEHPNPWKESFQQLYKGAHVKPGFAEHFYSNPARYKGRENMLYYDTIEDALGGVQEAHFDGLIFVHSGIYTDEWIYIESPITMIGAAPGKVADKVIIENTRDSTFVFMEGSEDAYVGYMTIRFNPDDKSAQHHNAHHCLEITVNCSPIIDHCIIRSTCTVGSAVCVSGQGACPTIKHCNISDCENVGLYITDHAQGIYEDNEISNNALAGIWVKNHGNPIIRRNHIHHGRDVGVFTFDHGMGYFESCNIHRNRIAGFEVKAYANPTVVRCEIHHGQTGGIYVHEKGRGQFIENKIYANNFAGVWITSNSDPTIRGNSIFNGNQGGVYIFGDGRGLIEGNDIYGNALAGIQIRTNSCPIVRHNKIHDGQHGGIYVHEKGQGVIEENEVYSNTLAGVWVTTGSTPVLRRNRIHSGKQVGVYFYDNGHGVLEDNDIYNHMYSGVQIRTGSNPKIRRNKIWGGQNGGILVYNSGLGCIEDNEIFDNAMAGVWIKTDSNPTLRRNKIHDGRDGGICIFNGGRGIVVNFALVKNPVFHYSSISLMINDIAN

SEQ ID NO: 22211 - protein, 843 aa, Homo sapiens
MVAEESGPGAQNSPYQLRRKTLLPKRTACPTKNSMEGASTSTTENFGHRAKRARVSGKSQDLSAAPAEQYLQEKLPDEVVLKIFSYLLEQDLCRAACVCKRFSELANDPILWKRLYMEVFEYTRPMMHPEPGKFYQINPEEYEHPNPWKESFQQLYKGAHVKPGFAEHFYSNPARYKGRENMLYYDTIEDALGGVQEAHFDGLIFVHSGIYTDEWIYIESPITMIGAAPGKVADKVIIENTRDSTFVFMEGSEDAYVGYMTIRFNPDDKSAQHHNAHHCLEITVNCSPIIDHCIIRSTCTVGSAVCVSGQGACPTIKHCNISDCENVGLYITDHAQGIYEDNEISNNALAGIWVKNHGNPIIRRNHIHHGRDVGVFTFDHGMGYFESCNIHRNRIAGFEVKAYANPTVVRCEIHHGQTGGIYVHEKGRGQFIENKIYANNFAGVWITSNSDPTIRGNSIFNGNQGGVYIFGDGRGLIEGNDIYGNALAGIQIRTNSCPIVRHNKIHDGQHGGIYVHEKGQGVIEENEVYSNTLAGVWVTTGSTPVLRRNRIHSGKQVGVYFYDNGHGVLEDNDIYNHMYSGVQIRTGSNPKIRRNKIWGGQNGGILVYNSGLGCIEDNEIFDNAMAGVWIKTDSNPTLRRNKIHDGRDGGICIFNGGRGLLEENDIFRNAQAGVLISTNSHPILRKNRIFDGFAAGIEITNHATATLEGNQIFNNRFGGLFLASGVNVTMKDNKIMNNQDAIEKAVSRGQCLYKISSYTSYPMHDFYRCHTCNTTDRNAICVNCIKKCHQGHDVEFIRHDRFFCDCGAGTLSNPCTLAGEPTHDTDTLYDSAPPIESNTLQHN

SEQ ID NO: 22212 - protein, 585 aa, Homo sapiens
MVAEESGPGAQNSPYQLRRKTLLPKRTACPTKNSMEGASTSTTENFGHRAKRARVSGKSQDLSAAPAEQYLQEKLPDEVVLKIFSYLLEQDLCRAACVCKRFSELANDPILWKRLYMEVFEYTRPMMHPEPGKFYQINPEEYEHPNPWKESFQQLYKGAHVKPGFAEHFYSNPARYKGRENMLYYDTIEDALGGVQEAHFDGLIFVHSGIYTDEWIYIESPITMIGAAPGKVADKVIIENTRDSTFVFMEGSEDAYVGYMTIRFNPDDKSAQHHNAHHCLEITVNCSPIIDHCIIRSTCTVGSAVCVSGQGACPTIKHCNISDCENVGLYITDHAQGIYEDNEISNNALAGIWVKNHGNPIIRRNHIHHGRDVGVFTFDHGMGYFESCNIHRNRIAGFEVKAYANPTVVRCEIHHGQTGGIYVHEKGRGQFIENKIYANNFAGVWITSNSDPTIRGNSIFNGNQGGVYIFGDGRGLIEGNDIYGNALAGIQIRTNSCPIVRHNKIHDGQHGGIYVHEKGQGVIEENEVYSNTLAGVWVTTGSTPVLRRNRIHSGKQVGVYFYDNGHGVLEDNDIYNHMYSGVQIR

SEQ ID NO: 22213 - protein, 211 aa, Homo sapiens
MNSVRAANRRPRRVSRPRPVQQQQQQPPQQPPPQPPQQQPPQQQPPPPPQQQQQQQPPPPPPPPPPLPQERNNVGERDDDVPADMVAEESGPGAQNSPYQLRRKTLLPKRTACPTKNSMEGASTSTTENFGHRAKRARVSGKSQDLSAAPAEQYLQEKLPDEVVLKIFSYLLEQDLCRAACVCKRFSELANDPILWLGEVAHAYNPSTLGG

SEQ ID NO: 22214 - protein, 954 aa, Homo sapiens
MNSVRAANRRPRRVSRPRPVQQQQQQPPQQPPPQPPQQQPPQQQPPPPPQQQQQQQPPPPPPPPPPLPQERNNVGERDDDVPADMVAEESGPGAQNSPYQLRRKTLLPKRTACPTKNSMEGASTSTTENFGHRAKRARVSGKSQDLSAAPAEQYLQEKLPDEVVLKIFSYLLEQDLCRAACVCKRFSELANDPILWKRLYMEVFEYTRPMMHPEPGKFYQINPEEYEHPNPWKESFQQLYKGAHVKPGFAEHFYSNPARYKGRENMLYYDTIEDALGGVQEAHFDGLIFVHSGIYTDEWIYIESPITMIGAAPGKVADKVIIENTRDSTFVFMEGSEDAYVGYMTIRFNPDDKSAQHHNAHHCLEITVNCSPIIDHCIIRSTCTVGSAVCVSGQGACPTIKHCNISDCENVGLYITDHAQGIYEDNEISNNALAGIWVKNHGNPIIRRNHIHHGRDVGVFTFDHGMGYFESCNIHRNRIAGFEVKAYANPTVVRCEIHHGQTGGIYVHEKGRGQFIENKIYANNFAGVWITSNSDPTIRGNSIFNGNQGGVYIFGDGRGLIEGNDIYGNALAGIQIRTNSCPIVRHNKIHDGQHGGIYVHEKGQGVIEENEVYSNTLAGVWVTTGSTPVLRRNRIHSGKQVGVYFYDNGHGVLEDNDIYNHMYSGVQIRTGSNPKIRRNKIWGGQNGGILVYNSGLGCIEDNEIFDNAMAGVWIKTDSNPTLRRNKIHDGRDGGICIFNGGRGLLEENDIFRNAQAGVLISTNSHPILRKNRIFDGFAAGIEITNHATATLEGNQIFNNRFGGLFLASGVNVTMKDNKIMNNQDAIEKAVSRGQCLYKISSYTSYPMHDFYRCHTCNTTDRNAICVNCIKKCHQGHDVEFIRHDRYVAHLLDILPNYFPPHFSNIWVSFCFRFFCDCGAGTLSNPCTLAGEPTHDTDTLYDSAPPIESNTLQHN

SEQ ID NO: 22215 - protein, 526 aa, Homo sapiens
MVNEGPNQEESDDTPVPESALQADPSVSVHPSVSVHPSVSINPSVSVHPSSSAHPSALAQPSGLAHPSSSGPEDLSVIKVSRRRWAVVLVFSCYSMCNSFQWIQYGSINNIFMHFYGVSAFAIDWLSMCYMLTYIPLLLPVAWLLEKFGLRTIALTGSALNCLGAWVKLGSLKPHLFPVTVVGQLICSVAQVFILGMPSRIASVWFGANEVSTACSVAVFGNQLGIAIGFLVPPVLVPNIEDRDELAYHISIMFYIIGGVATLLLILVIIVFKEKPKYPPSRAQSLSYALTSPDASYLGSIARLFKNLNFVLLVITYGLNAGAFYALSTLLNRMVIWHYPGEEVNAGRIGLTIVIAGMLGAVISGIWLDRSKTYKETTLVVYIMTLVGMVVYTFTLNLGHLWVVFITAGTMGFFMTGYLPLGFEFAVELTYPESEGISSGLLNISAQVFGIIFTISQGQIIDNYGTKPGNIFLCVFLTLGAALTAFIKADLRRQKANKETLENKLQEEEEESNTSKVPTAVSEDHL

SEQ ID NO: 22216 - protein, 321 aa, Homo sapiens
MSADNSSTICVCRSVRQELGIAIGFLVPPVLVPNIEDRDELAYHISIMFYIIGGVATLLLILVIIVFKEKPKYPPSRAQSLSYALTSPDASYLGSIARLFKNLNFVLLVITYGLNAGAFYALSTLLNRMVIWHYPGEEVNAGRIGLTIVIAGMLGAVISGIWLDRSKTYKETTLVVYIMTLVGMVVYTFTLNLGHLWVVFITAGTMGFFMTGYLPLGFEFAVELTYPESEGISSGLLNISAQVFGIIFTISQGQIIDNYGTKPGNIFLCVFLTLGAALTAFIKADLRRQKANKETLENKLQEEEEESNTSKVPTAVSEDHL

SEQ ID NO: 22217 - protein, 177 aa, Homo sapiens
MATNYSANQYEKAFSSKYLQNWSPTKPTKESISSHEGYTQIIANDRGHLLPSVPRSKANPWGSFMGTWQMPLKIPPARVTLTSRTTAGAASLTKWIQKNPDLLKASNGLCPEILGKPHDPDSQKKLRKKSITKTVQQARSPTIIPSSPAANLNSPDELQSSHPSAGHTPGPQRPAKS

SEQ ID NO: 22218 - protein, 355 aa, Homo sapiens
MPFLGQDWRSPGQNWVKTADGWKRFLDEKSGSFVSDLSSYCNKEVYNKENLFNSLNYDVAAKKRKKDMLNSKTKTQYFHQEKWIYVHKGSTKERHGYCTLGEAFNRLDFSTAILDSRRFNYVVRLLELIAKSQLTSLSGIAQKNFMNILEKVVLKVLEDQQNIRLIRELLQTLYTSLCTLVQRVGKSVLVGNINMWVYRMETILHWQQQLNNIQITRPAFKGLTFTDLPLCLQLNIMQRLSDGRDLVSLGQAAPDLHVLSEDRLLWKKLCQYHFSERQIRKRLILSDKGQLDWKKMYFKLVRCYPRKEQYGDTLQLCKHCHILSWKGTDHPCTANNPESCSVSLSPQDFINLFKF

SEQ ID NO: 22219 - protein, 262 aa, Homo sapiens
MPFLGQDWRSPGQNWVKTADGWKRFLDEKSGSFVSDLSSYCNKEVYNKENLFNSLNYDVAAKKRKKDMLNSKTKTQYFHQEKWIYVHKGSTKERHGYCTLGEAFNRLDFSTAILDSRRFNYVVRPAFKGLTFTDLPLCLQLNIMQRLSDGRDLVSLGQAAPDLHVLSEDRLLWKKLCQYHFSERQIRKRLILSDKGQLDWKKMYFKLVRCYPRKEQYGDTLQLCKHCHILSWKGTDHPCTANNPESCSVSLSPQDFINLFKF

SEQ ID NO: 22220 - protein, 211 aa, Homo sapiens
MVFLKFFCMSFFCHLCQGYFDGPLYPEMSNGTLHHYFVPDGDYEENDDPEKCQLLFRVSDHRRCSQGEGSQVGSLLSLTLREEFTVLGRQVEDAGRVLEGISKSISYDLDGEESYGKYLRRESHQIGDAYSNSDKSLTELESKFKQGQEQDSRQESRLNEDFLGMLVHTRSLLKETLDISVGLRDKYELLALTIRSHGTRLGRLKNDYLKV

SEQ ID NO: 22221 - protein, 453 aa, Homo sapiens
MSWSLHPRNLILYFYALLFLSSTCVAYVATRDNCCILDERFGSYCPTTCGIADFLSTYQTKVDKDLQSLEDILHQVENKTSEVKQLIKAIQLTYNPDESSKPNMIDAATLKSRKMLEEIMKYEASILTHDSSIRYLQEIYNSNNQKIVNLKEKVAQLEAQCQEPCKDTVQIHDITGKDCQDIANKGAKQSGLYFIKPLKANQQFLVYCEIDGSGNGWTVFQKRLDGSVDFKKNWIQYKEGFGHLSPTGTTEFWLGNEKIHLISTQSAIPYALRVELEDWNGRTSTADYAMFKVGPEADKYRLTYAYFAGGDAGDAFDGFDFGDDPSDKFFTSHNGMQFSTWDNDNDKFEGNCAEQDGSGWWMNKCHAGHLNGVYYQGGTYSKASTPNGYDNGIIWATWKTRWYSMKKTTMKIIPFNRLTIGEGQQHHLGGAKQVRPEHPAETEYDSLYPEDDL

SEQ ID NO: 22222 - protein, 437 aa, Homo sapiens
MSWSLHPRNLILYFYALLFLSSTCVAYVATRDNCCILDERFGSYCPTTCGIADFLSTYQTKVDKDLQSLEDILHQVENKTSEVKQLIKAIQLTYNPDESSKPNMIDAATLKSRKMLEEIMKYEASILTHDSSIRYLQEIYNSNNQKIVNLKEKVAQLEAQCQEPCKDTVQIHDITGKDCQDIANKGAKQSGLYFIKPLKANQQFLVYCEIDGSGNGWTVFQKRLDGSVDFKKNWIQYKEGFGHLSPTGTTEFWLGNEKIHLISTQSAIPYALRVELEDWNGRTSTADYAMFKVGPEADKYRLTYAYFAGGDAGDAFDGFDFGDDPSDKFFTSHNGMQFSTWDNDNDKFEGNCAEQDGSGWWMNKCHAGHLNGVYYQGGTYSKASTPNGYDNGIIWATWKTRWYSMKKTTMKIIPFNRLTIGEGQQHHLGGAKQAGDV

SEQ ID NO: 22223 - protein, 458 aa, Homo sapiens
MMLIPMASVMAVTEPKWVSVWSRFLWVTLLSMVLGSLLALLLPLGAVEEQCLAVLKGLYLLRSKPDRAQHAATKCTSPSTELSITSRGATLLVAKTKASPAGKLEARAALNQALEMKRQGKREKAQKLFMHALKMDPDFVDALTEFGIFSEEDKDIIQADYLYTRALTISPYHEKALVNRDRTLPLVEEIDQRYFSIIDSKVKKVMSIPKGNSALRRVMEETYYHHIYHTVAIEGNTLTLSEIRHILETRYAVPGKSLEEQNEVIGMHAAMKYINTTLVSRIGSVTISDVLEIHRRVLGYVDPVEAGRFRTTQVLVGHHIPPHPQDVEKQMQEFVQWLNSEEAMNLHPVEFAALAHYKLVYIHPFIDGNGRTSRLLMNLILMQAGYPPITIRKEQRSDYYHVLEAANEGDVRPFIRFIAKCTETTLDTLLFATTEYSVALPEAQPNHSGFKETLPVKP

SEQ ID NO: 22224 - protein, 387 aa, Homo sapiens
MAGSEPRSGTNSPPPPFSDWGRLEAAILSGWKTFWQSVSKERVARTTSREEVDEAASTLTRLPIDVQLYILSFLSPHDLCQLGSTNHYWNETVRDPILWRYFLLRDLPSWSSVDWKSLPDLEILKKPISEVTDGAFFDYMAVYRMCCPYTRRASKSSRPMYGAVTSFLHSLIIQNEPRFAMFGPGLEELNTSLVLSLMSSEELCPTAGLPQRQIDGIGSGVNFQLNNQHKFNILILYSTTRKERDRAREEHTSAVNKMFSRHNEGDDQQGSRYSVIPQIQKVCEVVDGFIYVANAEAHKRHEWQDEFSHIMAMTDPAFGSSGRPLLVLSCISQGDVKRMPCFYLAHELHLNLLNHPWLVQDTEAETLTGFLNGIEWILEEVESKRAR

SEQ ID NO: 22225 - protein, 307 aa, Homo sapiens
MAGSEPRSGTNSPPPPFSDWGRLEAAILSGWKTFWQSVSKERVARTTSREEVDEAASTLTRLPIDVQLYILSFLSPHDLCQLGSTNHYWNETVRDPILWRYFLLRDLPSWSSVDWKSLPDLEILKKPISEVTDGAFFDYMAVYRMCCPYTRRASKSSRPMYGAVTSFLHSLIIQNEPRFAMFGPGLEELNTSLVLSLMSSEELCPTAGLPQRQIDGIGSGVNFQLNNQHKFNILILYSTTRKERDRAREEHTSAVNKMFSRHNEGDDQQGSRYSVIPQIQKVCEVVDGFIYVANAEAHKSKYSYVHF

SEQ ID NO: 22226 - protein, 447 aa, Homo sapiens
MSRRPCSCALRPPRCSCSASPSAVTAAGRPRPSDSCKEESSTLSVKMKCDFNCNHVHSGLKLVKPDDIGRLVSYTPAYLEGSCKDCIKDYERLSCIGSPIVSPRIVQLETESKRLHNKENQHVQQTLNSTNEIEALETSRLYEDSGYSSFSLQSGLSEHEEGSLLEENFGDSLQSCLLQIQSPDQYPNKNLLPVLHFEKVVCSTLKKNAKRNPKVDREMLKEIIARGNFRLQNIIGRKMGLECVDILSELFRRGLRHVLATILAQLSDMDLINVSKVSTTWKKILEDDKGAFQLYSKAIQRVTENNNKFSPHASTREYVMFRTPLASVQKSAAQTSLKKDAQTKLSNQGDQKGSTYSRHNEFSEVAKTLKKNESLKACIRCNSPAKYDCYLQRATCKREGCGFDYCTKCLCNYHTTKDCSDGKLLKASCKIGPLPGTKKSKKNLRRL

SEQ ID NO: 22227 - protein, 401 aa, Homo sapiens
MKCDFNCNHVHSGLKLVKPDDIGRLVSYTPAYLEGSCKDCIKDYERLSCIGSPIVSPRIVQLETESKRLHNKENQHVQQTLNSTNEIEALETSRLYEDSGYSSFSLQSGLSEHEEGSLLEENFGDSLQSCLLQIQSPDQYPNKNLLPVLHFEKVVCSTLKKNAKRNPKVDREMLKEIIARGNFRLQNIIGRKMGLECVDILSELFRRGLRHVLATILAQLSDMDLINVSKVSTTWKKILEDDKGAFQLYSKAIQRVTENNNKFSPHASTREYVMFRTPLASVQKSAAQTSLKKDAQTKLSNQGDQKGSTYSRHNEFSEVAKTLKKNESLKACIRCNSPAKYDCYLQRATCKREGCGFDYCTKCLCNYHTTKDCSDGKLLKASCKIGPLPGTKKSKKNLRRL

SEQ ID NO: 22228 - protein, 224 aa, Homo sapiens
MAPPAAPGRDRVGREDEDGWETRGDRKARKPLVEKKRRARINESLQELRLLLAGAEVQAKLENAEVLELTVRRVQGVLRGRAREREQLQAEASERFAAGYIQCMHEVHTFVSTCQAIDATVAAELLNHLLESMPLREGSSFQDLLGDALAGPPRAPGRSGWPAGGAPGSPIPSPPGPGDDLCSDLEEAPEAELSQAPAEGPDLVPAALGSLTTAQIARSVWRPW

SEQ ID NO: 22229 - protein, 214 aa, Homo sapiens
MAPPAAPGRDRVGREDEDGWETRGDRKARKPLVEKKRRARINESLQELRLLLAGAEVQAKLENAEVLELTVRRVQGVLRGRARGEWRRGGRGRRPRAPVTPARRRTSLPAPLSCRRRGLPPEQGAPPRLLGEPRPRGPGGLGHAVAAHRAGRGSLPPTLGPRARAAAGGSERALRCRLHPVHARGAHVRVHVPGHRRYRRCRAPEPSARVHAAA

SEQ ID NO: 22230 - protein, 222 aa, Homo sapiens
MAPPAAPGRDRVGREDEDGWETRGDRKARKPLVEKKRRARINESLQELRLLLAGAEAKLENAEVLELTVRRVQGVLRGRAREREQLQAEASERFAAGYIQCMHEVHTFVSTCQAIDATVAAELLNHLLESMPLREGSSFQDLLGDALAGPPRAPGRSGWPAGGAPGSPIPSPPGPGDDLCSDLEEAPEAELSQAPAEGPDLVPAALGSLTTAQIARSVWRPW

SEQ ID NO: 22231 - protein, 112 aa, Homo sapiens
MAPPAAPGRDRVGREDEDGWETRGDRKARKPLVEKKRRARINESLQELRLLLAGAEVQAKLENAEVLELTSASSCRRKRASASLPATSSACTRCTRSCPRARPSTLPSLPSS

SEQ ID NO: 22232 - protein, 253 aa, Homo sapiens
MSCTIEKALADAKALVERLRDHDDAAESLIEQTTALNKRVEAMKQYQEEIQELNEVARHRPRSTLVMGIQQENRQIRELQQENKELRTSLEEHQSALELIMSKYREQMFRLLMASKKDDPGIIMKLKEQHSKIDMVHRNKSEGFFLDASRHILEAPQHGLERRHLEANQNELQAHVDQITEMAAVMRKAIEIDEQQGCKEQERIFQLEQENKGLREILQITRESFLNLRKDDASESTSLSALVTNSDLSLRKS

SEQ ID NO: 22233 - protein, 215 aa, Homo sapiens
MSCTIEKALADAKALVERLRDHDDAAESLIEQTTALNKRVEAMKQYQEEIQELNEVARHRPRSTLVMGIQQENRQIRELQQENKELRTSLEEHQSALELIMSKYREQMFRLLMASKKDDPGIIMKLKEQHSKELQAHVDQITEMAAVMRKAIEIDEQQGCKEQERIFQLEQENKGLREILQITRESFLNLRKDDASESTSLSALVTNSDLSLRKS

SEQ ID NO: 22234 - protein, 172 aa, Homo sapiens
MSCTIEKALADAKALVERLRDHDDAAESLIEQTTALNKRVEAMKQYQEEIQELNEVARHRPRSTLVMGIQQENRQIRELQQENKELRTSLEEHQSALELIMSKYREQMFRLLMASKKDDPGIIMKLKEQHSKIDMVHRNKSEGFFLDASRHILEAPQHGLERRHLEANQNVH

SEQ ID NO: 22235 - protein, 653 aa, Homo sapiens
MHWTPEHAQPLNQWPEQHLDVSSTTPSPAHKLELPPGGRQRCHYAWAHDDISALTASNLLKRYAEKYSGVLDSPYERPALGGYSDASFLNGAKGDPEPWPGPEPPYPLASLHEGLPGTKSGGGGGSGALGGSPVLAGNLPEPLYAGNACGGPSAAPEYAAGYGGGYLAPGYCAQTGAALPPPPPAALLQPPPPPGYGPSAPLYNYPAGGYAAQPGYGALPPPPGPPPAPYLTPGLPAPTPLPAPAPPTAYGFPTAAPGAESGLSLKRKAADEGPEGRYRKYAYEPAKAPVADGASYPAADNGECRGNGFRAKPPGAAEEASGKYGGGVPLKVLGSPVYGPQLEPFEKFPERAPAPRGGFAVPSGETPKGVDPGALELVTSKMVDCGPPVQWADVAGQGALKAALEEELVWPLLRPPAYPGSLRPPRTVLLFGPRGAGKALLGRCLATQLGATLLRLRGATLAAPGAAEGARLLQAAFAAARCRPPSVLLISELEALLPARDDGAAAGGALQVPLLACLDGGCGAGADGVLVVGTTSRPAALDEATRRRFSLRFYVALPDSPARGQILQRALAQQGCALSERELAALVQGTQGFSGGELGQLCQQAAAGAGLPGLQRPLSYKDLEAALAKVGPRASAKELDSFVEWDKMYGSGH

SEQ ID NO: 22236 - protein, 224 aa, Homo sapiens
MNIEVGNISYTGAIISWSSSEPCLEDYYHIMYRPNWNSIFSGYLRYSFHHEEKVPRTISSVVLEHLAPSTLYFLCISCKKAAFPYRHYCTMFHTLDKSPLAPGSSLVDPQISLWVLMAILLACFTAVLAFICLQFWCVRCHEPRWSYRAGHMEEANGLVRWPEEAPDLGQREEDLQGLPLVEMPRKNSRDGAELDPEANQDAPDAGALQRGGGDPPAILPHCGE

SEQ ID NO: 22237 - protein, 674 aa, Homo sapiens
MQTSSSRSVHLSEWQKNYFAITSGICTGPKADAYRAQILRIQYAWANSEISQVCATKLFKKYAEKYSAIIDSDNVESGLNNYAENILTLAGSQQTDSDKWQSGLSINNVFKMSSVQKMMQAGKKFKDSLLEPALASVVIHKEATVFDLPKFSVCGSSQESDSLPNSAHDRDRTQDFPESNRLKLLQNAQPPMVTNTARTCPTFSAPVGESATAKFHVTPLFGNVKKENHSSAKENIGLNVFLSNQSCFPAACENPQRKSFYGSGTIDALSNPILNKACSKTEDNGPKEDSSLPTFKTAKEQLWVDQQKKYHQPQRASGSSYGGVKKSLGASRSRGILGKFVPPIPKQDGGEQNGGMQCKPYGAGPTEPAHPVDERLKNLEPKMIELIMNEIMDHGPPVNWEDIAGVEFAKATIKEIVVWPMLRPDIFTGLRGPPKGILLFGPPGTGKTLIGKCIASQSGATFFSISASSLTSKWVGEGEKMVRALFAVARCQQPAVIFIDEIDSLLSQRGDGEHESSRRIKTEFLVQLDGATTSSEDRILVVGATNRPQEIDEAARRRLVKRLYIPLPEASARKQIVINLMSKEQCCLSEEEIEQIVQQSDAFSGADMTQLCREASLGPIRSLQTADIATITPDQVRPIAYIDFENAFRTVRPSVSPKDLELYENWNKTFGCGK

SEQ ID NO: 22238 - protein, 563 aa, Homo sapiens
MSSVQKMMQAGKKFKDSLLEPALASVVIHKEATVFDLPKFSVCGSSQESDSLPNSAHDRDRTQDFPESNRLKLLQNAQPPMVTNTARTCPTFSAPVGESATAKFHVTPLFGNVKKENHSSAKENIGLNVFLSNQSCFPAACENPQRKSFYGSGTIDALSNPILNKACSKTEDNGPKEDSSLPTFKTAKEQLWVDQQKKYHQPQRASGSSYGGVKKSLGASRSRGILGKFVPPIPKQDGGEQNGGMQCKPYGAGPTEPAHPVDERLKNLEPKMIELIMNEIMDHGPPVNWEDIAGVEFAKATIKEIVVWPMLRPDIFTGLRGPPKGILLFGPPGTGKTLIGKCIASQSGATFFSISASSLTSKWVGEGEKMVRALFAVARCQQPAVIFIDEIDSLLSQRGDGEHESSRRIKTEFLVQLDGATTSSEDRILVVGATNRPQEIDEAARRRLVKRLYIPLPEASARKQIVINLMSKEQCCLSEEEIEQIVQQSDAFSGADMTQLCREASLGPIRSLQTADIATITPDQVRPIAYIDFENAFRTVRPSVSPKDLELYENWNKTFGCGK

SEQ ID NO: 22239 - protein, 212 aa, Homo sapiens
MHPGSPSAWPPRARAALRLWLGCVCFALVQADSPSAPVNVTVRHLKANSAVVSWDVLEDEVVIGFAISQQKKDVRMLRFIQEVNTTTRSCALWDLEEDTEYIVHVQAISIQGQSPASEPVLFKTPREAEKMASKNKDEVTMKEMGRNQQLRTGEVLIIVVVLFMWAGVIALFCRQYDIIKDNEPNNNKEKTKSASETSTPEHQGGGLLRSKI

SEQ ID NO: 22240 - protein, 181 aa, Homo sapiens
MHPGSPSAWPPRARAALRLWLGCVCFALVQADSPSAPVNVTVRHLKANSAVVSWDVLEDEVVIGFAISQQKKDVRMLRFIQEVNTTTRSCALWDLEEDTEYIVHVQAISIQGQSPASEPVLFKTPREAEKMASKNKDEVTMKEMGRNQQLRTGEVLIIVVVLFMWAGVIALFCRQYDIIEA

SEQ ID NO: 22241 - protein, 153 aa, Homo sapiens
MLRFIQEVNTTTRSCALWDLEEDTEYIVHVQAISIQGQSPASEPVLFKTPREAEKMASKNKDEVTMKEMGRNQQLRTGEVLIIVVVLFMWAGVIALFCRQYDIIKDNEPNNNKEKTKSASETSTPEHQGGGLLRSKVRARPGPGWATLCLMLW

SEQ ID NO: 22242 - protein, 137 aa, Homo sapiens
MLRFIQEVNTTTRSCALWDLEEDTEYIVHVQAISIQGQSPASEPVLFKTPREAEKMASKNKDEVTMKEMGRNQQLRTGEVLIIVVVLFMWAGVIALFCRQYDIIKDNEPNNNKEKTKSASETSTPEHQGGGLLRSKI

SEQ ID NO: 22243 - protein, 691 aa, Homo sapiens
MAPFPEEVDVFTAPHWRMKQLVGLYCDKLSKTNFSNNNDFRALLQSLYATFKEFKMHEQIENEYIIGLLQQRSQTIYNVHSDNKLSEMLSLFEKGLKNVKNEYEQLNYAKQLKERLEAFTRDFLPHMKEEEEVFQPMLMEYFTYEELKDIKKKVIAQHCSQKDTAELLRGLSLWNHAEERQKFFKYSVDEKSDKEAEVSEHSTGITHLPPEVMLSIFSYLNPQELCRCSQVSMKWSQLTKTGSLWKHLYPVHWARGDWYSGPATELDTEPDDEWVKNRKDESRAFHEWDEDADIDESEESAEESIAISIAQMEKRLLHGLIHNVLPYVGTSVKTLVLAYSSAVSSKMVRQILELCPNLEHLDLTQTDISDSAFDSWSWLGCCQSLRHLDLSGCEKITDVALEKISRALGILTSHQSGFLKTSTSKITSTAWKNKDITMQSTKQYACLHDLTNKGIGEEIDNEHPWTKPVSSENFTSPYVWMLDAEDLADIEDTVEWRHRNVESLCVMETASNFSCSTSGCFSKDIVGLRTSVCWQQHCASPAFAYCGHSFCCTGTALRTMSSLPESSAMCRKAARTRLPRGKDLIYFGSEKSDQETGRVLLFLSLSGCYQITDHGLRVLTLGGGLPYLEHLNLSGCLTITGAGLQDLVSACPSLNDEYFYYCDNINGPHADTASGCQNLQCGFRACCRSGE

SEQ ID NO: 22244 - protein, 674 aa, Homo sapiens
MAPFPEEVDVFTAPHWRMKQLVGLYCDKSLYATFKEFKMHEQIENEYIIGLLQQRSQTIYNVHSDNKLSEMLSLFEKGLKNVKNEYEQLNYAKQLKERLEAFTRDFLPHMKEEEEVFQPMLMEYFTYEELKDIKKKVIAQHCSQKDTAELLRGLSLWNHAEERQKFFKYSVDEKSDKEAEVSEHSTGITHLPPEVMLSIFSYLNPQELCRCSQVSMKWSQLTKTGSLWKHLYPVHWARGDWYSGPATELDTEPDDEWVKNRKDESRAFHEWDEDADIDESEESAEESIAISIAQMEKRLLHGLIHNVLPYVGTSVKTLVLAYSSAVSSKMVRQILELCPNLEHLDLTQTDISDSAFDSWSWLGCCQSLRHLDLSGCEKITDVALEKISRALGILTSHQSGFLKTSTSKITSTAWKNKDITMQSTKQYACLHDLTNKGIGEEIDNEHPWTKPVSSENFTSPYVWMLDAEDLADIEDTVEWRHRNVESLCVMETASNFSCSTSGCFSKDIVGLRTSVCWQQHCASPAFAYCGHSFCCTGTALRTMSSLPESSAMCRKAARTRLPRGKDLIYFGSEKSDQETGRVLLFLSLSGCYQITDHGLRVLTLGGGLPYLEHLNLSGCLTITGAGLQDLVSACPSLNDEYFYYCDNINGPHADTASGCQNLQCGFRACCRSGE

SEQ ID NO: 22245 - protein, 390 aa, Homo sapiens
MDFWLWPLYFLPVSGALRILPEVKVEGELGGSVTIKCPLPEMHVRIYLCREMAGSGTCGTVVSTTNFIKAEYKGRVTLKQYPRKNLFLVEVTQLTESDSGVYACGAGMNTDRGKTQKVTLNVHSEYEPSWEEQPMPETPKWFHLPYLFQMPAYASSSKFVTRVTTPAQRGKVPPVHHSSPTTQITHRPRVSRASSVAGDKPRTFLPSTTASKISALEGLLKPQTPSYNHHTRLHRQRALDYGSQSGREGQGFHILIPTILGLFLLALLGLVVKRAVERRKALSRRARRLAVRMRALESSQRPRGSPRPRSQNNIYSACPRRARGADAAGTGEAPVPGPGAPLPPAPLQVSESPWLHAPSLKTSCEYVSLYHQPAAMMEDSDSDDYINVPA

SEQ ID NO: 22246 - protein, 278 aa, Homo sapiens
MDFWLWPLYFLPEYEPSWEEQPMPETPKWFHLPYLFQMPAYASSSKFVTRVTTPAQRGKVPPVHHSSPTTQITHRPRVSRASSVAGDKPRTFLPSTTASKISALEGLLKPQTPSYNHHTRLHRQRALDYGSQSGREGQGFHILIPTILGLFLLALLGLVVKRAVERRKALSRRARRLAVRMRALESSQRPRGSPRPRSQNNIYSACPRRARGADAAGTGEAPVPGPGAPLPPAPLQVSESPWLHAPSLKTSCEYVSLYHQPAAMMEDSDSDDYINVPA

SEQ ID NO: 22247 - protein, 306 aa, Homo sapiens
MDFWLWPLYFLPVSGALRILPEVKVEGELGGSVTIKCPLPEMHVRIYLCREMAGSGTCGTVVSTTNFIKAEYKGRVTLKQYPRKNLFLVEVTQLTESDSGVYACGAGMNTDRGKTQKVTLNVHSEYEPSWEEQPMPETPKWFHLPYLFQMPAYASSSKFVTRVTTPAQRGKVPPVHHSSPTTQITHRPRVSRASSVAGDKPRTFLPSTTASKISALEGLLKPQTPSYNHHTRLHRQSPLQAGPPTGREDARPGELPEAPRVAATALPKQHLQRLPAARSWSGRCRHRGGPRSRPRSAVAPRPAAGV

SEQ ID NO: 22248 - protein, 123 aa, Homo sapiens
MWRELRGCPGGDVETAQRLSQRRRGKSSEAVPEKTWRAQRMSQRRRGESSEAVPEKTWKELRNSETVPEKTWKQLRGCLQEDVQRVQRLSRRRHGESSKAVHKKMWREFRGCRYCCTWLFFFG

SEQ ID NO: 22249 - protein, 1045 aa, Homo sapiens
MGEIEQRPTPGSRLGAPENSGISTLERGQKPPPTPSGKLVSIKIQMLDDTQEAFEVPQRAPGKVLLDAVCNHLNLVEGDYFGLEFPDHKKITVWLDLLKPIVKQIRRPKHVVVKFVVKFFPPDHTQLQEELTRYLFALQVKQDLAQGRLTCNDTSAALLISHIVQSEIGDFDEALDREHLAKNKYIPQQDALEDKIVEFHHNHIGQTPAESDFQLLEIARRLEMYGIRLHPAKDREGTKINLAVANTGILVFQGFTKINAFNWAKVRKLSFKRKRFLIKLRPDANSAYQDTLEFLMASRDFCKSFWKICVEHHAFFRLFEEPKPKPKPVLFSRGSSFRFSGRTQKQVLDYVKEGGHKKVQFERKHSKIHSIRSLASQPTELNSEVLEQSQQSTSLTFGEGAESPGGQSCRRGKEPKVSAGEPGSHPSPAPRRSPAGNKQADGAASAPTEEEEEVVKDRTQQSKPQPPQPSTGSLTGSPHLSELSVNSQGGVAPANVTLSPNLSPDTKQASPLISPLLNDQACPRTDDEDEGRRKRFPTDKAYFIAKEVSTTERTYLKDLEVITSWFQSTVSKEDAMPEALKSLIFPNFEPLHKFHTNFLKEIEQRLALWEGRSNAQIRDYQRIGDVMLKNIQGMKHLAAHLWKHSEALEALENGIKSSRRLENFCRDFELQKVCYLPLNTFLLRPLHRLMHYKQVLERLCKHHPPSHADFRDCRAALAEITEMVAQLHGTMIKMENFQKLHELKKDLIGIDNLVVPGREFIRLGSLSKLSGKGLQQRMFFLFNDVLLYTSRGLTASNQFKVHGQLPLYGMTIEESEDEWGVPHCLTLRGQRQSIIVAASSRSEMEKWVEDIQMAIDLAEKSSSPAPEFLASSPPDNKSPDEATAADQESEDDLSASRTSLERQAPHRGNTMVHVCWHRNTSVSMVDFSIAVENQLSGNLLRKFKNSNGWQKLWVVFTNFCLFFYKSHQDNHPLASLPLLGYSLTIPSESENIQKDYVFKLHFKSHVYYFRAESEYTFERWMEVIRSATSSASRPHVLSHKESLVY

SEQ ID NO: 22250 - protein, 1076 aa, Homo sapiens
MGEIEQRPTPGSRLGAPENSGISTLERGQKPPPTPSGKLVSIKIQMLDDTQEAFEVPQRAPGKVLLDAVCNHLNLVEGDYFGLEFPDHKKITVWLDLLKPIVKQIRRPKHVVVKFVVKFFPPDHTQLQEELTRYLFALQVKQDLAQGRLTCNDTSAALLISHIVQSEIGDFDEALDREHLAKNKYIPQQDALEDKIVEFHHNHIGQTPAESDFQLLEIARRLEMYGIRLHPAKDREGTKINLAVANTGILVFQGFTKINAFNWAKVRKLSFKRKRFLIKLRPDANSAYQDTLEFLMASRDFCKSFWKICVEHHAFFRLFEEPKPKPKPVLFSRGSSFRFSGRTQKQVLDYVKEGGHKKVQFERKHSKIHSIRSLASQPTELNSEVLEQSQQSTSLTFGEGAESPGGQSCRRGKEPKVSAGEPGSHPSPAPRRSPAGNKQADGAASAPTEEEEEVVKDRTQQSKPQPPQPSTGSLTGSPHLSELSVNSQGGVAPANVTLSPNLSPDTKQASPLISPLLNDQACPRTDDEDEGRRKRFPTDKAYFIAKEVSTTERTYLKDLEVITSWFQSTVSKEDAMPEALKSLIFPNFEPLHKFHTNFLKEIEQRLALWEGRSNAQIRDYQRIGDVMLKNIQGMKHLAAHLWKHSEALEALENGIKSSRRLENFCRDFELQKVCYLPLNTFLLRPLHRLMHYKQVLERLCKHHPPSHADFRDCRAALAEITEMVAQLHGTMIKMENFQKLHELKKDLIGIDNLVVPGRPGSFSLMRTPHLGQARRIPCAPERRPLLLVKEFIRLGSLSKLSGKGLQQRMFFLFNDVLLYTSRGLTASNQFKVHGQLPLYGMTIEESEDEWGVPHCLTLRGQRQSIIVAASSRSEMEKWVEDIQMAIDLAEKSSSPAPEFLASSPPDNKSPDEATAADQESEDDLSASRTSLERQAPHRGNTMVHVCWHRNTSVSMVDFSIAVENQLSGNLLRKFKNSNGWQKLWVVFTNFCLFFYKSHQDNHPLASLPLLGYSLTIPSESENIQKDYVFKLHFKSHVYYFRAESEYTFERWMEVIRSATSSASRPHVLSHKESLVY

SEQ ID NO: 22251 - protein, 129 aa, Homo sapiens
MGEIEQRPTPGSRLGAPENSGISTLERGQKPPPTPSGKLVSIKIQMLDDTQEAFEVPMVSSSSFLKATGSSWTGWVLRCSMKPKHHSHLIEKFGEDRILTHLTGSISYTNWAGSRSLAVTVTEELLNLF

SEQ ID NO: 22252 - protein, 1184 aa, Homo sapiens
MVLLWEPAGAWLALGLALALGPSVAAAAPRQDCTGVECPPLENCIEEALEPGACCATCVQQGCACEGYQYYDCLQGGFVRGRVPAGQSYFVDFGSTECSCPPGGGKISCQFMLCPELPPNCIEAVVVADSCPQCGQVGCVHAGHKYAAGHTVHLPPCRACHCPDAGGELICYQLPGCHGNFSDAEEGDPERHYEDPYSYDQEVAEVEAATALGGEVQAGAVQAGAGGPPAALGGGSQPLSTIQAPPWPAVLPRPTAAAALGPPAPVQAKARRVTEDSEEEEEEEEEREEMAVTEQLAAGGHRGLDGLPTTAPAGPSLPIQEERAEAGARAEAGARPEENLILDAQATSRSTGPEGVTHAPSLGKAALVPTQAVPGSPRDPVKPSPHNILSTSLPDAAWIPPTREVPRKPQVLPHSHVEEDTDPNSVHSIPRSSPEGSTKDLIETCCAAGQQWAIDNDECLEIPESGTEDNVCRTAQRHCCVSYLQEKSCMAGVLGAKEGETCGAEDNDSCGISLYKQCCDCCGLGLRVRAEGQSCESNPNLGYPCNHVMLSCCEGEEPLIVPEVRRPPEPAAAPRRVSEAEMAGREALSLGTEAELPNSLPGDDQDECLLLPGELCQHLCINTVGSYHCACFPGFSLQDDGRTCRPEGHPPQPEAPQEPALKSEFSQVASNTIPLPLPQPNTCKDNGPCKQVCSTVGGSAICSCFPGYAIMADGVSCEDINECVTDLHTCSRGEHCVNTLGSFHCYKALTCEPGYALKDGECEDVDECAMGTHTCQPGFLCQNTKGSFYCQARQRCMDGFLQDPEGNCVDINECTSLSEPCRPGFSCINTVGSYTCQRNPLICARGYHASDDGTKCVDVNECETGVHRCGEGQVCHNLPGSYRCDCKAGFQRDAFGRGCIDVNECWASPGRLCQHTCENTLGSYRCSCASGFLLAADGKRCEDVNECEAQRCSQECANIYGSYQCYCRQGYQLAEDGHTCTDIDECAQGAGILCTFRCLNVPGSYQCACPEQGYTMTANGRSCKDVDECALGTHNCSEAETCHNIQGSFRCLRFECPPNYVQVSKTKCERTTCHDFLECQNSPARITHYQLNFQTGLLVPAHIFRIGPAPAFTGDTIALNIIKGNEEGYFGTRRLNAYTGVVYLQRAVLEPRDFALDVEMKLWRQGSVTTFLAKMHIFFTTFAL

SEQ ID NO: 22253 - protein, 1231 aa, Homo sapiens
MVLLWEPAGAWLALGLALALGPSVAAAAPRQDCTGVECPPLENCIEEALEPGACCATCVQQGCACEGYQYYDCLQGGFVRGRVPAGQSYFVDFGSTECSCPPGGGKISCQFMLCPELPPNCIEAVVVADSCPQCGQVGCVHAGHKYAAGHTVHLPPCRACHCPDAGGELICYQLPGCHGNFSDAEEGDPERHYEDPYSYDQEVAEVEAATALGGEVQAGAVQAGAGGPPAALGGGSQPLSTIQAPPWPAVLPRPTAAAALGPPAPVQAKARRVTEDSEEEEEEEEEREEMAVTEQLAAGGHRGLDGLPTTAPAGPSLPIQEERAEAGARAEAGARPEENLILDAQATSRSTGPEGVTHAPSLGKAALVPTQAVPGSPRDPVKPSPHNILSTSLPDAAWIPPTREVPRKPQVLPHSHVEEDTDPNSVHSIPRSSPEGSTKDLIETCCAAGQQWAIDNDECLEIPESGTEDNVCRTAQRHCCVSYLQEKSCMAGVLGAKEGETCGAEDNDSCGISLYKQCCDCCGLGLRVRAEGQSCESNPNLGYPCNHVMLSCCEGEEPLIVPEVRRPPEPAAAPRRVSEAEMAGREALSLGTEAELPNSLPGDDQDECLLLPGELCQHLCINTVGSYHCACFPGFSLQDDGRTCRPEGHPPQPEAPQEPALKSEFSQVASNTIPLPLPQPNTCKDNGPCKQVCSTVGGSAICSCFPGYAIMADGVSCEDQDECLMGAHDCSRRQFCVNTLGSFYCVNHTVLCADGYILNAHRKCVDINECVTDLHTCSRGEHCVNTLGSFHCYKALTCEPGYALKDGECEDVDECAMGTHTCQPGFLCQNTKGSFYCQARQRCMDGFLQDPEGNCVDINECTSLSEPCRPGFSCINTVGSYTCQRNPLICARGYHASDDGTKCVDVNECETGVHRCGEGQVCHNLPGSYRCDCKAGFQRDAFGRGCIDVNECWASPGRLCQHTCENTLGSYRCSCASGFLLAADGKRCEDVNECEAQRCSQECANIYGSYQCYCRQGYQLAEDGHTCTDIDECAQGAGILCTFRCLNVPGSYQCACPEQGYTMTANGRSCKDVDECALGTHNCSEAETCHNIQGSFRCLRFECPPNYVQVSKTKCERTTCHDFLECQNSPARITHYQLNFQTGLLVPAHIFRIGPAPAFTGDTIALNIIKGNEEGYFGTRRLNAYTGVVYLQRAVLEPRDFALDVEMKLWRQGSVTTFLAKMHIFFTTFAL

SEQ ID NO: 22254 - protein, 334 aa, Homo sapiens
MKSAASSRGGGGGGRGGGGWGSWGGGRGGGGGAGKGGGGDGGGQGGKGGFGARARGFGGGGRGRGRGGGDGKDRGGGGQRRGGVAKSKSRRRKGAMVVSVEPHRHEGVFIYRGAEDALVTLNMVPGQSVYGERRVTVTEGGVKQEYRTWNPFRSKLAAAILGGVDQIHIKPKSKVLYLGAASGTTVSHVSDIIGPDGLVYAVEFSHRAGRDLVNVAKKRTNIIPVLEDARHPLKYRMLIGMVDVIFADVAQPDQSRIVALNAHTFLRNGGHFLISIKANCIDSTASAEAVFASEVRKLQQENLKPQEQLTLEPYERDHAVVVGVYRPLPKSSSK

SEQ ID NO: 22255 - protein, 448 aa, Homo sapiens
MPGIKRILTVTILALCLPSPGNAQAQCTNGFDLDRQSGQCLDIDECRTIPEACRGDMMCVNQNGGYLCIPRTNPVYRGPYSNPYSTPYSGPYPAAAPPLSAPNYPTISRPLICRFGYQMDESNQCVDVDECATDSHQCNPTQICINTEGGYTCSCTDGYWLLEGQCLDIDECRYGYCQQLCANVPGSYSCTCNPGFTLNEDGRSCQDVNECATENPCVQTCVNTYGSFICRCDPGYELEEDGVHCSDMDECSFSEFLCQHECVNQPGTYFCSCPPGYILLDDNRSCQDINECEHRNHTCNLQQTCYNLQGGFKCIDPIRCEEPYLRISDNRCMCPAENPGCRDQPFTILYRDMDVVSGRSVPADIFQMQATTRYPGAYYIFQIKSGNEGREFYMRQTGPISATLVMTRPIKGPREIQLDLEMITVNTVINFRGSSVIRLRIYVSQYPF

SEQ ID NO: 22256 - protein, 140 aa, Homo sapiens
MPLPEPSEQEGESVKASQEPSPKPGTEVIPAAPRKPRKFSKLVLLTASKDSTKVAGAKRKGVHCVMSLGVPGPATLAKALLQTHPEAQRAIEAAPQEPEQKRSRQDPGTDRTEDSGLAAGPPEAAGENFAPCSVAPGKSL

SEQ ID NO: 22257 - protein, 6907 aa, Homo sapiens
MELYLGACSKPAKVAVTKTVASVLAADTQQCRDGVHKTHFAGVGPAQLLDLPLGVKLPVIPGSNAVFYTTNFGEKLFRPSYGFNLTDPYCRLLENQYKSLHDPHLKAYYKRKDILKRLKKGGYITSNNKVVCTLRELNKYRQYLTSLKLDFERNYIKEQRILAKQLHNIPENNQIPQHCDVAQVQNWLLKEGTESIKDQERLMRHRYLDMISRKLEQLERTAEEQRLFLMDREERRQREHTRRKLTLRRKIEEEWKTKEMLLLTRMAEDVKREERIEEQQHRNREESDRKKQDLLEKKMAYHLQKMQDTGFNGEDIGKNTFKYRGQDGTHASPKNKKKTSEDIMLVYPAGDQNTYKETHGHTANAAHQRQNSSNNFTKKNSASVVYQADVQDNGINQKRDGMVSKNSSIFDDRGGINISGQGSIISAQVSPTRNFSRVSQAFLDPSKEEKETNADWDGRPTKRSSYLCESGPQAHATDPGIFSSPVYTNMQQNLLQNCLQEKVTSEELNIIIQNVMTWVVATVTSILYPAITKYEKRLQNNTYPVSDDSILSSDSSSFCSTCSEDFTYRSYTSATTKTFQAEPCAFVVDTSVRRPTTPIKPPPAHVEKTVVGKTCHIKGQSIISKHKYNKTNLLYSYPKLRSCKSDSHLLASFETGTKKSKDATTETDSLGSSLHCDKTAKAMDEMKNLKNVFVNFKCYLKGETEVILESILREIMSDLTQAIPSLSSVTAEVFVEQCEREKEILLSNAHIPSVASEIVENMLEKLESAVEKKCVEMFSQDLSVDIKPSLAASDELLTSSNGKPLKNSMPHTLDPMCDIAEDMVHAILEKLMTLVSFKQNEFLHLKDTNKLSCQQHKTDPICMFLQRAGKNKSSLESDEASLIVNEEVQNLISNIFSQSSLVAYIEEAINAILGYIQTELNNERIIASEETVVLLQLLEDILFQLHQEPVNESFQKSRQPRISSPSDTKEKYRLTGTRLSNSPRSGRPFPPINVPGMVLYSDDENEEIDNIVKNVLDSTFKDEKVKSQEQIPNHWFTKGNTCFECKRNIKPPTKPGSRSKAAFHDWELKTEPPSTNHEDILKKKLSSNKDISTFSQDQKHQIEKASENIVTSILKEMLKDISSVPFGHLDSKTGSEASVLVSEKPQGLSHQEWIDQMFSVSEISTVAQEITDSVLNILHKASNYISNTTKSSISSSVHQISLHNSDTEHIVKEAPNKYPLKTWFDSEKKMKYLSLFDVDPEKPPWLKSGKSEPKPVDDINDKIIRTIFKRLKSFICPKLHMGFKSSLRSQLSKYTAKIVNIVLCAIQNELELHKENLNLREIDHTKSLTDKGFFANTDKKLESLVTSIDDDILASPLLTCIYDMLLSSENAHQRSISLSSRKPKSATDSVDVQSILPNRQDKKSFHKYLATPCTHHSVNGGNHIKENAKLQVLERIGETLHEMLSKLLGTHLHSQLSCSQQSREMTNKNQKMAAALQSNIQLISKAILDYILAKLCGVDMDTSFASCGLKAISESLDIDNPSFASIIEKMAKSTKIISSIVSRRVQEDNKEETKSKAKPVAPVSSKTPSTKEMHPNKLKAVASDILNMVFAKLEGFANGHLEILGAINDGNKKSNKIGWEYESTNISRDTHEASFLSALYMHAKKVSSAILKVIQTELNVTSSDLKTSVENPPPETQILKYVVKLILDAVSSDMFNEMESEGGGIETYRYRPTYGSLPGGAESDSFLEDDAYTAKKIIDERSPQREEVKTRSLKQWALEKTLNKIEVKLKEPHISPIAPIIRNILNEIFQSTLINQLNVLSLSHSNFNGMPHNVDEPTPQTSVQFMDKMMDPLLSEADITIVTDNIVRTVFHKLYSAAMTERNVRENRYKTITFSANVSSHEHTYKGKSSVTALDENPCTFQSRFSVADKETKVNLAEDIVQAILTNLETFATSKVKSLFYSQVNFTVPVALPIQQDHSTLSKALSAKDSYSDEQFSCCSVDHTKSGKTNLCQLSLSKLNTYALQVARRNLQGIKQELDKERENPFLTHDIGISESIASQIVNALLDIISRKGKCDKNSSDKEIDLDQQKGVIEKLLNETKYRKVLQLQIQDTIEGILCDIYEKTLFQNNLSFATPTLKCSIADKHSEENSEMFMEGANKIIPKLSVPKSDVILISNDIVNIVLHNLSSAATLVINAKNPTSARLPLTFCDTFPKIDCQQPLKGSKTERKTERFSYSRNQKSAYADDNQITVVEKEDTQKSATDSCEENANFITKTIFKRLESFATERIDSLITLAFQSKEKSFVIPELENCKQNDSIFYDSSQVESDVNVLKISATETILSQELTDFTFVGRREKLGSTIHLSQARLKTYADVIASAILKLIKNDLDLEIQKIYPYQNNILFQENIIVSEIVDSMLKMLDDKRSVKEICFNSKENSNFSQLALSNEILLGHKEKERSTKQSLFTKYPLEQNQMILENKRQIIVLEEIFMRNGESKNKEKGELLIAVEELLNKLYQRVREVTGHLPPLNETANFISNSKIKTSDTTQKNSFQSHINSVANDIVESVLGKMYLVVVTSLYENNKSRTEVEISDHNDSLLMKPLRFRETKQAGKISNSPRYAISQAYSYVDSQNISVMENTLLPYLPLQVKKDLIQMVLNKITNFVSLPLKVSPKDNPKPCFKAHLKTRSKITTLPKFTKKTHLGLSAAKAKSKTKLGPGEKTLKDSRSKTAIGLSHIMSAGDAKNLLDTKLPTSELKIYAKDIIINILETIVKEFGKVKQTKALPSDQIIAAGKIVNTVLQELYVTNNCNLAYPMKSSHLRLSQGNIGTGSLPKQQACFYLENVSSQLEHIFPREGIFKKLFDKWQTESNDKENEKCKLLMIAENVLTEISIKAKELEYSLSLLNLPPLENCESRFYNHFKGASTRAEDTKAQINMFGREIVEMLLEKLQLCFLSQIPTPDSEETLSNSKEHITAKSKYGFPNKHSLSSLPIYNTKTKDQISVGSSNQIVQEIVETVLNMLESFVDLQFKHISKYEFSEIVKMPIENLSSIQQKLLNKKMLPKLQPLKMFSDKSESNTINFKENIQNILLRVHSFHSQLLTYAVNIISDMLAVIKNKLDNEISQMEPSSISILKENIVASEIIGTLMDQCTYFNESLIQNLSRESLFQGAENAYTVNQVELATNMKMFTSKLKEGSLGINPSQVSKTGFVFCSDEDMKEKYRVSSDLPTSVRSSVEDTVKNSEPTKRPDSETMPSCSTRNKVQDHRPRESNFGSFDQTMKGNSYLPEGSFLQKLLRKASDSTEAALKQVLSFIEMGKGENLRVFHYENLKPVVEPNQIQTTISPLKICLAAENIVNTVLSSCGFPSQPHTNENREIMKPFFISKQSSLSEVSGGQKDNEKSLLRMQDKKINYIPEEENENLEASREDSSFLQKLKKKEYPKIETVKEVEAFTFADHEMGSNEVHLIARHVTTSVVTYLKNFETTVFSEEKMSVSTWSRKKYESKQFLRNIYDDSSIYQCCEHLTESVLYHLTSSISDGTKKGREKEKAWEIQEATFSKIISIHSQVFESRSISIGELALCISEIIIKILFNNKIIQADIAQKMVAIPTKYTYCPGIVSGGFDDLFQDLLVGVIHVLSKEIEVDYHFESNVRNKSFSMHRNNSVPLCNKINRQASPRDWQFSTQQIGQLFQKNKLSYLACKLNSLVGNLKTSESKEVVNKVFNIVSDLFSPDECLDTGMDSGKIQRTYFYSSNNEQPNSILTNNLQLSSKSVFLLNVVCEKLIRILLEECTSTAFPDKGSVSEETSAEECQLLKMLQSVEDGKSDYRKGGMDCECLQVDYMSDLLENVAEIDQDLLTSDSMLTIISHSLVKSLMDKLSHSIQQAPESLPFANKHLNYRTREIQSSFIKARKSELIELGQSKSSLELRSYDSNSLTVSLNNPSVVSSKIQAPFNKHCAVKSSSVSPFERQRTKEMDKVAIHNKLHQEGIYAGVYSATFLEGIISELFFNLSMSLWGKNKNITVSWLNEMNTLFVNNVVNEFNNAQVTVLRNAEERLCFPPVHTETVSKIVDSVYYDVLQQYELKVACGNNPVYDNASIAEQITNGILLEILDYKLPSCFKEHLIPHSYYPLKPEIILQKLQSNLTEFTSLPRSSSDYSTMLSHSFLEDVIRRLLSQLIPPPITCSSLGKKYLMSSDFNEMSTCIINKVMSAISKHKIWFTIYDNQYLYTGKNLQKMVDSVYCNILQMSDSLVSIQKSIVSRSPIMIDQIASFIIQEIIENHLQPFLSGEVLCHPRTPLDPVSTIVTQVLSEVIESHRPQKQSPLDIHLDSFVREIVARLLSKIFSPKHNTEIELKNMTQRIVNSINRHFNKAKIHILYDDKEQAFFSFNTDIVDELATSVYRNALKQHGLDLAVDKESEDSGIFVENITNLIVAAISDYLLHPLFSGDFSASTYSNSVAENIVQDILSNISKSTEPSQSVPLYNTLLPYTFLEDMIRVLLSKLFSSASSLVLNRDTQKDISRVNFNDIASNLVSDIRMKVSQHEIRFSKEEEETKFIYSEDDIQHLVDSVFANVVQTSGSQESAVQNITSSNDILIDRIAGFIIKHICQKHLQPFVSGKSLSSSDTYFDDERRQLFYTSVYSSTFLEDVISGVLRKIFHRVVGIVQTKSIRDSEDELFEKAEELIHLITGEFSKAQVSIIDNTEERLCLPPVERDVVKTIVDMVYSKVLQEYEMEVVPNKDFLNDTKTLAARITNIILAEIFDFQIHPDLIANLPFKSHSKLSANVLIQRVQYDISKSRFQRQASTMYTTMLSHSHLEKIVTQLTSQISPLNTSAEQSDTTKSDLSNTVIKLINEIMSIISKHEICIIKYGNKKQSMISAKDIQSMVDSIYADLSHSNIYQSITKDKKSISDIPVSKIASFIIKEIFNHHIQSFLSEDKTLLLAAVDQTYKLKAIDPKQRELSFIVNSSVFLEEVISELLCKILYAFSHNMLVTENPDRVKLKLTRIVTTLVNSIVLEFTTSEILVADNFDKNLCFSERYKEMVQKIVNSVYGKVLDQYKSLIQIHRVIQSDTICFGRKIYYLLLEEIYDYQVQSLVSGELESSSYSYPQADNIIRNVLNIITKDSHALPPYITVLPHSLLEDMVYRLLGHVFPSTHTENELKEKKFPPDDEFVEAASKLTDEIIKEISEHEIRLSMAEDNAESMQLEPIENLVDSICNNILKTSEFQAEVQKDADKKGCSFLSKLAGFIMKEIMYHHLQPFLHGEESSFSDLSDYDHVSELAKSGKEKTQPSLYSATFLEDIIIDLVHKFCSLLIITEDSKKNEMAELDIMGLALKLANSLIREFKKSDIKVLPNAEKMFSFPPIDKETVDKISNFVYEQFIEKCTSHDIQKGDESNIAIGMIAALTQKAISAFRIQPLFSGDWSSTFFSFLNPDNITQRVQHLPQNTFTQISRCAKENQLSLPDQSYKDTSSTPDCKNMMSTLEINRGTMNRKKSFKTKDTSVKKGDIQNPVLSSINAIMKSGMINLTSGLATGVTNKKEVDENKVGICTQKHSENVSKVTSTTTVKSKDTQEPNLSETFNNNEIEKKRNLIPTDKKGKDDEIYTHFSLIIDDTEYEKEVLGSDSEIGYKKKIDNARESSFKKDDKLFQLSSLKSKRNLGTTTDTLEIRIRTSSNEGRRDSPTQTCRDEEHHSDYEHVQNVIENIFEDVLELSSSPEPAYYSKLSYDQSPPGDNVLNVIQEISRDSAQSVTTKKVSSSTNKNISAKEKEEEEREKEKVREEIKSEPSKPDDPQNQRESKPGIFPAKFLEDVITEMVKQLIFSSIPETQIQDRCQNVSDKQNQAKLYDTAMKLINSLLKEFSDAQIKVFRPDKGNQFPGGKVSSVPKVPPRYKEPTTDEAPSSIKIKSADKMPPMHKMMRKPSSDKIPSIDKTLVNKVVHSSVCNILNDYGSQDSIWKNINSNGENLARRLTSAVINEIFQRQVNLIFCDEVSVSACLPLESKDVVKKVQKLAQTASKECQTSSPYTIILPHKFLENVISALFSKIFSTISSTKTKEPEDNLSTELNFLQMKLVSAVATEISQDKYMTIQYVETLQSDDDEIIQLVVQSVYNNLLPQFGSQEIIQNCVTSGCKILSENIVDLVLREVASNQLQSYFCGELTPHQCVEVENIVEKILKDVFQTTDVPLPKPSHADKLSYNIIEEIAVKFLSKLLSIFPKVHKERTKSLETDMQKITSKVLNSVQEFISKSKIKLVPPTKESPTVPVADNATIENIVNSIYTSVLKHSGSYTSVFKDLMGKSNVLSDTIGFLMVNAISNSEFQPQVEEEVSNSELVLEAVKIMEKVIKIIDELKSKEKSSSRKGLTLDAKLLEEVLALFLAKLIRLPSSSSKDEKNLSKTELNKIASQLSKLVTAEISRSSISLIASDPEEHCLNPENTERIYQVVDSVYSNILQQSGTNKEFYYDIKDTNTAFPKKVASLIIDGVSSFPLDTINSTISNADLSGELDVNRIVQKAQEHAFNVIPELEQEKLDQNLSEEESPIKIVPHVGKKPVKIDPKIISEHLAVISIKTQPLEKLKQECLKRTGHSIAELRRASISGRNYSLGSPDLEKRKTERRTSLDKTGRLDVKPLEAVARNSFQNIRKPDITKVELLKDVQSKNDLIVRLVAHDIDQVYLENYIKEERDSDEDEVVLTQTFAKEEGIKVFEDQVKEVKKPIQSKLSPKSTLSTSSLKKFLSLSKCCQTTASANIESTEAISNQVIESKETHVKRAVAELDMATPKTMPETASSSWEEKPQCKKEEKNLVTEPTHYFIHRIMSSSSYNQEDLISSTGEAEDCHSDPSAKILEESSQEQKPEHGNSVKFITIFERSKDVLGSANPSKEVISETPKPDVSKQGSKMLTKMSSTLSKVFSQCNTNISRSSSPAHQDEH

SEQ ID NO: 22258 - protein, 3466 aa, Homo sapiens
MELYLGACSKPAKVAVTKTVASVLAADTQQCRDGVHKTHFAGVGPAQLLDLPLGVKLPVIPGSNAVFYTTNFGEKLFRPSYGFNLTDPYCRLLENQYKSLHDPHLKAYYKRKDILKRLKKGGYITSNNKVVCTLRELNKYRQYLTSLKLDFERNYIKEQRILAKQLHNIPENNQIPQHCDVAQVQNWLLKEGTESIKDQERLMRHRYLDMISRKLEQLERTAEEQRLFLMDREERRQREHTRRKLTLRRKIEEEWKTKEMLLLTRMAEDVKREERIEEQQHRNREESDRKKQDLLEKKMAYHLQKMQDTGFNGEDIGKNTFKYRGQDGTHASPKNKKKTSEDIMLVYPAGDQNTYKETHGHTANAAHQRQNSSNNFTKKNSASVVYQADVQDNGINQKRDGMVSKNSSIFDDRGGINISGQGSIISAQVSPTRNFSRVSQAFLDPSKEEKETNADWDGRPTKRSSYLCESGPQAHATDPGIFSSPVYTNMQQNLLQNCLQEKVTSEELNIIIQNVMTWVVATVTSILYPAITKYEKRLQNNTYPVSDDSILSSDSSSFCSTCSEDFTYRSYTSATTKTFQAEPCAFVVDTSVRRPTTPIKPPPAHVEKTVVGKTCHIKGQSIISKHKYNKTNLLYSYPKLRSCKSDSHLLASFETGTKKSKDATTETDSLGSSLHCDKTAKAMDEMKNLKNVFVNFKCYLKGETEVILESILREIMSDLTQAIPSLSSVTAEVFVEQCEREKEILLSNAHIPSVASEIVENMLEKLESAVEKKCVEMFSQDLSVDIKPSLAASDELLTSSNGKPLKNSMPHTLDPMCDIAEDMVHAILEKLMTLVSFKQNEFLHLKDTNKLSCQQHKTDPICMFLQRAGKNKSSLESDEASLIVNEEVQNLISNIFSQSSLVAYIEEAINAILGYIQTELNNERIIASEETVVLLQLLEDILFQLHQEPVNESFQKSRQPRISSPSDTKEKYRLTGTRLSNSPRSGRPFPPINVPGMVLYSDDENEEIDNIVKNVLDSTFKDEKVKSQEQIPNHWFTKGNTCFECKRNIKPPTKPGSRSKAAFHDWELKTEPPSTNHEDILKKKLSSNKDISTFSQDQKHQIEKASENIVTSILKEMLKDISSVPFGHLDSKTGSEASVLVSEKPQGLSHQEWIDQMFSVSEISTVAQEITDSVLNILHKASNYISNTTKSSISSSVHQISLHNSDTEHIVKEAPNKYPLKTWFDSEKKMKYLSLFDVDPEKPPWLKSGKSEPKPVDDINDKIIRTIFKRLKSFICPKLHMGFKSSLRSQLSKYTAKIVNIVLCAIQNELELHKENLNLREIDHTKSLTDKGFFANTDKKLESLVTSIDDDILASPLLTCIYDMLLSSENAHQRSISLSSRKPKSATDSVDVQSILPNRQDKKSFHKYLATPCTHHSVNGGNHIKENAKLQVLERIGETLHEMLSKLLGTHLHSQLSCSQQSREMTNKNQKMAAALQSNIQLISKAILDYILAKLCGVDMDTSFASCGLKAISESLDIDNPSFASIIEKMAKSTKIISSIVSRRVQEDNKEETKSKAKPVAPVSSKTPSTKEMHPNKLKAVASDILNMVFAKLEGFANGHLEILGAINDGNKKSNKIGWEYESTNISRDTHEASFLSALYMHAKKVSSAILKVIQTELNVTSSDLKTSVENPPPETQILKYVVKLILDAVSSDMFNEMESEGGGIETYRYRPTYGSLPGGAESDSFLEDDAYTAKKIIDERSPQREEVKTRSLKQWALEKTLNKIEVKLKEPHISPIAPIIRNILNEIFQSTLINQLNVLSLSHSNFNGMPHNVDEPTPQTSVQFMDKMMDPLLSEADITIVTDNIVRTVFHKLYSAAMTERNVRENRYKTITFSANVSSHEHTYKGKSSVTALDENPCTFQSRFSVADKETKVNLAEDIVQAILTNLETFATSKVKSLFYSQVNFTVPVALPIQQDHSTLSKALSAKDSYSDEQFSCCSVDHTKSGKTNLCQLSLSKLNTYALQVARRNLQGIKQELDKERENPFLTHDIGISESIASQIVNALLDIISRKGKCDKNSSDKEIDLDQQKGVIEKLLNETKYRKVLQLQIQDTIEGILCDIYEKTLFQNNLSFATPTLKCSIADKHSEENSEMFMEGANKIIPKLSVPKSDVILISNDIVNIVLHNLSSAATLVINAKNPTSARLPLTFCDTFPKIDCQQPLKGSKTERKTERFSYSRNQKSAYADDNQITVVEKEDTQKSATDSCEENANFITKTIFKRLESFATERIDSLITLAFQSKEKSFVIPELENCKQNDSIFYDSSQVESDVNVLKISATETILSQELTDFTFVGRREKLGSTIHLSQARLKTYADVIASAILKLIKNDLDLEIQKIYPYQNNILFQENIIVSEIVDSMLKMLDDKRSVKEICFNSKENSNFSQLALSNEILLGHKEKERSTKQSLFTKYPLEQNQMILENKRQIIVLEEIFMRNGESKNKEKGELLIAVEELLNKLYQRVREVTGHLPPLNETANFISNSKIKTSDTTQKNSFQSHINSVANDIVESVLGKMYLVVVTSLYENNKSRTEVEISDHNDSLLMKPLRFRETKQAGKISNSPRYAISQAYSYVDSQNISVMENTLLPYLPLQVKKDLIQMVLNKITNFVSLPLKVSPKDNPKPCFKAHLKTRSKITTLPKFTKKTHLGLSAAKAKSKTKLGPGEKTLKDSRSKTAIGLSHIMSAGDAKNLLDTKLPTSELKIYAKDIIINILETIVKEFGKVKQTKALPSDQIIAAGKIVNTVLQELYVTNNCNLAYPMKSSHLRLSQGNIGTGSLPKQQACFYLENVSSQLEHIFPREGIFKKLFDKWQTESNDKENEKCKLLMIAENVLTEISIKAKELEYSLSLLNLPPLENCESRFYNHFKGASTRAEDTKAQINMFGREIVEMLLEKLQLCFLSQIPTPDSEETLSNSKEHITAKSKYGFPNKHSLSSLPIYNTKTKDQISVGSSNQIVQEIVETVLNMLESFVDLQFKHISKYEFSEIVKMPIENLSSIQQKLLNKKMLPKLQPLKMFSDKSESNTINFKENIQNILLRVHSFHSQLLTYAVNIISDMLAVIKNKLDNEISQMEPSSISILKENIVASEIIGTLMDQCTYFNESLIQNLSRESLFQGAENAYTVNQVELATNMKMFTSKLKEGSLGINPSQVSKTGFVFCSDEDMKEKYRVSSDLPTSVRSSVEDTVKNSEPTKRPDSETMPSCSTRNKVQDHRPRESNFGSFDQTMKGNSYLPEGSFLQKLLRKASDSTEAALKQVLSFIEMGKGENLRVFHYENLKPVVEPNQIQTTISPLKICLAAENIVNTVLSSCGFPSQPHTNENREIMKPFFISKQSSLSEVSGGQKDNEKSLLRMQDKKINYIPEEENENLEASREDSSFLQKLKKKEYPKIETVKEVEAFTFADHEMGSNEVHLIARHVTTSVVTYLKNFETTGRC

SEQ ID NO: 22259 - protein, 423 aa, Homo sapiens
MLPPQKKPWESMAKGLVLGALFTSFLLLVYSYAVPPLHAGLASTTPEAAASCSPPALEPEAVIRANGSAGECQPRRNIVFLKTHKTASSTLLNILFRFGQKHRLKFAFPNGRNDFDYPTFFARSLVQDYRPGACFNIICNHMRFHYDEVRGLVPTNAIFITVLRDPARLFESSFHYFGPVVPLTWKLSAGDKLTEFLQDPDRYYDPNGFNAHYLRNLLFFDLGYDNSLDPSSPQVQEHILEVERRFHLVLLQEYFDESLVLLKDLLCWELEDVLYFKLNARRDSPVPRLSGELYGRATAWNMLDSHLYRHFNASFWRKVEAFGRERMAREVAALRHANERMRTICIDGGHAVDAAAIQDEAMQPWQPLGTKSILGYNLKKSIGQRHAQLCRRMLTPEIQYLMDLGANLWVTKLWKFIRDFLRW

SEQ ID NO: 22260 - protein, 575 aa, Homo sapiens
MASWLRRKLRGKRRPVIAFCLLMILSAMAVTRFPPQRPSAGPDPGPMEPQGVTGAPATHIRQALSSSRRQRARNMGFWRSRALPRNSILVCAEEQGHRARVDRSRESPGGDLRHPGRVRRDITLSGHPRLSTQHVVLLREDEVGDPGTKDLGHPQHGSPIQETQSEVVTLVSPLPGSDMAALPAWRATSGLTLWPHTAEGRDLLGAENRALTGGQQAEDPTLASGAHQWPGSVEKLQGSVWCDAETLLSSSRTGGQAPPWLTDHDVQMLRLLAQGEVVDKARVPAHGQVLQVGFSTEAALQDLSSPRLSQLCSQGLCGLIKRPGDLPEVLSFHVDRVLGLRRSLPAVARRFHSPLLPYRYTDGGARPVIWWAPDVQHLSDPDEDQNSLALGWLQYQALLAHSCNWPGQAPCPGIHHTEWARLALFDFLLQVHDRLDRYCCGFEPEPSDPCVEERLREKCQNPAELRLVHILVRSSDPSHLVYIDNAGNLQHPEDKLNFRLLEGIDGFPESAVKVLASGCLQNMLLKSLQMDPVFWESQGGAQGLKQVLQTLEQRGQVLLGHIQKHNLTLFRDEDP

SEQ ID NO: 22261 - protein, 189 aa, Homo sapiens
METSAPRAGSQVVATTARHSAAYRADPLRVSSRDKLTEMAASSQGNFEGNFESLDLAEFAKKQPWWRKLFGQESGPSAEKYSVATQLFIGGVTGWCTGFIFQKVGKLAATAVGGGFFLLQLANHTGYIKVDWQRVEKDMKKAKEQLKIRKSNQIPTEVRSKAEEVVSFVKKNVLVTGGFFGGFLLGMAS

SEQ ID NO: 22262 - protein, 647 aa, Homo sapiens
MAEEEAPKKSRAAGGGASWELCAGALSARLAEEGSGDAGGRRRPPVDPRRLARQLLLLLWLLEAPLLLGVRAQAAGQGPGQGPGPGQQPPPPPQQQQSGQQYNGERGISVPDHGYCQPISIPLCTDIAYNQTIMPNLLGHTNQEDAGLEVHQFYPLVKVQCSAELKFFLCSMYAPVCTVLEQALPPCRSLCERARQGCEALMNKFGFQWPDTLKCEKFPVHGAGELCVGQNTSDKGTPTPSLLPEFWTSNPQHGGGGHRGGFPGGAGASERGKFSCPRALKVPSYLNYHFLGEKDCGAPCEPTKVYGLMYFGPEELRFSRTWIGIWSVLCCASTLFTVLTYLVDMRRFSYPERPIIFLSGCYTAVAVAYIAGFLLEDRVVCNDKFAEDGARTVAQGTKKEGCTILFMMLYFFSMASSIWWVILSLTWFLAAGMKWGHEAIEANSQYFHLAAWAVPAIKTITILALGQVDGDVLSGVCFVGLNNVDALRGFVLAPLFVYLFIGTSFLLAGFVSLFRIRTIMKHDGTKTEKLEKLMVRIGVFSVLYTVPATIVIACYFYEQAFRDQWERSWVAQSCKSYAIPCPHLQAGGGAPPHPPMSPDFTVFMIKYLMTLIVGITSGFWIWSGKTLNSWRKFYTRLTNSKQGETTV

SEQ ID NO: 22263 - protein, 1309 aa, Homo sapiens
MQPLTKDAGMSLSSVTLASALQVRGEALSEEEIWSLLFLAAEQLLEDLRNDSSDYVVCPWSALLSAAGSLSFQGRVSHIEAAPFKAPELLQGQSEDEQPDASQMHVYSLGMTLYWSAGFHVPPHQPLQLCEPLHSILLTMCEDQPHRRCTLQSVLEACRVHEKEVSVYPAPAGLHIRRLVGLVLGTISEVEKRVVEESSSVQQNRSYLLRKRLRGTSSESPAAQAPECLHPCRVSERSTETQSSPEPHWSTLTHSHCSLLVNRALPGADPQDQQAGRRLSSGSVHSAADSSWPTTPSQRGFLQRRSKFSRPEFILLAGEAPMTLHLPGSVVTKKGKSYLALRDLCVVLLNGQHLEVKCDVESTVGAVFNAVTSFANLEELTYFGLAYMKSKEFFFLDSETRLCKIAPEGWREQPQKTSMNTFTLFLRIKFFVSHYGLLQHSLTRHQFYLQLRKDILEERLYCNEEILLQLGVLALQAEFGNYPKEQVESKPYFHVEDYIPASLIERMTALRVQVEVSEMHRLSSALWGEDAELKFLRVTQQLPEYGVLVHQVFSEKRRPEEEMALGICAKGVIVYEVKNNSRIAMLRFQWRETGKISTYQKKFTITSSVTGKKHTFVTDSAKTSKYLLDLCSAQHGFNAQMGSGQPSHVLFDHDKFVQMANLSPAHQARSKPLIWIQRLSCSENELFVSRLQGAAGGLLSTSMDNFNVDGSKEAGAEGIGRSPCTGREQLKSACVIQKPMTWDSLSGPPVQSMHAGSKNNRRKSFIAEPGREIVRVTLKRDPHRGFGFVINEGEYSGQADPGIFISSIIPGGPAEKAKTIKPGGQILALNHISLEGFTFNMAVRMIQNSPDNIELIISQSKGVGGNNPDEEKNSTANSGVSSTDILSFGYQGSLLSHTQDQDRNTEELDMAGVQSLVPRLRHQLSFLPLKGAGSSCPPSPPEISAGEIYFVELVKEDGTLGFSVTGGINTSVPYGGIYVKSIVPGGPAAKEGQILQGDRLLQVDGVILCGLTHKQAVQCLTGPGQVARLVLERRVPRSTQQCPSANDSMGDERTAVSLVTALPGRPSSCVSVTDGPKFEVKLKKNANGLGFSFVQMEKESCSHLKSDLVRIKRLFPGQPAEENGAIAAGDIILAVNGRSTEGLIFQEVLHLLRGAPQEVTLLLCRPPPGALPELEQEWQTPELSADKEFTRATCTDSCTSPILDQEDSWRDSASPDAGEGLGLRPESSQKAIREAQWGQNRERPWASSLTHSPESHPHLCKLHQERDESTLATSLEKDVRQNCYSVCDIMRLGRYSFSSPLTRLSTDIF

SEQ ID NO: 22264 - protein, 1284 aa, Homo sapiens
MHVFIVGMSLSSVTLASALQVRGEALSEEEIWSLLFLAAEQLLEDLRNDSSDYVVCPWSALLSAAGSLSFQGRVSHIEAAPFKAPELLQGQSEDEQPDASQPLQLCEPLHSILLTMCEDQPHRRCTLQSVLEACRVHEKEVSVYPAPAGLHIRRLVGLVLGTISEVEKRVVEESSSVQQNRSYLLRKRLRGTSSESPAAQAPECLHPCRVSERSTETQSSPEPHWSTLTHSHCSLLVNRALPGADPQDQQAGRRLSSGSVHSAADSSWPTTPSQRGFLQRRSKFSRPEFILLAGEAPMTLHLPGSVVTKKGKSYLALRDLCVVLLNGQHLEVKCDVESTVGAVFNAVTSFANLEELTYFGLAYMKSKEFFFLDSETRLCKIAPEGWREQPQKTSMNTFTLFLRIKFFVSHYGLLQHSLTRHQFYLQLRKDILEERLYCNEEILLQLGVLALQAEFGNYPKEVESKPYFHVEDYIPASLIERMTALRVQVEVSEMHRLSSALWGEDAELKFLRVTQQLPEYGVLVHQVFSEKRRPEEEMALGICAKGVIVYEVKNNSRIAMLRFQWRETGKISTYQKKFTITSSVTGKKHTFVTDSAKTSKYLLDLCSAQHGFNAQMGSGQPSHVLFDHDKFVQMANLSPAHQARSKPLIWIQRLSCSENELFVSRLQGAAGGLLSTSMDNFNVDGSKEAGAEGIGRSPCTGREQLKSACVIQKPMTWDSLSGPPVQSMHAGSKNNRRKSFIAEPGREIVRVTLKRDPHRGFGFVINEGEYSGQADPGIFISSIIPGGPAEKAKTIKPGGQILALNHISLEGFTFNMAVRMIQNSPDNIELIISQSKGVGGNNPDEEKNSTANSGVSSTDILSFGYQGSLLSHTQDQDRNTEELDMAGVQSLVPRLRHQLSFLPLKGAGSSCPPSPPEISAGEIYFVELVKEDGTLGFSVTGGINTSVPYGGIYVKSIVPGGPAAKEGQILQGDRLLQVDGVILCGLTHKQAVQCLTGPGQVARLVLERRVPRSTQQCPSANDSMGDERTAVSLVTALPGRPSSCVSVTDGPKFEVKLKKNANGLGFSFVQMEKESCSHLKSDLVRIKRLFPGQPAEENGAIAAGDIILAVNGRSTEGLIFQEVLHLLRGAPQEVTLLLCRPPPGALPELEQEWQTPELSADKEFTRATCTDSCTSPILDQEDSWRDSASPDAGEGLGLRPESSQKAIREAQWGQNRERPWASSLTHSPESHPHLCKLHQERDESTLATSLEKDVRQNCYSVCDIMRLGRYSFSSPLTRLSTDIF

SEQ ID NO: 22265 - protein, 392 aa, Homo sapiens
MQPLTKDAGMSLSSVTLASALQVRGEALSEEEIWSLLFLAAEQLLEDLRNDSSDYVVCPWSALLSAAGSLSFQGRVSHIEAAPFKAPELLQGQSEDEQPDASQMHVYSLGMTLYWSAGFHVPPHQPLQLCEPLHSILLTMCEDQPHRRCTLQSVLEACRVHEKEVSVYPAPAGLHIRRLVGLVLGTISEVEKRVVEESSSVQQNRSYLLRKRLRGTSSESPAAQAPECLHPCRVSERSTETQSSPEPHWSTLTHSHCSLLVNRALPGADPQDQQAGRRLSSGSVHSAADSSWPTTPSQRGFLQRRSKFSRPEFILLAGEAPMTLHLPGSVVTKKGKSYLALRDLCVVLLNGQHLEVKCDVESTVGAVFNAVTSFANLEELTYFGLAYMKSGE

SEQ ID NO: 22266 - protein, 320 aa, Homo sapiens
MTSIPFPGDRLLQVDGVILCGLTHKQAVQCLTGPGQVARLVLERRVPRSTQQCPSANDSMGDERTAVSLVTALPGRPSSCVSVTDGPKFEVKLKKNANGLGFSFVQMEKESCSHLKSDLVRIKRLFPGQPAEENGAIAAGDIILAVNGRSTEGLIFQEVLHLLRGAPQEVTLLLCRPPPGALPELEQEWQTPELSADKEFTRATCTDSCTSPILDQEDSWRDSASPDAGEGLGLRPESSQKAIREAQWGQNRERPWASSLTHSPESHPHLCKLHQERDESTLATSLEKDVRQNCYSVCDIMRLGRYSFSSPLTRLSTDIF

SEQ ID NO: 22267 - protein, 261 aa, Homo sapiens
MGDERTAVSLVTALPGRPSSCVSVTDGPKFEVKLKKNANGLGFSFVQMEKESCSHLKSDLVRIKRLFPGQPAEENGAIAAGDIILAVNGRSTEGLIFQEVLHLLRGAPQEVTLLLCRPPPGALPELEQEWQTPELSADKEFTRATCTDSCTSPILDQEDSWRDSASPDAGEGLGLRPESSQKAIREAQWGQNRERPWASSLTHSPESHPHLCKLHQERDESTLATSLEKDVRQNCYSVCDIMRLGRYSFSSPLTRLSTDIF

SEQ ID NO: 22268 - protein, 633 aa, Homo sapiens
MAHLKRLVKLHIKRHYHKKFWKLGAVIFFFIIVLVLMQREVSVQYSKEESRMERNMKNKNKMLDLMLEAVNNIKDAMPKMQIGAPVRQNIDAGERPCLQGYYTAAELKPVLDRPPQDSNAPGASGKAFKTTNLSVEEQKEKERGEAKHCFNAFASDRISLHRDLGPDTRPPECIEQKFKRCPPLPTTSVIIVFHNEAWSTLLRTVHSVLYSSPAILLKEIILVDDASVDEYLHDKLDEYVKQFSIVKIVRQRERKGLITARLLGATVATAETLTFLDAHCECFYGWLEPLLARIAENYTAVVSPDIASIDLNTFEFNKPSPYGSNHNRGNFDWSLSFGWESLPDHEKQRRKDETYPIKTPTFAGGLFSISKEYFEYIGSYDEEMEIWGGENIEMSFRVWQCGGQLEIMPCSVVGHVFRSKSPHSFPKGTQVIARNQVRLAEVWMDEYKEIFYRRNTDAAKIVKQKAFGDLSKRFEIKHRLQCKNFTWYLNNIYPEVYVPDLNPVISGYIKSVGQPLCLDVGENNQGGKPLIMYTCHGLGGNQYFEYSAQHEIRHNIQKELCLHAAQGLVQLKACTYKGHKTVVTGEQIWEIQKDQLLYNPFLKMCLSANGEHPSLVSCNPSDPLQKWILSQND

SEQ ID NO: 22269 - protein, 192 aa, Homo sapiens
MAHLKRLVKLHIKRHYHKKFWKLGAVIFFFIIVLVLMQREVSVQYSKEESRMERNMKNKNKMLDLMLEAVNNIKDAMPKMQIGAPVRQNIDAGERPCLQGYYTAAELKPVLDRPPQDSNAPGASGKAFKTTNLSVEEQKEKERGEAKHCFNAFASDRISLHRDLGPDTRPPEYVEEYLLFILYHQALQGREG

SEQ ID NO: 22270 - protein, 236 aa, Homo sapiens
MSAPSATPIFAPGENCSPAWGAAPAAYDAADTHLRILGKPVMERWETPYMHALAAAASSKGGRVLEVGFGMAIAASKVQEAPIDEHWIIECNDGVFQRLRDWAPRQTHKVIPLKGLWEDVAPTLPDGHFDGILYDTYPLSEETWHTHQFNFIKNHAFRLLKPGGVLTYCNLTSWGELMKSKYSDITIMFEETQVPALLEAGFRRENIRTEVMALVPPADCRYYAFPQMITPLVTKG

SEQ ID NO: 22271 - protein, 269 aa, Homo sapiens
MSAPSATPIFAPGENCSPAWGAAPAAYDAADTHLRILGKPVMERWETPYMHALAAAASSKGGRVLEVGFGMAIAASKVQEAPIDEHWIIECNDGVFQRLRDWAPRQTHKVIPLKGLWEDVAPTLPDGHFDGILYDTYPLSEETWHTHQFNFIKNHAFRLLKPGGVLTYCNLTSWGELMKSKYSDITIMFEVRPPEVPHGSPGSDLGWGWEGAAGATLLPGEGPFLTPWVGWTVLVHLEIKVLCLAQWLPGAVAQVYNPSTVEGRGGQIA

SEQ ID NO: 22272 - protein, 482 aa, Homo sapiens
MKFEEKCGDNGSIVGRNQSYPGEKHQPKGKPIANGEAEVYAKQEANGKCSTPRKSLSMYTWLEIQRHNHEADQLVINCKVYNVSSWADRHPGGHQVLNHCAGEDAMDVFRAMHPELDIVQLYLKPLLIGELAPGEPSQERHKNSQLVKDFQELWSIAEAMNMFHANLGFFFLHFVQILILEVLAWLIVYHFGSGWPVTMFISFLLTISQASSSFLQHDAGHLSIFRKSKWNHVVHKFVMCHLKGLSADRWNYWHFEQHVKPNIYPKDPDIDTDPLFLLGDSQPVKYGKKKIKYINYEEQHLYFYKVWLPLFMPVYLKLPSMQAMYLQRYWVCFSLQDITWVSSFYIYFITFGLYYGIFGTMLLIYLVKFLESPWIVYVTQMSHITMRMSTEENRDWLTTQVLATCNTESFFNDFTGHLNFQIEHHLFPTMPRHNYHKVAPLVRSLCAKHGLHYVNKPMLRAFGDIVRALKKSAALWADAYYE

SEQ ID NO: 22273 - protein, 492 aa, Homo sapiens
MAAGPIRVVLVLLGVLSVCAASGHGSVAEREAGGEAEWAEPWDGAVFRPPSALGAVGVTRSSGTPRPGREEAGDLPVLLWWSPGLFPHFPGDSERIECARGACVASRNRRALRDSRTRALLFYGTDFRASAAPLPRLAHQSWALLHEESPLNNFLLSHGPGIRLFNLTSTFSRHSDYPLSLQWLPGTAYLRRPVPPPMERAEWRRRGYAPLLYLQSHCDVPADRDRYVRELMRHIPVDSYGKCLQNRELPTARLQDTATATTEDPELLAFLSRYKFHLALENAICNDYMTEKLWRPMHLGAVPVYRGSPSVRDWMPNNHSVILIDDFESPQKLAEFIDFLDKNDEEYMKYLAYKQPGGITNQFLLDSLKHREWGVNDPLLPNYLNGFECFVCDYELARLDAEKAHAASPGDSPVFEPHIAQPSHMDCPVPTPGFGNVEEIPENDSWKEMWLQDYWQGLDQGEALTAMIHNNETEQTKFWDYLHEIFMKRQHL

SEQ ID NO: 22274 - protein, 476 aa, Homo sapiens
MAAGPIRVVLVLLGVLSVCAASGHGSVAEREAGGEAEWAEPWDGAVFRPPSALGAVGVTRSSGTPRPGREEAGDLPVLLWWSPGLFPHFPGDSERIECARGACVASRNRRALRDSRTRALLFYGTDFRASAAPLPRLAHQSWALLHEESPLNNFLLSHGPGIRLFNLTSTFSRHSDYPLSLQWLPGTAYLRRPVPPPMERAEWRRRGYAPLLYLQSHCDVPADRDRYVRELMRHIPVDSYGKCLQNRELPTARLQDTATATTEDPELLAFLSRYKFHLALENAICNDYMTEKLWRPMHLGAVPVYRGSPSVRDWMPNNHSVILIDDFESPQKLAEFIDFLDKNDEEYMKYLAYKQPGGITNQFLLDSLKHREWGVNDPLLPNYLNGFECFVCDYELARLDAEKAHAASPGDSPVFEPHIAQPSHMDCPVPTPGFGNVEEIPENDSSLVQVRDHCICLRFLWPHSEKGRTHNYAAVP

SEQ ID NO: 22275 - protein, 496 aa, Homo sapiens
MDQDYERRLLRQIVIQNENTMPRVTEMRRTLTPASSPVSSPSKHGDRFIPSRAGANWSVNFHRINENEKSPSQNRKAKDATSDNGKDGLAYSALLKNELLGAGIEKVQDPQTEDRRLQPSTPEKKGLFTYSLSTKRSSPDDGNDVSPYSLSPVSNKSQKLLRSPRKPTRKISKIPFKVLDAPELQDDFYLNLVDWSSLNVLSVGLGTCVYLWSACTSQVTRLCDLSVEGDSVTSVGWSERGNLVAVGTHKGFVQIWDAAAGKKLSMLEGHTARVGALAWNAEQLSSGSRDRMILQRDIRTPPLQSERRLQGHRQEVCGLKWSTDHQLLASGGNDNKLLVWNHSSLSPVQQYTEHLAAVKAIAWSPHQHGLLASGGGTADRCIRFWNTLTGQPLQCIDTGSQVCNLAWSKHANELVSTHGYSQNQILVWKYPSLTQVAKLTGHSYRVLYLAMSPDGEAIVTGAGDETLRFWNVFSKTRSTKVKWESVSVLNLFTRIR

SEQ ID NO: 22276 - protein, 493 aa, Homo sapiens
MDQDYERRLLRQIVIQNENTMPRVTEMRRTLTPASSPVSSPSKHGDRFIPSRAGANWSVNFHRINENEKSPSQNRKAKDATSDNGKDGLAYSALLKNELLGAGIEKVQDPQTEDRRLQPSTPEKKGLFTYSLSTKRSSPDDGNDVSPYSLSPVSNKSQKLLRSPRKPTRKISKIPFKVLDAPELQDDFYLNLVDWSSLNVLSVGLGTCVYLWSACTSQVTRLCDLSVEGDSVTSVGWSERGNLVAVGTHKGFVQIWDAAAGKKLSMLEGHTARVGALAWNAEQLSSGSRDRMILQRDIRTPPLQSERRLQGHRQEVCGLKWSTDHQLLASGGNDNKLLVWNHSSLSPVQQYTEHLAAVKAIAWSPHQHGLLASGGGTADRCIRFWNTLTGQPLQCIDTGSQVCNLAWSKHANELVSTHGYSQNQILVWKYPSLTQVAKLTGHSYRVLYLAMSPDGEAIVTGAGDETLRFWNVFSKTRSTKESVSVLNLFTRIR

SEQ ID NO: 22277 - protein, 404 aa, Homo sapiens
MDQDYERRLLRQIVIQNENTMPRVTEMRRTLTPASSPVSSPSKHGDRFIPSRAGANWSVNFHRINENEKSPSQNRKAKDATSDNGKDGLAYSALLKNELLGAGIEKVQDPQTEDRRLQPSTPEKKGLFTVTRLCDLSVEGDSVTSVGWSERGNLVAVGTHKGFVQIWDAAAGKKLSMLEGHTARVGALAWNAEQLSSGSRDRMILQRDIRTPPLQSERRLQGHRQEVCGLKWSTDHQLLASGGNDNKLLVWNHSSLSPVQQYTEHLAAVKAIAWSPHQHGLLASGGGTADRCIRFWNTLTGQPLQCIDTGSQVCNLAWSKHANELVSTHGYSQNQILVWKYPSLTQVAKLTGHSYRVLYLAMSPDGEAIVTGAGDETLRFWNVFSKTRSTKESVSVLNLFTRIR

SEQ ID NO: 22278 - protein, 467 aa, Homo sapiens
MRPQELPRLAFPLLLLLLLLLPPPPCPAHSATRFDPTWESLDARQLPAWFDQAKFGIFIHWGVFSVPSFGSEWFWWYWQKEKIPKYVEFMKDNYPPSFKYEDFGPLFTAKFFNANQWADIFQASGAKYIVLTSKHHEGFTLWGSEYSWNWNAIDEGPKRDIVKELEVAIRNRTDLRFGLYYSLFEWFHPLFLEDESSSFHKRQFPVSKTLPELYELVNNYQPEVLWSDGDGGAPDQYWNSTGFLAWLYNESPVRGTVVTNDRWGAGSICKHGGFYTCSDRYNPGHLLPHKWENCMTIDKLSWGYRREAGISDYLTIEELVKQLVETVSCGGNLLMNIGPTLDGTISVVFEERLRQMGSWLKVNGEAIYETHTWRSQNDTVTPDVWYTSKPKEKLVYAIFLKWPTSGQLFLGHPKAILGATEVKLLGHGQPLNWISLEQNGIMVELPQLTIHQMPCKWGWALALTNVI

SEQ ID NO: 22279 - protein, 165 aa, Homo sapiens
MRPQELPRLAFPLLLLLLLLLPPPPCPAHSATRFDPTWESLDARQLPAWFDQAKFGIFIHWGVFSVPSFGSEWFWWYWQKEKIPKYVEFMKDNYPPSFKYEDFGPLFTAKFFNANQWADIFQASGAKYIVLTSKHHEATCRDSFMWRKSFDEYWAHTRWHHFCSF

SEQ ID NO: 22280 - protein, 466 aa, Homo sapiens
MRAPGMRSRPAGPALLLLLLFLGAAESVRRAQPPRRYTPDWPSLDSRPLPAWFDEAKFGVFIHWGVFSVPAWGSEWFWWHWQGEGRPQYQRFMRDNYPPGFSYADFGPQFTARFFHPEEWADLFQAAGAKYVVLTTKHHEGFTNWPSPVSWNWNSKDVGPHRDLVGELGTALRKRNIRYGLYHSLLEWFHPLYLLDKKNGFKTQHFVSAKTMPELYDLVNSYKPDLIWSDGEWECPDTYWNSTNFLSWLYNDSPVKDEVVVNDRWGQNCSCHHGGYYNCEDKFKPQSLPDHKWEMCTSIDKFSWGYRRDMALSDVTEESEIISELVQTVSLGGNYLLNIGPTKDGLIVPIFQERLLAVGKWLSINGEAIYASKPWRVQWEKNTTSVWYTSKGSAVYAIFLHWPENGVLNLESPITTSTTKITMLGIQGDLKWSTDPDKGLFISLPQLPPSAVPAEFAWTIKLTGVK

SEQ ID NO: 22281 - protein, 489 aa, Homo sapiens [sequence omitted]

SEQ ID NO: 22282 - protein, 2179 aa, Homo sapiens
MNSLSWGAANAVLLLLLLAWASPTFISINRGVRVMKGHSAFLSGDDLKFAIPKEKDACKVEVVMNEPITQRVGKLTPQVFDCHFLPNEVKYVHNGCPILDEDTVKLRLYRFTERDTFIETFILWVYLLEPDCNIIHMSNNVLEVPEFNGLSQAIDKNLLRFDYDRMASLECTVSLDTARTRLPAHGQMVLGEPRPEEPRGDQPHSFFPESQLRAKLKCPGGSCTPGLKKIGSLKVSCEEFLLMGLRYQHLDPPSPNIDYISIQLDLTDTRSKIVYKSESAWLPVYIRAGIPNQIPKAAFMAVFILEVDQFILTSLTTSVLDCEEDETPKPLLVFNITKAPLQGYVTHLLDHTRPISSFTWKDLSDMQIAYQPPNSSHSERRHDEVELEVYDFFFERSAPMTVHISIRTADTNAPRVSWNTGLSLLEGQSRAITWEQFQVVDNDDIGAVRLVTVGGLQHGWLTLRGGKGFLFTVADLQAGVVRYHHDDSDSTKDFVVFRIFDGHHSIRHKFPINVLPKDDSPPFLITNVVIELEEGQTILIQGSMLRASDVDASDDYIFFNITKPPQAGEIMKKPGPGLIGYPVHGFLQRDLFNGIIYYRHFGGEIFEDSFQFVLWDSHEPPNLSVPQVATIHITPVDDQLPKEAPGVSRHLVVKETEVAYITKKQLHFIDSESYDRELVYTITTPPFFSFSHRHLDAGKLFMVDSIPKVVKNPTALELRSFTQHAVNYMKVAYMPPMQDIGPHCRDVQFTFSVSNQHGGTLHGICFNITILPVDNQVPEAFTNPLKVTEGGQSIISTEHILISDADTKLDNIDLSLRELPLHGRVELNGFPLNSGGTFSWGDLHTLKVRYQHDGTEVLQDDLLLEVTDGTNSAEFVLHVEVFPVNDEPPVLKADLMPVMNCSEGGEVVITSEYIFATDVDSDNLKLMFVIAREPQHGVVRRAGVTVDQFSQRDVISEAVTYKHTGGEIGLMPCFDTITLVVSDGEAGPFVNGCCYNGPNPSVPLHASFPVYDLNITVYPVDNQPPSIAIGPVFVVDEGCSTALTVNHLSATDPDTAADDLEFVLVSPPQFGYLENILPSVGFEKSNIGISIDSFQWKDMNAFHINYVQSRHLRIEPTADQFTVYVTDGKHHSLEIPFSIIINPTNDEAPDFVVQNITVCEGQMKELDSSIISAVDLDIPQDALLFSITQKPRHGLLIDRGFSKDFSENKQPANPHQKHAPVHSFSMELLKTGMRLTYMHDDSESLADDFTIQLSDGKHKILKTISVEVIPVNDEKPMLSKKAEIAMNMGETRIISSAILSAIDEDSPREKIYYVFERLPQNGQLQLKIGRDWVPLSPGMKCTQEEVDLNLLRYTHTGAMDSQNQDSFTFYLWDGNNRSPALDCQITIKDMEKGDIVILTKPLVVSKGDRGFLTTTTLLAVDGTDKPEELLYVITSPPRYGQIEYVHYPGVPITNFSQMDVVGQTVCYVHKSKVTVSSDRFRFIISNGLRTEHGVFEITLETVDRALPVVTRNKGLRLAQGAVGLLSPDLLQLTDPDTPAENLTFLLVQLPQHGQLYLWGTGLLQHNFTQQDVDSKNVAYRHSGGDSQTDCFTFMATDGTNQGFIVNGRVWEEPVLFTIQVDQLDKTAPRITLLHSPSQVGLLKNGCYGIYITSRVLKASDPDTEDDQIIFKILQGPKHGHLENTTTGEFIHEKFSQKDLNSKTILYIINPSLEVNSDTVEFQIMDPTGNSATPQILELKWSHIEWSQTEYEVCENVGLLPLEIIRRGYSMDSAFVGIKVNQVSAAVGKDFTVIPSKLIQFDPGMSTKMWNIAITYDGLEEDDEVFEVILNSPVNAVLGTKTKAAVKILDSKGGQCHPSYSSNQSKHSTWEKGIWHLLPPGSSSSTTSGSFHLERRPLPSSMQLAVIRGDTLRGFDSTDLSQRKLRTRGNGKTVRPSSVYRNGTDIIYNYHGIVSLKLEDDSFPTHKRKAKVSIISQPQKTIKVAELPQADKVESTTDSHFPRQDQLPSFPKNCTLELKGLFHFEEGIQKLYQCNGIAWKAWSPQTKDVEDKSCPAGWHQHSGYCHILITEQKGTWNAAAQACREQYLGNLVTVFSRQHMRWLWDIGGRKSFWIGLNDQVHAGHWEWIGGEPVAFTNGRRGPSQRSKLGKSCVLVQRQGKWQTKDCRRAKPHNYVCSRKL

SEQ ID NO: 22283 - protein, 715 aa, Homo sapiens
MVTQESMLKAALPLFTRFIISNGLRTEHGVFEITLETVDRALPVVTRNKGLRLAQGAVGLLSPDLLQLTDPDTPAENLTFLLVQLPQHGQLYLWGTGLLQHNFTQQDVDSKNVAYRHSGGDSQTDCFTFMATDGTNQGFIVNGRVWEEPVLFTIQVDQLDKTAPRITLLHSPSQVGLLKNGCYGIYITSRVLKASDPDTEDDQIIFKILQGPKHGHLENTTTGEFIHEKFSQKDLNSKTILYIINPSLEVNSDTVEFQIMDPTGNSATPQILELKWSHIEWSQTEYEVCENVGLLPLEIIRRGYSMDSAFVGIKVNQVSAAVGKDFTVIPSKLIQFDPGMSTKMWNIAITYDGLEEDDEVFEVILNSPVNAVLGTKTKAAVKILDSKGGQCHPSYSSNQSKHSTWEKGIWHLLPPGSSSSTTSGSFHLERRPLPSSMQLAVIRGDTLRGFDSTDLSQRKLRTRGNGKTVRPSSVYRNGTDIIYNYHGIVSLKLEDDSFPTHKRKAKVSIISQPQKTIKVAELPQADKVESTTDSHFPRQDQLPSFPKNCTLELKGLFHFEEGIQKLYQCNGIAWKAWSPQTKDVEDKSCPAGWHQHSGYCHILITEQKGTWNAAAQACREQYLGNLVTVFSRQHMRWLWDIGGRKSFWIGLNDQVHAGHWEWIGGEPVAFTNGRRGPSQRSKLGKSCVLVQRQGKWQTKDCRRAKPHNYVCSRKL

SEQ ID NO: 22284 - protein, 376 aa, Homo sapiens
MSTKMWNIAITYDGLEEDDEVFEVILNSPVNAVLGTKTKAAVKILDSKGGQCHPSYSSNQSKHSTWEKGIWHLLPPGSSSSTTSGSFHLERRPLPSSMQLAVIRGDTLRGFDSTDLSQRKLRTRGNGKTVRPSSVYRNGTDIIYNYHGIVSLKLEDDSFPTHKRKAKVSIISQPQKTIKVAELPQADKVESTTDSHFPRQDQLPSFPKNCTLELKGLFHFEEGIQKLYQCNGIAWKAWSPQTKDVEDKSCPAGWHQHSGYCHILITEQKGTWNAAAQACREQYLGNLVTVFSRQHMRWLWDIGGRKSFWIGLNDQVHAGHWEWIGGEPVAFTNGRRGPSQRSKLGKSCVLVQRQGKWQTKDCRRAKPHNYVCSRKL

SEQ ID NO: 22285 - protein, 222 aa, Homo sapiens
MLDESLAVRRSKKCKEMIMHWEKKEDIDIVNTVDQLDKTAPRITLLHSPSQVGLLKNGCYGIYITSRVLKASDPDTEDDQIIFKILQGPKHGHLENTTTGEFIHEKFSQKDLNSKTILYIINPSLEVNSDTVEFQIMDPTGNSATPQILELKWSHIEWSQTEYEVCENVGLLPLEIIRRGYSMDSAFVGIKVNQVSAAVGKDFTVIPSKLIQFDPGSSILCL

SEQ ID NO: 22286 - protein, 711 aa, Homo sapiens
MSDYSTGGPPPGPPPPAGGGGGAGGAGGGPPPGPPGAGDRGGGGPGGGGPGGGSAGGPSQPPGGGGPGIRKDAFADAVQRARQIAAKIGGDAATTVNNSTPDFGFGGQKRQLEDGDQPESKKLASQGDSISSQLGPIHPPPRTSMTEEYRVPDGMVGLIIGRGGEQINKIQQDSGCKVQISPDSGGLPERSVSLTGAPESVQKAKMMLDDIVSRGRGGPPGQFHDNANGGQNGTVQEIMIPAGKAGLVIGKGGETIKQLQERAGVKMILIQDGSQNTNVDKPLRIIGDPYKVQQACEMVMDILRERDQGGFGDRNEYGSRIGGGIDVPVPRHSVGVVIGRSGEMIKKIQNDAGVRIQFKQDDGTGPEKIAHIMGPPDRCEHAARIINDLLQSLRSGPPGPPGGPGMPPGGRGRGRGQGNWGPPGGEMTFSIPTHKCGLVIGRGGENVKAINQQTGAFVEISRQLPPNGDPNFKLFIIRGSPQQIDHAKQLIEEKIEGPLCPVGPGPGGPGPAGPMGPFNPGPFNQGPPGAPPHAGGPPPHQYPPQGWGNTYPQWQPPAPHDPSKAAAAAADPNAAWAAYYSHYYQQPPGPVPGPAPAPAAPPAQGEPPQPPPTGQSDYTKAWEEYYKKIGQQPQQPGAPPQQDYTKAWEEYYKKQAQVATGGGPGAPPGSQPDYSAAWAEYYRQQAAYYGQTPGPGGPQPPPTQQGQQQAQ

SEQ ID NO: 22287 - protein, 733 aa, Homo sapiens
MAEVGEDSGARALLALRSAPCSPVLCAAAAAAAFPAAAPPPAPAQPQPPPGPPPPPPPPLPPGAIAGAGSSGGSSGVSGDSAVAGAAPALVAAAAASVRQSPGPALARLEGREFEFLMRQPSVTIGRNSSQGSVDLSMGLSSFISRRHLQLSFQEPHFYLRCLGKNGVFVDGAFQRRGAPALQLPKQCTFRFPSTAIKIQFTSLYHKEEAPASPLRPLYPQISPLKIHIPEPDLRSMVSPVPSPTGTISVPNSCPASPRGAGSSSYRFVQNVTSDLQLAAEFAAKAASEQQADTSGGDSPKDESKPPFSYAQLIVQAISSAQDRQLTLSGIYAHITKHYPYYRTADKGWQNSIRHNLSLNRYFIKVPRSQEEPGKGSFWRIDPASEAKLVEQAFRKRRQRGVSCFRTPFGPLSSRSAPASPTHPGLMSPRSGGLQTPECLSREGSPIPHDPEFGSKLASVPEYRYSQSAPGSPVSAQPVIMAVPPRPSSLVAKPVAYMPASIVTSQQPAGHAIHVVQQAPTVTMVRVVTTSANSANGYILTSQGAAGGSHDAAGAAVLDLGSEARGLEEKPTIAFATIPAAGGVIQTVASQMAPGVPGHTVTILQPATPVTLGQHHLPVRAVTQNGKHAVPTNSLAGNAYALTSPLQLLATQASSSAPVVVTRVCEVGPKEPAAAVAATATTTPATATTASASASSTGEPEVKRSRVEEPSGAVTTPAGVIAAAGPQGPGTGE

SEQ ID NO: 22288 - protein, 570 aa, Homo sapiens
MAYCLGVNFVPSRFCYQLHRLLLRCTFRFPSTAIKIQFTSLYHKEEAPASPLRPLYPQISPLKIHIPEPDLRSMVSPVPSPTGTISVPNSCPASPRGAGSSSYRFVQNVTSDLQLAAEFAAKAASEQQADTSGGDSPKDESKPPFSYAQLIVQAISSAQDRQLTLSGIYAHITKHYPYYRTADKGWQNSIRHNLSLNRYFIKVPRSQEEPGKGSFWRIDPASEAKLVEQAFRKRRQRGVSCFRTPFGPLSSRSAPASPTHPGLMSPRSGGLQTPECLSREGSPIPHDPEFGSKLASVPEYRYSQSAPGSPVSAQPVIMAVPPRPSSLVAKPVAYMPASIVTSQQPAGHAIHVVQQAPTVTMVRVVTTSANSANGYILTSQGAAGGSHDAAGAAVLDLGSEARGLEEKPTIAFATIPAAGGVIQTVASQMAPGVPGHTVTILQPATPVTLGQHHLPVRAVTQNGKHAVPTNSLAGNAYALTSPLQLLATQASSSAPVVVTRVCEVGPKEPAAAVAATATTTPATATTASASASSTGEPEVKRSRVEEPSGAVTTPAGVIAAAGPQGPGTGE

SEQ ID NO: 22289 - protein, 763 aa, Homo sapiens
MKTSPRRPLILKRRRLPLPVQNAPSETSEEEPKRSPAQQESNQAEASKEVAESNSCKFPAGIKIINHPTMPNTQVVAIPNNANIHSIITALTAKGKESGSSGPNKFILISCGGAPTQPPGLRPQTQTSYDAKRTEVTLETLGPKPAARDVNLPRPPGALCEQKRETCADGEAAGCTINNSLSNIQWLRKMSSDGLGSRSIKQEMEEKENCHLEQRQVKVEEPSRPSASWQNSVSERPPYSYMAMIQFAINSTERKRMTLKDIYTWIEDHFPYFKHIAKPGWKNSIRHNLSLHDMFVRETSANGKVSFWTIHPSANRYLTLDQVFKPLDPGSPQLPEHLESQQKRPNPELRRNMTIKTELPLGARRKMKPLLPRVSSYLVPIQFPVNQSLVLQPSVKVPLPLAASLMSSELARHSKRVRIAPKVLLAEEGIAPLSSAGPGKEEKLLFGEGFSPLLPVQTIKEEEIQPGEEMPHLARPIKVESPPLEEWPSPAPSFKEESSHSWEDSSQSPTPRPKKSYSGLRSPTRCVSEMLVIQHRERRERSRSRRKQHLLPPCVDEPELLFSEGPSTSRWAAELPFPADSSDPASQLSYSQEVGGPFKTPIKETLPISSTPSKSVLPRTPESWRLTPPAKVGGLDFSPVQTSQGASDPLPDPLGLMDLSTTPLQSAPPLESPQRLLSSEPLDLISVPFGNSSPSDIDVPKPGSPEPQVSGLAANRSLTEGLVLDTMNDSLSKILLDISFPGLDEDPLGPDNINWSQFIPELQ

SEQ ID NO: 22290 - protein, 748 aa, Homo sapiens
MKTSPRRPLILKRRRLPLPVQNAPSETSEEEPKRSPAQQESNQAEASKEVAESNSCKFPAGIKIINHPTMPNTQVVAIPNNANIHSIITALTAKGKESGSSGPNKFILISCGGAPTQPPGLRPQTQTSYDAKRTEVTLETLGPKPAARDVNLPRPPGALCEQKRETCADGEAAGCTINNSLSNIQWLRKMSSDGLGSRSIKQEMEEKENCHLEQRQVKVEEPSRPSASWQNSVSERPPYSYMAMIQFAINSTERKRMTLKDIYTWIEDHFPYFKHIAKPGWKNSIRHNLSLHDMFVRETSANGKVSFWTIHPSANRYLTLDQVFKQQKRPNPELRRNMTIKTELPLGARRKMKPLLPRVSSYLVPIQFPVNQSLVLQPSVKVPLPLAASLMSSELARHSKRVRIAPKVLLAEEGIAPLSSAGPGKEEKLLFGEGFSPLLPVQTIKEEEIQPGEEMPHLARPIKVESPPLEEWPSPAPSFKEESSHSWEDSSQSPTPRPKKSYSGLRSPTRCVSEMLVIQHRERRERSRSRRKQHLLPPCVDEPELLFSEGPSTSRWAAELPFPADSSDPASQLSYSQEVGGPFKTPIKETLPISSTPSKSVLPRTPESWRLTPPAKVGGLDFSPVQTSQGASDPLPDPLGLMDLSTTPLQSAPPLESPQRLLSSEPLDLISVPFGNSSPSDIDVPKPGSPEPQVSGLAANRSLTEGLVLDTMNDSLSKILLDISFPGLDEDPLGPDNINWSQFIPELQ

SEQ ID NO: 22291 - protein, 801 aa, Homo sapiens
MKTSPRRPLILKRRRLPLPVQNAPSETSEEEPKRSPAQQESNQAEASKEVAESNSCKFPAGIKIINHPTMPNTQVVAIPNNANIHSIITALTAKGKESGSSGPNKFILISCGGAPTQPPGLRPQTQTSYDAKRTEVTLETLGPKPAARDVNLPRPPGALCEQKRETCADGEAAGCTINNSLSNIQWLRKMSSDGLGSRSIKQEMEEKENCHLEQRQVKVEEPSRPSASWQNSVSERPPYSYMAMIQFAINSTERKRMTLKDIYTWIEDHFPYFKHIAKPGWKNSIRHNLSLHDMFVRETSANGKVSFWTIHPSANRYLTLDQVFKPLDPGSPQLPEHLESQQKRPNPELRRNMTIKTELPLGARRKMKPLLPRVSSYLVPIQFPVNQSLVLQPSVKVPLPLAASLMSSELARHSKRVRIAPKVFGEQVVFGYMSKFFSGDLRDFGTPITSLFNFIFLCLSVLLAEEGIAPLSSAGPGKEEKLLFGEGFSPLLPVQTIKEEEIQPGEEMPHLARPIKVESPPLEEWPSPAPSFKEESSHSWEDSSQSPTPRPKKSYSGLRSPTRCVSEMLVIQHRERRERSRSRRKQHLLPPCVDEPELLFSEGPSTSRWAAELPFPADSSDPASQLSYSQEVGGPFKTPIKETLPISSTPSKSVLPRTPESWRLTPPAKVGGLDFSPVQTSQGASDPLPDPLGLMDLSTTPLQSAPPLESPQRLLSSEPLDLISVPFGNSSPSDIDVPKPGSPEPQVSGLAANRSLTEGLVLDTMNDSLSKILLDISFPGLDEDPLGPDNINWSQFIPELQ

SEQ ID NO: 22292 - protein, 1020 aa, Homo sapiens
MQSCARAWGLRLGRGVGGGRRLAGGSGPCWAPRSRDSSSGGGDSAAAGASRLLERLLPRHDDFARRHIGPGDKDQREMLQTLGLASIDELIEKTVPANIRLKRPLKMEDPVCENEILATLHAISSKNQIWRSYIGMGYYNCSVPQTILRNLLENSGWITQYTPYQPEVSQGRLESLLNYQTMVCDITGLDMANASLLDEGTAAAEALQLCYRHNKRRKFLVDPRCHPQTIAVVQTRAKYTGVLTELKLPCEMDFSGKDVSGVLFQYPDTEGKVEDFTELVERAHQSGSLACCATDLLALCILRPPGEFGVDIALGSSQRFGVPLGYGGPHAAFFAVRESLVRMMPGRMVGVTRDATGKEVYRLALQTREQHIRRDKATSNICTAQALLANMAAMFAIYHGSHGLEHIARRVHNATLILSEGLKRAGHQLQHDLFFDTLKIQCGCSVKEVLGRAAQRQINFRLFEDGTLGISLDETVNEKDLDDLLWIFGCESSAELVAESMGEECRGIPGSVFKRTSPFLTHQVFNSYHSETNIVRYMKKLENKDISLVHSMIPLGSCTMKLNSSSELAPITWKEFANIHPFVPLDQAQGYQQLFRELEKDLCELTGYDQVCFQPNSGAQGEYAGLATIRAYLNQKGEGHRTVCLIPKSAHGTNPASAHMAGMKIQPVEVDKYGNIDAVHLKAMVDKHKENLAAIMITYPSTNGVFEENISDVCDLIHQHGGQVYLDGANMNAQVGICRPGDFGSDVSHLNLHKTFCIPHGGGGPGMGPIGVKKHLAPFLPNHPVISLKRNEDACPVGTVSAAPWGSSSILPISWAYIKMMGGKGLKQATETAILNANYMAKRLETHYRILFRGARGYVGHEFILDTRPFKKSANIEAVDVAKRLQDYGFHAPTMSWPVAGTLMVEPTESEDKAELDRFCDAMISIRQEIADIEEGRIDPRVNPLKMSPHSLTCVTSSHWDRPYSREVAAFPLPFVKPENKFWPTIARIDDIYGDQHLVCTCPPMEVYESPFSEQKRASS

SEQ ID NO: 22293 - protein, 367 aa, Homo sapiens
MATPNNLTPTNCSWWPISALESDAAKPAEAPDAPEAASPAHWPRESLVLYHWTQSFSSQKVRLVIAEKGLVCEERDVSLPQSEHKEPWFMRLNLGEEVPVIIHRDNIISDYDQIIDYVERTFTGEHVVALMPEVGSLQHARVLQYRELLDALPMDAYTHGCILHPELTTDSMIPKYATAEIRRHLANATTDLMKLDHEEEPQLSEPYLSKQKKLMAKILEHDDVSYLKKILGELAMVLDQIEAELEKRKLENEGQKCELWLCGCAFTLADVLLGATLHRLKFLGLSKKYWEDGSRPNLQSFFERVQRRFAFRKVLGDIHTTLLSAVIPNAFRLVKRKPPSFFGASFLMGSLGGMGYFAYWYLKKKYI

SEQ ID NO: 22294 - protein, 147 aa, Homo sapiens
MATPNNLTPTNCSWWPISALESDAAKPAEAPDAPEAASPAHWPRESLVLYHWTQSFSSQKVRLVIAEKGLVCEERDVSLPQSEHKEPWFMRLNLGEEVPVIIHRDNIISDYDQIIDYVERTFTGGPRLAASLELRGANPRGQLGRAQ

SEQ ID NO: 22295 - protein, 386 aa, Homo sapiens
MATPNNLTPTNCSWWPISALESDAAKPAEAPDAPEAASPAHWPRESLVLYHWTQSFSSQKVRLVIAEKGLVCEERDVSLPQSEHKEPWFMRLNLGEEVPVIIHRDNIISDYDQIIDYVERTFTGGGRGRCPSGFPAQPLAVPTEHVVALMPEVGSLQHARVLQYRELLDALPMDAYTHGCILHPELTTDSMIPKYATAEIRRHLANATTDLMKLDHEEEPQLSEPYLSKQKKLMAKILEHDDVSYLKKILGELAMVLDQIEAELEKRKLENEGQKCELWLCGCAFTLADVLLGATLHRLKFLGLSKKYWEDGSRPNLQSFFERVQRRFAFRKVLGDIHTTLLSAVIPNAFRLVKRKPPSFFGASFLMGSLGGMGYFAYWYLKKKYI

SEQ ID NO: 22296 - protein, 560 aa, Homo sapiens
MDSKKGRPKAAAGKWQTLHPGPKTRAAAGKPGENRPPQRKAGWQAREPASAESPQAPTGPAEDRAARAIQGAFRQLRARRELARRREERREYLEQMETPQKEAYLAPVRREQEAARRLREQEEAAQRERREELQRRRRLLDAAFDGDVGEIRAVLKEVEQLLTREGVGHDEAGEARRLQRRVALAECEDSYGNTPLSEAAAGGQPLAIQLRAELGASPNSKGAFGPTPLYRAAFGGHLAAVEVLLKLGADPRVYAEDGSTPERVASLDTVVSVLRSWDLSLTEAMLQNMEAEQQRRAQEAQRHKEAEAERCGSMTLKVQQLTREQQQCHKELQQAYCELSRRISEHDQCEWRCMDKTKLTLQAIKDTEAQVDRLRQEAQKAEEALAMARLELREQTQEGEEEAPGLKCQVTELHDVLMKDVGNRIRADGRWPLVIDPLGQAATFLRYQDTNYVDTVNPEPLRPETMWLALLGALRYGKPLVFDLREEDLFPVVQRQLEAVQERYLSLLRPTDGPEYSPTQFQEQRLEHFRLFFVTKVQWPPAEQLQVLLPVRVQLPGTGL

SEQ ID NO: 22297 - protein, 250 aa, Homo sapiens
MACWWPLLLELWTVMPTWAGDELLNICMNAKHHKRVPSPEDKLYEECIPWKDNACCTLTTSWEAHLDVSPLYNFSLFHCGLLMPGCRKHFIQAICFYECSPNLGPWIQPVGSLGWEVAPSGQGERVVNVPLCQEDCEEWWEDCRMSYTCKSNWRGGWDWSQGKNRCPKGAQCLPFSHYFPTPADLCEKTWSNSFKASPERRNSGRCLQKWFEPAQGNPNVAVARLFASSAPSWELSYTIMVCSLFLPFLS

SEQ ID NO: 22298 - protein, 243 aa, Homo sapiens
MACWWPLLLELWTVMPTWAGDELLNICMNAKHHKRVPSPEDKLYEECIPWKDNACCTLTTSWEAHLDVSPLYNFSLFHCGLLMPGCRKHFIQAICFYECSPNLGPWIQPVAPSGQGERVVNVPLCQEDCEEWWEDCRMSYTCKSNWRGGWDWSQGKNRCPKGAQCLPFSHYFPTPADLCEKTWSNSFKASPERRNSGRCLQKWFEPAQGNPNVAVARLFASSAPSWELSYTIMVCSLFLPFLS

SEQ ID NO: 22299 - protein, 402 aa, Homo sapiens
MMGSWKHCLFSASLISALIFVFVYNTELWENKRFLRAALSNASLLAEACHQIFEGKVFYPTENALKTTLDEATCYEYMVRSHYVTETLSEEEAGFPLAYTVTIHKDFGTFERLFRAIYMPQNVYCVHLDQKATDAFKGAVKQLLSCFPNAFLASKKESVVYGGISRLQADLNCLEDLVASEVPWKYVINTCGQDFPLKTNREIVQYLKGFKGKNITPGVLPPDHAVGRTKYVHQELLNHKNSYVIKTTKLKTPPPHDMVIYFGTAYVALTRDFANFVLQDQLALDLLSWSKDTYSPDEHFWVTLNRIPGVPGSMPNASWTGNLRAIKWSDMEDRHGGCHGHYVHGICIYGNGDLKWLVNSPSLFANKFELNTYPLTVECLELRHRERTLNQSETAIQPSWYF

SEQ ID NO: 22300 - protein, 400 aa, Homo sapiens
MPLSMRYLFIISVSSVIIFIVFSVFNFGGDPSFQRLNISDPLRLTQVCTSFINGKTRFLWKNKLMIHEKSSCKEYLTQSHYITAPLSKEEADFPLAYIMVIHHHFDTFARLFRAIYMPQNIYCVHVDEKATTEFKDAVEQLLSCFPNAFLASKMEPVVYGGISRLQADLNCIRDLSAFEVSWKYVINTCGQDFPLKTNKEIVQYLKGFKGKNITPGVLPPAHAIGRTKYVHQEHLGKELSYVIRTTALKPPPPHNLTIYFGSAYVALSREFANFVLHDPRAVDLLQWSKDTFSPDEHFWVTLNRIPGVPGSMPNASWTGNLRAIKWSDMEDRHGGCHGHYVHGICIYGNGDLKWLVNSPSLFANKFELNTYPLTVECLELRHRERTLNQSETAIQPSWYF

SEQ ID NO: 22301 - protein, 402 aa, Homo sapiens
MNFWRYCFFAFTLLSVVIFVRFYSSQLSPPKSYEKLNSSSERYFRKTACNHALEKMPVFLWENILPSPLRSVPCKDYLTQNHYITSPLSEEEAAFPLAYVMVIHKDFDTFERLFRAIYMPQNVYCVHVDEKAPAEYKESVRQLLSCFQNAFIASKTESVVYAGISRLQADLNCLKDLVASEVPWKYVINTCGQDFPLKTNREIVQHLKGFKGKNITPGVLPPDHAIKRTKYVHQEHTDKGGFFVKNTNILKTSPPHQLTIYFGTAYVALTRDFVDFVLRDQRAIDLLQWSKDTYSPDEHFWVTLNRVSGVPGSMPNASWTGNLRAIKWSDMEDRHGGCHGHYVHGICIYGNGDLKWLVNSPSLFANKFELNTYPLTVECLELRHRERTLNQSETAIQPSWYF

SEQ ID NO: 22302 - protein, 426 aa, Homo sapiens
MPLLWLRGFLLASCWIIVRSSPTPGSEGHSAAPDCPSCALAALPKDVPNSQPEMVEAVKKHILNMLHLKKRPDVTQPVPKAALLNAIRKLHVGKVGENGYVEIEDDIGRRAEMNELMEQTSEIITFAESGTARKTLHFEISKEGSDLSVVERAEVWLFLKVPKANRTRTKVTIRLFQQQKHPQGSLDTGEEAEEVGLKGERSELLLSEKVVDARKSTWHVFPVSSSIQRLLDQGKSSLDVRIACEQCQESGASLVLLGKKKKKEEEGEGKKKGGGEGGAGADEEKEQSHRPFLMLQARQSEDHPHRRRRRGLECDGKVNICCKKQFFVSFKDIGWNDWIIAPSGYHANYCEGECPSHIAGTSGSSLSFHSTVINHYRMRGHSPFANLKSCCVPTKLRPMSMLYYDDGQNIIKKDIQNMIVEECGCS

SEQ ID NO: 22303 - protein, 904 aa, Homo sapiens
MGMDLTCPFGISPACGAQASWSIFGADAAEVPGTRGHSQQEAAMPHIPEDEEPPGEPQAAQSPAGQGPPAAGVSCSPTPTIVLTGDATSPEGETDKNLANRVHSPHKRLSHRHLKVSTASLTSVDPAGHIIDLVNDQLPDISISEEDKKKNLALLEEAKLVSERFLTRRGRKSRSSPGDSPSAVSPNLSPSASPTSSRSNSLTVPTPPGLDVCSGPPSPLPGAPPQQKGDEADVSSPHPGEPNVPKGLADRKQNDQRKVSQGRLAPRPPPVEKSKEIAIEQKENFDPLQYPETTPKGLAPVTNSSGKMALNSPQPGPVESELGKQLLKTGWEGSPLPRSPTQDAAGVGPPASQGRGPAGEPMGPEAGSKAELPPTVSRPPLLRGLSWDSGPEEPGPRLQKVLAKLPLAEEEKRFAGKAGGKLAKAPGLKDFQIQVQPVRMQKLTKLREEHILMRNQNLVGLKLPDLSEAAEQEKGLPSELSPAIEEEESKSGLDVMPNISDVLLRKLRVHRSLPGSAPPLTEKEVENVFVQLSLAFRNDSYTLESRINQAERERNLTEENTEKELENFKASITSSASLWHHCEHRETYQKLLEDIAVLHRLAARLSSRAEVVGAVRQEKRMSKATEVMMQYVENLKRTYEKDHAELMEFKKLANQNSSRSCGPSEDGVPRTARSMSLTLGKNMPRRRVSVAVVPKFNALNLPGQTPSSSSIPSLPALSESPNGKGSLPVTSALPALLENGKTNGDPDCEASAPALTLSCLEELSQETKARMEEEAYSKGFQEGLKKTKELQDLKEEEEEQKSESPEEPEEVEETEEEEKGPRSSKLEELVHFLQVMYPKLCQHWQVIWMMAAVMLVLTVVLGLYNSYNSCAEQADGPLGRSTCSAAQRDSWWSSGLQHEQPTEQ

SEQ ID NO: 22304 - protein, 886 aa, Homo sapiens
MGMDLTCPFGISPACGAQASWSIFGADAAEVPGTRGHSQQEAAMPHIPEDEEPPGEPQAAQSPAGQQGPPAAGVSCSPTPTIVLTGDATSPEGETDKNLANRVHSPHKRLSHRHLKVSTASLTSVDPAGHIIDLVNDQLPDISISEEDKKKNLALLEEAKLVSERFLTRRGRKSRSSPGDSPSAVSPNLSPSASPTSSRSNSLTVPTPPEGDEADVSSPHPGEPNVPKGLADRKQNDQRKVSQGRLAPRPPPVEKSKEIAIEQKENFDPLQYPETTPKGLAPVTNSSGKMALNSPQPGPVESELGKQLLKTGWEGSPLPRSPTQDAAGVGPPASQGRGPAGEPMGPEAGSKAELPPTVSRPPLLRGLSWDSGPEEPGPRLQKVLAKLPLAEEEKRFAGKAGGKLAKAPGLKDFQIQVQPVRMQKLTKLREEHILMRNQNLVGLKLPDLSEAAEQEKGLPSELSPAIEEEESKSGLDVMPNISDVLLRKLRVHRSLPGSAPPLTEKEVENVFVQLSLAFRNDSYTLESRINQAERERNLTEENTEKELENFKASITSSASLWHHCEHRETYQKLLEDIAVLHRLAARLSSRAEVVGAVRQEKRMSKATEVMMQYVENLKRTYEKDHAELMEFKKLANQNSSRSCGPSEDGVPRTARSMSLTLGKNMPRRRVSVAVVPKFNALNLPGQTPSSSSIPSLPALSESPNGKGSLPVTSALPALLENGKTNGDPDCEASAPALTLSCLEELSQETKARMEEEAYSKGFQEGLKKTKELQDLKEEEEEQKSESPEEPEEVEETEEEEKGPRSSKLEELVHFLQVMYPKLCQHWQVIWMMAAVMLVLTVVLGLYNSYNSCAEQADGPLGRSTCSAAQRDSWWSSGLQHEQPTEQ

SEQ ID NO: 22305 - protein, 803 aa, Homo sapiens
MTGDATSPEGETDKNLANRVHSPHKRLSHRHLKVSTASLTSVDPAGHIIDLVNDQLPDISISEEDKKKNLALLEEAKLVSERFLTRRGRKSRSSPGDSPSAVSPNLSPSASPTSSRSNSLTVPTPPEGDEADVSSPHPGEPNVPKGLADRKQNDQRKVSQGRLAPRPPPVEKSKEIAIEQKENFDPLQYPETTPKGLAPVTNSSGKMALNSPQPGPVESELGKQLLKTGWEGSPLPRSPTQDAAGVGPPASQGRGPAGEPMGPEAGSKAELPPTVSRPPLLRGLSWDSGPEEPGPRLQKVLAKLPLAEEEKRFAGKAGGKLAKAPGLKDFQIQVQPVRMQKLTKLREEHILMRNQNLVGLKLPDLSEAAEQEKGLPSELSPAIEEEESKSGLDVMPNISDVLLRKLRVHRSLPGSAPPLTEKEVENVFVQLSLAFRNDSYTLESRINQAERERNLTEENTEKELENFKASITSSASLWHHCEHRETYQKLLEDIAVLHRLAARLSSRAEVVGAVRQEKRMSKATEVMMQYVENLKRTYEKDHAELMEFKKLANQNSSRSCGPSEDGVPRTARSMSLTLGKNMPRRRVSVAVVPKFNALNLPGQTPSSSSIPSLPALSESPNGKGSLPVTSALPALLENGKTNGDPDCEASAPALTLSCLEELSQETKARMEEEAYSKGFQEGLKKTKELQDLKEEEEEQKSESPEEPEEVEETEEEEKGPRSSKLEELVHFLQVMYPKLCQHWQVIWMMAAVMLVLTVVLGLYNSYNSCAEQADGPLGRSTCSAAQRDSWWSSGLQHEQPTEQ

SEQ ID NO: 22306 - protein, 903 aa, Homo sapiens
MGMDLTCPFGISPACGAQASWSIFGADAAEVPGTRGHSQQEAAMPHIPEDEEPPGEPQAAQSPAGQGPPAAGVSCSPTPTIVLTGDATSPEGETDKNLANRVHSPHKRLSHRHLKVSTASLTSVDPAGHIIDLVNDQLPDISISEEDKKKNLALLEEAKLVSERFLTRRGRKSRSSPGDSPSAVSPNLSPSASPTSSRSNSLTVPTPPGLDVCSGPPSPLPGAPPQKGDEADVSSPHPGEPNVPKGLADRKQNDQRKVSQGRLAPRPPPVEKSKEIAIEQKENFDPLQYPETTPKGLAPVTNSSGKMALNSPQPGPVESELGKQLLKTGWEGSPLPRSPTQDAAGVGPPASQGRGPAGEPMGPEAGSKAELPPTVSRPPLLRGLSWDSGPEEPGPRLQKVLAKLPLAEEEKRFAGKAGGKLAKAPGLKDFQIQVQPVRMQKLTKLREEHILMRNQNLVGLKLPDLSEAAEQEKGLPSELSPAIEEEESKSGLDVMPNISDVLLRKLRVHRSLPGSAPPLTEKEVENVFVQLSLAFRNDSYTLESRINQAERERNLTEENTEKELENFKASITSSASLWHHCEHRETYQKLLEDIAVLHRLAARLSSRAEVVGAVRQEKRMSKATEVMMQYVENLKRTYEKDHAELMEFKKLANQNSSRSCGPSEDGVPRTARSMSLTLGKNMPRRRVSVAVVPKFNALNLPGQTPSSSSIPSLPALSESPNGKGSLPVTSALPALLENGKTNGDPDCEASAPALTLSCLEELSQETKARMEEEAYSKGFQEGLKKTKELQDLKEEEEEQKSESPEEPEEVEETEEEEKGPRSSKLEELVHFLQVMYPKLCQHWQVIWMMAAVMLVLTVVLGLYNSYNSCAEQADGPLGRSTCSAAQRDSWWSSGLQHEQPTEQ

SEQ ID NO: 22307 - protein, 821 aa, Homo sapiens
MTGDATSPEGETDKNLANRVHSPHKRLSHRHLKVSTASLTSVDPAGHIIDLVNDQLPDISISEEDKKKNLALLEEAKLVSERFLTRRGRKSRSSPGDSPSAVSPNLSPSASPTSSRSNSLTVPTPPGLDVCSGPPSPLPGAPPQKGDEADVSSPHPGEPNVPKGLADRKQNDQRKVSQGRLAPRPPPVEKSKEIAIEQKENFDPLQYPETTPKGLAPVTNSSGKMALNSPQPGPVESELGKQLLKTGWEGSPLPRSPTQDAAGVGPPASQGRGPAGEPMGPEAGSKAELPPTVSRPPLLRGLSWDSGPEEPGPRLQKVLAKLPLAEEEKRFAGKAGGKLAKAPGLKDFQIQVQPVRMQKLTKLREEHILMRNQNLVGLKLPDLSEAAEQEKGLPSELSPAIEEEESKSGLDVMPNISDVLLRKLRVHRSLPGSAPPLTEKEVENVFVQLSLAFRNDSYTLESRINQAERERNLTEENTEKELENFKASITSSASLWHHCEHRETYQKLLEDIAVLHRLAARLSSRAEVVGAVRQEKRMSKATEVMMQYVENLKRTYEKDHAELMEFKKLANQNSSRSCGPSEDGVPRTARSMSLTLGKNMPRRRVSVAVVPKFNALNLPGQTPSSSSIPSLPALSESPNGKGSLPVTSALPALLENGKTNGDPDCEASAPALTLSCLEELSQETKARMEEEAYSKGFQEGLKKTKELQDLKEEEEEQKSESPEEPEEVEETEEEEKGPRSSKLEELVHFLQVMYPKLCQHWQVIWMMAAVMLVLTVVLGLYNSYNSCAEQADGPLGRSTCSAAQRDSWWSSGLQHEQPTEQ

SEQ ID NO: 22308 - protein, 597 aa, Homo sapiens
MALNSPQPGPVESELGKQLLKTGWEGSPLPRSPTQDAAGVGPPASQGRGPAGEPMGPEAGSKAELPPTVSRPPLLRGLSWDSGPEEPGPRLQKVLAKLPLAEEEKRFAGKAGGKLAKAPGLKDFQIQVQPVRMQKLTKLREEHILMRNQNLVGLKLPDLSEAAEQEKGLPSELSPAIEEEESKSGLDVMPNISDVLLRKLRVHRSLPGSAPPLTEKEVENVFVQLSLAFRNDSYTLESRINQAERERNLTEENTEKELENFKASITSSASLWHHCEHRETYQKLLEDIAVLHRLAARLSSRAEVVGAVRQEKRMSKATEVMMQYVENLKRTYEKDHAELMEFKKLANQNSSRSCGPSEDGVPRTARSMSLTLGKNMPRRRVSVAVVPKFNALNLPGQTPSSSSIPSLPALSESPNGKGSLPVTSALPALLENGKTNGDPDCEASAPALTLSCLEELSQETKARMEEEAYSKGFQEGLKKTKELQDLKEEEEEQKSESPEEPEEVEETEEEEKGPRSSKLEELVHFLQVMYPKLCQHWQVIWMMAAVMLVLTVVLGLYNSYNSCAEQADGPLGRSTCSAAQRDSWWSSGLQHEQPTEQ

SEQ ID NO: 22309 - protein, 912 aa, Homo sapiens
MVKAPQSEERLARGGKENNSVLACGAQASWSIFGADAAEVPGTRGHSQQEAAMPHIPEDEEPPGEPQAAQSPAGQGPPAAGVSCSPTPTIVLTGDATSPEGETDKNLANRVHSPHKRLSHRHLKVSTASLTSVDPAGHIIDLVNDQLPDISISEEDKKKNLALLEEAKLVSERFLTRRGRKSRSSPGDSPSAVSPNLSPSASPTSSRSNSLTVPTPPGLDVCSGPPSPLPGAPPQKGDEADVSSPHPGEPNVPKGLADRKQNDQRKVSQGRLAPRPPPVEKSKEIAIEQKENFDPLQYPETTPKGLAPVTNSSGKMALNSPQPGPVESELGKQLLKTGWEGSPLPRSPTQDAAGVGPPASQGRGPAGEPMGPEAGSKAELPPTVSRPPLLRGLSWDSGPEEPGPRLQKVLAKLPLAEEEKRFAGKAGGKLAKAPGLKDFQIQVQPVRMQKLTKLREEHILMRNQNLVGLKLPDLSEAAEQEKGLPSELSPAIEEEESKSGLDVMPNISDVLLRKLRVHRSLPGSAPPLTEKEVENVFVQLSLAFRNDSYTLESRINQAERERNLTEENTEKELENFKASITSSASLWHHCEHRETYQKLLEDIAVLHRLAARLSSRAEVVGAVRQEKRMSKATEVMMQYVENLKRTYEKDHAELMEFKKLANQNSSRSCGPSEDGVPRTARSMSLTLGKNMPRRRVSVAVVPKFNALNLPGQTPSSSSIPSLPALSESPNGKGSLPVTSALPALLENGKTNGDPDCEASAPALTLSCLEELSQETKARMEEEAYSKGFQEGLKKTKELQDLKEEEEEQKSESPEEPEEVEETEEEEKGPRSSKLEELVHFLQVMYPKLCQHWQVIWMMAAVMLVLTVVLGLYNSYNSCAEQADGPLGRSTCSAAQRDSWWSSGLQHEQPTEQ

SEQ ID NO: 22310 - protein, 706 aa, Homo sapiens
MVKAPQSEERLARGGKENNSVLACGAQASWSIFGADAAEVPGTRGHSQQEAAMPHIPEDEEPPGEPQAAQSPAGQGPPAAGVSCSPTPTIVLTGDATSPEGETDKNLANRVHSPHKRLSHRHLKVSTASLTSVDPAGHIIDLVNDQLPDISISEEDKKKNLALLEEAKLVSERFLTRRGRKSRSSPGDSPSAVSPNLSPSASPTSSRSNSLTVPTPPGLDVCSGPPSPLPGAPPQKGDEADVSSPHPGEPEHILMRNQNLVGLKLPDLSEAAEQEKGLPSELSPAIEEEESKSGLDVMPNISDVLLRKLRVHRSLPGSAPPLTEKEVENVFVQLSLAFRNDSYTLESRINQAERERNLTEENTEKELENFKASITSSASLWHHCEHRETYQKLLEDIAVLHRLAARLSSRAEVVGAVRQEKRMSKATEVMMQYVENLKRTYEKDHAELMEFKKLANQNSSRSCGPSEDGVPRTARSMSLTLGKNMPRRRVSVAVVPKFNALNLPGQTPSSSSIPSLPALSESPNGKGSLPVTSALPALLENGKTNGDPDCEASAPALTLSCLEELSQETKARMEEEAYSKGFQEGLKKTKELQDLKEEEEEQKSESPEEPEEVEETEEEEKGPRSSKLEELVHFLQVMYPKLCQHWQVIWMMAAVMLVLTVVLGLYNSYNSCAEQADGPLGRSTCSAAQRDSWWSSGLQHEQPTEQ

SEQ ID NO: 22311 - protein, 885 aa, Homo sapiens
MGMDLTCPFGISPACGAQASWSIFGADAAEVPGTRGHSQQEAAMPHIPEDEEPPGEPQAAQSPAGQGPPAAGVSCSPTPTIVLTGDATSPEGETDKNLANRVHSPHKRLSHRHLKVSTASLTSVDPAGHIIDLVNDQLPDISISEEDKKKNLALLEEAKLVSERFLTRRGRKSRSSPGDSPSAVSPNLSPSASPTSSRSNSLTVPTPPDGDEADVSSPHPGEPNVPKGLADRKQNDQRKVSQGRLAPRPPPVEKSKEIAIEQKENFDPLQYPETTPKGLAPVTNSSGKMALNSPQPGPVESELGKQLLKTGWEGSPLPRSPTQDAAGVGPPASQGRGPAGEPMGPEAGSKAELPPTVSRPPLLRGLSWDSGPEEPGPRLQKVLAKLPLAEEEKRFAGKAGGKLAKAPGLKDFQIQVQPVRMQKLTKLREEHILMRNQNLVGLKLPDLSEAAEQEKGLPSELSPAIEEEESKSGLDVMPNISDVLLRKLRVHRSLPGSAPPLTEKEVENVFVQLSLAFRNDSYTLESRINQAERERNLTEENTEKELENFKASITSSASLWHHCEHRETYQKLLEDIAVLHRLAARLSSRAEVVGAVRQEKRMSKATEVMMQYVENLKRTYEKDHAELMEFKKLANQNSSRSCGPSEDGVPRTARSMSLTLGKNMPRRRVSVAVVPKFNALNLPGQTPSSSSIPSLPALSESPNGKGSLPVTSALPALLENGKTNGDPDCEASAPALTLSCLEELSQETKARMEEEAYSKGFQEGLKKTKELQDLKEEEEEQKSESPEEPEEVEETEEEEKGPRSSKLEELVHFLQVMYPKLCQHWQVIWMMAAVMLVLTVVLGLYNSYNSCAEQADGPLGRSTCSAAQRDSWWSSGLQHEQPTEQ

SEQ ID NO: 22312 - protein, 319 aa, Homo sapiens
MTNSSFFCPVYKDLEPFTYFFYLVFLVGIIGSCFATWAFIQKNTNHRCVSIYLINLLTADFLLTLALPVKIVVDLGVAPWKLKIFHCQVTACLIYINMYLSIIFLAFVSIDRCLQLTHSCKIYRIQEPGFAKMISTVVWLMVLLIMVPNMMIPIKDIKEKSNVGCMEFKKEFGRNWHLLTNFICVAIFLNFSAIILISNCLVIRQLYRNKDNENYPNVKKALINILLVTTGYIICFVPYHIVRIPYTLSQTEVITDCSTRISLFKAKEATLLLAVSNLCFDPILYYHLSKAFRSKVTETFASPKETKAQKEKLRCENNA

SEQ ID NO: 22313 - protein, 333 aa, Homo sapiens
MPANYTCTRPDGDNTDFRYFIYAVTYTVILVPGLIGNILALWVFYGYMKETKRAVIFMINLAIADLLQVLSLPLRIFYYLNHDWPFGPGLCMFCFYLKYVNMYASIYFLVCISVRRFWFLMYPFRFHDCKQKYDLYISIAGWLIICLACVLFPLLRTSDDTSGNRTKCFVDLPTRNVNLAQSVVMMTIGELIGFVTPLLIVLYCTWKTVLSLQDKYPMAQDLGEKQKALKMILTCAGVFLICFAPYHFSFPLDFLVKSNEIKSCLARRVILIFHSVALCLASLNSCLDPVIYYFSTNEFRRRLSRQDLHDSIQLHAKSFVSNHTASTMTPELC

SEQ ID NO: 22314 - protein, 555 aa, Homo sapiens
MESTPFSGVANQIHTLCERPTYGEVKDGALDVKRQHKCPGPTSGPSPGTNLSGCIRMNDDPSMEENGVERVCPESLLQSREYSSLPLPRHTSSTDGTITSSDPGLEILNMASCDLDRNSLCKKEEDTRSASPTIEAQGTSPAHDNIAFQDSTSKDKTILNLEAKEEPETIEEHKKEHASGDSVVSPLPVTTVKSVNLRQSENTSANEKEVEAEFLRLSLGFKCDWFTLEKRVKLEERSRDLAEENLKKEITNCLKLLESLTPLCEDDNQAQEIIKKLEKSIKFLSQCAARVASRAEMLGAINQESRVSKAVEVMIQHVENLKRMYAKEHAELEELKQVLLQNERSFNPLEDDDDCQIKKRSASLNSKPSSLRRVTIASLPRNIGNAGMVAGMENNDRFSRRSSSWRILGSKQSEHRPSLPRFISTYSWADAEEEKCELKTKDDSEPSGEETVERTRKPSLSEKKNNPSKWDVSSVYDTIASWATNLKSSIRKANKALWLSIAFIVLFAALMSFLTGQLFQKSVDAAPTQQEDSWTSLEHILWPFTRLRHNGPPPV

SEQ ID NO: 22315 - protein, 499 aa, Homo sapiens
MNDDPSMEENGVERVCPESLLQSREYSSLPLPRHTSSTDGTITSSDPGLEILNMASCDLDRNSLCKKEEDTRSASPTIEAQGTSPAHDNIAFQDSTSKDKTILNLEAKEEPETIEEHKKEHASGDSVVSPLPVTTVKSVNLRQSENTSANEKEVEAEFLRLSLGFKCDWFTLEKRVKLEERSRDLAEENLKKEITNCLKLLESLTPLCEDDNQAQEIIKKLEKSIKFLSQCAARVASRAEMLGAINQESRVSKAVEVMIQHVENLKRMYAKEHAELEELKQVLLQNERSFNPLEDDDDCQIKKRSASLNSKPSSLRRVTIASLPRNIGNAGMVAGMENNDRFSRRSSSWRILGSKQSEHRPSLPRFISTYSWADAEEEKCELKTKDDSEPSGEETVERTRKPSLSEKKNNPSKWDVSSVYDTIASWATNLKSSIRKANKALWLSIAFIVLFAALMSFLTGQLFQKSVDAAPTQQEDSWTSLEHILWPFTRLRHNGPPPV

SEQ ID NO: 22316 - protein, 160 aa, Homo sapiens
MEAERPQEEEDGEQGPPQDEEGWPPPNSTTRPWRSAPPSPPPPGTRHTALGPRSASLLSLQTELLLDLVAEAQSRRLEEQRATFYTPQNPSSLAPAPLRPLEDREQLYSTILSHQCQRMEAQRSEPPLPPGGQELLELLLRVQGGGRMEEQRSRPPTHTC

SEQ ID NO: 22317 - protein, 712 aa, Homo sapiens
MAGGPGPGEPAAPGAQHFLYEVPPWVMCRFYKVMDALEPADWCQFAALIVRDQTELRLCERSGQRTASVLWPWINRNARVADLVHILTHLQLLRARDIITAWHPPAPLPSPGTTAPRPSSIPAPAEAEAWSPRKLPSSASTFLSPAFPGSQTHSGPELGLVPSPASLWPPPPSPAPSSTKPGPESSVSLLQGARPFPFCWPLCEISRGTHNFSEELKIGEGGFGCVYRAVMRNTVYAVKRLKENADLEWTAVKQSFLTEVEQLSRFRHPNIVDFAGYCAQNGFYCLVYGFLPNGSLEDRLHCQTQACPPLSWPQRLDILLGTARAIQFLHQDSPSLIHGDIKSSNVLLDERLTPKLGDFGLARFSRFAGSSPSQSSMVARTQTVRGTLAYLPEEYIKTGRLAVDTDTFSFGVVVLETLAGQRAVKTHGARTKYLKDLVEEEAEEAGVALRSTQSTLQAGLAADAWAAPIAMQIYKKHLDPRPGPCPPELGLGLGQLACCCLHRRAKRRPPMTQVYERLEKLQAVVAGVPGHSEAASCIPPSPQENSYVSSTGRAHSGAAPWQPLAAPSGASAQAAEQLQRGPNQPVESDESLGGLSAALRSWHLTPSCPLDPAPLREAGCPQGDTAGESSWGSGPGSRPTAVEGLALGSSASSSSEPPQIIINPARQKMVQKLALYEDGALDSLQLLSSSSLPGLGLEQDRQGPEESDEFQS

SEQ ID NO: 22318 - protein, 682 aa, Homo sapiens
MAGGPGPGEPAAPGAQHFLYEVPPWVMCRFYKVMDALEPADWCQFAALIVRDQTELRLCERSGQRTASVLWPWINRNARVADLVHILTHLQLLRARDIITAWHPPAPLPSPGTTAPRPSSIPAPAEAEAWSPRKLPSSASTFLSPAFPGSQTHSGPELGLVPSPASLWPPPPSPAPSSTKPGPESSVSLLQGARPFPFCWPLCEISRGTHNFSEELKIGEGGFGCVYRAVMRNTVYAVKRLKENADLEWTAVKQSFLTEVEQLSRFRHPNIVDFAGYCAQNGFYCLVYGFLPNGSLEDRLHCQTQACPPLSWPQRLDILLGTARAIQFLHQDSPSLIHGDIKSSNVLLDERLTPKLGDFGLARFSRFAGSSPSQSSMVARTQTVRGTLAYLPEEYIKTGRLAVDTDTFSFGVVVLETLAGQRAVKTHGARTKYLKDLVEEEAEEAGVALRSTQSTLQAGLAADAWAAPIAMQIYKKHLDPRPGPCPPELGLGLGQLACCCLHRRAKRRPPMTQENSYVSSTGRAHSGAAPWQPLAAPSGASAQAAEQLQRGPNQPVESDESLGGLSAALRSWHLTPSCPLDPAPLREAGCPQGDTAGESSWGSGPGSRPTAVEGLALGSSASSSSEPPQIIINPARQKMVQKLALYEDGALDSLQLLSSSSLPGLGLEQDRQGPEESDEFQS

SEQ ID NO: 22319 - protein, 693 aa, Homo sapiens
MAGGPGPGEPAAPGAQHFLYEVPPWVMCRFYKVMDALEPADWCQFGGWRRAAGGREARGLLAPTPDAPRPAAALIVRDQTELRLCERSGQRTASVLWPWINRNARVADLVHILTHLQLLRARDIITAWHPPAPLPSPGTTAPRPSSIPAPAEAEAWSPRKLPSSASTFLSPAFPGSQTHSGPELGLVPSPASLWPPPPSPAPSSTKPGPESSVSLLQGARPFPFCWPLCEISRGTHNFSEELKIGEGGFGCVYRAVMRNTVYAVKRLKENADLEWTAVKQSFLTEVEQLSRFRHPNIVDFAGYCAQNGFYCLVYGFLPNGSLEDRLHCQTQACPPLSWPQRLDILLGTARAIQFLHQDSPSLIHGDIKSSNVLLDERLTPKLGDFGLARFSRFAGSSPSQSSMVARTQTVRGTLAYLPEEYIKTGRLAVDTDTFSFGVVVLETLAGQRAVKTHGARTKYLKDLVEEEAEEAGVALRSTQSTLQAGLAADAWAAPIAMQIYKKHLGQLACCCLHRRAKRRPPMTQENSYVSSTGRAHSGAAPWQPLAAPSGASAQAAEQLQRGPNQPVESDESLGGLSAALRSWHLTPSCPLDPAPLREAGCPQGDTAGESSWGSGPGSRPTAVEGLALGSSASSSSEPPQIIINPARQKMVQKLALYEDGALDSLQLLSSSSLPGLGLEQDRQGPEESDEFQS

SEQ ID NO: 22320 - protein, 633 aa, Homo sapiens
MAGGPGPGEPAAPGAQHFLYEVPPWVMCRFYKVMDALEPADWCQFAALIVRDQTELRLCERSGQRTASVLWPWINRNARVADLVHILTHLQLLRARDIITAWHPPAPLPSPGTTAPRPSSIPAPAEAEAWSPRKLPSSASTFLSPAFPGSQTHSGPELGLVPSPASLWPPPPSPAPSSTKPGPESSVSLLQGARPFPFCWPLCEISRGTHNFSEELKIGEGGFGCVYRAVMRNTVYAVKRLKENADLEWTAVKQSFLTEVEQLSRFRHPNIVDFAGYCAQNGFYCLVYGFLPNGSLEDRLHCQTQACPPLSWPQRLDILLGTARAIQFLHQDSPSLIHGDIKSSNVLLDERLTPKLGDFGLARFSRFAGSSPSQSSMVARTQTVRGTLAYLPEEYIKTGRLAVDTDTFSFGVVVLETLAGQRAVKTHGARTKYLVYERLEKLQAVVAGVPGHSEAASCIPPSPQENSYVSSTGRAHSGAAPWQPLAAPSGASAQAAEQLQRGPNQPVESDESLGGLSAALRSWHLTPSCPLDPAPLREAGCPQGDTAGESSWGSGPGSRPTAVEGLALGSSASSSSEPPQIIINPARQKMVQKLALYEDGALDSLQLLSSSSLPGLGLEQDRQGPEESDEFQS

SEQ ID NO: 22321 - protein, 350 aa, Homo sapiens
MRLPDVQLWLVLLWALVRAQGTGSVCPSCGGSKLAPQAERALVLELAKQQILDGLHLTSRPRITHPPPQAALTRALRRLQPGSVAPGNGEEVISFATVTDSTSAYSSLLTFHLSTPRSHHLYHARLWLHVLPTLPGTLCLRIFRWGPRRRRQGSRTLLAEHHITNLGWHTLTLPSSGLRGEKSGVLKLQLDCRPLEGNSTVTGQPRRLLDTAGHQQPFLELKIRANEPGAGRARRRTPTCEPATPLCCRRDHYVDFQELGWRDWILQPEGYQLNYCSGQCPPHLAGSPGIAASFHSAVFSLLKANNPWPASTSCCVPTARRPLSLLYLDHNGNVVKTDVPDMVVEACGCS

SEQ ID NO: 22322 - protein, 693 aa, Homo sapiens
MWPQPYLPPHPMMLEESRQNKLAAAKKKLKEYQQRKSPGIPAGAKTKKKKTDSSPETTTSGGGHSPGDSQYQELAVALESSSVTISQLNENIESLKQQKKQVEHQLEEAKKTNNEIHKAQMERLETINILTLEKADLKTTLYHTKRAARHFEEESKDLAGRLQYSLQRIQELERALCAVSTQQQEEDRSSSCREAVLHRRLQQTIKERALLNAHVTQVTESLKQVQLERDEYAKHIKGERARWQERMWKMSVEARTLKEEKKRDIHRIQELERSLSELKNQMAKPPSLAPPAVTSVVEQLQDEAKHLRQEVEGLEGKLQSQVENNQALSLLSKEQKQRLQEQEEMLREQEVQRVREQERLCEQNERLREQQKTLQEQGERLRKQEQRLRKQEERLRKEEERLQKQEKRLWDQEERLWKKEERLQKQEERLALSQNHKLDKQLAEPQCSFEDLNNEKKSALQLEQQVKELQEKLDEEHLEAASQQNQQLETQLSLVALPGEGDGGQHLDSEEEEAPRPTPNIPEDLESREATSSFMDLPKEKADGTEQVERRELGFVQPSGVTDGMRESFTVYESQGAVPNTRHQEMEDVIRLAQKEEEMKVKLLELQELVLPLVGNHEGHGKFLIAAQNPADEPTPGAPAPQELGAAGEQDDFYEVSLDNNVEPAPGAAREGSPHDNPTVQQIVQLSPVMQDT

SEQ ID NO: 22323 - protein, 313 aa, Homo sapiens
MAARRALHFVFKVGNRFQTARFYRDVLGMKVESCSVARLECSGAISAHCSDYTRITEDSFSKPYDGKWSKTMVGFGPEDDHFVAELTYNYGVGDYKLGNDFMGITLASSQAVSNARKLEWPLTEVAEGVFETEAPGGYKFYLQNRSLPQSDPVLKVTLAVSDLQKSLNYWCNLLGMKIYEKDEEKQRALLGYADNQCKLELQGVKGGVDHAAAFGRIAFSCPQKELPDLEDLMKRENQKILTPLVSLDTPGKATVQVVILADPDGHEICFVGDEAFRELSKMDPEGSKLLDDAMAADKSDEWFAKHNKPKASG

SEQ ID NO: 22324 - protein, 298 aa, Homo sapiens
MAARRALHFVFKVGNRFQTARFYRDVLGMKVLRHEEFEEGCKAACNGPYDGKWSKTMVGFGPEDDHFVAELTYNYGVGDYKLGNDFMGITLASSQAVSNARKLEWPLTEVAEGVFETEAPGGYKFYLQNRSLPQSDPVLKVTLAVSDLQKSLNYWCNLLGMKIYEKDEEKQRALLGYADNQCKLELQGVKGGVDHAAAFGRIAFSCPQKELPDLEDLMKRENQKILTPLVSLDTPGKATVQVVILADPDGHEICFVGDEAFRELSKMDPEGSKLLDDAMAADKSDEWFAKHNKPKASG

SEQ ID NO: 22325 - protein, 188 aa, Homo sapiens
MAARRALHFVFKVGNRFQTARFYRDVLGMKVLRHEEFEEGCKAACNGPYDGKWSKTMVGFGPEDDHFVAELTYNYGVGDYKLGNDFMGITLASSQAVSNARKLEWPLTEVAEGVFETEAPGGYKFYLQNRSLPQSDPVLKVTLAVSDLQKSLNYWCNLLGMKIYEKDEEKQRALLGYADNQVSNLGEE

SEQ ID NO: 22326 - protein, 430 aa, Homo sapiens
MEWKLEQSMREQALLKAQLTQLKESLKEVQLERDEYAEHLKGERARWQQRMRKMSQEVCSLKKEKKHDKYRVEKLERSLSKLKNQMAEPLPPEPPAVPSEVELQHLRKELERVAGALQAQVEYNQRISLLNEGQKERLREQEERLQEQQERLPEQEERLQQLAEPQNSFKELNNENKSVLQLEQQVKELQEKLGKERLEAASQQKQQLTAQLSLMALPGEGHGGEHLDSEGEEAPRPMPSVPEDLESREAMSGFMDHLEEKADLSELVEKEELGFFQYYRERCHQKVYHPITKPGGSAKDAAPGGGHHQAGPGQGGDEGEAAGAAGDGVAAGGDYKGHSKFLVTAQNPAHEPSPGAPAPQELGAAHKHGDLCEVSLTDSVEPVQGEAREGSPHDNPTAQPIVQDHQEHPGLGSNCCVPFFCWAWLPRRRR

SEQ ID NO: 22327 - protein, 167 aa, Homo sapiens
MATEVHNLQELRRSASLATKVFIQRDYSDGTICQFQTKFPPELDSRIERQLFEETVKTLNGFYAEAEKIGGSSYLEGCLACATAYFIFLCMETHYEKVLKKISRYIQEQNEKIFAPRGLLLTDPVERGMRVIEISIYEDRCSSGSSSSGSSSGSGSSSGGGGGAGAR

SEQ ID NO: 22328 - protein, 239 aa, Homo sapiens
MGDLWLFLLLPLSAFHGVKGCLECDPKFIEDVGSLLGNLIPSEVPGRTQLLERQIKEMIHLSFKVSHSDKRLRVLAVQQVVKLRTWLKNEFYKLGNETWKGVFIYQGKLLDVCQNLESKLKELLKNFSEIACSEDCIVVEGPILDCWTCLRMTNRCFKGEYCGDEDPRKAENREIALFLILLATAVILGSAVLLFHFCIFHRRKMKAIRRSLKEYVEKKLEELMGKIDEKEEKDFRLRK

SEQ ID NO: 22329 - protein, 86 aa, Homo sapiens
MAVRQWVIALALAALLVVDREVPVAAGKLPFSRMPICEHMVESPTCSQMSNLVCGTDGLTYTNECQLCLARIKTKQDIQIMKDGKC

SEQ ID NO: 22330 - protein, 553 aa, Homo sapiens
MKLGSSRAGPGRGSAGLLPGVHELPMGIPAPWGTSPLSFHRKCSLWAPGRPFLTLVLLVSIKQVTGSLLEETTRKWAQYKQACLRDLLKEPSGIFCNGTFDQYVCWPHSSPGNVSVPCPSYLPWWSEESSGRAYRHCLAQGTWQTIENATDIWQDDSECSENHSFKQNVDRYALLSTLQLMYTVGYSFSLISLFLALTLLLFLRKLHCTRNYIHMNLFASFILRTLAVLVKDVVFYNSYSKRPDNENGWMSYLSEMSTSCRSVQVLLHYFVGANYLWLLVEGLYLHTLLEPTVLPERRLWPRYLLLGWAFPVLFVVPWGFARAHLENTGCWTTNGNKKIWWIIRGPMMLCVTVNFFIFLKILKLLISKLKAHQMCFRDYKYRLAKSTLVLIPLLGVHEILFSFITDDQVEGFAKLIRLFIQLTLSSFHGFLVALQYGFANGEVKAELRKYWVRFLLARHSGCRACVLGKDFRFLGKCPKKLSEGDGAEKLRKLQPSLNSGRLLHLAMRGLGELGAQPQQDHARWPRGSSLSECSEGDVTMANTMEEILEESEI

SEQ ID NO: 22331 - protein, 408 aa, Homo sapiens
MWAFSELPMPLLINLIVSLLGFVATVTLIPAFRGHFIAARLCGQDLNKTSRQQIPESQGVISGAVFLIILFCFIPFPFLNCFVKEQCKAFPHHEFVALIGALLAICCMIFLGFADDVLNLRWRHKLLLPTAASLPLLMVYFTNFGNTTIVVPKPFRPILGLHLDLGILYYVYMGLLAVFCTNAINILAGINGLEAGQSLVISASIIVFNLVELEGDCRDDHVFSLYFMIPFFFTTLGLLYHNWYPSRVFVGDTFCYFAGMTFAVVGILGHFSKTMLLFFMPQVFNFLYSLPQLLHIIPCPRHRIPRLNIKTGKLEMSYSKFKTKSLSFLGTFILKVAESLQLVTVHQSETEDGEFTECNNMTLINLLLKVLGPIHERNLTLLLLLLQILGSAITFSIRYQLVRLFYDV

SEQ ID NO: 22332 - protein, 400 aa, Homo sapiens
MPLLINLIVSLLGFVATVTLIPAFRGHFIAARLCGQDLNKTSRQQIPESQGVISGAVFLIILFCFIPFPFLNCFVKEQCKAFPHHEFVALIGALLAICCMIFLGFADDVLNLRWRHKLLLPTAASLPLLMVYFTNFGNTTIVVPKPFRPILGLHLDLGILYYVYMGLLAVFCTNAINILAGINGLEAGQSLVISASIIVFNLVELEGDCRDDHVFSLYFMIPFFFTTLGLLYHNWYPSRVFVGDTFCYFAGMTFAVVGILGHFSKTMLLFFMPQVFNFLYSLPQLLHIIPCPRHRIPRLNIKTGKLEMSYSKFKTKSLSFLGTFILKVAESLQLVTVHQSETEDGEFTECNNMTLINLLLKVLGPIHERNLTLLLLLLQILGSAITFSIRYQLVRLFYDV

SEQ ID NO: 22333 - protein, 301 aa, Homo sapiens
MIFLGFADDVLNLRWRHKLLLPTAASLPLLMVYFTNFGNTTIVVPKPFRPILGLHLDLGILYYVYMGLLAVFCTNAINILAGINGLEAGQSLVISASIIVFNLVELEGDCRDDHVFSLYFMIPFFFTTLGLLYHNWYPSRVFVGDTFCYFAGMTFAVVGILGHFSKTMLLFFMPQVFNFLYSLPQLLHIIPCPRHRIPRLNIKTGKLEMSYSKFKTKSLSFLGTFILKVAESLQLVTVHQSETEDGEFTECNNMTLINLLLKVLGPIHERNLTLLLLLLQILGSAITFSIRYQLVRLFYDV

SEQ ID NO: 22334 - protein, 672 aa, Homo sapiens
MTPSQVAFEIRGTLLPGEVFAICGSCDALGNWNPQNAVALLPENDTGESMLWKATIVLSRGVSVQYRYFKGYFLEPKTIGGPCQVIVHKWETHLQPRSITPLESEIIIDDGQFGIHNGVETLDSGWLTCQTEIRLRLHYSEKPPVSITKKKLKKSRFRVKLTLEGLEEDDDDRVSPTVLHKMSNSLEISLISDNEFKCRHSQPECGYGLQPDRWTEYSIQTMEPDNLELIFDFFEEDLSEHVVQGDALPGHVGTACLLSSTIAESGKSAGILTLPIMSRNSRKTIGKVRVDYIIIKPLPGYSCDMKSSFSKYWKPRIPLDVGHRGAGNSTTTAQLAKVQENTIASLRNAASHGAAFVEFDVHLSKDFVPVVYHDLTCCLTMKKKFDADPVELFEIPVKELTFDQLQLLKLTHVTALKSKDRKESVVQEENSFSENQPFPSLKMVLESLPEDVGFNIEIKWICQQRDGMWDGNLSTYFDMNLFLDIILKTVLENSGKRRIVFSSFDADICTMVRQKQNKYPILFLTQGKSEIYPELMDLRSRTTPIAMSFAQFENLLGINVHTEDLLRNPSYIQEAKAKGLVIFCWGDDTNDPENRRKLKELGVNGLIYDRIYDWMPEQPNIFQVEQLERLKQELPELKSCLCPTVSRFVPSSLCGESDIHVDANGIDNVENA

SEQ ID NO: 22335 - protein, 126 aa, Homo sapiens
MDSLAAGELNASHQPWVPEFVAYWRKTHQGNLQTLLLHWLLLCSCLHHLYNASCHPAFPVEYSHAVCCLQPRFWKEMSPFSSSSTTHLFSKCFFYTCLCWAWQQCSSEQNHQPCSHAAYNQVERQT

SEQ ID NO: 22336 - protein, 117 aa, Homo sapiens
MDSLAAGELNASHQPWVPEFVAYWRKTHQDHLCSLHSRAFGLLDARVTWALRRAPEPVPGKDRLLLAAFPAEASPVDTASVSVYGRAPRYMHKGVKKCVCTPVSKNSTAWLLLGGIS

SEQ ID NO: 22337 - protein, 745 aa, Homo sapiens
MFPLRALWLVWALLGVAGSCPEPCACVDKYAHQFADCAYKELREVPEGLPANVTTLSLSANKITVLRRGAFADVTQVTSLWLAHNEVRTVEPGALAVLSQLKNLDLSHNFISSFPWSDLRNLSALQLLKMNHNRLGSLPRDALGALPDLRSLRINNNRLRTLAPGTFDALSALSHLQLYHNPFHCGCGLVWLQAWAASTRVSLPEPDSIACASPPALQGVPVYRLPALPCAPPSVHLSAEPPLEAPGTPLRAGLAFVLHCIADGHPTPRLQWQLQIPGGTVVLEPPVLSGEDDGVGAEEGEGEGDGDLLTQTQAQTPTPAPAWPAPPATPRFLALANGSLLVPLLSAKEAGVYTCRAHNELGANSTSIRVAVAATGPPKHAPGAGGEPDGQAPTSERKSTAKGRGNSVLPSKPEGKIKGQGLAKVSILGETETEPEEDTSEGEEAEDQILADPAEEQRCGNGDPSRYVSNHAFNQSAELKPHVFELGVIALDVAEREARVQLTPLAARWGPGPGGAGGAPRPGRRPLRLLYLCPAGGGAAVQWSRVEEGVNAYWFRGLRPGTNYSVCLALAGEACHVQVVFSTKKELPSLLVIVAVSVFLLVLATVPLLGAACCHLLAKHPGKPYRLILRPQAPDPMEKRIAADFDPRASYLESEKSYPAGGEAGGEEPEDVQGEGLDEDAEQGDPSGDLQREESLAACSLVESQSKANQEEFEAGSEYSDRLPLGAEAVNIAQEINGNYRQTAG

SEQ ID NO: 22338 - protein, 263 aa, Homo sapiens
MKGGFTGGDEYQKHFLPRDYLATYYSFDGSPSPEAEMLKFNLECLHKTFGPGGLQGDTLIDIGSGPTIYQVLAACDSFQDITLSDFTDRNREELEKWLKKEPGAYDWTPAVKFACELEGNSGRWEEKEEKLRAAVKRVLKCDVHLGNPLAPAVLPLADCVLTLLAMECACCSLDAYRAALCNLASLLKPGGHLVTTVTLRLPSYMVGKREFSCVALEKEEVEQAVLDAGFDIEQLLHSPQSYSVTNAANNGVCFIVARKKPGP

SEQ ID NO: 22339 - protein, 262 aa, Homo sapiens
MKGGFTGGDEYQKHFLPRDYLATYYSFDGSPSPEAEMLKFNLECLHKTFGPGLQGDTLIDIGSGPTIYQVLAACDSFQDITLSDFTDRNREELEKWLKKEPGAYDWTPAVKFACELEGNSGRWEEKEEKLRAAVKRVLKCDVHLGNPLAPAVLPLADCVLTLLAMECACCSLDAYRAALCNLASLLKPGGHLVTTVTLRLPSYMVGKREFSCVALEKEEVEQAVLDAGFDIEQLLHSPQSYSVTNAANNGVCFIVARKKPGP

SEQ ID NO: 22340 - protein, 428 aa, Homo sapiens
MQELHLLWWALLLGLAQACPEPCDCGEKYGFQIADCAYRDLESVPPGFPANVTTLSLSANRLPGLPEGAFREVPLLQSLWLAHNEIRTVAAGALASLSHLKSLDLSHNLISDFAWSDLHNLSALQLLKMDSNELTFIPRDAFRSLRALRSLQLNHNRLHTLAEGTFTPLTALSHLQINENPFDCTCGIVWLKTWALTTAVSIPEQDNIACTSPHVLKGTPLSRLPPLPCSAPSVQLSYQPSQDGAELRPGFVLALHCDVDGQPAPQLHWHIQIPSGIVEITSPNVGTDGRALPGTPVASSQPRFQAFANGSLLIPDFGKLEEGTYSCLATNELGSAESSVDVALATPGEGGEDTLGRRFHGKAVEGKGCYTVDNEVQPSGPEDNVVIIYLSRAGNPEAAVAEGVPGQLPPGLLLLGQSLLLFFFLTSF

SEQ ID NO: 22341 - protein, 1238 aa, Homo sapiens
MRAQGRGRLPRRLLLLLALWVQAARPMGYFELQLSALRNVNGELLSGACCDGDGRTTRAGGCGHDECDTYVRVCLKEYQAKVTPTGPCSYGHGATPVLGGNSFYLPPAGAAGDRARARARAGGDQDPGLVVIPFQFAWPRSFTLIVEAWDWDNDTTPNEELLIERVSHAGMINPEDRWKSLHFSGHVAHLELQIRVRCDENYYSATCNKFCRPRNDFFGHYTCDQYGNKACMDGWMGKECKEAVCKQGCNLLHGGCTVPGECRCSYGWQGRFCDECVPYPGCVHGSCVEPWQCNCETNWGGLLCDKDLNYCGSHHPCTNGGTCINAEPDQYRCTCPDGYSGRNCEKAEHACTSNPCANGGSCHEVPSGFECHCPSGWSGPTCALDIDECASNPCAAGGTCVDQVDGFECICPEQWVGATCQLDANECEGKPCLNAFSCKNLIGGYYCDCIPGWKGINCHINVNDCRGQCQHGGTCKDLVNGYQCVCPRGFGGRHCELERDECASSPCHSGGLCEDLADGFHCHCPQGFSGPLCEVDVDLCEPSPCRNGARCYNLEGDYYCACPDDFGGKNCSVPREPCPGGACRVIDGCGSDAGPGMPGTAASGVCGPHGRCVSQPGGNFSCICDSGFTGTYCHENIDDCLGQPCRNGGTCIDEVDAFRCFCPSGWEGELCDTNPNDCLPDPCHSRGRCYDLVNDFYCACDDGWKGKTCHSREFQCDAYTCSNGGTCYDSGDTFRCACPPGWKGSTCAVAKNSSCLPNPCVNGGTCVGSGASFSCICRDGWEGRTCTHNTNDCNPLPCYNGGICVDGVNWFRCECAPGFAGPDCRINIDECQSSPCAYGATCVDEINGYRCSCPPGRAGPRCQEVIGFGRSCWSRGTPFPHGSSWVEDCNSCRCLDGRRDCSKVWCGWKPCLLAGQPEALSAQCPLGQRCLEKAPGQCLRPPCEAWGECGAEEPPSTPCLPRSGHLDNNCARLTLHFNRDHVPQGTTVGAICSGIRSLPATRAVARDRLLVLLCDRASSGASAVEVAVSFSPARDLPDSSLIQGAAHAIVAAITQRGNSSLLLAVTEVKVETVVTGGSSTGLLVPVLCGAFSVLWLACVVLCVWWTRKRRKERERSRLPREESANNQWAPLNPIRNPIERPGGHKDVLYQCKNFTPPPRRADEALPGPAGHAAVREDEEDEDLGRGEEDSLEAEKFLSHKFTKDPGRSPGRPAHWASGPKVDNRAVRSINEARYAGKE

SEQ ID NO: 22342 - protein, 1200 aa, Homo sapiens
MRAQGRGRLPRRLLLLLALWVQAARPMGYFELQLSALRNVNGELLSGACCDGDGRTTRAGGCGHDECDTYVRVCLKEYQAKVTPTGPCSYGHGATPVLGGNSFYLPPAGAAGDRARARARAGGDQDPGLVVIPFQFAWPRSFTLIVEAWDWDNDTTPNEELLIERVSHAGMINPEDRWKSLHFSGHVAHLELQIRVRCDENYYSATCNKFCRPRNDFFGHYTCDQYGNKACMDGWMGKECKEAVCKQGCNLLHGGCTVPGECRCSYGWQGRFCDECVPYPGCVHGSCVEPWQCNCETNWGGLLCDKDLNYCGSHHPCTNGGTCINAEPDQYRCTCPDGYSGRNCEKAEHACTSNPCANGGSCHEVPSGFECHCPSGWSGPTCALDIDECASNPCAAGGTCVDQVDGFECICPEQWVGATCQLDVNDCRGQCQHGGTCKDLVNGYQCVCPRGFGGRHCELERDECASSPCHSGGLCEDLADGFHCHCPQGFSGPLCEVDVDLCEPSPCRNGARCYNLEGDYYCACPDDFGGKNCSVPREPCPGGACRVIDGCGSDAGPGMPGTAASGVCGPHGRCVSQPGGNFSCICDSGFTGTYCHENIDDCLGQPCRNGGTCIDEVDAFRCFCPSGWEGELCDTNPNDCLPDPCHSRGRCYDLVNDFYCACDDGWKGKTCHSREFQCDAYTCSNGGTCYDSGDTFRCACPPGWKGSTCAVAKNSSCLPNPCVNGGTCVGSGASFSCICRDGWEGRTCTHNTNDCNPLPCYNGGICVDGVNWFRCECAPGFAGPDCRINIDECQSSPCAYGATCVDEINGYRCSCPPGRAGPRCQEVIGFGRSCWSRGTPFPHGSSWVEDCNSCRCLDGRRDCSKVWCGWKPCLLAGQPEALSAQCPLGQRCLEKAPGQCLRPPCEAWGECGAEEPPSTPCLPRSGHLDNNCARLTLHFNRDHVPQGTTVGAICSGIRSLPATRAVARDRLLVLLCDRASSGASAVEVAVSFSPARDLPDSSLIQGAAHAIVAAITQRGNSSLLLAVTEVKVETVVTGGSSTGLLVPVLCGAFSVLWLACVVLCVWWTRKRRKERERSRLPREESANNQWAPLNPIRNPIERPGGHKDVLYQCKNFTPPPRRADEALPGPAGHAAVREDEEDEDLGRGEEDSLEAEKFLSHKFTKDPGRSPGRPAHWASGPKVDNRAVRSINEARYAGKE

SEQ ID NO: 22343 - protein, 464 aa, Homo sapiens
MVRLAAELLLLLGLLLLTLHITVLRGSGAADGPDAAAGNASQAQLQNNLNVGSDTTSETSFSLSKEAPREHLDHQAAHQPFPRPRFRQETGHPSLQRDFPRSFLLDLPNFPDLSKADINGQNPNIQVTIEVVDGPDSEADKDQHPENKPSWSVPSPDWRAWWQRSLSLARANSGDQDYKYDSTSDDSNFLNPPRGWDHTAPGHRTFETKDQPEYDSTDGEGDWSLWSVCSVTCGNGNQKRTRSCGYACTATESRTCDRPNCPGIEDTFRTAATEVSLLAGSEEFNATKLFEVDTDSCERWMSCKSEFLKKYMHKVMNDLPSCPCSYPTEVAYSTADIFDRIKRKDFRWKDASGPKEKLEIYKPTARYCIRSMLSLESTTLAAQHCCYGDNMQLITRGKGAGTPNLISTEFSAELHYKVDVLPWIICKGDWSRYNEARPPNNGQKCTESPSDEDYIKQFQEAREY

SEQ ID NO: 22344 - protein, 183 aa, Homo sapiens
MASRAGPRAAGTDGSDFQHRERVAMHYQMSVTLKYEIKKLIYVHLVIWLLLVAKMSVGHLRLLSHDQVAMPYQWEYPYLLSILPSLLGLLSFPRNNISYLVLSMISMGLFSIAPLIYGSMEMFPAAQQLYRHGKAYRFLFGFSAVSIMYLVLVLAVQVHAWQLYYSKKLLDSWFTSTQEKKHK

SEQ ID NO: 22345 - protein, 571 aa, Homo sapiens
MRALRDRAGLLLCVLLLAALLEAALGLPVKKPRLRGPRPGSLTRLAEVSASPDPRPLKEEEEAPLLPRTHLQAEPHQHGCWTVTEPAAMTPGNATPPRTPEVTPLRLELQKLPGLANTTLSTPNPDTQASASPDPRPLREEEEARLLPRTHLQAELHQHGCWTVTEPAALTPGNATPPRTQEVTPLLLELQKLPELVHATLSTPNPDNQVTIKVVEDPQAEVSIDLLAEPSNPPPQDTLSWLPALWSFLWGDYKGEEKDRAPGEKGEEKEEDEDYPSEDIEGEDQEDKEEDEEEQALWFNGTTDNWDQGWLAPGDWVFKDSVSYDYEPQKEWSPWSPCSGNCSTGKQQRTRPCGYGCTATETRTCDLPSCPGTEDKDTLGLPSEEWKLLARNATDMHDQDVDSCEKWLNCKSDFLIKYLSQMLRDLPSCPCAYPLEAMDSPVSLQDEHQGRSFRWRDASGPRERLDIYQPTARFCLRSMLSGESSTLAAQHCCYDEDSRLLTRGKGAGMPNLISTDFSPKLHFKFDTTPWILCKGDWSRLHAVLPPNNGRACTDNPLEEEYLAQLQEAKEY

SEQ ID NO: 22346 - protein, 292 aa, Homo sapiens
MRALRDRAGLLLCVLLLAALLEAALGLPVKKPRLRGPRPGSLTRLAEVSASPDPRPLKEEEEAPLLPRTHLQAEPHQHGCWTVTEPAAMTPGNATPPRTPEVTPLRLELQKLPGLANTTLSTPNPDTQASASPDPRPLREEEEARLLPRTHLQAELHQHGCWTVTEPAALTPGNATPPRTQEVTPLLLELQKLPELVHATLSTPNPDNQTMSLRRSGVPGLPAVGTAALASSRGLGPVAMAALPPRPVPVTCPPVLALRTRTPWASPVRSGSSWPAMLRTCMIKMWTAVRSG

SEQ ID NO: 22347 - protein, 490 aa, Homo sapiens
MRALRDRAGLLLCVLLLAALLEAALGLPVKKPRLRGPRPGSLTRLAEASASPDPRPLREEEEARLLPRTHLQAELHQHGCWTVTEPAALTPGNATPPRTQEVTPLLLELQKLPELVHATLSTPNPDNQVTIKVVEDPQAEVSIDLLAEPSNPPPQDTLSWLPALWSFLWGDYKGEEKDRAPGEKGEEKEEDEDYPSEDIEGEDQEDKEEDEEEQALWFNGTTDNWDQGWLAPGDWVFKDSVSYDYEPQKEWSPWSPCSGNCSTGKQQRTRPCGYGCTATETRTCDLPSCPGTEDKDTLGLPSEEWKLLARNATDMHDQDVDSCEKWLNCKSDFLIKYLSQMLRDLPSCPCAYPLEAMDSPVSLQDEHQGRSFRWRDASGPRERLDIYQPTARFCLRSMLSGESSTLAAQHCCYDEDSRLLTRGKGAGMPNLISTDFSPKLHFKFDTTPWILCKGDWSRLHAVLPPNNGRACTDNPLEEEYLAQLQEAKEY

SEQ ID NO: 22348 - protein, 76 aa, Homo sapiens
MRALRDRAGLLLCVLLLAALLEAALGLPVKKPRLRGPRPGSLTRLAEPPFQVRASSERSPAGARNLALCGVAGQGR

SEQ ID NO: 22349 - protein, 490 aa, Homo sapiens
MRALRDRAGLLLCVLLLAALLEAALGLPVKKPRLRGPRPGSLTRLAEVSASPDPRPLKEEEEAPLLPRTHLQAEPHQHGCWTVTEPAAMTPGNATPPRTPEVTPLRLELQKLPGLANTTLSTPNPDTQVTIKVVEDPQAEVSIDLLAEPSNPPPQDTLSWLPALWSFLWGDYKGEEKDRAPGEKGEEKEEDEDYPSEDIEGEDQEDKEEDEEEQALWFNGTTDNWDQGWLAPGDWVFKDSVSYDYEPQKEWSPWSPCSGNCSTGKQQRTRPCGYGCTATETRTCDLPSCPGTEDKDTLGLPSEEWKLLARNATDMHDQDVDSCEKWLNCKSDFLIKYLSQMLRDLPSCPCAYPLEAMDSPVSLQDEHQGRSFRWRDASGPRERLDIYQPTARFCLRSMLSGESSTLAAQHCCYDEDSRLLTRGKGAGMPNLISTDFSPKLHFKFDTTPWILCKGDWSRLHAVLPPNNGRACTDNPLEEEYLAQLQEAKEY

SEQ ID NO: 22350 - protein, 558 aa, Homo sapiens
MEAAAQFFVESPDVVYGPEAIEAQYEYRTTRVSREGGVLKVHPTSTRFTFRTARQVPRLGVMLVGWGGNNGSTLTAAVLANRLRLSWPTRSGRKEANYYGSLTQAGTVSLGLDAEGQEVFVPFSAVLPMVAPNDLVFDGWDISSLNLAEAMRRAKVLDWGLQEQLWPHMEALRPRPSVYIPEFIAANQSARADNLIPGSRAQQLEQIRRDIRDFRSSAGLDKVIVLWTANTERFCEVIPGLNDTAENLLRTIELGLEVSPSTLFAVASILEGCAFLNGSPQNTLVPGALELAWQHRVFVGGDDFKSGQTKVKSVLVDFLIGSGLKTMSIVSYNHLGNNDGENLSAPLQFRSKEVSKSNVVDDMVQSNPVLYTPGEEPDHCVVIKYVPYVGDSKRALDEYTSELMLGGTNTLVLHNTCEDSLLAAPIMLDLALLTELCQRVSFCTDMDPEPQTFHPVLSLLSFLFKAPLVPPGSPVVNALFRQRSCIENILRACVGLPPQNHMLLEHKMERPGPSLKRVGPVAATYPMLNKKGPVPAATNGCTGDANGHLQEEPPMPTT

SEQ ID NO: 22351 - protein, 430 aa, Homo sapiens
MVAPNDLVFDGWDISSLNLAEAMRRAKVLDWGLQEQLWPHMEALRPRPSVYIPEFIAANQSARADNLIPGSRAQQLEQIRRDIRDFRSSAGLDKVIVLWTANTERFCEVIPGLNDTAENLLRTIELGLEVSPSTLFAVASILEGCAFLNGSPQNTLVPGALELAWQHRVFVGGDDFKSGQTKVKSVLVDFLIGSGLKTMSIVSYNHLGNNDGENLSAPLQFRSKEVSKSNVVDDMVQSNPVLYTPGEEPDHCVVIKYVPYVGDSKRALDEYTSELMLGGTNTLVLHNTCEDSLLAAPIMLDLALLTELCQRVSFCTDMDPEPQTFHPVLSLLSFLFKAPLVPPGSPVVNALFRQRSCIENILRACVGLPPQNHMLLEHKMERPGPSLKRVGPVAATYPMLNKKGPVPAATNGCTGDANGHLQEEPPMPTT

SEQ ID NO: 22352 - protein, 504 aa, Homo sapiens
MEAAAQFFVESPDVVYGPEAIEAQYEYRTTRVSREGGVLKEANYYGSLTQAGTVSLGLDAEGQEVFVPFSAVLPMVAPNDLVFDGWDISSLNLAEAMRRAKVLDWGLQEQLWPHMEALRPRPSVYIPEFIAANQSARADNLIPGSRAQQLEQIRRDIRDFRSSAGLDKVIVLWTANTERFCEVIPGLNDTAENLLRTIELGLEVSPSTLFAVASILEGCAFLNGSPQNTLVPGALELAWQHRVFVGGDDFKSGQTKVKSVLVDFLIGSGLKTMSIVSYNHLGNNDGENLSAPLQFRSKEVSKSNVVDDMVQSNPVLYTPGEEPDHCVVIKYVPYVGDSKRALDEYTSELMLGGTNTLVLHNTCEDSLLAAPIMLDLALLTELCQRVSFCTDMDPEPQTFHPVLSLLSFLFKAPLVPPGSPVVNALFRQRSCIENILRACVGLPPQNHMLLEHKMERPGPSLKRVGPVAATYPMLNKKGPVPAATNGCTGDANGHLQEEPPMPTT

SEQ ID NO: 22353 - protein, 1154 aa, Homo sapiens
MQYLNIKEDCNAMAFCAKMRSSKKTEVNLEAPEPGVEVIFYLSDREPLRLGSGEYTAEELCIRAAQACRISPLCHNLFALYDENTKLWYAPNRTITVDDKMSLRLHYRMRFYFTNWHGTNDNEQSVWRHSPKKQKNGYEKKKIPDATPLLDASSLEYLFAQGQYDLVKCLAPIRDPKTEQDGHDIENECLGMAVLAISHYAMMKKMQLPELPKDISYKRYIPETLNKSIRQRNLLTRMRINNVFKDFLKEFNNKTICDSSVSTHDLKVKYLATLETLTKHYGAEIFETSMLLISSENEMNWFHSNDGGNVLYYEVMVTGNLGIQWRHKPNVVSVEKEKNKLKRKKLENKHKKDEEKNKIREEWNNFSYFPEITHIVIKESVVSINKQDNKKMELKLSSHEEALSFVSLVDGYFRLTADAHHYLCTDVAPPLIVHNIQNGCHGPICTEYAINKLRQEGSEEGMYVLRWSCTDFDNILMTVTCFEKSEQVQGAQKQFKNFQIEVQKGRYSLHGSDRSFPSLGDLMSHLKKQILRTDNISFMLKRCCQPKPREISNLLVATKKAQEWQPVYPMSQLSFDRILKKDLVQGEHLGRGTRTHIYSGTLMDYKDDEGTSEEKKIKVILKVLDPSHRDISLAFFEAASMMRQVSHKHIVYLYGVCVRDVENIMVEEFVEGGPLDLFMHRKSDVLTTPWKFKVAKQLASALSYLEDKDLVHGNVCTKNLLLAREGIDSECGPFIKLSDPGIPITVLSRQECIERIPWIAPECVEDSKNLSVAADKWSFGTTLWEICYNGEIPLKDKTLIEKERFYESRCRPVTPSCKELADLMTRCMNYDPNQRPFFRAIMRDINKLEEQNPDIVSEKKPATEVDPTHFEKRFLKRIRDLGEGHFGKVELCRYDPEGDNTGEQVAVKSLKPESGGNHIADLKKEIEILRNLYHENIVKYKGICTEDGGNGIKLIMEFLPSGSLKEYLPKNKNKINLKQQLKYAVQICKGMDYLGSRQYVHRDLAARNVLVESEHQVKIGDFGLTKAIETDKEYYTVKDDRDSPVFWYAPECLMQSKFYIASDVWSFGVTLHELLTYCDSDSSPMALFLKMIGPTHGQMTVTRLVNTLKEGKRLPCPPNCPDEVYQLMRKCWEFQPSNRTSFQNLIEGFEALLK

SEQ ID NO: 22354 - protein, 298 aa, Homo sapiens
MAAAEPAVLALPNSGAGGAGAPSGTVPVLFCFSVFARPSSVPHGAGYELLIQKFLSLYGDQIDMHRKFVVQLFAEEWGQYVDLPKGFAVSERCKVRLVPLQIQLTTLGNLTPSSTVFFCCDMQERFRPAIKYFGDIISVGQRLLQGARILGIPVIVTEQYPKGLGSTVQEIDLTGVKLVLPKTKFSMVLPEVEAALAEIPGVRSVVLFGVETHVCIQQTALELVGRGVEVHIVADATSSRSMMDRMFALERLARTGIIVTTSEAVLLQLVADKDHPKFKEIQNLIKASAPESGLLSKV

SEQ ID NO: 22355 - protein, 1132 aa, Homo sapiens
MGMACLTMTEMEGTSTSSIYQNGDISGNANSMKQIDPVLQVYLYHSLGKSEADYLTFPSGEYVAEEICIAASKACGITPVYHNMFALMSETERIWYPPNHVFHIDESTRHNVLYRIRFYFPRWYCSGSNRAYRHGISRGAEAPLLDDFVMSYLFAQWRHDFVHGWIKVPVTHETQEECLGMAVLDMMRIAKENDQTPLAIYNSISYKTFLPKCIRAKIQDYHILTRKRIRYRFRRFIQQFSQCKATARNLKLKYLINLETLQSAFYTEKFEVKEPGSGPSGEEIFATIIITGNGGIQWSRGKHKESETLTEQDLQLYCDFPNIIDVSIKQANQEGSNESRVVTIHKQDGKNLEIELSSLREALSFVSLIDGYYRLTADAHHYLCKEVAPPAVLENIQSNCHGPISMDFAISKLKKAGNQTGLYVLRCSPKDFNKYFLTFAVERENVIEYKHCLITKNENEEYNLSGTKKNFSSLKDLLNCYQMETVRSDNIIFQFTKCCPPKPKDKSNLLVFRTNGVSDVPTSPTLQRPTHMNQMVFHKIRNEDLIFNESLGQGTFTKIFKGVRREVGDYGQLHETEVLLKVLDKAHRNYSESFFEAASMMSKLSHKHLVLNYGVCVCGDENILVQEFVKFGSLDTYLKKNKNCINILWKLEVAKQLAWAMHFLEENTLIHGNVCAKNILLIREEDRKTGNPPFIKLSDPGISITVLPKDILQERIPWVPPECIENPKNLNLATDKWSFGTTLWEICSGGDKPLSALDSQRKLQFYEDRHQLPAPKWAELANLINNCMDYEPDFRPSFRAIIRDLNSLFTPDYELLTENDMLPNMRIGALGFSGAFEDRDPTQFEERHLKFLQQLGKGNFGSVEMCRYDPLQDNTGEVVAVKKLQHSTEEHLRDFEREIEILKSLQHDNIVKYKGVCYSAGRRNLKLIMEYLPYGSLRDYLQKHKERIDHIKLLQYTSQICKGMEYLGTKRYIHRDLATRNILVENENRVKIGDFGLTKVLPQDKEYYKVKEPGESPIFWYAPESLTESKFSVASDVWSFGVVLYELFTYIEKSKSPPAEFMRMIGNDKQGQMIVFHLIELLKNNGRLPRPDGCPDEIYMIMTECWNNNVNQRPSFRDLALRVDQIRDNMAG

SEQ ID NO: 22356 - protein, 1124 aa, Homo sapiens
MAPPSEETPLIPQRSCSLLSTEAGALHVLLPARGPGPPQRLSFSFGDHLAEDLCVQAAKASGILPVYHSLFALATEDLSCWFPPSHIFSVEDASTQVLLYRIRFYFPNWFGLEKCHRFGLRKDLASAILDLPVLEHLFAQHRSDLVSGRLPVGLSLKEQGECLSLAVLDLARMAREQAQRPGELLKTVSYKACLPPSLRDLIQGLSFVTRRRIRRTVRRALRRVAACQADRHSLMAKYIMDLERLDPAGAAETFHVGLPGALGGHDGLGLLRVAGDGGIAWTQGEQEVLQPFCDFPEIVDISIKQAPRVGPAGEHRLVTVTRTDNQILEAEFPGLPEALSFVALVDGYFRLTTDSQHFFCKEVAPPRLLEEVAEQCHGPITLDFAINKLKTGGSRPGSYVLRRSPQDFDSFLLTVCVQNPLGPDYKGCLIRRSPTGTFLLVGLSRPHSSLRELLATCWDGGLHVDGVAVTLTSCCIPRPKEKSNLIVVQRGHSPPTSSLVQPQSQYQLSQMTFHKIPADSLEWHENLGHGSFTKIYRGCRHEVVDGEARKTEVLLKVMDAKHKNCMESFLEAASLMSQVSYRHLVLLHGVCMAGDSTMVQEFVHLGAIDMYLRKRGHLVPASWKLQVVKQLAYALNYLEDKGLPHGNVSARKVLLAREGADGSPPFIKLSDPGVSPAVLSLEMLTDRIPWVAPECLREAQTLSLEADKWGFGATVWEVFSGVTMPISALDPAKKLQFYEDRQQLPAPKWTELALLIQQCMAYEPVQRPSFRAVIRDLNSLISSDYELLSDPTPGALAPRDGLWNGAQLYACQDPTIFEERHLKYISQLGKGNFGSVELCRYDPLGDNTGALVAVKQLQHSGPDQQRDFQREIQILKALHSDFIVKYRGVSYGPGRQSLRLVMEYLPSGCLRDFLQRHRARLDASRLLLYSSQICKGMEYLGSRRCVHRDLAARNILVESEAHVKIADFGLAKLLPLDKDYYVVREPGQSPIFWYAPESLSDNIFSRQSDVWSFGVVLYELFTYCDKSCSPSAEFLRMMGCERDVPALCRLLELLEEGQRLPAPPACPAEVHELMKLCWAPSPQDRPSFSALGPQLDMLWSGSRGCETHAFTAHPEGKHHSLSFS

SEQ ID NO: 22357 - protein, 1094 aa, Homo sapiens
MAPPSEETPLIPQRSCSLLSTEAGALHVLLPARGPGPPQRLSFSFGDHLAEDLCVQAAKASGILPVYHSLFALATEDLSCWFPPSHIFSVEDASTQVLLYRIRFYFPNWFGLEKCHRFGLRKDLASAILDLPVLEHLFAQHRSDLVSGRLPVGLSLKEQGECLSLAVLDLARMAREQAQRPGELLKTVSYKACLPPSLRDLIQGLSFVTRRRIRRTVRRALRRVAACQADRHSLMAKYIMDLERLDPAGAAETFHVGLPGALGGHDGLGLLRVAGDGGIAWTQGEQEVLQPFCDFPEIVDISIKQAPRVGPAGEHRLVTVTRTDNQILEAEFPGLPEALSFVALVDGYFRLTTDSQHFFCKEVAPPRLLEEVAEQCHGPITLDFAINKLKTGGSRPGSYVLRRSPQDFDSFLLTVCVQNPLGPDYKGCLIRRSPTGTFLLVGLSRPHSSLRELLATCWDGGLHVDGVAVTLTSCCIPRPKEKSNLIVVQRGHSPPTSSLVQPQSQYQLSQMTFHKIPADSLEWHENLGHGSFTKIYRGCRHEVVDGEARKTEVLLKVMDAKHKNCMESFLEAASLMSQVSYRHLVLLHGVCMAGDSTMVQEFVHLGAIDMYLRKRGHLVPASWKLQVVKQLAYALNYLEDKGLPHGNVSARKVLLAREGADGSPPFIKLSDPGVSPAVLSLEMLTDRIPWVAPECLREAQTLSLEADKWGFGATVWEVFSGVTMPISALDPAKKLQFYEDRQQLPAPKWTELALLIQQCMAYEPVQRPSFRAVIRDLNSLISSDYELLSDPTPGALAPRDGLWNGAQLYACQDPTIFEERHLKYISQLGKGNFGSVELCRYDPLGDNTGALVAVKQLQHSGPDQQRDFQREIQILKALHSDFIVKYRGVSYGPGRQSLRLVMEYLPSGCLRDFLQRHRARLDASRLLLYSSQICKGMEYLGSRRCVHRDLAARNILVESEAHVKIADFGLAKLLPLDKDYYVVREPGQSPIFWYAPESLSDNIFSRQSDVWSFGVVLYELFTYCDKSCSPSAEFLRMMGCERDVPALCRLLELLEEGQRLPAPPACPAEVSAAGLASVSQSVDWAGVSGKPAGA

SEQ ID NO: 22358 - protein, 619 aa, Homo sapiens
MAPPSEETPLIPQRSCSLLSTEAGALHVLLPARGPGPPQRLSFSFGDHLAEDLCVQAAKASGILPVYHSLFALATEDLSCWFPPSHIFSVEDASTQVLLYRIRFYFPNWFGLEKCHRFGLRKDLASAILDLPVLEHLFAQHRSDLVSGRLPVGLSLKEQGECLSLAVLDLARMAREQAQRPGELLKTVSYKACLPPSLRDLIQGLSFVTRRRIRRTVRRALRRVAACQADRHSLMAKYIMDLERLDPAGAAETFHVGLPGALGGHDGLGLLRVAGDGGIAWTQGEQEVLQPFCDFPEIVDISIKQAPRVGPAGEHRLVTVTRTDNQILEAEFPGLPEALSFVALVDGYFRLTTDSQHFFCKEVAPPRLLEEVAEQCHGPITLDFAINKLKTGGSRPGSYVLRRSPQDFDSFLLTVCVQNPLGPDYKGCLIRRSPTGTFLLVGLSRPHSSLRELLATCWDGGLHVDGVAVTLTSCCIPRPKEKSNLIVVQRGHSPPTSSLVQPQSQYQLSQMTFHKIPADSLEWHENLGHGSFTKIYRGCRHEVVDGEARKTEVLLKVMDAKHKNCMESFLEAASLMSQVSYRHLVLLHGVCMAGDSESPPPTHPTPASPKSRLFFPPLF

SEQ ID NO: 22359 - protein, 504 aa, Homo sapiens
MLYFSLFWAARPLQRCGQLVRMAIRAQHSNAAQTQTGEANRGWTGQESLSDSDPEMWELLQREKDRQCRGLELIASENFCSRAALEALGSCLNNKYSEGYPGKRYYGGAEVVDEIELLCQRRALEAFDLDPAQWGVNVQPYSGSPANLAVYTALLQPHDRIMGLDLPDGGHLTHGYMSDVKRISATSIFFESMPYKLNPKTGLIDYNQLALTARLFRPRLIIAGTSAYARLIDYARMREVCDEVKAHLLADMAHISGLVAAKVIPSPFKHADIVTTTTHKTLRGARSGLIFYRKGVKAVDPKTGREIPYTFEDRINFAVFPSLQGGPHNHAIAAVAVALKQACTPMFREYSLQVLKNARAMADALLERGYSLVSGGTDNHLVLVDLRPKGLDGARAERVLELVSITANKNTCPGDRSAITPGGLRLGAPALTSRQFREDDFRRVVDFIDEGVNIGLEVKSKTAKLQDFKSFLLKDSETSQRLANLRQRVEQFARAFPMPGFDEH

SEQ ID NO: 22360 - protein, 494 aa, Homo sapiens
MLYFSLFWAARPLQRCGQLVRMAIRAQHSNAAQTQTGEANRGWTGQESLSDSDPEMWELLQREKDRQCRGLELIASENFCSRAALEALGSCLNNKYSEGYPGKRYYGGAEVVDEIELLCQRRALEAFDLDPAQWGVNVQPYSGSPANLAVYTALLQPHDRIMGLDLPDGGHLTHGYMSDVKRISATSIFFESMPYKLNLALTARLFRPRLIIAGTSAYARLIDYARMREVCDEVKAHLLADMAHISGLVAAKVIPSPFKHADIVTTTTHKTLRGARSGLIFYRKGVKAVDPKTGREIPYTFEDRINFAVFPSLQGGPHNHAIAAVAVALKQACTPMFREYSLQVLKNARAMADALLERGYSLVSGGTDNHLVLVDLRPKGLDGARAERVLELVSITANKNTCPGDRSAITPGGLRLGAPALTSRQFREDDFRRVVDFIDEGVNIGLEVKSKTAKLQDFKSFLLKDSETSQRLANLRQRVEQFARAFPMPGFDEH

SEQ ID NO: 22361 - protein, 483 aa, Homo sapiens
MAIRAQHSNAAQTQTGEANRGWTGQESLSDSDPEMWELLQREKDRQCRGLELIASENFCSRAALEALGSCLNNKYSEGYPGKRYYGGAEVVDEIELLCQRRALEAFDLDPAQWGVNVQPYSGSPANLAVYTALLQPHDRIMGLDLPDGGHLTHGYMSDVKRISATSIFFESMPYKLNPKTGLIDYNQLALTARLFRPRLIIAGTSAYARLIDYARMREVCDEVKAHLLADMAHISGLVAAKVIPSPFKHADIVTTTTHKTLRGARSGLIFYRKGVKAVDPKTGREIPYTFEDRINFAVFPSLQGGPHNHAIAAVAVALKQACTPMFREYSLQVLKNARAMADALLERGYSLVSGGTDNHLVLVDLRPKGLDGARAERVLELVSITANKNTCPGDRSAITPGGLRLGAPALTSRQFREDDFRRVVDFIDEGVNIGLEVKSKTAKLQDFKSFLLKDSETSQRLANLRQRVEQFARAFPMPGFDEH

SEQ ID NO: 22362 - protein, 278 aa, Homo sapiens
MEENMEEGQTQKGCFECCIKCLGGIPYASLIATILLYAGVALFCGCGHEALSGTVNILQTYFEMARTAGDTLDVFTMIDIFKYVIYGIAAAFFVYGILLMVEGFFTTGAIKDLYGDFKITTCGRCVSAWFIMLTYLFMLAWLGVTAFTSLPVYMYFNLWTICRNTTLVEGANLCLDLRQFGIVTIGEEKKICTVSENFLRMCESTELNMTFHLFIVALAGAGAAVIAMVHYLMVLSANWAYVKDACRMQKYEDIKSKEEQELHDIHSTRSKERLNAYT

SEQ ID NO: 22363 - protein, 271 aa, Homo sapiens
MTDLEGCFECCIKCLGGIPYASLIATILLYAGVALFCGCGHEALSGTVNILQTYFEMARTAGDTLDVFTMIDIFKYVIYGIAAAFFVYGILLMVEGFFTTGAIKDLYGDFKITTCGRCVSAWFIMLTYLFMLAWLGVTAFTSLPVYMYFNLWTICRNTTLVEGANLCLDLRQFGIVTIGEEKKICTVSENFLRMCESTELNMTFHLFIVALAGAGAAVIAMVHYLMVLSANWAYVKDACRMQKYEDIKSKEEQELHDIHSTRSKERLNAYT

SEQ ID NO: 22364 - protein, 267 aa, Homo sapiens
MGCFECCIKCLGGIPYASLIATILLYAGVALFCGCGHEALSGTVNILQTYFEMARTAGDTLDVFTMIDIFKYVIYGIAAAFFVYGILLMVEGFFTTGAIKDLYGDFKITTCGRCVSAWFIMLTYLFMLAWLGVTAFTSLPVYMYFNLWTICRNTTLVEGANLCLDLRQFGIVTIGEEKKICTVSENFLRMCESTELNMTFHLFIVALAGAGAAVIAMVHYLMVLSANWAYVKDACRMQKYEDIKSKEEQELHDIHSTRSKERLNAYT

SEQ ID NO: 22365 - protein, 1027 aa, Homo sapiens
MYEGKHIHFSEVDNKPLCSYSPKLCKQRRLNGYAFCIRHVLEDKTAPFKQCEYVAKYNSQRCTNPIPKSEDRRYCNSHLQVLGFIPKKERKKKNDPIDEVKVRHQMDTMAFSLTVPTLALKMPNGLDGMSLSPPGARVPLHYLETELEDPFAFNEEDDDLKKGATVRKKLQSKLAQNRQRQRETEILKVRQEHFSPPPAPSQQQPPQQHSHLSPLSTSLKPPAPPQGSVCKSPQPQNTSLPMQGVAPTTHTIAQARQLSHKRPLPLLPSSRAPTVDPPRTDRILMKATAFSPHFSCISRLQRLVKLCTQKHQLDTDLFPHLGLDWSEESGEEPEDSEQASPYQVAWSIRETLRYQRHASDDDDAESRSSRVTQLCTYFQQKYKHLCRLERAESRQKKCRHTFRKALLQAASKEPECTGQLIQELRRAACSRTSISRTKLREVEPAACSGTVKGEQCANKALPFTRHCFQHILLNHSQQLFSSCTAKFADGQQCSVPVFDITHQTPLCEEHAKKMDNFLRGDNSRKVQHQQQRKPRKKTKPPALTKKHKKKRRRGPRRPQKPIPPAVPQGNLSMPASVSLPVEASHIRSPSTPELSADELPDDIANEITDIPHDLELNQEDFSDVLPRLPDDLQDFDFFEGKNGDLLPTTEEAEELERALQAVTSLECLSTIGVLAQSDGVPVQELSDRGIGVFSTGTGASGIQSLSREVNTDLGELLNGRIVHDNFSSLELDENLLRSATLSNPPTPLAGQIQGQFSAPANVGLTSATLISQSALGERAFPGQFHGLHDGSHASQRPHPAQLLSKADDLITSRQQYSSDHSHSSPHGSHYDSEHVPSPYSDHITSPHTTSYSGDNMAATFSAEMPIMAQHLLPTQLEVPLGGVVNPRTHWGNLPVNLGDPSPFSNLLGADGHLLSTSLSTPPTTSNSETTQPAFATVTPSSSSVLPGLPQTSFSGMGPSAELMASTSPKQQLPQFSAAFGHQLSSHSGIPKDLQPSHSSIAPPTGFTVTGATATSTNNASSPFPSPN

SEQ ID NO: 22366 - protein, 372 aa, Homo sapiens
MAHAPARCPSARGSGDGEMGKPRNVALITGITGQDGSYLAEFLLEKGYEVHGIVRRSSSFNTGRIEHLYKNPQAHIEGNMKLHYGDLTDSTCLVKIINEVKPTEIYNLGAQSHVKISFDLAEYTADVDGVGTLRLLDAVKTCGLINSVKFYQASTSELYGKVQEIPQKETTPFYPRSPYGAAKLYAYWIVVNFREAYNLFAVNGILFNHESPRRGANFVTRKISRSVAKIYLGQLECFSLGNLDAKRDWGHAKDYVEAMWLMLQNDEPEDFVIATGEVHSVREFVEKSFLHIGKTIVWEGKNENEVGRCKETGKVHVTVDLKYYRPTEVDFLQGDCTKAKQKLNWKPRVAFDELVREMVHADVELMRTNPNA

SEQ ID NO: 22367 - protein, 342 aa, Homo sapiens
MCKMDGSYLAEFLLEKGYEVHGIVRRSSSFNTGRIEHLYKNPQAHIEGNMKLHYGDLTDSTCLVKIINEVKPTEIYNLGAQSHVKISFDLAEYTADVDGVGTLRLLDAVKTCGLINSVKFYQASTSELYGKVQEIPQKETTPFYPRSPYGAAKLYAYWIVVNFREAYNLFAVNGILFNHESPRRGANFVTRKISRSVAKIYLGQLECFSLGNLDAKRDWGHAKDYVEAMWLMLQNDEPEDFVIATGEVHSVREFVEKSFLHIGKTIVWEGKNENEVGRCKETGKVHVTVDLKYYRPTEVDFLQGDCTKAKQKLNWKPRVAFDELVREMVHADVELMRTNPNA

SEQ ID NO: 22368 - protein, 416 aa, Homo sapiens [sequence omitted]

SEQ ID NO: 22369 - protein, 363 aa, Homo sapiens
MGPGEALLAGLLVMVLAVALLSNALVLLCCAYSAELRTRASGVLLVNLSLGHLLLAALDMPFTLLGVMRGRTPSAPGACQVIGFLDTFLASNAALSVAALSADQWLAVGFPLRYAGRLRPRYAGLLLGCAWGQSLAFSGAALGCSWLGYSSAFASCSLRLPPEPERPRFAAFTATLHAVGFVLPLAVLCLTSLQVHRVARRHCQRMDTVTMKALALLADLHPSVRQRCLIQQKRRRHRATRKIGIAIATFLICFAPYVMTRLAELVPFVTVNAQWGILSKCLTYSKAVADPFTYSLLRRPFRQVLAGMVHRLLKRTPRPASTHDSSLDVAGMVHQLLKRTPRPASTHNGSVDTENDSCLQQTH

SEQ ID NO: 22370 - protein, 381 aa, Homo sapiens
MPEEVHLGEKEVETFAFQAEIAQLMSLIINTFYSNKEIFLWELISNASDALDKIRYESLTDPSKLDSGKELKIDIIPNTQEHTLTLVDTGIGMTKADLINNLGTIAKFQDQTEYLEEMQVKEVVEKHSQFLGYPITLYLEKEREKEISDGKAEEEKGEKEEENKDDEEKPKIEDVGSDEEDDSGKDKKKKTKKIKEKYIDQEELNKTKPIWTRNTEDITQEEYGEFYKSLTNDWKDHLAVRYFSVEEYVSRMKEIQKSIYYITGESKEQVANSAFVEQVWKRDSRVVYMTEPIDGYQLKEFDGKSLVSVTKEGLELPEDGEEKKRMEERKAKFENLCKFMKETLDKKVEMVTVSNRLVSSSCCIVTSTYSWTANMEQIMKA

SEQ ID NO: 22371 - protein, 737 aa, Homo sapiens
MPLNRTLSMSSLPGLEDWEDEFDLENAVLFEVAWEVANKVGGIYTVLQTKAKVTGDEWGDNYFLVGPYTEQGVRTQVELLEAPTPALKRTLDSMNSKGCKVYFGRWLIEGGPLVVLLDVGASAWALERWKGELWDTCNIGVPWYDREANDAVLFGFLTTWFLGEFLAQSEEKPHVVAHFHEWLAGVGLCLCRARRLPVATIFTTHATLLGRYLCAGAVDFYNNLENFNVDKEAGERQIYHRYCMERAAAHCAHVFTTVSQITAIEAQHLLKRKPDIVTPNGLNVKKFSAMHEFQNLHAQSKARIQEFVRGHFYGHLDFNLDKTLYFFIAGRYEFSNKGADVFLEALARLNYLLRVNGSEQTVVAFFIMPARTNNFNVETLKGQAVRKQLWDTANTVKEKFGRKLYESLLVGSLPDMNKMLDKEDFTMMKRAIFATQRQSFPPVCTHNMLDDSSDPILTTIRRIGLFNSSADRVKVIFHPEFLSSTSPLLPVDYEEFVRGCHLGVFPSYYEPWGYTPAECTVMGIPSISTNLSGFGCFMEEHIADPSAYGIYILDRRFRSLDDSCSQLTSFLYSFCQQSRRQRIIQRNRTERLSDLLDWKYLGRYYMSARHMALSKAFPEHFTYEPNEADAAQGYRYPRPASVPPSPSLSRHSSPHQSEDEEDPRNGPLEEDGERYDEDEEAAKDRRNIRAPEWPRRASCTSSTSGSKRNSVDTATSSSLSTPSEPLSPTSSLGEERN

SEQ ID NO: 22372 - protein, 673 aa, Homo sapiens
MPLNRTLSMSSLPGLEDWEDEFDLENAVLFEVAWEVANKVGGIYTVLQTKAKVTGDEWGDNYFLVGPYTEQGVRTQVELLEAPTPALKRTLDSMNSKGCKFLAQSEEKPHVVAHFHEWLAGVGLCLCRARRLPVATIFTTHATLLGRYLCAGAVDFYNNLENFNVDKEAGERQIYHRYCMERAAAHCAHVFTTVSQITAIEAQHLLKRKPDIVTPNGLNVKKFSAMHEFQNLHAQSKARIQEFVRGHFYGHLDFNLDKTLYFFIAGRYEFSNKGADVFLEALARLNYLLRVNGSEQTVVAFFIMPARTNNFNVETLKGQAVRKQLWDTANTVKEKFGRKLYESLLVGSLPDMNKMLDKEDFTMMKRAIFATQRQSFPPVCTHNMLDDSSDPILTTIRRIGLFNSSADRVKVIFHPEFLSSTSPLLPVDYEEFVRGCHLGVFPSYYEPWGYTPAECTVMGIPSISTNLSGFGCFMEEHIADPSAYGIYILDRRFRSLDDSCSQLTSFLYSFCQQSRRQRIIQRNRTERLSDLLDWKYLGRYYMSARHMALSKAFPEHFTYEPNEADAAQGYRYPRPASVPPSPSLSRHSSPHQSEDEEDPRNGPLEEDGERYDEDEEAAKDRRNIRAPEWPRRASCTSSTSGSKRNSVDTATSSSLSTPSEPLSPTSSLGEERN

SEQ ID NO: 22373 - protein, 126 aa, Homo sapiens
MPEPSKSAPAPKKGSKKAITKAQKKDGKKRKRSRKESYSIYVYKVLKQVHPDTGISSKAMGIMNSFVNDIFERIAGEASRLAHYNKRSTITSREIQTAVRLLLPGELAKHAVSEGTKAVTKYTSSK

SEQ ID NO: 22374 - protein, 404 aa, Homo sapiens
MLRAIAEERGRLSLRREVCGLGCFKDDRIVFWTWMFSTYFMEKWAPRQDDMLFYVRRKLAYSGSESGADGRKAAEPEVEVEVYRRDSKKLPGLGDPDIDWEESVCLNLILQKLDYMVTCAVCTRADGGDIHIHKKKSQQVFASPSKHPMDSKGEESKISYPNIFFMIDSFEEVFSDMTVGEGEMVCVELVASDKTNTFQGVIFQGSIRYEALKKVYDNRVSVAARMAQKMSFGFYKYSNMEFVRMKGPQGKGHAEMAVSRVSTGDTSPCGTEEDSSPASPMHERVTSFSTPPTPERNNRPAFFSPSLKRKVPRNRIAEMKKSHSANDSEEFFREDDGGADLHNATNLRSRSLSGTGRSLVGSWLKLNRADGNFLLYAHLTYVTLPLHRILTDILEVRQKPILMT

SEQ ID NO: 22375 - protein, 409 aa, Homo sapiens
MGSQAAAEWRNWASWEVSSSLSGCSMGCFKDDRIVFWTWMFSTYFMEKWAPRQDDMLFYVRRKLAYSGSESGADGRKAAEPEVEVEVYRRDSKKLPGLGDPDIDWEESVCLNLILQKLDYMVTCAVCTRADGGDIHIHKKKSQQVFASPSKHPMDSKGEESKISYPNIFFMIDSFEEVFSDMTVGEGEMVCVELVASDKTNTFQGVIFQGSIRYEALKKVYDNRVSVAARMAQKMSFGFYKYSNMEFVRMKGPQGKGHAEMAVSRVSTGDTSPCGTEEDSSPASPMHERVTSFSTPPTPERNNRPAFFSPSLKRKVPRNRIAEMKKSHSANDSEEFFREDDGGADLHNATNLRSRSLSGTGRSLVGSWLKLNRADGNFLLYAHLTYVTLPLHRILTDILEVRQKPILMT

SEQ ID NO: 22376 - protein, 370 aa, Homo sapiens
MFSTYFMEKWAPRQDDMLFYVRRKLAYSGSESGADGRKAAEPEVEVEVYRRDSKKLPGLGDPDIDWEESVCLNLILQKLDYMVTCAVCTRADGGDIHIHKKKSQQVFASPSKHPMDSKGEESKISYPNIFFMIDSFEEVFSDMTVGEGEMVCVELVASDKTNTFQGVIFQGSIRYEALKKVYDNRVSVAARMAQKMSFGFYKYSNMEFVRMKGPQGKGHAEMAVSRVSTGDTSPCGTEEDSSPASPMHERVTSFSTPPTPERNNRPAFFSPSLKRKVPRNRIAEMKKSHSANDSEEFFREDDGGADLHNATNLRSRSLSGTGRSLVGSWLKLNRADGNFLLYAHLTYVTLPLHRILTDILEVRQKPILMT

SEQ ID NO: 22377 - protein, 219 aa, Homo sapiens
MSETAPAAPAAPAPAEKTPVKKKARKSAGAAKRKASGPPVSELITKAVAASKERSGVSLAALKKALAAAGYDVEKNNSRIKLGLKSLVSKGTLVQTKGTGASGSFKLNKKAASGEAKPKAKKAGAAKAKKPAGAAKKPKKATGAATPKKSAKKTPKKAKKPAAAAGAKKAKSPKKAKAAKPKKAPKSPAKAKAVKPKAAKPKTAKPKAAKPKKAAAKKK

SEQ ID NO: 22378 - protein, 304 aa, Homo sapiens
MNRAFSRKKDKTWMHTPEALSKHFIPYNAKFLGSTEVEQPKGTEVVRDAVRKLKFARHIKKSEGQKIPKVELQISIYGVKILEPKTKEVQHNCQLHRISFCADDKTDKRIFTFICKDSESNKHLCYVFDSEKCAEEITLTIGQAFDLAYRKFLESGGKDVETRKQIAGLQKRIQDLETENMELKNKVQDLENQLRITQVSAPPAGSMTPKSPSTDIFDMIPFSPISHQSSMPTRNGTQPPPVPSRSTEIKRDLFGAEPFDPFNCGAADFPPDIQSKLDEMQEGFKMGLTLEGTVFCLDPLDSRC

SEQ ID NO: 22379 - protein, 167 aa, Homo sapiens
MNRAFSRKKDKTWMHTPEALSKHFIPYNAKFLGSTEVEQPKGTEVVRDAVRKLKFARHIKKSEGQKIPKVELQISIYGVKILEPKTKEVQHNCQLHRISFCADDKTDKRIFTFICKDSESNKHLCYVFDSEKCVSIPDVVGWFVLFYKPGIVLLLALAKYLKMNNFL

SEQ ID NO: 22380 - protein, 201 aa, Homo sapiens
MNRAFSRKKDKTWMHTPEALSKHFIPYNAKAEEITLTIGQAFDLAYRKFLESGGKDVETRKQIAGLQKRIQDLETENMELKNKVQDLENQLRITQVSAPPAGSMTPKSPSTDIFDMIPFSPISHQSSMPTRNGTQPPPVPSRSTEIKRDLFGAEPFDPFNCGAADFPPDIQSKLDEMQEGFKMGLTLEGTVFCLDPLDSRC

SEQ ID NO: 22381 - protein, 291 aa, Homo sapiens
MNRAFSRKKDKTWMHTPEALSKHFIPYNAKFLGSTEVEQPKGTEVVRDAVRKLKFARHIKKSEGQKIPKVELQISIYGVKILEPKTKEVQHNCQLHRISFCADDKTDKRIFTFICKDSESNKHLCYVFDSEKCAEEITLTIGQAFDLAYRKFLESGGKDVETRKQIAGLQKRIQDLETENMELKNKVQDLENQLRITQVSAPPAGSMTPKSPSTDIFDMIPFSPISHQSSMPTRNGTQPPPVPSRSTEIKRDLFGAEPFDPFNCGAADFPPDIQSKLDEMQRQRWRGSKWD

SEQ ID NO: 22382 - protein, 375 aa, Homo sapiens
MSLMVISMACVGFFLLQGAWTHEGGQDKPLLSAWPSAVVPRGGHVTLLCRSRLGFTIFSLYKEDGVPVPELYNKIFWKSILMGPVTPAHAGTYRCRGSHPRSPIEWSAPSNPLVIVVTGLFGKPSLSAQPGPTVRTGENVTLSCSSRSSFDMYHLSREGRAHEPRLPAVPSVNGTFQADFPLGPATHGGTYTCFGSLHDSPYEWSDPSDPLLVSVTGNSSSSSSSPTEPSSKTGIRRHLHILIGTSVAIILFIILFFFLLHCCCSNKKNAAVMDQEPAGDRTVNREDSDDQDPQEVTYAQLDHCVFTQTKITSPSQRPKTPPTDTTMYMELPNAKPRSLSPAHKHHSQALRGSSRETTALSQNRVASSHVPAAGI

SEQ ID NO: 22383 - protein, 154 aa, Homo sapiens
MAAASAMAEASSETTSEEGQSIQEPKEANSTKAQKQKRRGCRGSRRRHANRRGDSFGDSFTPYFPRVLKQVHQGLSLSQEAVSVMDSMIHDILDRIATEAGQLAHYTKRVTITSRDIQMAVRLLLPGKMGKLAEAQGTNAALRTSLCAIWQQRK

SEQ ID NO: 22384 - protein, 375 aa, Homo sapiens
MSLMVVSMACVGFFLLQGAWTHEGGQDKPLLSAWPSAVVPRGGHVTLLCRSRLGFTIFSLYKEDGVPVPELYNKIFWKSILMGPVTPAHAGTYRCRGSHPRSPIEWSAPSNPLVIVVTGLFGKPSLSAQPGPTVRTGENVTLSCSSRSSFDMYHLSREGRAHEPRLPAVPSVDGTFQADFPLGPATHGGTYTCFSSLHDSPYEWSDPSDPLLVSVTGNSSSSSSSPTEPSSKTGIRRHLHILIGTSVAIILFIILFFFLLHCCCSNKKNAAVMDQEPAGDRTVNREDSDDQDPQEVTYAQLDHCVFTQTKITSPSQRPKTPPTDTTMYMELPNAKPRSLSPAHKHHSQALRGSSRETTALSQNRVASSHVPAAGI

SEQ ID NO: 22385 - protein, 130 aa, Homo sapiens
MSGRGKQGGKARAKAKSRSSRAGLQFPVGRVHRLLRKGNYAERVGAGAPVYLAAVLEYLTAEILELAGNAARDNKKTRIIPRHLQLAVRNDEELNKLLGGVTIAQGGVLPNIQAVLLPKKTESHKPGKNK

SEQ ID NO: 22386 - protein, 115 aa, Homo sapiens
MPRRRRRRGSSGAGGRGRTCSRTVRAELSFSVSQVERSLREGHYAQRLSRTAPVYLAAVIEYLTAKVPELAGNEAQNSGERNITPLLLDMVVHNDRLLSTLFNTTTISQVAPGED

SEQ ID NO: 22387 - protein, 1179 aa, Homo sapiens
MAACGRVRRMFRLSAALHLLLLFAAGAEKLPGQGVHSQGQGPGANFVSFVGQAGGGGPAGQQLPQLPQSSQLQQQQQQQQQQQQPQPPQPPFPAGGPPARRGGAGAGGGWKLAEEESCREDVTRVCPKHTWSNNLAVLECLQDVREPENEISSDCNHLLWNYKLNLTTDPKFESVAREVCKSTITEIKECADEPVGKGYMVSCLVDHRGNITEYQCHQYITKMTAIIFSDYRLICGFMDDCKNDINILKCGSIRLGEKDAHSQGEVVSCLEKGLVKEAEEREPKIQVSELCKKAILRVAELSSDDFHLDRHLYFACRDDRERFCENTQAGEGRVYKCLFNHKFEESMSEKCREALTTRQKLIAQDYKVSYSLAKSCKSDLKKYRCNVENLPRSREARLSYLLMCLESAVHRGRQVSSECQGEMLDYRRMLMEDFSLSPEIILSCRGEIEHHCSGLHRKGRTLHCLMKVVRGEKGNLGMNCQQALQTLIQETDPGADYRIDRALNEACESVIQTACKHIRSGDPMILSCLMEHLYTEKMVEDCEHRLLELQYFISRDWKLDPVLYRKCQGDASRLCHTHGWNETSEFMPQGAVFSCLYRHAYRTEEQGRRLSRECRAEVQRILHQRAMDVKLDPALQDKCLIDLGKWCSEKTETGQELECLQDHLDDLVVECRDIVGNLTELESEDIQIEALLMRACEPIIQNFCHDVADNQIDSGDLMECLIQNKHQKDMNEKCAIGVTHFQLVQMKDFRFSYKFKMACKEDVLKLCPNIKKKVDVVICLSTTVRNDTLQEAKEHRVSLKCRRQLRVEELEMTEDIRLEPDLYEACKSDIKNFCSAVQYGNAQIIECLKENKKQLSTRCHQKVFKLQETEMMDPELDYTLMRVCKQMIKRFCPEADSKTMLQCLKQNKNSELMDPKCKQMITKRQITQNTDYRLNPMLRKACKADIPKFCHGILTKAKDDSELEGQVISCLKLRYADQRLSSDCEDQIRIIIQESALDYRLDPQLQLHCSDEISSLCAEEAAAQEQTGQVEECLKVNLLKIKTELCKKEVLNMLKESKADIFVDPVLHTACALDIKHHCAAITPGRGRQMSCLMEALEDKRVRLQPECKKRLNDRIEMWSYAAKVAPADGFSDLAMQVMTSPSKNYILSVISGSICILFLIGLMCGRITKRVTRELKDR

SEQ ID NO: 22388 - protein, 1203 aa, Homo sapiens
MAACGRVRRMFRLSAALHLLLLFAAGAEKLPGQGVHSQGQGPGANFVSFVGQAGGGGPAGQQLPQLPQSSQLQQQQQQQQQQQQPQPPQPPFPAGGPPARRGGAGAGGGWKLAEEESCREDVTRVCPKHTWSNNLAVLECLQDVREPENEISSDCNHLLWNYKLNLTTDPKFESVAREVCKSTITEIKECADEPVGKGYMVSCLVDHRGNITEYQCHQYITKMTAIIFSDYRLICGFMDDCKNDINILKCGSIRLGEKDAHSQGEVVSCLEKGLVKEAEEREPKIQVSELCKKAILRVAELSSDDFHLDRHLYFACRDDRERFCENTQAGEGRVYKCLFNHKFEESMSEKCREALTTRQKLIAQDYKVSYSLAKSCKSDLKKYRCNVENLPRSREARLSYLLMCLESAVHRGRQVSSECQGEMLDYRRMLMEDFSLSPEIILSCRGEIEHHCSGLHRKGRTLHCLMKVVRGEKGNLGMNCQQALQTLIQETDPGADYRIDRALNEACESVIQTACKHIRSGDPMILSCLMEHLYTEKMVEDCEHRLLELQYFISRDWKLDPVLYRKCQGDASRLCHTHGWNETSEFMPQGAVFSCLYRHAYRTEEQGRRLSRECRAEVQRILHQRAMDVKLDPALQDKCLIDLGKWCSEKTETGQELECLQDHLDDLVVECRDIVGNLTELESEDIQIEALLMRACEPIIQNFCHDVADNQIDSGDLMECLIQNKHQKDMNEKCAIGVTHFQLVQMKDFRFSYKFKMACKEDVLKLCPNIKKKVDVVICLSTTVRNDTLQEAKEHRVSLKCRRQLRVEELEMTEDIRLEPDLYEACKSDIKNFCSAVQYGNAQIIECLKENKKQLSTRCHQKVFKLQETEMMDPELDYTLMRVCKQMIKRFCPEADSKTMLQCLKQNKNSELMDPKCKQMITKRQITQNTDYRLNPMLRKACKADIPKFCHGILTKAKDDSELEGQVISCLKLRYADQRLSSDCEDQIRIIIQESALDYRLDPQLQLHCSDEISSLCAEEAAAQEQTGQVEECLKVNLLKIKTELCKKEVLNMLKESKADIFVDPVLHTACALDIKHHCAAITPGRGRQMSCLMEALEDKRVRLQPECKKRLNDRIEMWSYAAKVAPADGFSDLAMQVMTSPSKNYILSVISGSICILFLIGLMCGRITKRVTRELKDRLQYRSETMAYKGLVWSQDVTGSPA

SEQ ID NO: 22389 - protein, 1192 aa, Homo sapiens
MAACGRVRRMFRLSAALHLLLLFAAGAEKLPGQGVHSQGQGPGANFVSFVGQAGGGGPAGQQLPQLPQSSQLQQQQQQQQQQQQPQPPQPPFPAGGPPARRGGAGAGGGWKLAEEESCREDVTRVCPKHTWSNNLAVLECLQDVRELLWNYKLNLTTDPKFESVAREVCKSTITEIKECADEPVGKGYMVSCLVDHRGNITEYQCHQYITKMTAIIFSDYRLICGFMDDCKNDINILKCGSIRLGEKDAHSQGEVVSCLEKGLVKEAEEREPKIQVSELCKKAILRVAELSSDDFHLDRHLYFACRDDRERFCENTQAGEGRVYKCLFNHKFEESMSEKCREALTTRQKLIAQDYKVSYSLAKSCKSDLKKYRCNVENLPRSREARLSYLLMCLESAVHRGRQVSSECQGEMLDYRRMLMEDFSLSPEIILSCRGEIEHHCSGLHRKGRTLHCLMKVVRGEKGNLGMNCQQALQTLIQETDPGADYRIDRALNEACESVIQTACKHIRSGDPMILSCLMEHLYTEKMVEDCEHRLLELQYFISRDWKLDPVLYRKCQGDASRLCHTHGWNETSEFMPQGAVFSCLYRHAYRTEEQGRRLSRECRAEVQRILHQRAMDVKLDPALQDKCLIDLGKWCSEKTETGQELECLQDHLDDLVVECRDIVGNLTELESEDIQIEALLMRACEPIIQNFCHDVADNQIDSGDLMECLIQNKHQKDMNEKCAIGVTHFQLVQMKDFRFSYKFKMACKEDVLKLCPNIKKKVDVVICLSTTVRNDTLQEAKEHRVSLKCRRQLRVEELEMTEDIRLEPDLYEACKSDIKNFCSAVQYGNAQIIECLKENKKQLSTRCHQKVFKLQETEMMDPELDYTLMRVCKQMIKRFCPEADSKTMLQCLKQNKNSELMDPKCKQMITKRQITQNTDYRLNPMLRKACKADIPKFCHGILTKAKDDSELEGQVISCLKLRYADQRLSSDCEDQIRIIIQESALDYRLDPQLQLHCSDEISSLCAEEAAAQEQTGQVEECLKVNLLKIKTELCKKEVLNMLKESKADIFVDPVLHTACALDIKHHCAAITPGRGRQMSCLMEALEDKRVRLQPECKKRLNDRIEMWSYAAKVAPADGFSDLAMQVMTSPSKNYILSVISGSICILFLIGLMCGRITKRVTRELKDRLQYRSETMAYKGLVWSQDVTGSPA

SEQ ID NO: 22390 - protein, 507 aa, Homo sapiens
MQEPLLGAEGPDYDTFPEKPPPSPGDRARVGTLQNKRVFLATFAAVLGNFSFGYALVYTSPVIPALERSLDPDLHLTKSQASWFGSVFTLGAAAGGLSAMILNDLLGRKLSIMFSAVPSAAGYALMAGAHGLWMLLLGRTLTGFAGGLTAACIPVYVSEIAPPGVRGALGATPQLMAVFGSLSLYALGLLLPWRWLAVAGEAPVLIMILLLSFMPNSPRFLLSRGRDEEALRALAWLRGTDVDVHWEFEQIQDNVRRQSSRVSWAEARAPHVCRPITVALLMRLLQQLTGITPILVYLQSIFDSTAVLLPPKDDAAIVGAVRLLSVLIAALTMDLAGRKVLLFVSAAIMFAANLTLGLYIHFGPRPLSPNSTAGLESESWGDLAQPLAAPAGYLTLVPLLATMLFIMGYAVGWGPITWLLMSEVLPLRARGVASGLCVLASWLTAFVLTKSFLPVVSTFGLQVPFFFFAAICLVSLVFTGCCVPETKGRSLEQIESFFRTGRRSFLR

SEQ ID NO: 22391 - protein, 445 aa, Homo sapiens
MQEPLLGAEGPDYDTFPEKPPPSPGDRARVGTLQNKRVFLATFAAVLGNFSFGYALVYTSPVIPALERSLDPDLHLTKSQASWFGSVFTLGAAAGGLSAMILNDLLGRKLSIMFSAVPSAAGYALMAGAHGLWMLLLGRTLTGFAGGLTAACIPVYVSEIAPPGVRGALGATPQLMAVFGSLSLYALGLLLPWRWLAVAGEAPVLIMILLLSFMPNSPRFLLSRGRDEEALRALAWLRGTDVDVHWEFEQIQDNVRRQSSRVSWAEARAPHVCRPITVALLMRLLQQLTGITPILVYLQSIFDSTAVLLPPKDDAAIVGAVRLLSVLIAALTMDLAGRKVLLFVSGYAVGWGPITWLLMSEVLPLRARGVASGLCVLASWLTAFVLTKSFLPVVSTFGLQVPFFFFAAICLVSLVFTGCCVPETKGRSLEQIESFFRTGRRSFLR

SEQ ID NO: 22392 - protein, 826 aa, Homo sapiens
MEGAGGANDKKKISSERRKEKSRDAARSRRSKESEVFYELAHQLPLPHNVSSHLDKASVMRLTISYLRVRKLLDAGDLDIEDDMKAQMNCFYLKALDGFVMVLTDDGDMIYISDNVNKYMGLTQFELTGHSVFDFTHPCDHEEMREMLTHRNGLVKKGKEQNTQRSFFLRMKCTLTSRGRTMNIKSATWKVLHCTGHIHVYDTNSNQPQCGYKKPPMTCLVLICEPIPHPSNIEIPLDSKTFLSRHSLDMKFSYCDERITELMGYEPEELLGRSIYEYYHALDSDHLTKTHHDMFTKGQVTTGQYRMLAKRGGYVWVETQATVIYNTKNSQPQCIVCVNYVVSGIIQHDLIFSLQQTECVLKPVESSDMKMTQLFTKVESEDTSSLFDKLKKEPDALTLLAPAAGDTIISLDFGSNDTETDDQQLEEVPLYNDVMLPSPNEKLQNINLAMSPLPTAETPKPLRSSADPALNQEVALKLEPNPESLELSFTMPQIQDQTPSPSDGSTRQSSPEPNSPSEYCFYVDSDMVNEFKLELVEKLFAEDTEAKNPFSTQDTDLDLEMLAPYIPMDDDFQLRSFDQLSPLESSSASPESASPQSTVTVFQQTQIQEPTANATTTTATTDELKTVTKDRMEDIKILIASPSPTHIHKETTSATSSPYRDTQSRTASPNRAGKGVIEQTEKSHPRSPNVLSVALSQRTTVPEEELNPKILALQNAQRKRKMEHDGSLFQAVGIGTLLQQPDDHAATTSLSWKRVKGCKSSEQNGMEQKTIILIPSDLACRLLGQSMDESGLPQLTSYDCEVNAPIQGSRNLLQGEELLRALDQVN

SEQ ID NO: 22393 - protein, 735 aa, Homo sapiens
MEGAGGANDKKKISSERRKEKSRDAARSRRSKESEVFYELAHQLPLPHNVSSHLDKASVMRLTISYLRVRKLLDAGDLDIEDDMKAQMNCFYLKALDGFVMVLTDDGDMIYISDNVNKYMGLTQFELTGHSVFDFTHPCDHEEMREMLTHRNGLVKKGKEQNTQRSFFLRMKCTLTSRGRTMNIKSATWKVLHCTGHIHVYDTNSNQPQCGYKKPPMTCLVLICEPIPHPSNIEIPLDSKTFLSRHSLDMKFSYCDERITELMGYEPEELLGRSIYEYYHALDSDHLTKTHHDMFTKGQVTTGQYRMLAKRGGYVWVETQATVIYNTKNSQPQCIVCVNYVVSGIIQHDLIFSLQQTECVLKPVESSDMKMTQLFTKVESEDTSSLFDKLKKEPDALTLLAPAAGDTIISLDFGSNDTETDDQQLEEVPLYNDVMLPSPNEKLQNINLAMSPLPTAETPKPLRSSADPALNQEVALKLEPNPESLELSFTMPQIQDQTPSPSDGSTRQSSPEPNSPSEYCFYVDSDMVNEFKLELVEKLFAEDTEAKNPFSTQDTDLDLEMLAPYIPMDDDFQLRSFDQLSPLESSSASPESASPQSTVTVFQQTQIQEPTANATTTTATTDELKTVTKDRMEDIKILIASPSPTHIHKETTSATSSPYRDTQSRTASPNRAGKGVIEQTEKSHPRSPNVLSVALSQRTTVPEEELNPKILALQNAQRKRKMEHDGSLFQAVGII

SEQ ID NO: 22394 - protein, 850 aa, Homo sapiens
MSSQCRSLENKFVFLKEGLGNSKPEELEEIRIENGRISSERRKEKSRDAARSRRSKESEVFYELAHQLPLPHNVSSHLDKASVMRLTISYLRVRKLLDAGDLDIEDDMKAQMNCFYLKALDGFVMVLTDDGDMIYISDNVNKYMGLTQFELTGHSVFDFTHPCDHEEMREMLTHRNGLVKKGKEQNTQRSFFLRMKCTLTSRGRTMNIKSATWKVLHCTGHIHVYDTNSNQPQCGYKKPPMTCLVLICEPIPHPSNIEIPLDSKTFLSRHSLDMKFSYCDERITELMGYEPEELLGRSIYEYYHALDSDHLTKTHHDMFTKGQVTTGQYRMLAKRGGYVWVETQATVIYNTKNSQPQCIVCVNYVVSGIIQHDLIFSLQQTECVLKPVESSDMKMTQLFTKVESEDTSSLFDKLKKEPDALTLLAPAAGDTIISLDFGSNDTETDDQQLEEVPLYNDVMLPSPNEKLQNINLAMSPLPTAETPKPLRSSADPALNQEVALKLEPNPESLELSFTMPQIQDQTPSPSDGSTRQSSPEPNSPSEYCFYVDSDMVNEFKLELVEKLFAEDTEAKNPFSTQDTDLDLEMLAPYIPMDDDFQLRSFDQLSPLESSSASPESASPQSTVTVFQQTQIQEPTANATTTTATTDELKTVTKDRMEDIKILIASPSPTHIHKETTSATSSPYRDTQSRTASPNRAGKGVIEQTEKSHPRSPNVLSVALSQRTTVPEEELNPKILALQNAQRKRKMEHDGSLFQAVGIGTLLQQPDDHAATTSLSWKRVKGCKSSEQNGMEQKTIILIPSDLACRLLGQSMDESGLPQLTSYDCEVNAPIQGSRNLLQGEELLRALDQVN

SEQ ID NO: 22395 - protein, 570 aa, Homo sapiens
MAYEKSTDISDVSRSMFLYPWLEYPDKTKELRKAMAPVHLPLSCYQMPKEEFPPSPECWRQHPSKPNSVPYCYFKKPEIYTHWHDLYDQREEREAEKMLRKMRDDCRYIKEVHQTHIKMFHLPMSKLTIKSEMRSRPLEPTQDPLKWQRLRELTKSLESPREDEQFYAAQALGCLRISDKFVMEALQQVAQTGPEKVKYEAYRTLAILGCLNKHVIRALIKQLKEKNEGQRMETLTGLRMALNSWAAVSKDKRTQVGDEGKLVPVLQTLIKKSSSEASLEAALCLGFLRPCSNMVQEFLLQCLCQGLKTQRMKALRMLVKVMHVHSAPVIKAILDQLCSSSVLEDRFEATQMLKTIGLEQIQAQGLEELTFNLLRRKTHNEPFLAVRQAVAQTVEELKLKPTMMNLVEAQLMNPDATARQEAVISLGVLGIRSPQVFHLLLDLLDAENHQAVKKSLQETLILCASIDPWIQNKLKNKVLSVYEAPKTNVKAEPTRFQKEPENPEELTIQDFRLAKLNPLFIAKSITKVGQKKTPAFPPCCSKPRKHRPQVIGPWQPRIKKQLRVLAEIAK

SEQ ID NO: 22396 - protein, 219 aa, Homo sapiens
MAYEKSTDISDVSRSMFLYPWLEYPDKTKELRKAMAPVHLPLSCYQMPKEEFPPSPECWRQHPSKPNSVPYCYFKKPEIYTHWHDLYDQREEREAEKMLRKMRDDCRYIKEVHQTHIKMFHLPMSKLTIKSEMRSRPLEPTQDPLKWQRLRELTKSLESPREDEQFYAAQALGCLRISDKFVMEALQQVVSLRTAGVQERRKQGLRCVACGHRRGSPGC

SEQ ID NO: 22397 - protein, 530 aa, Homo sapiens
MAYEKSTDISDVSRSMFLYPWLEYPDKTKELRKAMAPVHLPLSCYQMPKEEFPPSPECWRQHPSKPNSVPYCYFKKPEIYTHWHDLYDQREEREAEKMLRKMRDDCRYIKEELTKSLESPREDEQFYAAQALGCLRISDKFVMEALQQVAQTGPEKVKYEAYRTLAILGCLNKHVIRALIKQLKEKNEGQRMETLTGLRMALNSWAAVSKDKRTQVGDEGKLVPVLQTLIKKSSSEASLEAALCLGFLRPCSNMVQEFLLQCLCQGLKTQRMKALRMLVKVMHVHSAPVIKAILDQLCSSSVLEDRFEATQMLKTIGLEQIQAQGLEELTFNLLRRKTHNEPFLAVRQAVAQTVEELKLKPTMMNLVEAQLMNPDATARQEAVISLGVLGIRSPQVFHLLLDLLDAENHQAVKKSLQETLILCASIDPWIQNKLKNKVLSVYEAPKTNVKAEPTRFQKEPENPEELTIQDFRLAKLNPLFIAKSITKVGQKKTPAFPPCCSKPRKHRPQVIGPWQPRIKKQLRVLAEIAK

SEQ ID NO: 22398 - protein, 380 aa, Homo sapiens
MAPVHLPLSCYQMPKEEFPPSPECWRQHPSKPNSVPYCYFKKPEIYTHWHDLYDQREEREAEKMLRKMRDDCRYIKEVHQTHIKMFHLPMSKLTIKSEMRSRPLEPTQDPLKWQRLRELTKSLESPREDEQFYAAQALGCLRISDKFVMEALQQVAQTGPEKVKYEAYRTLAILGCLNKHVIRALIKQLKEKNEGQRMETLTGLRMALNSWAAVSKDKRTQVGDEGKLVPVLQTLIKKSSSEASLEAALCLGFLRPCSNMVQEFLLQCLCQGLKTQRMKALRMLVKVMHVHSAPVIKAILDQLCSSSVLEDRFEATQMLKTIGLEQIQAQGLEELTFNLLRRKTHNEPFLAVRQAVAQTVEELKLKPTMMNLVEANKRRK

SEQ ID NO: 22399 - protein, 340 aa, Homo sapiens
MAPVHLPLSCYQMPKEEFPPSPECWRQHPSKPNSVPYCYFKKPEIYTHWHDLYDQREEREAEKMLRKMRDDCRYIKEELTKSLESPREDEQFYAAQALGCLRISDKFVMEALQQVAQTGPEKVKYEAYRTLAILGCLNKHVIRALIKQLKEKNEGQRMETLTGLRMALNSWAAVSKDKRTQVGDEGKLVPVLQTLIKKSSSEASLEAALCLGFLRPCSNMVQEFLLQCLCQGLKTQRMKALRMLVKVMHVHSAPVIKAILDQLCSSSVLEDRFEATQMLKTIGLEQIQAQGLEELTFNLLRRKTHNEPFLAVRQAVAQTVEELKLKPTMMNLVEANKRRK

SEQ ID NO: 22400 - protein, 1011 aa, Homo sapiens
MHSMISSVDVKSEVPVGLEPISPLDLRTDLRMMMPVVDPVVREKQLQQELLLIQQQQQIQKQLLIAEFQKQHENLTRQHQAQLQEHIKELLAIKQQQELLEKEQKLEQQRQEQEVERHRREQQLPPLRGKDRGRERAVASTEVKQKLQEFLLSKSATKDTPTNGKNHSVSRHPKLWYTAAHHTSLDQSSPPLSGTSPSYKYTLPGAQDAKDDFPLRKTASEPNLKVRSRLKQKVAERRSSPLLRRKDGNVVTSFKKRMFEVTESSVSSSSPGSGPSSPNNGPTGSVTENETSVLPPTPHAEQMVSQQRILIHEDSMNLLSLYTSPSLPNITLGLPAVPSQLNASNSLKEKQKCETQTLRQGVPLPGQYGGSIPASSSHPHVTLEGKPPNSSHQALLQHLLLKEQMRQQKLLVAGGVPLHPQSPLATKERISPGIRGTHKLPRHRPLNRTQSAPLPQSTLAQLVIQQQHQQFLEKQKQYQQQIHMNKLLSKSIEQLKQPGSHLEEAEEELQGDQAMQEDRAPSSGNSTRSDSSACVDDTLGQVGAVKVKEEPVDSDEDAQIQEMESGEQAAFMQQPFLEPTHTRALSVRQAPLAAVGMDGLEKHRLVSRTHSSPAASVLPHPAMDRPLQPGSATGIAYDPLMLKHQCVCGNSTTHPEHAGRIQSIWSRLQETGLLNKCERIQGRKASLEEIQLVHSEHHSLLYGTNPLDGQKLDPRILLGDDSQKFFSSLPCGGLGVDSDTIWNELHSSGAARMAVGCVIELASKVASGELKNGFAVVRPPGHHAEESTAMGFCFFNSVAITAKYLRDQLNISKILIVDLDVHHGNGTQQAFYADPSILYISLHRYDEGNFFPGSGAPNEVGTGLGEGYNINIAWTGGLDPPMGDVEYLEAFRTIVKPVAKEFDPDMVLVSAGFDALEGHTPPLGGYKVTAKCFGHLTKQLMTLADGRVVLALEGGHDLTAICDASEACVNALLGNELEPLAEDILHQSPNMNAVISLQKIIEIQSMSLKFS

SEQ ID NO: 22401 - protein, 923 aa, Homo sapiens
MHSMISSVDVKSEVPVGLEPISPLDLRTDLRMMMPVVDPVVREKQLQQELLLIQQQQQIQKQLLIAEFQKQHENLTRQHQAQLQEHIKELLAIKQQQELLEKEQKLEQQRQEQEVERHRREQQLPPLRGKDRGRERAVASTEVKQKLQEFLLSKSATKDTPTNGKNHSVSRHPKLWYTAAHHTSLDQSSPPLSGTSPSYKYTLPGAQDAKDDFPLRKTASEPNLKVRSRLKQKVAERRSSPLLRRKDGNVVTSFKKRMFEVTESSVSSSSPGSGPSSPNNGPTGSVTENETSVLPPTPHAEQMVSQQRILIHEDSMNLLSLYTSPSLPNITLGLPAVPSQLNASNSLKEKQKCETQTLRQGVPLPGQYGGSIPASSSHPHVTLEGKPPNSSHQALLQHLLLKEQMRQQKLLVAGGVPLHPQSPLATKERISPGIRGTHKLPRHRPLNRTQSAPLPQSTLAQLVIQQQHQQFLEKQKQYQQQIHMNKPFLEPTHTRALSVRQAPLAAVGMDGLEKHRLVSRTHSSPAASVLPHPAMDRPLQPGSATGIAYDPLMLKHQCVCGNSTTHPEHAGRIQSIWSRLQETGLLNKCERIQGRKASLEEIQLVHSEHHSLLYGTNPLDGQKLDPRILLGDDSQKFFSSLPCGGLGVDSDTIWNELHSSGAARMAVGCVIELASKVASGELKNGFAVVRPPGHHAEESTAMGFCFFNSVAITAKYLRDQLNISKILIVDLDVHHGNGTQQAFYADPSILYISLHRYDEGNFFPGSGAPNEVGTGLGEGYNINIAWTGGLDPPMGDVEYLEAFRTIVKPVAKEFDPDMVLVSAGFDALEGHTPPLGGYKVTAKCFGHLTKQLMTLADGRVVLALEGGHDLTAICDASEACVNALLGNELEPLAEDILHQSPNMNAVISLQKIIEIQSMSLKFS

SEQ ID NO: 22402 - protein, 590 aa, Homo sapiens
MHSMISSVDVKSEVPVGLEPISPLDLRTDLRMMMPVVDPVVREKQLQQELLLIQQQQQIQKQLLIAEFQKQHENLTRQHQAQLQEHIKELLAIKQQQELLEKEQKLEQQRQEQEVERHRREQQLPPLRGKDRGRERAVASTEVKQKLQEFLLSKSATKDTPTNGKNHSVSRHPKLWYTAAHHTSLDQSSPPLSGTSPSYKYTLPGAQDAKDDFPLRKTASEPNLKVRSRLKQKVAERRSSPLLRRKDGNVVTSFKKRMFEVTESSVSSSSPGSGPSSPNNGPTGSVTENETSVLPPTPHAEQMVSQQRILIHEDSMNLLSLYTSPSLPNITLGLPAVPSQLNASNSLKEKQKCETQTLRQGVPLPGQYGGSIPASSSHPHVTLEGKPPNSSHQALLQHLLLKEQMRQQKLLVAGGVPLHPQSPLATKERISPGIRGTHKLPRHRPLNRTQSAPLPQSTLAQLVIQQQHQQFLEKQKQYQQQIHMNKLLSKSIEQLKQPGSHLEEAEEELQGDQAMQEDRAPSSGNSTRSDSSACVDDTLGQVGAVKVKEEPVDSDEDAQIQEMESGEQAAFMQQVIGKDLAPGFVIKVII

SEQ ID NO: 22403 - protein, 879 aa, Homo sapiens
MHSMISSVDVKSEVPVGLEPISPLDLRTDLRMMMPVVDPVVREKQLQQELLLIQQQQQIQKQLLIAEFQKQHENLTRQHQAQLQEHIKELLAIKQQQELLEKEQKLEQQRQEQEVERHRREQQLPPLRGKDRGRERAVASTEVKQKLQEFLLSKSATKDTPTNGKNHSVSRHPKLWYTAAHHTSLDQSSPPLSGTSPSYKYTLPGAQDAKDDFPLRKTASEPNLKVRSRLKQKVAERRSSPLLRRKDGNVVTSFKKRMFEVTESSVSSSSPGSGPSSPNNGPTGSVTENETSVLPPTPHAEQMVSQQRILIHEDSMNLLSLYTSPSLPNITLGLPAVPSQLNASNSLKEKQKCETQTLRQGVPLPGQYGGSIPASSSHPHVTLEGKPPNSSHQALLQHLLLKEQMRQQKLLVAGGVPLHPQSPLATKERISPGIRGTHKLPRHRPLNRTQSAPLPQSTLAQLVIQQQHQQFLEKQKQYQQQIHMNKLLSKSIEQLKQPGSHLEEAEEELQGDQAMQEDRAPSSGNSTRSDSSACVDDTLGQVGAVKVKEEPVDSDEDAQIQEMESGEQAAFMQQPFLEPTHTRALSVRQAPLAAVGMDGLEKHRLVSRTHSSPAASVLPHPAMDRPLQPGSATGIAYDPLMLKHQCVCGNSTTHPEHAGRIQSIWSRLQETGLLNKCERIQGRKASLEEIQLVHSEHHSLLYGTNPLDGQKLDPRILLGDDSQKFFSSLPCGGLGVDSDTIWNELHSSGAARMAVGCVIELASKVASGELKNGFAVVRPPGHHAEESTAMGFCFFNSVAITAKYLRDQLNISKILIVDLDVHHGNGTQQAFYADPSILYISLHRYDEGNFFPGSGAPNEVRFISLEPHFYLYLSGNCIA

SEQ ID NO: 22404 - protein, 1066 aa, Homo sapiens
MHSMISSVDVKSEVPVGLEPISPLDLRTDLRMMMPVVDPVVREKQLQQELLLIQQQQQIQKQLLIAEFQKQHENLTRQHQAQLQEHIKELLAIKQQQELLEKEQKLEQQRQEQEVERHRREQQLPPLRGKDRGRERAVASTEVKQKLQEFLLSKSATKDTPTNGKNHSVSRHPKLWYTAAHHTSLDQSSPPLSGTSPSYKYTLPGAQDAKDDFPLRKTASEPNLKVRSRLKQKVAERRSSPLLRRKDGNVVTSFKKRMFEVTESSVSSSSPGSGPSSPNNGPTGSVTENETSVLPPTPHAEQMVSQQRILIHEDSMNLLSLYTSPSLPNITLGLPAVPSQLNASNSLKEKQKCETQTLRQGVPLPGQYGGSIPASSSHPHVTLEGKPPNSSHQALLQHLLLKEQMRQQKLLVAGGVPLHPQSPLATKERISPGIRGTHKLPRHRPLNRTQSAPLPQSTLAQLVIQQQHQQFLEKQKQYQQQIHMNKLLSKSIEQLKQPGSHLEEAEEELQGDQAMQEDRAPSSGNSTRSDSSACVDDTLGQVGAVKVKEEPVDSDEDAQIQEMESGEQAAFMQQPFLEPTHTRALSVRQAPLAAVGMDGLEKHRLVSRTHSSPAASVLPHPAMDRPLQPGSATGIAYDPLMLKHQCVCGNSTTHPEHAGRIQSIWSRLQETGLLNKCERIQGRKASLEEIQLVHSEHHSLLYGTNPLDGQKLDPRILLGDDSQKFFSSLPCGGLGVDSDTIWNELHSSGAARMAVGCVIELASKVASGELKNGFAVVRPPGHHAEESTAMGFCFFNSVAITAKYLRDQLNISKILIVDLDVHHGNGTQQAFYADPSILYISLHRYDEGNFFPGSGAPNEVGTGLGEGYNINIAWTGGLDPPMGDVEYLEAFRTIVKPVAKEFDPDMVLVSAGFDALEGHTPPLGGYKVTAKCFGHLTKQLMTLADGRVVLALEGGHDLTAICDASEACVNALLGNELEPLAEDILHQSPNMNAVISLQKIIEIQSKYWKSVRMVAVPRGCALAGAQLQEETETVSALASLTVDVEQPFAQEDSRTAGEPMEEEPAL

SEQ ID NO: 22405 - protein, 1025 aa, Homo sapiens
MHSMISSVDVKSEVPVGLEPISPLDLRTDLRMMMPVVDPVVREKQLQQELLLIQQQQQIQKQLLIAEFQKQHENLTRQHQAQLQEHIKLQQELLAIKQQQELLEKEQKLEQQRQEQEVERHRREQQLPPLRGKDRGRERAVASTEVKQKLQEFLLSKSATKDTPTNGKNHSVSRHPKLWYTAAHHTSLDQSSPPLSGTSPSYKYTLPGAQDAKDDFPLRKTESSVSSSSPGSGPSSPNNGPTGSVTENETSVLPPTPHAEQMVSQQRILIHEDSMNLLSLYTSPSLPNITLGLPAVPSQLNASNSLKEKQKCETQTLRQGVPLPGQYGGSIPASSSHPHVTLEGKPPNSSHQALLQHLLLKEQMRQQKLLVAGGVPLHPQSPLATKERISPGIRGTHKLPRHRPLNRTQSAPLPQSTLAQLVIQQQHQQFLEKQKQYQQQIHMNKLLSKSIEQLKQPGSHLEEAEEELQGDQAMQEDRAPSSGNSTRSDSSACVDDTLGQVGAVKVKEEPVDSDEDAQIQEMESGEQAAFMQQPFLEPTHTRALSVRQAPLAAVGMDGLEKHRLVSRTHSSPAASVLPHPAMDRPLQPGSATGIAYDPLMLKHQCVCGNSTTHPEHAGRIQSIWSRLQETGLLNKCERIQGRKASLEEIQLVHSEHHSLLYGTNPLDGQKLDPRILLGDDSQKFFSSLPCGGLGVDSDTIWNELHSSGAARMAVGCVIELASKVASGELKNGFAVVRPPGHHAEESTAMGFCFFNSVAITAKYLRDQLNISKILIVDLDVHHGNGTQQAFYADPSILYISLHRYDEGNFFPGSGAPNEVGTGLGEGYNINIAWTGGLDPPMGDVEYLEAFRTIVKPVAKEFDPDMVLVSAGFDALEGHTPPLGGYKVTAKCFGHLTKQLMTLADGRVVLALEGGHDLTAICDASEACVNALLGNELEPLAEDILHQSPNMNAVISLQKIIEIQSKYWKSVRMVAVPRGCALAGAQLQEETETVSALASLTVDVEQPFAQEDSRTAGEPMEEEPAL

SEQ ID NO: 22406 - protein, 1069 aa, Homo sapiens
MHSMISSVDVKSEVPVGLEPISPLDLRTDLRMMMPVVDPVVREKQLQQELLLIQQQQQIQKQLLIAEFQKQHENLTRQHQAQLQEHIKLQQELLAIKQQQELLEKEQKLEQQRQEQEVERHRREQQLPPLRGKDRGRERAVASTEVKQKLQEFLLSKSATKDTPTNGKNHSVSRHPKLWYTAAHHTSLDQSSPPLSGTSPSYKYTLPGAQDAKDDFPLRKTASEPNLKVRSRLKQKVAERRSSPLLRRKDGNVVTSFKKRMFEVTESSVSSSSPGSGPSSPNNGPTGSVTENETSVLPPTPHAEQMVSQQRILIHEDSMNLLSLYTSPSLPNITLGLPAVPSQLNASNSLKEKQKCETQTLRQGVPLPGQYGGSIPASSSHPHVTLEGKPPNSSHQALLQHLLLKEQMRQQKLLVAGGVPLHPQSPLATKERISPGIRGTHKLPRHRPLNRTQSAPLPQSTLAQLVIQQQHQQFLEKQKQYQQQIHMNKLLSKSIEQLKQPGSHLEEAEEELQGDQAMQEDRAPSSGNSTRSDSSACVDDTLGQVGAVKVKEEPVDSDEDAQIQEMESGEQAAFMQQPFLEPTHTRALSVRQAPLAAVGMDGLEKHRLVSRTHSSPAASVLPHPAMDRPLQPGSATGIAYDPLMLKHQCVCGNSTTHPEHAGRIQSIWSRLQETGLLNKCERIQGRKASLEEIQLVHSEHHSLLYGTNPLDGQKLDPRILLGDDSQKFFSSLPCGGLGVDSDTIWNELHSSGAARMAVGCVIELASKVASGELKNGFAVVRPPGHHAEESTAMGFCFFNSVAITAKYLRDQLNISKILIVDLDVHHGNGTQQAFYADPSILYISLHRYDEGNFFPGSGAPNEVGTGLGEGYNINIAWTGGLDPPMGDVEYLEAFRTIVKPVAKEFDPDMVLVSAGFDALEGHTPPLGGYKVTAKCFGHLTKQLMTLADGRVVLALEGGHDLTAICDASEACVNALLGNELEPLAEDILHQSPNMNAVISLQKIIEIQSKYWKSVRMVAVPRGCALAGAQLQEETETVSALASLTVDVEQPFAQEDSRTAGEPMEEEPAL

SEQ ID NO: 22407 - protein, 588 aa, Homo sapiens
MMSSPAQPDLMWNLVPWVLFCGCCRIFPDGVAGREQLLAQQRMHSMISSVDVKSEVPVGLEPISPLDLRTDLRMMMPVVDPVVREKQLQQELLLIQQQQQIQKQLLIAEFQKQHENLTRQHQAQLQEHIKELLAIKQQQELLEKEQKLEQQRQEQEVERHRREQQLPPLRGKDRGRERAVASTEVKQKLQEFLLSKSATKDTPTNGKNHSVSRHPKLWYTAAHHTSLDQSSPPLSGTSPSYKYTLPGAQDAKDDFPLRKTESSVSSSSPGSGPSSPNNGPTGSVTENETSVLPPTPHAEQMVSQQRILIHEDSMNLLSLYTSPSLPNITLGLPAVPSQLNASNSLKEKQKCETQTLRQGVPLPGQYGGSIPASSSHPHVTLEGKPPNSSHQALLQHLLLKEQMRQQKLLVAGGVPLHPQSPLATKERISPGIRGTHKLPRHRPLNRTQSAPLPQSTLAQLVIQQQHQQFLEKQKQYQQQIHMNKLLSKSIEQLKQPGSHLEEAEEELQGDQAMQEDRAPSSGNSTRSDSSACVDDTLGQVGAVKVKEEPVDSDEDAQIQEMESGEQAAFMQQVIGKDLAPGFVIKVII

SEQ ID NO: 22408 - protein, 546 aa, Homo sapiens
MHSMISSVDVKSEVPVGLEPISPLDLRTDLRMMMPVVDPVVREKQLQQELLLIQQQQQIQKQLLIAEFQKQHENLTRQHQAQLQEHIKELLAIKQQQELLEKEQKLEQQRQEQEVERHRREQQLPPLRGKDRGRERAVASTEVKQKLQEFLLSKSATKDTPTNGKNHSVSRHPKLWYTAAHHTSLDQSSPPLSGTSPSYKYTLPGAQDAKDDFPLRKTESSVSSSSPGSGPSSPNNGPTGSVTENETSVLPPTPHAEQMVSQQRILIHEDSMNLLSLYTSPSLPNITLGLPAVPSQLNASNSLKEKQKCETQTLRQGVPLPGQYGGSIPASSSHPHVTLEGKPPNSSHQALLQHLLLKEQMRQQKLLVAGGVPLHPQSPLATKERISPGIRGTHKLPRHRPLNRTQSAPLPQSTLAQLVIQQQHQQFLEKQKQYQQQIHMNKLLSKSIEQLKQPGSHLEEAEEELQGDQAMQEDRAPSSGNSTRSDSSACVDDTLGQVGAVKVKEEPVDSDEDAQIQEMESGEQAAFMQQVIGKDLAPGFVIKVII

SEQ ID NO: 22409 - protein, 562 aa, Homo sapiens
MMMPVVDPVVREKQLQQELLLIQQQQQIQKQLLIAEFQKQHENLTRQHQAQLQEHIKLQQELLAIKQQQELLEKEQKLEQQRQEQEVERHRREQQLPPLRGKDRGRERAVASTEVKQKLQEFLLSKSATKDTPTNGKNHSVSRHPKLWYTAAHHTSLDQSSPPLSGTSPSYKYTLPGAQDAKDDFPLRKTASEPNLKVRSRLKQKVAERRSSPLLRRKDGNVVTSFKKRMFEVTESSVSSSSPGSGPSSPNNGPTGSVTENETSVLPPTPHAEQMVSQQRILIHEDSMNLLSLYTSPSLPNITLGLPAVPSQLNASNSLKEKQKCETQTLRQGVPLPGQYGGSIPASSSHPHVTLEGKPPNSSHQALLQHLLLKEQMRQQKLLVAGGVPLHPQSPLATKERISPGIRGTHKLPRHRPLNRTQSAPLPQSTLAQLVIQQQHQQFLEKQKQYQQQIHMNKLLSKSIEQLKQPGSHLEEAEEELQGDQAMQEDRAPSSGNSTRSDSSACVDDTLGQVGAVKVKEEPVDSDEDAQIQEMESGEQAAFMQQVIGKDLAPGFVIKVII

SEQ ID NO: 22410 - protein, 513 aa, Homo sapiens
MMMPVVDPVVREKQLQQELLLIQQQQQIQKQLLIAEFQKQHENLTRQHQAQLQEHIKELLAIKQQQELLEKEQKLEQQRQEQEVERHRREQQLPPLRGKDRGRERAVASTEVKQKLQEFLLSKSATKDTPTNGKNHSVSRHPKLWAAHHTSLDQSSPPLSGTSPSYKYTLPGAQDAKDDFPLRKTESSVSSSSPGSGPSSPNNGPTGSVTENETSVLPPTPHAEQMVSQQRILIHEDSMNLLSLYTSPSLPNITLGLPAVPSQLNASNSLKEKQKCETQTLRQGVPLPGQYGGSIPASSSHPHVTLEGKPPNSSHQALLQHLLLKEQMRQQKLLVAGGVPLHPQSPLATKERISPGIRGTHKLPRHRPLNRTQSAPLPQSTLAQLVIQQQHQQFLEKQKQYQQQIHMNKLLSKSIEQLKQPGSHLEEAEEELQGDQAMQEDRAPSSGNSTRSDSSACVDDTLGQVGAVKVKEEPVDSDEDAQIQEMESGEQAAFMQQVIGKDLAPGFVIKVII

SEQ ID NO: 22411 - protein, 1181 aa, Homo sapiens
MAAVQVVGSWPSVQPREAPREAIPERGNGFRLLSARLCALRPDDSSSARTEIHLLFDQLISENYSEGSGVAPEDVSALLVQACRLVPLNQNHLVSKVSQLIHHLLNRLQVIVDEQHLDFLLAYTISAIHQCSSWTHREILQALAALVYCNGSKCQKYLPELLGNTGLLMKLSDLAQSDPEVRRAAVHCMANLCLSVPGQPYLEEPYQNVCFQAFLTILQSPKSSDMDDITFCMLLQNALKGIQSLLNGGRMKLTQTDELGALLAVLKKFMFHGLPGLNIEMPTVLYPTPLPQYDGRTPIKPQQSESSASRPTLNKKKKSKVKPKKIQQGEEEEKESSGEIEAAPVTGTGRVNLHEGNTWCPSSLGVQSLPLDGSGAAEKDGVSSSFSSSSWKRVSSSESDFSDAEGGMQSKMRSYQAKVRQGALVCFLSTIKSIEKKVLYGYWSAFIPDTPELGSPQSVSLMTLTLKDPSPKTRACALQVLSAILEGSKQFLSVAEDTSDHRRAFTPFSVMIACSIRELHRCLLLALVAESSSQTVTQIIKCLANLVSNAPYDRLKLSLLTKVWNQIKPYIRHKDVNVRVSSLTLLGAIVSTHAPLPEVQLLLQQPCSSGLGNSNSATPHLSPPDWWKKAPAGPSLEETSVSSPKGSSEPCWLIRLCISIVVLPKEDSCSGSDAGSAAGSTYEPSPMRLEALQVLTLLARGYFSMTQAYLMELGEVICKCMGEADPSIQLHGAKLLEELGTGLIQQYKPDSTAAPDQRAPVFLVVMFWTMMLNGPLPRALQNSEHPTLQASACDALSSILPEAFSNLPNDRQMLCITVLLGLNDSKNRLVKAATSRALGVYVLFPCLRQDVIFVADAANAILMSLEDKSLNVRAKAAWSLGNLTDTLIVNMETPDPSFQEEFSGLLLLKMLRSAIEASKDKDKVKSNAVRALGNLLHFLQPSHIEKPTFAEIIEESIQALISTVLTEAAMKVRWNACYAMGNVFKNPALPLGTAPWTSQAYNALTSVVTSCKNFKVRIRSAAALSVPGKREQYGSVDQYARIWNALVTALQKSEDTIDFLEFKYCVSLRTQICQALIHLLSLASASDLPCMKETLELSGNMVQSYILQFLKSGAEGDDTGAPHSPQERDQMVRMALKHMGSIQAPTGDTARRAIMGFLEEILAVCFDSSGSQGALPGLTNQ

SEQ ID NO: 22412 - protein, 97 aa, Homo sapiens
MSSDNQWSADEDEGQLSRLIRKSRDSPFVPIGIAGFVTVVSCGLYKLKYRRDQKMSIHLIHMRVAAQGFVVGAVTLGVLYSMYKDYIRPRFFSESKK

SEQ ID NO: 22413 - protein, 393 aa, Homo sapiens
MEENNLQCSSVVDGNFEEVPRETAIQFKPPLYRQRYQFVKNLVDQHEPKKVADLGCGDTSLLRLLKVNPCIELLVGVDINEDKLRWRGDSLAPFLGDFLKPRDLNLTITLYHGSVVERDSRLLGFDLITCIELIEHLDSGDLARFPEVVFGYLSPSMIVISTPNSEFNPLFPSVTLRDSDHKFEWTRMEFQTWALYVANRYDYSVEFTGVGEPPAGAENVGYCTQIGIFRKNGGKATESCLSEQHDQHVYKAVFTTSYPSLQQERFFKLVLVNEVSQQVESLRVSHLPRRKEQAGERGDKPKDIGGSKAPVPCFGPVFTEVEKAKIENSPTPFCVGDKFFVPLQRLLAYPKLNRLCANEEMMRSVIADSIPLSSDGSAVVADLRNYFDEQFEF

SEQ ID NO: 22414 - protein, 682 aa, Homo sapiens
MNPQQQRMAAIGTDKELSDLLDFSAMFSPPVNSGKTRPTTLGSSQFSGSGIDERGGTTSWGTSGQPSPSYDSSRGFTDSPHYSDHLNDSRLGAHEGLSPTPFMNSNLMGKTSERGSFSLYSRDTGLPGCQSSLLRQDLGLGSPAQLSSSGKPGTAYYSFSATSSRRRPLHDSAALDPLQAKKVRKVPPGLPSSVYAPSPNSDDFNRESPSYPSPKPPTSMFASTFFMQDGTHNSSDLWSSSNGMSQPGFGGILGTSTSHMSQSSSYGNLHSHDRLSYPPHSVSPTDINTSLPPMSSFHRGSTSSSPYVAASHTPPINGSDSILGTRGNAAGSSQTGDALGKALASIYSPDHTSSSFPSNPSTPVGSPSPLTGTSQWPRPGGQAPSSPSYENSLHSLQSRMEDRLDRLDDAIHVLRNHAVGPSTSLPAGHSDIHSLLGPSHNAPIGSLNSNYGGSSLVASSRSASMVGTHREDSVSLNGNHSVLSSTVTTSSTDLNHKTQENYRGGLQSQSGTVVTTEIKTENKEKDENLHEPPSSDDMKSDDESSQKDIKVSSRGRTSSTNEDEDLNPEQKIEREKERRMANNARERLRVRDINEAFKELGRMCQLHLKSEKPQTKLLILHQAVAVILSLEQQVRERNLNPKAACLKRREEEKVSAVSAEPPTTLPGTHPGLSETTNPMGHM

SEQ ID NO: 22415 - protein, 512 aa, Homo sapiens
MYCAYPVPGMGSNSLMYYYNGKTVYAPSPNSDDFNRESPSYPSPKPPTSMFASTFFMQDGTHNSSDLWSSSNGMSQPGFGGILGTSTSHMSQSSSYGNLHSHDRLSYPPHSVSPTDINTSLPPMSSFHRGSTSSSPYVAASHTPPINGSDSILGTRGNAAGSSQTGDALGKALASIYSPDHTSSSFPSNPSTPVGSPSPLTGTSQWPRPGGQAPSSPSYENSLHSLQSRMEDRLDRLDDAIHVLRNHAVGPSTSLPAGHSDIHSLLGPSHNAPIGSLNSNYGGSSLVASSRSASMVGTHREDSVSLNGNHSVLSSTVTTSSTDLNHKTQENYRGGLQSQSGTVVTTEIKTENKEKDENLHEPPSSDDMKSDDESSQKDIKVSSRGRTSSTNEDEDLNPEQKIEREKERRMANNARERLRVRDINEAFKELGRMCQLHLKSEKPQTKLLILHQAVAVILSLEQQVRERNLNPKAACLKRREEEKVSAVSAEPPTTLPGTHPGLSETTNPMGHM

SEQ ID NO: 22416 - protein, 706 aa, Homo sapiens
MNPQQQRMAAIGTDKELSDLLDFSAMFSPPVNSGKTRPTTLGSSQFSGSGIDERGGTTSWGTSGQPSPSYDSSRGFTDSPHYSDHLNDSRLGAHEGLSPTPFMNSNLMGKTSERGSFSLYSRDTGLPGCQSSLLRQDLGLGSPAQLSSSGKPGTAYYSFSATSSRRRPLHDSAALDPLQAKKVRKVPPGLPSSVYAPSPNSDDFNRESPSYPSPKPPTSMFASTFFMQDGTHNSSDLWSSSNGMSQPGFGGILGTSTSHMSQSSSYGNLHSHDRLSYPPHSVSPTDINTSLPPMSSFHRGSTSSSPYVAASHTPPINGSDSILGTRGNAAGSSQTGDALGKALASIYSPDHTSSSFPSNPSTPVGSPSPLTGTSQWPRPGGQAPSSPSYENSLHSLKNRVEQQLHEHLQDAMSFLKDVCEQSRMEDRLDRLDDAIHVLRNHAVGPSTSLPAGHSDIHSLLGPSHNAPIGSLNSNYGGSSLVASSRSASMVGTHREDSVSLNGNHSVLSSTVTTSSTDLNHKTQENYRGGLQSQSGTVVTTEIKTENKEKDENLHEPPSSDDMKSDDESSQKDIKVSSRGRTSSTNEDEDLNPEQKIEREKERRMANNARERLRVRDINEAFKELGRMCQLHLKSEKPQTKLLILHQAVAVILSLEQQVRERNLNPKAACLKRREEEKVSAVSAEPPTTLPGTHPGLSETTNPMGHM

SEQ ID NO: 22417 - protein, 446 aa, Homo sapiens
MGKRYMHHPQIQMISTVNLLVIHLLSHQPVCSLALSLCKSYPPHSVSPTDINTSLPPMSSFHRGSTSSSPYVAASHTPPINGSDSILGTRGNAAGSSQTGDALGKALASIYSPDHTSSSFPSNPSTPVGSPSPLTGTSQWPRPGGQAPSSPSYENSLHSLQSRMEDRLDRLDDAIHVLRNHAVGPSTSLPAGHSDIHSLLGPSHNAPIGSLNSNYGGSSLVASSRSASMVGTHREDSVSLNGNHSVLSSTVTTSSTDLNHKTQENYRGGLQSQSGTVVTTEIKTENKEKDENLHEPPSSDDMKSDDESSQKDIKVSSRGRTSSTNEDEDLNPEQKIEREKERRMANNARERLRVRDINEAFKELGRMCQLHLKSEKPQTKLLILHQAVAVILSLEQQVRERNLNPKAACLKRREEEKVSAVSAEPPTTLPGTHPGLSETTNPMGHM

SEQ ID NO: 22418 - protein, 596 aa, Homo sapiens
MEALLSTPINPNNFPAKLWRLVNSPRYRSIRWDGRGEGLLIDQPLFEAELLSPPGPGGGGGTAGAGAEPELFKTTSFTSFIRQLNLYGFRKVVLGGPGGGKPAGNGPLHHFHNPHFRRDQPQLLVHLKRLTSANKAKLAAGLEVPCRPPNRFQRLLITSASAATAPLQHQQPPPPAGPRPEPHGPVAVGQFHRSFRRDSLSPYSCVSTPSHDHSTYPLKGLDRTPVPHRIWQNSLGMHPGQVETSPTFSDKGVPFPVLQRFPTEVTYTLQPSTTSVHVQQGPQTMVSSSQKYSNYTPSAQYSQAYYPTAVLQCCSPTHMDALSSCVTPNASSYAHCNYFQNPSMQSSYPVEFLPSNWPCSTTDENTKTEVNLEAVFQIVDELHSSPKLEMVKVEPVENQCPTSPSYRGQHILANSNNSNPCSASQASQLEPLTPVGSDIMSFVVGTEQAVACSLPQSPEYIYTIHTAQPVENSTIQESAAIQQAHVKLKEHLNHNPSPSSVVFVQEGPPFSTHQVDANIKCQTSSRENILPSEQMGFLISEMGPASKPSEDTGLATPARYREHRSNSQQGKSPDLHLLVDVACKQERFPKEEELKE

SEQ ID NO: 22419 - protein, 475 aa, Homo sapiens
MEALLSTPINPNNFPAKLWRLVNSPRYRSIRWDGRGEGLLIDQPLFEAELLSPPAGPRPEPHGPVAVGQFHRSFRRDSLSPYSCVSTPSHDHSTYPLKGLDRTPVPHRIWQNSLGMHPGQVETSPTFSDKGVPFPVLQRFPTEVTYTLQPSTTSVHVQQGPQTMVSSSQKYSNYTPSAQYSQAYYPTAVLQCCSPTHMDALSSCVTPNASSYAHCNYFQNPSMQSSYPVEFLPSNWPCSTTDENTKTEVNLEAVFQIVDELHSSPKLEMVKVEPVENQCPTSPSYRGQHILANSNNSNPCSASQASQLEPLTPVGSDIMSFVVGTEQAVACSLPQSPEYIYTIHTAQPVENSTIQESAAIQQAHVKLKEHLNHNPSPSSVVFVQEGPPFSTHQVDANIKCQTSSRENILPSEQMGFLISEMGPASKPSEDTGLATPARYREHRSNSQQGKSPDLHLLVDVACKQERFPKEEELKE

SEQ ID NO: 22420 - protein, 476 aa, Homo sapiens
MIRPQLRTAGLGRCLLPGLLLLLVPVLWAGAEKLHTQPSCPAVCQPTRCPALPTCALGTTPVFDLCRCCRVCPAAEREVCGGAQGQPCAPGLQCLQPLRPGFPSTCGCPTLGGAVCGSDRRTYPSMCALRAENRAARRLGKVPAVPVQWGNCGDTGTRSAGPLRRNYNFIAAVVEKVAPSVVHVQLWGRLLHGSRLVPVYSGSGFIVSEDGLIITNAHVVRNQQWIEVVLQNGARYEAVVKDIDLKLDLAVIKIESNAELPVLMLGRSSDLRAGEFVVALGSPFSLQNTATAGIVSTKQRGGKELGMKDSDMDYVQIDATINYGNSGGPLVNLDGDVIGVNSLRVTDGISFAIPSDRVRQFLAEYHEHQMKGKAFSNKKYLGLQMLSLTVPLSEELKMHYPDFPDVSSGVYVCKVVEGTAAQSSGLRDHDVIVNINGKPITTTTDVVKALDSDSLSMAVLRGKDNLLLTVIPETIN

SEQ ID NO: 22421 - protein, 540 aa, Homo sapiens
MATSGAASAELVIGWCIFGLLLLAILAFCWIYVRKYQSRRESEVVSTITAIFSLAIALITSALLPVDIFLVSYMKNQNGTFKDWANANVSRQIEDTVLYGYYTLYSVILFCVFFWIPFVYFYYEEKDDDDTSKCTQIKTALKYTLGFVVICALLLLVGAFVPLNVPNNKNSTEWEKVKSLFEELGSSHGLAALSFSISSLTLIGMLAAITYTAYGMSALPLNLIKGTRSAAYERLENTEDIEEVEQHIQTIKSKSKDGRPLPARDKRALKQFEERLRTLKKRERHLEFIENSWWTKFCGALRPLKIVWGIFFILVALLFVISLFLSNLDKALHSAGIDSGFIIFGANLSNPLNMLLPLLQTVFPLDYILITIIIMYFIFTSMAGIRNIGIWFFWIRLYKIRRGRTRPQALLFLCMILLLIVLHTSYMIYSLAPQYVMYGSQNYLIETNITSDNHKGNSTLSVPKRCDADAPEDQCTVTRTYLFLHKFWFFSAAYYFGNWAFLGVFLIGLIVSCCKGKKSVIEGVDEDSDISDDEPSVYSA

SEQ ID NO: 22422 - protein, 392 aa, Homo sapiens
MATSGAASAELVIGWCIFGLLLLAILAFCWIYVRKYQSRRESEVVSTITAIFSLAIALITSALLPVDIFLVSYMKNQNGTFKDWANANVSRQIEDTVLYGYYTLYSVILFCVFFWIPFVYFYYEEKDDDDTSKCTQIKTALKYTLGFVVICALLLLVGAFVPLNVPNNKNSTEWEKVKSLFEELGSSHGLAALSFSISSLTLIGMLAAITYTAYGMSALPLNLIKGTRSAAYERLENTEDIEEVEQHIQTIKSKSKDGRPLPARDKRALKQFEERLRTLKKRERHLEFIENSWWTKFCGALRPLKIVWGIFFILVALLFVISLFLSNLDKALHSAGIDSGFIIFGANLSNPLNMLLPLLQTEFEILAYGSFGLDYIKSEEVEPGPKHSFFSA

SEQ ID NO: 22423 - protein, 467 aa, Homo sapiens
MKNQNGTFKDWANANVSRQIEDTVLYGYYTLYSVILFCVFFWIPFVYFYYEEKDDDDTSKCTQIKTALKYTLGFVVICALLLLVGAFVPLNVPNNKNSTEWEKVKSLFEELGSSHGLAALSFSISSLTLIGMLAAITYTAYGMSALPLNLIKGTRSAAYERLENTEDIEEVEQHIQTIKSKSKDGRPLPARDKRALKQFEERLRTLKKRERHLEFIENSWWTKFCGALRPLKIVWGIFFILVALLFVISLFLSNLDKALHSAGIDSGFIIFGANLSNPLNMLLPLLQTVFPLDYILITIIIMYFIFTSMAGIRNIGIWFFWIRLYKIRRGRTRPQALLFLCMILLLIVLHTSYMIYSLAPQYVMYGSQNYLIETNITSDNHKGNSTLSVPKRCDADAPEDQCTVTRTYLFLHKFWFFSAAYYFGNWAFLGVFLIGLIVSCCKGKKSVIEGVDEDSDISDDEPSVYSA

SEQ ID NO: 22424 - protein, 188 aa, Homo sapiens
MLAAITYTAYGMSALPLNLIKGTRSAAYERLENTEDIEEVEQHIQTIKSKSKDGRPLPARDKRALKQFEERLRTLKKRERHLEFIENSWWTKFCGALRPLKIVWGIFFILVALLFVISLFLSNLDKALHSAGIDSGFIIFGANLSNPLNMLLPLLQTEFEILAYGSFGLDYIKSEEVEPGPKHSFFSA

SEQ ID NO: 22425 - protein, 34 aa, Homo sapiens
MAQPTASAQKLVRPIRAVCRILQIPESDPSNLRP

SEQ ID NO: 22426 - protein, 858 aa, Homo sapiens
MSVVGLDVGSQSCYIAVARAGGIETIANEFSDRCTPSVISFGSKNRTIGVAAKNQQITHANNTVSNFKRFHGRAFNDPFIQKEKENLSYDLVPLKNGGVGIKVMYMGEEHLFSVEQITAMLLTKLKETAENSLKKPVTDCVISVPSFFTDAERRSVLDAAQIVGLNCLRLMNDMTAVALNYGIYKQDLPSLDEKPRIVVFVDMGHSAFQVSACAFNKGKLKVLGTAFDPFLGGKNFDEKLVEHFCAEFKTKYKLDAKSKIRALLRLYQECEKLKKLMSSNSTDLPLNIECFMNDKDVSGKMNRSQFEELCAELLQKIEVPLYSLLEQTHLKVEDVSAVEIVGGATRIPAVKERIAKFFGKDISTTLNADEAVARGCALQCAILSPAFKVREFSVTDAVPFPISLIWNHDSEDTEGVHEVFSRNHAAPFSKVLTFLRRGPFELEAFYSDPQGVPYPEAKIGRFVVQNVSAQKDGEKSRVKVKVRVNTHGIFTISTASMVEKVPTEENEMSSEADMECLNQRPPENPDTDKNVQQDNSEAGTQPQVQTDAQQTSQSPPSPELTSEENKIPDADKANEKKVDQPPEAKKPKIKVVNVELPIEANLVWQLGKDLLNMYIETEGKMIMQDKLEKERNDAKNAVEEYVYEFRDKLCGPYEKFICEQDHQNFLRLLTETEDWLYEEGEDQAKQAYVDKLEELMKIGTPVKVRFQEAEERPKMFEELGQRLQHYAKIAADFRNKDEKYNHIDESEMKKVEKSVNEVMEWMNNVMNAQAKKSLDQDPVVRAQEIKTKIKELNNTCEPVVTQPKPKIESPKLERTPNGPNIDKKEEDLEDKNNFGAEPPHQNGECYPNEKNSVNMDLD

SEQ ID NO: 22427 - protein, 814 aa, Homo sapiens
MSVVGLDVGSQSCYIAVARAGGIETIANEFSDRCTPSVISFGSKNRTIGVAAKNQQITHANNTVSNFKRFHGRAFNDPFIQKEKENLSYDLVPLKNGGVGIKVMYMGEEHLFSVEQITAMLLTKLKETAENSLKKPVTDCVISVPSFFTDAERRSVLDAAQIVGLNCLRLMNDMTAVALNYGIYKQDLPSLDEKPRIVVFVDMGHSAFQVSACAFNKGKLKVLGTAFDPFLGGKNFDEKLVEHFCAEFKTKYKLDAKSKIRALLRLYQECEKLKKLMSSNSTDLPLNIECFMNDKDVSGKMNRSQFEELCAELLQKIEVPLYSLLEQTHLKVEDVSAVEIVGGATRIPAVKERIAKFFGKDISTTLNADEAVARGCALQCAILSPAFKVREFSVTDAVPFPISLIWNHDSEDTEGVHEVFSRNHAAPFSKVLTFLRRGPFELEAFYSDPQGVPYPEAKIGRFVVQNVSAQKDGEKSRVKVKVRVNTHGIFTISTASMVEKVPTEENEMSSEADMECLNQRPPENPDTDANEKKVDQPPEAKKPKIKVVNVELPIEANLVWQLGKDLLNMYIETEGKMIMQDKLEKERNDAKNAVEEYVYEFRDKLCGPYEKFICEQDHQNFLRLLTETEDWLYEEGEDQAKQAYVDKLEELMKIGTPVKVRFQEAEERPKMFEELGQRLQHYAKIAADFRNKDEKYNHIDESEMKKVEKSVNEVMEWMNNVMNAQAKKSLDQDPVVRAQEIKTKIKELNNTCEPVVTQPKPKIESPKLERTPNGPNIDKKEEDLEDKNNFGAEPPHQNGECYPNEKNSVNMDLD

SEQ ID NO: 22428 - protein, 817 aa, Homo sapiens
MSVVGLDVGSQSCYIAVARAGGIETIANEFSDRCTPSVISFGSKNRTIGVAAKNQQITHANNTVSNFKRFHGRAFNDPFIQKEKENLSYDLVPLKNGGVGIKVPSFFTDAERRSVLDAAQIVGLNCLRLMNDMTAVALNYGIYKQDLPSLDEKPRIVVFVDMGHSAFQVSACAFNKGKLKVLGTAFDPFLGGKNFDEKLVEHFCAEFKTKYKLDAKSKIRALLRLYQECEKLKKLMSSNSTDLPLNIECFMNDKDVSGKMNRSQFEELCAELLQKIEVPLYSLLEQTHLKVEDVSAVEIVGGATRIPAVKERIAKFFGKDISTTLNADEAVARGCALQCAILSPAFKVREFSVTDAVPFPISLIWNHDSEDTEGVHEVFSRNHAAPFSKVLTFLRRGPFELEAFYSDPQGVPYPEAKIGRFVVQNVSAQKDGEKSRVKVKVRVNTHGIFTISTASMVEKVPTEENEMSSEADMECLNQRPPENPDTDKNVQQDNSEAGTQPQVQTDAQQTSQSPPSPELTSEENKIPDADKANEKKVDQPPEAKKPKIKVVNVELPIEANLVWQLGKDLLNMYIETEGKMIMQDKLEKERNDAKNAVEEYVYEFRDKLCGPYEKFICEQDHQNFLRLLTETEDWLYEEGEDQAKQAYVDKLEELMKIGTPVKVRFQEAEERPKMFEELGQRLQHYAKIAADFRNKDEKYNHIDESEMKKVEKSVNEVMEWMNNVMNAQAKKSLDQDPVVRAQEIKTKIKELNNTCEPVVTQPKPKIESPKLERTPNGPNIDKKEEDLEDKNNFGAEPPHQNGECYPNEKNSVNMDLD

SEQ ID NO: 22429 - protein, 860 aa, Homo sapiens
MATAAVLRGPAAHWVESFQKAREEGSGSGTWRGRWRRRSVISFGSKNRTIGVAAKNQQITHANNTVSNFKRFHGRAFNDPFIQKEKENLSYDLVPLKNGGVGIKVMYMGEEHLFSVEQITAMLLTKLKETAENSLKKPVTDCVISVPSFFTDAERRSVLDAAQIVGLNCLRLMNDMTAVALNYGIYKQDLPSLDEKPRIVVFVDMGHSAFQVSACAFNKGKLKVLGTAFDPFLGGKNFDEKLVEHFCAEFKTKYKLDAKSKIRALLRLYQECEKLKKLMSSNSTDLPLNIECFMNDKDVSGKMNRSQFEELCAELLQKIEVPLYSLLEQTHLKVEDVSAVEIVGGATRIPAVKERIAKFFGKDISTTLNADEAVARGCALQCAILSPAFKVREFSVTDAVPFPISLIWNHDSEDTEGVHEVFSRNHAAPFSKVLTFLRRGPFELEAFYSDPQGVPYPEAKIGRFVVQNVSAQKDGEKSRVKVKVRVNTHGIFTISTASMVEKVPTEENEMSSEADMECLNQRPPENPDTDKNVQQDNSEAGTQPQVQTDAQQTSQSPPSPELTSEENKIPDADKANEKKVDQPPEAKKPKIKVVNVELPIEANLVWQLGKDLLNMYIETEGKMIMQDKLEKERNDAKNAVEEYVYEFRDKLCGPYEKFICEQDHQNFLRLLTETEDWLYEEGEDQAKQAYVDKLEELMKIGTPVKVRFQEAEERPKMFEELGQRLQHYAKIAADFRNKDEKYNHIDESEMKKVEKSVNEVMEWMNNVMNAQAKKSLDQDPVVRAQEIKTKIKELNNTCEPVVTQPKPKIESPKLERTPNGPNIDKKEEDLEDKNNFGAEPPHQNGECYPNEKNSVNMDLD

SEQ ID NO: 22430 - protein, 280 aa, Homo sapiens
MKFRAKIVDGACLNHFTRISNMIAKLAKTCTLRISPDKLNFILCDKLANGGVSMWCELEQENFFNEFQMEGVSAENNEIYLELTSENLSRALKTAQNARALKIKLTNKHFPCLTVSVELLSMSSSSRIVTHDIPIKVIPRKLWKDLQEPVVPDPDVSIYLPVLKTMKSVVEKMKNISNHLVIEANLDGELNLKIETELVCVTTHFKDLGNPPLASESTHEDRNVEHMAEVHIDIRKLLQFLAGQQVNPTKALCNIVNNKMVHFDLLHEDVSLQYFIPALS

SEQ ID NO: 22431 - protein, 259 aa, Homo sapiens
MIAKLAKTCTLRISPDKLNFILCDKLANGGVSMWCELEQENFFNEFQMEGVSAENNEIYLELTSENLSRALKTAQNARALKIKLTNKHFPCLTVSVELLSMSSSSRIVTHDIPIKVIPRKLWKDLQEPVVPDPDVSIYLPVLKTMKSVVEKMKNISNHLVIEANLDGELNLKIETELVCVTTHFKDLGNPPLASESTHEDRNVEHMAEVHIDIRKLLQFLAGQQVNPTKALCNIVNNKMVHFDLLHEDVSLQYFIPALS

SEQ ID NO: 22432 - protein, 406 aa, Homo sapiens
MSALGAVIALLLWGQLFAVDSGNDVTDIADDGCPKPPEIAHGYVEHSVRYQCKNYYKLRTEGDGVYTLNDKKQWINKAVGDKLPECEADDGCPKPPEIAHGYVEHSVRYQCKNYYKLRTEGDGVYTLNNEKQWINKAVGDKLPECEAVCGKPKNPANPVQRILGGHLDAKGSFPWQAKMVSHHNLTTGATLINEQWLLTTAKNLFLNHSENATAKDIAPTLTLYVGKKQLVEIEKVVLHPNYSQVDIGLIKLKQKVSVNERVMPICLPSKDYAEVGRVGYVSGWGRNANFKFTDHLKYVMLPVADQDQCIRHYEGSTVPEKKTPKSPVGVQPILNEHTFCAGMSKYQEDTCYGDAGSAFAVHDLEEDTWYATGILSFDKSCAVAEYGVYVKVTSIQDWVQKTIAEN

SEQ ID NO: 22433 - protein, 347 aa, Homo sapiens
MSALGAVIALLLWGQLFAVDSGNDVTDIADDGCPKPPEIAHGYVEHSVRYQCKNYYKLRTEGDGVYTLNNEKQWINKAVGDKLPECEAVCGKPKNPANPVQRILGGHLDAKGSFPWQAKMVSHHNLTTGATLINEQWLLTTAKNLFLNHSENATAKDIAPTLTLYVGKKQLVEIEKVVLHPNYSQVDIGLIKLKQKVSVNERVMPICLPSKDYAEVGRVGYVSGWGRNANFKFTDHLKYVMLPVADQDQCIRHYEGSTVPEKKTPKSPVGVQPILNEHTFCAGMSKYQEDTCYGDAGSAFAVHDLEEDTWYATGILSFDKSCAVAEYGVYVKVTSIQDWVQKTIAEN

SEQ ID NO: 22434 - protein, 639 aa, Homo sapiens
MSARGPAIGIDLGTTYSCVGVFQHGKVEIIANDQGNRTTPSYVAFTDTERLIGDAAKNQVAMNPTNTIFDAKRLIGRKFEDATVQSDMKHWPFRVVSEGGKPKVQVEYKGETKTFFPEEISSMVLTKMKEIAEAYLGGKVHSAVITVPAYFNDSQRQATKDAGTITGLNVLRIINEPTAAAIAYGLDKKGCAGGEKNVLIFDLGGGTFDVSILTIEDGIFEVKSTAGDTHLGGEDFDNRMVSHLAEEFKRKHKKDIGPNKRAVRRLRTACERAKRTLSSSTQASIEIDSLYEGVDFYTSITRARFEELNADLFRGTLEPVEKALRDAKLDKGQIQEIVLVGGSTRIPKIQKLLQDFFNGKELNKSINPDEAVAYGAAVQAAILIGDKSENVQDLLLLDVTPLSLGIETAGGVMTPLIKRNTTIPTKQTQTFTTYSDNQSSVLVQVYEGERAMTKDNNLLGKFDLTGIPPAPRGVPQIEVTFDIDANGILNVTAADKSTGKENKITITNDKGRLSKDDIDRMVQEAERYKSEDEANRDRVAAKNALESYTYNIKQTVEDEKLRGKISEQDKNKILDKCQEVINWLDRNQMAEKDEYEHKQKELERVCNPIISKLYQGGPGGGSGGGGSGASGGPTIEEVD

SEQ ID NO: 22435 - protein, 1009 aa, Homo sapiens
MSWMFKRDPVWKYLQTVQYGVHGNFPRLSYPTFFPRFEFQDVIPPDDFLTSDEEVDSVLFGSLRGHVVGLRYYTGVVNNNEMVALQRDPNNPYDKNAIKVNNVNGNQVGHLKKELAGALAYIMDNKLAQIEGVVPFGANNAFTMPLHMTFWGKEENRKAVSDQLKKHGFKLGPAPKTLGFNLESGWGSGRAGPSYSMPVHAAVQMTTEQLKTEFDKLFEDLKEDDKTHEMEPAEAIETPLLPHQKQALAWMVSRENSKELPPFWEQRNDLYYNTITNFSEKDRPENVHGGILADDMGLGKTLTAIAVILTNFHDGRPLPIERVKKNLLKKEYNVNDDSMKLGGNNTSEKADGLSKDASRCSEQPSISDIKEKSKFRMSELSSSRPKRRKTAVQYIESSDSEEIETSELPQKMKGKLKNVQSETKGRAKAGSSKVIEDVAFACALTSSVPTTKKKMLKKGACAVEGSKKTDVEERPRTTLIICPLSVLSNWIDQFGQHIKSDVHLNFYVYYGPDRIREPALLSKQDIVLTTYNILTHDYGTKGDSPLHSIRWLRVILDEGHAIRNPNAQQTKAVLDLESERRWVLTGTPIQNSLKDLWSLLSFLKLKPFIDREWWHRTIQRPVTMGDEGGLRRLQSLIKNITLRRTKTSKIKGKPVLELPERKVFIQHITLSDEERKIYQSVKNEGRATIGRYFNEGTVLAHYADVLGLLLRLRQICCHTYLLTNAVSSNGPSGNDTPEELRKKLIRKMKLILSSGSDEECAICLDSLTVPVITHCAHVFCKPCICQVIQNEQPHAKCPLCRNDIHEDNLLECPPEELARDSEKKSDMEWTSSSKINALMHALTDLRKKNPNIKSLVVSQFTTFLSLIEIPLKASGFVFTRLDGSMAQKKRVESIQCFQNTEAGSPTIMLLSLKAGGVGLNLSAASRVFLMDPAWNPAAEDQCFDRCHRLGQKQEVIITKFIVKDSVEENMLKIQNKKRELAAGAFGTKKPNADEMKQAKINEIRTLIDL

SEQ ID NO: 22436 - protein, 887 aa, Homo sapiens
MDNKLAQIEGVVPFGANNAFTMPLHMTFWGKEENRKAVSDQLKKHGFKLGPAPKTLGFNLESGWGSGRAGPSYSMPVHAAVQMTTEQLKTEFDKLFEDLKEDDKTHEMEPAEAIETPLLPHQKQALAWMVSRENSKELPPFWEQRNDLYYNTITNFSEKDRPENVHGGILADDMGLGKTLTAIAVILTNFHDGRPLPIERVKKNLLKKEYNVNDDSMKLGGNNTSEKADGLSKDASRCSEQPSISDIKEKSKFRMSELSSSRPKRRKTAVQYIESSDSEEIETSELPQKMKGKLKNVQSETKGRAKAGSSKVIEDVAFACALTSSVPTTKKKMLKKGACAVEGSKKTDVEERPRTTLIICPLSVLSNWIDQFGQHIKSDVHLNFYVYYGPDRIREPALLSKQDIVLTTYNILTHDYGTKGDSPLHSIRWLRVILDEGHAIRNPNAQQTKAVLDLESERRWVLTGTPIQNSLKDLWSLLSFLKLKPFIDREWWHRTIQRPVTMGDEGGLRRLQSLIKNITLRRTKTSKIKGKPVLELPERKVFIQHITLSDEERKIYQSVKNEGRATIGRYFNEGTVLAHYADVLGLLLRLRQICCHTYLLTNAVSSNGPSGNDTPEELRKKLIRKMKLILSSGSDEECAICLDSLTVPVITHCAHVFCKPCICQVIQNEQPHAKCPLCRNDIHEDNLLECPPEELARDSEKKSDMEWTSSSKINALMHALTDLRKKNPNIKSLVVSQFTTFLSLIEIPLKASGFVFTRLDGSMAQKKRVESIQCFQNTEAGSPTIMLLSLKAGGVGLNLSAASRVFLMDPAWNPAAEDQCFDRCHRLGQKQEVIITKFIVKDSVEENMLKIQNKKRELAAGAFGTKKPNADEMKQAKINEIRTLIDL

SEQ ID NO: 22437 - protein, 348 aa, Homo sapiens
MPDELTEPGRATPARASSFLIENLLAAEAKGAGRATQGDGSREDEEEDDDDPEDEDAEQARRRRLQRRRQLLAGTGPGGEARARALLGPGALGLGPRPPPGPGPPFALGCGGAARWYPRAHGGYGGGLSPDTSDRDSPETGEEMGRAEGAWPRGPGPGAVQREAAELAARGPAAGTEEASELAEVPAAAGETRGGVGVGGGRKKKTRTVFSRSQVFQLESTFDLKRYLSSAERAGLAASLQLTETQVKIWFQNRRNKWKRQLAAELEAASLSPPGAQRLVRVPVLYHESPPAAAAAGPPATLPFPLAPAAPAPPPPLLGFSGALAYPLAAFPAAASVPFLRAQMPGLV

SEQ ID NO: 22438 - protein, 390 aa, Homo sapiens
MGQRLSGGRSCLDVPGRLLPQPPPPPPPVRRKLALLFAMLCVWLYMFLYSCAGSCAAAPGLLLLGSGSRAAHDPPALATAPDGTPPRLPFRAPPATPLASGKEMAEGAASPEEQSPEVPDSPSPISSFFSGSGSKQLPQAIIIGVKKGGTRALLEFLRVHPDVRAVGAEPHFFDRSYDKGLAWYRDLMPRTLDGQITMEKTPSYFVTREAPARISAMSKDTKLIVVVRDPVTRAISDYTQTLSKRPDIPTFESLTFKNRTAGLIDTSWSAIQIGIYAKHLEHWLRHFPIRQMLFVSGERLISDPAGELGRVQDFLGLKRIITDKHFYFNKTKGFPCLKKAEGSSRPHCLGKTKGRTHPEIDREVVRRLREFYRPFNLKFYQMTGHDFGWD

SEQ ID NO: 22439 - protein, 357 aa, Homo sapiens
MPEPGPDAAGTASAQPQPPPPPPPAPKESPFSIKNLLNGDHHRPPPKPQPPPRTLFAPASAAAAAAAAAAAAAKGALEGAAGFALSQVGDLAFPRFEIPAQRFALPAHYLERSPAWWYPYTLTPAGGHLPRPEASEKALLRDSSPASGTDRDSPEPLLKADPDHKELDSKSPDEIILEESDSEESKKEGEAAPGAAGASVGAAAATPGAEDWKKGAESPEKKPACRKKKTRTVFSRSQVFQLESTFDMKRYLSSSERAGLAASLHLTETQVKIWFQNRRNKWKRQLAAELEAANLSHAAAQRIVRVPILYHENSAAEGAAAAAAGAPVPVSQPLLTFPHPVYYSHPVVSSVPLLRPV

SEQ ID NO: 22440 - protein, 839 aa, Homo sapiens
MSVVGIDLGFLNCYIAVARSGGIETIANEYSDRCTPACISLGSRTRAIGNAAKSQIVTNVRNTIHGFKKLHGRSFDDPIVQTERIRLPYELQKMPNGSAGVKVRYLEEERPFAIEQVTGMLLAKLKETSENALKKPVADCVISIPSFFTDAERRSVMAAAQVAGLNCLRLMNETTAVALAYGIYKQDLPPLDEKPRNVVFIDMGHSAYQVLVCAFNKGKLKVLATTFDPYLGGRNFDEALVDYFCDEFKTKYKINVKENSRALLRLYQECEKLKKLMSANASDLPLNIECFMNDLDVSSKMNRAQFEQLCASLLARVEPPLKAVMEQANLQREDISSIEIVGGATRIPAVKEQITKFFLKDISTTLNADEAVARGCALQCAILSPAFKVREFSITDLVPYSITLRWKTSFEDGSGECEVFCKNHPAPFSKVITFHKKEPFELEAFYTNLHEVPYPDARIGSFTIQNVFPQSDGDSSKVKVKVRVNIHGIFSVASASVIEKQNLEGDHSDAPMETETSFKNENKDNMDKMQVDQEEGHQKCHAEHTPEEEIDHTGAKTKSAVSDKQDRLNQTLKKGKVKSIDLPIQSSLCRQLGQDLLNSYIENEGKMIMQDKLEKERNDAKNAVEEYVYDFRDRLGTVYEKFITPEDLSKLSAVLEDTENWLYEDGEDQPKQVYVDKLQELKKYGQPIQMKYMEHEERPKALNDLGKKIQLVMKVIEAYRNKDERYDHLDPTEMEKVEKCISDAMSWLNSKMNAQNKLSLTQDPVVKVSEIVAKSKELDNFCNPIIYKPKPKAEVPEDKPKANSEHNGPMDGQSGTETKSDSTKDSSQHTKSSGEMEVD

SEQ ID NO: 22441 - protein, 334 aa, Homo sapiens
MGFHHVGQAGLELLTSGHPALERRPEYLEERRIKEIVKKHSQFIGYPITLFVEKKRNKQVSDAEAEKKEDKRKKKKESNDKPEIEDVGSDEEEEKKDADKKKKKSKEKYIDQELNKTKPIWTRNPDAITNEEYGEFHQSLTNNWEDHLAVKHFSVEGQLEELKDSRRVMKANQKHIYYITGETKDQVANSAFVECLQKHGLEVIYMIELIDKYCVQQLKELESKTVVSVAKEGLELPEDEEEKKKQEEKKTKFENLCKIMKDMLEKKVKKVVVSNCMEDPQRHTNKIYRMIKLGLGVDEYDPTANDINAAITKEMPPLRGGDDTSRMEEVGGSG

SEQ ID NO: 22442 - protein, 199 aa, Homo sapiens
MPNYKLTYFNMRGRAEIIRYIFAYLDIQYEDHRIEQADWPEIKSTLPFGKIPILEVDGLTLHQSLAIARYLTKNTDLAGNTEMEQCHVDAIVDTLDDFMSCFPWAEKKQDVKEQMFNELLTYNAPHLMQDLDTYLGGREWLIGNSVTWADFYWEICSTTLLVFKPDLLDNHPRLVTLRKKVQAIPAVANWIKRRPQTKL

SEQ ID NO: 22443 - protein, 415 aa, Homo sapiens
MMLGPEGGEGFVVKLRGLPWSCSVEDVQNFLSDCTIHDGAAGVHFIYTREGRQSGEAFVELGSEDDVKMALKKDRESMGHRYIEVFKSHRTEMDWVLKHSGPNSADSANDGFVRLRGLPFGCTKEEIVQFFSGLEIVPNGITLPVDPEGKITGEAFVQFASQELAEKALGKHKERIGHRYIEVFKSSQEEVRSYSDPPLKFMSVQRPGPYDRPGTARRYIGIVKQAGLERMRPGAYSTGYGGYEEYSGLSDGYGFTTDLFGRDLSYCLSGMYDHRYGDSEFTVQSTTGHCVHMRGLPYKATENDIYNFFSPLNPVRVHIEIGPDGRVTGEADVEFATHEEAVAAMSKDRANMQHRYIELFLNSTTGASNGAYSSQVMQGMGVSAAQATYSGLESQSVSGCYGAGYSGQNSMGGYD

SEQ ID NO: 22444 - protein, 594 aa, Homo sapiens
MNFNVWNIKEMLSIPSGSGNKKSSNWNNNQNDYSSLSDSQFLFGSQFCPENSETLSAPLDFGAHLRHSKQSQQNYLEGEPSIFTKYQTKPQLFGGDIKDGGLFPPPLSVGKSKGLLEQFEEKKKRAKDKCDSETLYNFVSNVRESILRLQTSVEKSEDHLSSRSQSILDSLETVAKTLQETIQAQNDLVFEAVQDKGNMEQAILEMKKRFEARQGEFIEMKSNLKHLEVLVAQQSQEFQQLCEQLGQLNVPSVLAELKRLISVPPVKDSASQTSPPLAQSLNLTRQEKYTSEKPVLWQAQALPAAWNPGMGSLQPGEFDVWGEGAKNDDLQEEAALPAFGSHERNRHVKDKVVQTNCKNWAVTKTGAKNHGSSVPGHKIPSDRDLVSQGASQLTSLEINFSTSIKNACQKYQAQSMFLCDPREHLVIKQKDGTVEMRGKDKKQQPRKAHRAHRGRLIASKQKQIPIQTCKFNSKYQSPQPAISVPQSPFLGQQEPRAQPLHLQCPRSPRKPVCPILGGTVMPNKTVRAVQGRLLQLSRCSSQDNWLLSSSSQGDHQMSWFSDLNLGCSETPLCKEAGKNLLYDLGFDSSDDDGF

SEQ ID NO: 22445 - protein, 574 aa, Homo sapiens
MARVDAKAKEAPRASEGCQHAVTSQRNKKSSNWNNNQNDYSSLSDSQFLFGSQFCPENSETLSAPLDFGAHLRHSKQSQQNYLEGEPSIFTKYQTKPQFEEKKKRAKDKCDSETLYNFVSNVRESILRLQTSVEKSEDHLSSRSQSILDSLETVAKTLQETIQAQNDLVFEAVQDKGNMEQAILEMKKRFEARQGEFIEMKSNLKHLEVLVAQQSQEFQQLCEQLGQLNVPSVLAELKRLISVPPVKDSASQTSPPLAQSLNLTRQEKYTSEKPVLWQAQALPAAWNPGMGSLQPGEFDVWGEGAKNDDLQEEAALPAFGSHERNRHVKDKVVQTNCKNWAVTKTGAKNHGSSVPGHKIPSDRDLVSQGASQLTSLEINFSTSIKNACQKYQAQSMFLCDPREHLVIKQKDGTVEMRGKDKKQQPRKAHRAHRGRLIASKQKQIPIQTCKFNSKYQSPQPAISVPQSPFLGQQEPRAQPLHLQCPRSPRKPVCPILGGTVMPNKTVRAVQGRLLQLSRCSSQDNWLLSSSSQGDHQMSWFSDLNLGCSETPLCKEAGKNLLYDLGFDSSDDDGF

SEQ ID NO: 22446 - protein, 203 aa, Homo sapiens
MNFNVWNIKEMLSIPSGSGNKKSSNWNNNQNDYSSLSDSQFLFGSQFCPENSETLSAPLDFGAHLRHSKQSQQNYLEGEPSIFTKYQTKPQLFGGDIKDGGLFPPPLSVGKSKGLLEQFEEKKKRAKDKCDSCRRLWKSLRTISVQEANLFWILWRLWPRHVSASCLRYQQRALVNDEHELSDPSLVSSGEVPHRVSDERMGI

SEQ ID NO: 22447 - protein, 340 aa, Homo sapiens
MSFPNSSPAANTFLVDSLISACRSDSFYSSSASMYMPPPSADMGTYGMQTCGLLPSLAKREVNHQNMGMNVHPYIPQVDSWTDPNRSCRIEQPVTQQVPTCSFTTNIKEESNCCMYSDKRNKLISAEVPSYQRLVPESCPVENPEVPVPGYFRLSQTYATGKTQEYNNSPEGSSTVMLQLNPRGAAKPQLSAAQLQMEKKMNEPVSGQEPTKVSQVESPEAKGGLPEERSCLAEVSVSSPEVQEKESKEEIKSDTPTSNWLTAKSGRKKRCPYTKHQTLELEKEFLFNMYLTRERRLEISKSVNLTDRQVKIWFQNRRMKLKKMSRENRIRELTANLTFS

SEQ ID NO: 22448 - protein, 158 aa, Homo sapiens
MEKALKIDTPQQGSIQDINHRVWVLQDQTLIAVPRKDRMSPVTIALISCRHVETLEKDRGNPIYLGLNGLNLCLMCAKVGDQPTLQLKEKDIMDLYNQPEPVKSFLFYHSQSGRNSTFESVAFPGWFIAVSSEGGCPLILTQELGKANTTDFGLTMLF

SEQ ID NO: 22449 - protein, 269 aa, Homo sapiens
MAEVPELASEMMAYYSGNEDDLFFEADGPKQMKCSFQDLDLCPLDGGIQLRISDHHYSKGFRQAASVVVAMDKLRKMLVPCPQTFQENDLSTFFPFIFEEEPIFFDTWDNEAYVHDAPVRSLNCTLRDSQQKSLVMSGPYELKALHLQGQDMEQQVVFSMSFVQGEESNDKIPVALGLKEKNLYLSCVLKDDKPTLQLESVDPKNYPKKKMEKRFVFNKIEINNKLEFESAQFPNWYISTSQAENMPVFLGGTKGGQDITDFTMQFVSS

SEQ ID NO: 22450 - protein, 311 aa, Homo sapiens
MAVDIQPACLGLYCGKTLLFKNGSTEIYGECGVCPRGQRTNAQKYCQPCTESPELYDWLYLGFMAMLPLVLHWFFIEWYSGKKSSSALFQHITALFECSMAAIITLLVSDPVGVLYIRSCRVLMLSDWYTMLYNPSPDYVTTVHCTHEAVYPLYTIVFIYYAFCLVLMMLLRPLLVKKIACGLGKSDRFKSIYAALYFFPILTVLQAVGGGLLYYAFPYIILVLSLVTLAVYMSASEIENCYDLLVRKKRLIVLFSHWLLHAYGIISISRVDKLEQDLPLLALVPTPALFYLFTAKFTEPSRILSEGANGH

SEQ ID NO: 22451 - protein, 248 aa, Homo sapiens
MAMLPLVLHWFFIEWYSGKKSSSALFQHITALFECSMAAIITLLVSDPVGVLYIRSCRVLMLSDWYTMLYNPSPDYVTTVHCTHEAVYPLYTIVFIYYAFCLVLMMLLRPLLVKKIACGLGKSDRFKSIYAALYFFPILTVLQAVGGGLLYYAFPYIILVLSLVTLAVYMSASEIENCYDLLVRKKRLIVLFSHWLLHAYGIISISRVDKLEQDLPLLALVPTPALFYLFTAKFTEPSRILSEGANGH

SEQ ID NO: 22452 - protein, 305 aa, Homo sapiens
MACLGLYCGKTLLFKNGSTEIYGECGVCPRGQRTNAQKYCQPCTESPELYDWLYLGFMAMLPLVLHWFFIEWYSGKKSSSALFQHITALFECSMAAIITLLVSDPVGVLYIRSCRVLMLSDWYTMLYNPSPDYVTTVHCTHEAVYPLYTIVFIYYAFCLVLMMLLRPLLVKKIACGLGKSDRFKSIYAALYFFPILTVLQAVGGGLLYYAFPYIILVLSLVTLAVYMSASEIENCYDLLVRKKRLIVLFSHWLLHAYGIISISRVDKLEQDLPLLALVPTPALFYLFTAKFTEPSRILSEGANGH

SEQ ID NO: 22453 - protein, 319 aa, Homo sapiens
MKGEIQQSLGAWVLLTCLGLYCGKTLLFKNGSTEIYGECGVCPRGQRTNAQKYCQPCTESPELYDWLYLGFMAMLPLVLHWFFIEWYSGKKSSSALFQHITALFECSMAAIITLLVSDPVGVLYIRSCRVLMLSDWYTMLYNPSPDYVTTVHCTHEAVYPLYTIVFIYYAFCLVLMMLLRPLLVKKIACGLGKSDRFKSIYAALYFFPILTVLQAVGGGLLYYAFPYIILVLSLVTLAVYMSASEIENCYDLLVRKKRLIVLFSHWLLHAYGIISISRVDKLEQDLPLLALVPTPALFYLFTAKFTEPSRILSEGANGH

SEQ ID NO: 22454 - protein, 289 aa, Homo sapiens
MSGFSTEERAAPFSLEYRVFLKNEKGQYISPFHDIPIYADKDVFHMVVEVPRWSNAKMEIATKDPLNPIKQDVKKGKLRYVANLFPYKGYIWNYGAIPQTWEDPGHNDKHTGCCGDNDPIDVCEIGSKVCARGEIIGVKVLGILAMIDEGETDWKVIAINVDDPDAANYNDINDVKRLKPGYLEATVDWFRRYKVPDGKPENEFAFNAEFKDKDFAIDIIKSTHDHWKALVTKKTNGKGISCMNTTLSESPFKCDPDAARAIVDALPPPCESACTVPTDVDKWFHHQKN

SEQ ID NO: 22455 - protein, 115 aa, Homo sapiens
MAWTALLLSLLAHFTGSVASYELTQPLSVSVALGQTARITCGGNNIGSKNVHWYQQKPGQAPVLVIYRDSNRPSGIPERFSGSNSGNTATLTISRAQAGDEADYYCQVWDSSTAH

SEQ ID NO: 22456 - protein, 695 aa, Homo sapiens
MFLGTGEPALDTGDDSLSAVTFDSDVETKAKRKAFHKPPPTSPKSPYLSKPRKVASWRSLRTAGSMPLGGRASLTPQKLWLGTAKPGSLTQALNSPLTWEHAWTGVPGGTPDCLTDTFRVKRPHLRRSASNGHVPGTPVYREKEDMYDEIIELKKSLHVQKSDVDLMRTKLRRLEEENSRKDRQIEQLLDPSRGTDFVRTLAEKRPDASWVINGLKQRILKLEQQCKEKDGTISKLQTDMKTTNLEEMRIAMETYYEEVHRLQTLLASSETTGKKPLGEKKTGAKRQKKMGSALLSLSRSVQELTEENQSLKEDLDRVLSTSPTISKTQGYVEWSKPRLLRRIVELEKKLSVMESSKSHAAEPVRSHPPACLASSSALHRQPRGDRNKDHERLRGAVRDLKEERTALQEQLLQRDLEVKQLLQAKADLEKELECAREGEEERREREEVLREEIQTLTSKLQELQEMKKEEKEDCPEVPHKAQELPAPTPSSRHCEQDWPPDSSEEGLPRPRSPCSDGRRDAAARVLQAQWKVYKHKKKKAVLDEAAVVLQAAFRGHLTRTKLLASKAHGSEPPSVPGLPDQSSPVPRVPSPIAQATGSPVQEEAIVIIQSALRAHLARARHSATGKRTTTAASTRRRSASATHGDASSPPFLAALPDPSPSGPQALAPLPGDDVNSDDSDDIVIAPSLPTKNFPV

SEQ ID NO: 22457 - protein, 630 aa, Homo sapiens
MPLGGRASLTPQKLWLGTAKPGSLTQALNSPLTWEHAWTGVPGGTPDCLTDTFRVKRPHLRRSASNGHVPGTPVYREKEDMYDEIIELKKSLHVQKSDVDLMRTKLRRLEEENSRKDRQIEQLLDPSRGTDFVRTLAEKRPDASWVINGLKQRILKLEQQCKEKDGTISKLQTDMKTTNLEEMRIAMETYYEEVHRLQTLLASSETTGKKPLGEKKTGAKRQKKMGSALLSLSRSVQELTEENQSLKEDLDRVLSTSPTISKTQGYVEWSKPRLLRRIVELEKKLSVMESSKSHAAEPVRSHPPACLASSSALHRQPRGDRNKDHERLRGAVRDLKEERTALQEQLLQRDLEVKQLLQAKADLEKELECAREGEEERREREEVLREEIQTLTSKLQELQEMKKEEKEDCPEVPHKAQELPAPTPSSRHCEQDWPPDSSEEGLPRPRSPCSDGRRDAAARVLQAQWKVYKHKKKKAVLDEAAVVLQAAFRGHLTRTKLLASKAHGSEPPSVPGLPDQSSPVPRVPSPIAQATGSPVQEEAIVIIQSALRAHLARARHSATGKRTTTAASTRRRSASATHGDASSPPFLAALPDPSPSGPQALAPLPGDDVNSDDSDDIVIAPSLPTKNFPV

SEQ ID NO: 22458 - protein, 644 aa, Homo sapiens
MFLGTGEPALDTSHLISLSRASLTPQKLWLGTAKPGSLTQALNSPLTWEHAWTGVPGGTPDCLTDTFRVKRPHLRRSASNGHVPGTPVYREKEDMYDEIIELKKSLHVQKSDVDLMRTKLRRLEEENSRKDRQIEQLLDPSRGTDFVRTLAEKRPDASWVINGLKQRILKLEQQCKEKDGTISKLQTDMKTTNLEEMRIAMETYYEEVHRLQTLLASSETTGKKPLGEKKTGAKRQKKMGSALLSLSRSVQELTEENQSLKEDLDRVLSTSPTISKTQGYVEWSKPRLLRRIVELEKKLSVMESSKSHAAEPVRSHPPACLASSSALHRQPRGDRNKDHERLRGAVRDLKEERTALQEQLLQRDLEVKQLLQAKADLEKELECAREGEEERREREEVLREEIQTLTSKLQELQEMKKEEKEDCPEVPHKAQELPAPTPSSRHCEQDWPPDSSEEGLPRPRSPCSDGRRDAAARVLQAQWKVYKHKKKKAVLDEAAVVLQAAFRGHLTRTKLLASKAHGSEPPSVPGLPDQSSPVPRVPSPIAQATGSPVQEEAIVIIQSALRAHLARARHSATGKRTTTAASTRRRSASATHGDASSPPFLAALPDPSPSGPQALAPLPGDDVNSDDSDDIVIAPSLPTKNFPV

SEQ ID NO: 22459 - protein, 679 aa, Homo sapiens
MFLGTGEPALDTKAKRKAFHKPPPTSPKSPYLSKPRKVASWRSLRTAGSMPLGGRASLTPQKLWLGTAKPGSLTQALNSPLTWEHAWTGVPGGTPDCLTDTFRVKRPHLRRSASNGHVPGTPVYREKEDMYDEIIELKKSLHVQKSDVDLMRTKLRRLEEENSRKDRQIEQLLDPSRGTDFVRTLAEKRPDASWVINGLKQRILKLEQQCKEKDGTISKLQTDMKTTNLEEMRIAMETYYEEVHRLQTLLASSETTGKKPLGEKKTGAKRQKKMGSALLSLSRSVQELTEENQSLKEDLDRVLSTSPTISKTQGYVEWSKPRLLRRIVELEKKLSVMESSKSHAAEPVRSHPPACLASSSALHRQPRGDRNKDHERLRGAVRDLKEERTALQEQLLQRDLEVKQLLQAKADLEKELECAREGEEERREREEVLREEIQTLTSKLQELQEMKKEEKEDCPEVPHKAQELPAPTPSSRHCEQDWPPDSSEEGLPRPRSPCSDGRRDAAARVLQAQWKVYKHKKKKAVLDEAAVVLQAAFRGHLTRTKLLASKAHGSEPPSVPGLPDQSSPVPRVPSPIAQATGSPVQEEAIVIIQSALRAHLARARHSATGKRTTTAASTRRRSASATHGDASSPPFLAALPDPSPSGPQALAPLPGDDVNSDDSDDIVIAPSLPTKNFPV

SEQ ID NO: 22460 - protein, 410 aa, Homo sapiens
MLMPLCGLLWWWWCCCSGWYCYGLCAPAPQMLRHQGLLKCRCRMLFNDLKVFLLRRPPQAPLPMHGDPQPPGLAANNTLPALGAGGWAGWRGPREVVGREPPPVPPPPPLPPSSVEDDWGGPATEPPASLLSSASSDDFCKEKTEDRYSLGSSLDSGMRTPLCRICFQGPEQGELLSPCRCDGSVKCTHQPCLIKWISERGCWSCELCYYKYHVIAISTKNPLQWQAISLTVIEKVQVAAAILGSLFLIASISWLIWSTFSPSARWQRQDLLFQICYGMYGFMDVVCIGLIIHEGPSVYRIFKRWQAVNQQWKVLNYDKTKDLEDQKAGGRTNPRTSSSTQANIPSSEEETAGTPAPEQGPAQAAGHPSGPLSHHHCAYTILHILSHLRPHEQRSPPGSSRELVMRVTTV

SEQ ID NO: 22461 - protein, 316 aa, Homo sapiens
MAEAALEAVRSELREFPAAARELCVPLAVPYLDKPPTPLHFYRDWVCPNRPCIIRNALQHWPALQKWSLPYFRATVGSTEVSVAVTPDGYADAVRGDRFMMPAERRLPLSFVLDVLEGRAQHPGVLYVQKQCSNLPSELPQLLPDLESHVPWASEALGKMPDAVNFWLGEAAAVTSLHKDHYENLYCVVSGEKHFLFHPPSDRPFIPYELYTPATYQLTEEGTFKVVDEEAMEKVPWIPLDPLAPDLARYPSYSQAQALRCTVRAGEMLYLPALWFHHVQQSQGCIAVNFWYDMEYDLKYSYFQLLDSLTKASGLD

SEQ ID NO: 22462 - protein, 1382 aa, Homo sapiens
MATGGRRGAAAAPLLVAVAALLLGAAGHLYPGEVCPGMDIRNNLTRLHELENCSVIEGHLQILLMFKTRPEDFRDLSFPKLIMITDYLLLFRVYGLESLKDLFPNLTVIRGSRLFFNYALVIFEMVHLKELGLYNLMNITRGSVRIEKNNELCYLATIDWSRILDSVEDNYIVLNKDDNEECGDICPGTAKGKTNCPATVINGQFVERCWTHSHCQKVCPTICKSHGCTAEGLCCHSECLGNCSQPDDPTKCVACRNFYLDGRCVETCPPPYYHFQDWRCVNFSFCQDLHHKCKNSRRQGCHQYVIHNNKCIPECPSGYTMNSSNLLCTPCLGPCPKVCHLLEGEKTIDSVTSAQELRGCTVINGSLIINIRGGNNLAAELEANLGLIEEISGYLKIRRSYALVSLSFFRKLRLIRGETLEIGNYSFYALDNQNLRQLWDWSKHNLTITQGKLFFHYNPKLCLSEIHKMEEVSGTKGRQERNDIALKTNGDQASCENELLKFSYIRTSFDKILLRWEPYWPPDFRDLLGFMLFYKEAPYQNVTEFDGQDACGSNSWTVVDIDPPLRSNDPKSQNHPGWLMRGLKPWTQYAIFVKTLVTFSDERRTYGAKSDIIYVQTDATNPSVPLDPISVSNSSSQIILKWKPPSDPNGNITHYLVFWERQAEDSELFELDYCLKGLKLPSRTWSPPFESEDSQKHNQSEYEDSAGECCSCPKTDSQILKELEESSFRKTFEDYLHNVVFVPRKTSSGTGAEDPRPSRKRRSLGDVGNVTVAVPTVAAFPNTSSTSVPTSPEEHRPFEKVVNKESLVISGLRHFTGYRIELQACNQDTPEERCSVAAYVSARTMPEAKADDIVGPVTHEIFENNVVHLMWQEPKEPNGLIVLYEVSYRRYGDEELHLCVSRKHFALERGCRLRGLSPGNYSVRIRATSLAGNGSWTEPTYFYVTDYLDVPSNIAKIIIGPLIFVFLFSVVIGSIYLFLRKRQPDGPLGPLYASSNPEYLSASDVFPCSVYVPDEWEVSREKITLLRELGQGSFGMVYEGNARDIIKGEAETRVAVKTVNESASLRERIEFLNEASVMKGFTCHHVVRLLGVVSKGQPTLVVMELMAHGDLKSYLRSLRPEAENNPGRPPPTLQEMIQMAAEIADGMAYLNAKKFVHRDLAARNCMVAHDFTVKIGDFGMTRDIYETDYYRKGGKGLLPVRWMAPESLKDGVFTTSSDMWSFGVVLWEITSLAEQPYQGLSNEQVLKFVMDGGYLDQPDNCPERVTDLMRMCWQFNPKMRPTFLEIVNLLKDDLHPSFPEVSFFHSEENKAPESEELEMEFEDMENVPLDRSSHCQREEAGGRDGGSSLGFKRSYEEHIPYTHMNGGKKNGRILTLPRSNPS

SEQ ID NO: 22463 - protein, 1370 aa, Homo sapiens
MATGGRRGAAAAPLLVAVAALLLGAAGHLYPGEVCPGMDIRNNLTRLHELENCSVIEGHLQILLMFKTRPEDFRDLSFPKLIMITDYLLLFRVYGLESLKDLFPNLTVIRGSRLFFNYALVIFEMVHLKELGLYNLMNITRGSVRIEKNNELCYLATIDWSRILDSVEDNYIVLNKDDNEECGDICPGTAKGKTNCPATVINGQFVERCWTHSHCQKVCPTICKSHGCTAEGLCCHSECLGNCSQPDDPTKCVACRNFYLDGRCVETCPPPYYHFQDWRCVNFSFCQDLHHKCKNSRRQGCHQYVIHNNKCIPECPSGYTMNSSNLLCTPCLGPCPKVCHLLEGEKTIDSVTSAQELRGCTVINGSLIINIRGGNNLAAELEANLGLIEEISGYLKIRRSYALVSLSFFRKLRLIRGETLEIGNYSFYALDNQNLRQLWDWSKHNLTITQGKLFFHYNPKLCLSEIHKMEEVSGTKGRQERNDIALKTNGDQASCENELLKFSYIRTSFDKILLRWEPYWPPDFRDLLGFMLFYKEAPYQNVTEFDGQDACGSNSWTVVDIDPPLRSNDPKSQNHPGWLMRGLKPWTQYAIFVKTLVTFSDERRTYGAKSDIIYVQTDATNPSVPLDPISVSNSSSQIILKWKPPSDPNGNITHYLVFWERQAEDSELFELDYCLKGLKLPSRTWSPPFESEDSQKHNQSEYEDSAGECCSCPKTDSQILKELEESSFRKTFEDYLHNVVFVPRPSRKRRSLGDVGNVTVAVPTVAAFPNTSSTSVPTSPEEHRPFEKVVNKESLVISGLRHFTGYRIELQACNQDTPEERCSVAAYVSARTMPEAKADDIVGPVTHEIFENNVVHLMWQEPKEPNGLIVLYEVSYRRYGDEELHLCVSRKHFALERGCRLRGLSPGNYSVRIRATSLAGNGSWTEPTYFYVTDYLDVPSNIAKIIIGPLIFVFLFSVVIGSIYLFLRKRQPDGPLGPLYASSNPEYLSASDVFPCSVYVPDEWEVSREKITLLRELGQGSFGMVYEGNARDIIKGEAETRVAVKTVNESASLRERIEFLNEASVMKGFTCHHVVRLLGVVSKGQPTLVVMELMAHGDLKSYLRSLRPEAENNPGRPPPTLQEMIQMAAEIADGMAYLNAKKFVHRDLAARNCMVAHDFTVKIGDFGMTRDIYETDYYRKGGKGLLPVRWMAPESLKDGVFTTSSDMWSFGVVLWEITSLAEQPYQGLSNEQVLKFVMDGGYLDQPDNCPERVTDLMRMCWQFNPKMRPTFLEIVNLLKDDLHPSFPEVSFFHSEENKAPESEELEMEFEDMENVPLDRSSHCQREEAGGRDGGSSLGFKRSYEEHIPYTHMNGGKKNGRILTLPRSNPS

SEQ ID NO: 22464 - protein, 988 aa, Homo sapiens
MSFALEETLESDWVAVRPHVFDEREKHKFVFIVAWNEIEGKFAITCHNRTAQRQRSGSREQAGARGGAEAGGAASDGSRGPGSPAGRGRPEATASATLVRSPGPRRSSAWAEGGSPRSTRSLLGDPRLRSPGSKGAESRLRSPVRAKPIPGQKTSEADDAAGAAAAAARPAPREAQVSSVRIVSASGTVSEEIEVLEMVKEDEAPLALSDAEQPPPATELESPAEECSWAGLFSFQDLRAVHQQLCSVNSQLEPCLPVFPEEPSGMWTVLFGGAPEMTEQEIDTLCYQLQVYLGHGLDTCGWKILSQVLFTETDDPEEYYESLSELRQKGYEEVLQRARKRIQELLDKHKNTESMVELLDLYQMEDEAYSSLAEATTELYQYLLQPFRDMRELAMLRRQQIKISMENDYLGPRRIESLQKEDADWQRKAHMAVLSIQDLTVKYFEITAKAQKAVYDRMRADQKKFGKASWAAAAERMEKLQYAVSKETLQMMRAKEICLEQRKHALKEEMQSLRGGTEAIARLDQLEADYYDLQLQLYEVQFEILKCEELLLTAQLESIKRLISEKRDEVVYYDTYESMEAMLEKEEMAASAYLQREELQKLQQKARQLEARRGRVSAKKSYLRNKKEICIAKHNEKIQQRTRIEDEYRTHHTVQLKREKLHDEEERKSAWVSQERQRTLDRLRTFKQRYPGQVILKSTRLRLAHARRKGAASPVLQEDHCDSLPSVLQVEEKTEEVGEGRVKRGPSQTTEPQSLVQLEDTSLTQLEATSLPLSGVTSELPPTISLPLLNNNLEPCSVTINPLPSPLPPTPPPPPPPPPPPPPPPLPVAKDSGPETLEKDLPRKEGNEKRIPKSASAPSAHLFDSSQLVSARKKLRKTAEGLQRRRVSSPMDEVLASLKRGSFHLKKVEQRTLPPFPDEDDSNNILAQIRKGVKLKKVQKDVLRESFTLLPDTDPLTRSIHEALRRIKEASPESEDEEEALPCTDWEN

SEQ ID NO: 22465 - protein, 976 aa, Homo sapiens
MSFALEETLESDWVAVRPHVFDEREKHKFVFIVAWNEIEGKFAITCHNRTAQRQRSGSREQAGARGGAEAGGAASDGSRGPGSPAGRGRPEATASATLVRSPGPRRSSAWAEGGSPRSTRSLLGDPRLRSPGSKGAESRLRSPVRAKPIPGQKTSEADDAAGAAAAAARPAPREAQVSSVRIVSASGTVSEEIEVLEMVKEDEAPLALSDAEQPPPATELESPAEECSWAGLFSFQDLRAVHQQLCSVNSQLEPCLPVFPEEPSGMWTVLFGGAPEMTEQEIDTLCYQLQVYLGHGLDTCGWKILSQVLFTETDDPEEYYESLSELRQKGYEEVLQRARKRIQELLDKHKNTESMVELLDLYQMEDEAYSSLAEATTELYQYLLQPFRDMRELAMLRRQQIKISMENDYLGPRRIESLQKEDADWQRKAHMAVLSIQDLTVKYFEITAKAQKAVYDRMRADQKKFGKASWAAAAERMEKLQYAVSKETLQMMRAKEICLEQRKHALKEEMQSLRGGTEAIARLDQLEADYYDLQLQLYEVQFEILKCEELLLTAQLESIKRLISEKRDEVVYYDTYESMEAMLEKEEMAASAYLQREELQKLQQKARQLEARRGRVSAKKSYLRNKKEICIAKHNEKIQQRTRIEDEYRTHHTVQLKREKLHDEEERKSAWVSQERQRTLDRLRTFKQRYPGQVILKSTRLRLAHARRKGAASPVLQEDHCDSLPSVLQVEEKTEEVGEGRVKRGPSQTTEPQSLVQLEDTSLTQLEATSLPLSGVTSELPPTISLPLLNNNLEPCSVTINPLPSPLPPTPPPLPVAKDSGPETLEKDLPRKEGNEKRIPKSASAPSAHLFDSSQLVSARKKLRKTAEGLQRRRVSSPMDEVLASLKRGSFHLKKVEQRTLPPFPDEDDSNNILAQIRKGVKLKKVQKDVLRESFTLLPDTDPLTRSIHEALRRIKEASPESEDEEEALPCTDWEN

SEQ ID NO: 22466 - protein, 85 aa, Homo sapiens
MASDLDFSPPEVPEPTFLENLLRYGLFLGAIFQLICVLAIIVPIPKSHEAEAEPSEPRSAEVTRKPKAAVPSVNKRPKKETKKKR

SEQ ID NO: 22467 - protein, 1180 aa, Homo sapiens
MTLQGRADLSGNQGNAAGRLATVHEPVVTQWAVHPPAPAHPSLLDKMEKAPPQPQHEGLKSKEHLPQQPAEGKTASRRVPRLRAVVESQAFKNILVDEMDMMHARAATLIQANWRGYWLRQKLISQMMAAKAIQEAWRRFNKRHILHSSKSLVKKTRAEEGDIPYHAPQQVRFQHPEENRLLSPPIMVNKETQFPSCDNLVLCRPQSSPLLQPPAAQGTPEPCVQGPHAARVRGLAFLPHQTVTIRFPCPVSLDAKCQPCLLTRTIRSTCLVHIEGDSVKTKRVSARTNKARAPETPLSRRYDQAVTRPSRAQTQGPVKAETPKAPFQICPGPMITKTLLQTYPVVSVTLPQTYPASTMTTTPPKTSPVPKVTIIKTPAQMYPGPTVTKTAPHTCPMPTMTKIQVHPTASRTGTPRQTCPATITAKNRPQVSLLASIMKSLPQVCPGPAMAKTPPQMHPVTTPAKNPLQTCLSATMSKTSSQRSPVGVTKPSPQTRLPAMITKTPAQLRSVATILKTLCLASPTVANVKAPPQVAVAAGTPNTSGSIHENPPKAKATVNVKQAAKVVKASSPSYLAEGKIRCLAQPHPGTGVPRAAAELPLEAEKIKTGTQKQAKTDMAFKTSVAVEMAGAPSWTKVAEEGDKPPHVYVPVDMAVTLPRGQLAAPLTNASSQRHPPCLSQRPLAAPLTKASSQGHLPTELTKTPSLAHLDTCLSKMHSQTHLATGAVKVQSQAPLATCLTKTQSRGQPITDITTCLIPAHQAADLSSNTHSQVLLTGSKVSNHACQRLGGLSAPPWAKPEDRQTQPQPHGHVPGKTTQGGPCPAACEVQGMLVPPMAPTGHSTCNVESWGDNGATRAQPSMPGQAVPCQEDTGPADAGVVGGQSWNRAWEPARGAASWDTWRNKAVVPPRRSGEPMVSMQAAEEIRILAVITIQAGVRGYLARRRIRLWHRGAMVIQATWRGYRVRRNLAHLCRATTTIQSAWRGYSTRRDQARHWQMLHPVTWVELGSRAGVMSDRSWFQDGRARTVSDHRCFQSCQAHACSVCHSLSSRIGSPPSVVMLVGSSPRTCHTCGRTQPTRVVQGMGQGTEGPGAVSWASAYQLAALSPRQPHRQDKAATAIQSAWRGFKIRQQMRQQQMAAKIVQATWRGHHTRSCLKNTEALLGPADPSASSRHMHWPGI

SEQ ID NO: 22468 - protein, 554 aa, Homo sapiens
MTLQGRADLSGNQGNAAGRLATVHEPVVTQWAVHPPAPAHPSLLDKMEKAPPQPQHEGLKSKEHLPQQPAEGKTASRRVPRLRAVVESQAFKNILVDEMDMMHARAATLIQANWRGYWLRQKLISQMMAAKAIQEAWRRFNKRHILHSSKSLVKKTRAEEGDIPYHAPQQVRFQHPEENRLLSPPIMVNKETQFPSCDNLVLCRPQSSPLLQPPAAQGTPEPCVQGPHAARVRGLAFLPHQTVTIRFPCPVSLDAKCQPCLLTRTIRSTCLVHIEGDSVKTKRVSARTNKARAPETPLSRRYDQAVTRPSRAQTQGPVKAETPKAPFQICPGPMITKTLLQTYPVVSVTLPQTYPASTMTTTPPKTSPVPKVTIIKTPAQMYPGPTVTKTAPHTCPMPTMTKIQVHPTASRTGTPRQTCPATITAKNRPQVSLLASIMKSPPSVVMLVGSSPRTCHTCGRTQPTRVVQGMGQGTEGPGAVSWASAYQLAALSPRQPHRQDKAATAIQSAWRGFKIRQQMRQQQMAAKIVQATWHLGPWLPAVGTSWEALMALWV

SEQ ID NO: 22469 - protein, 444 aa, Homo sapiens
MAPSSRWDAMGPKNSYRSVHGRIVPELLESSVARVRPLQYVQRQPSQASARSGANPTHRPSAEVRPVIRTGEMTHSSVIPPLAPGVRRVSLGYESSPSGSLPPLFNQESPWRRQDSYSPQNPAVSHKASLNSTILQGPADAGVVGGQSWNRAWEPARGAASWDTWRNKAVVPPRRSGEPMVSMQAAEEIRILAVITIQAGVRGYLARRRIRLWHRGAMVIQATWRGYRVRRNLAHLCRATTTIQSAWRGYSTRRDQARHWQMLHPVTWVELGSRAGVMSDRSWFQDGRARTVSDHRCFQSCQAHACSVCHSLSSRIGSPPSVVMLVGSSPRTCHTCGRTQPTRVVQGMGQGTEGPGAVSWASAYQLAALSPRQPHRQDKAATAIQSAWRGFKIRQQMRQQQMAAKIVQATWRGHHTRSCLKNTEALLGPADPSASSRHMHWPGI

SEQ ID NO: 22470 - protein, 1367 aa, Homo sapiens
MTLQGRADLSGNQGNAAGRLATVHEPVVTQWAVHPPAPAHPSLLDKMEKAPPQPQHEGLKSKEHLPQQPAEGKTASRRVPRLRAVVESQAFKNILVDEMDMMHARAATLIQANWRGYWLRQKLISQMMAAKAIQEAWRRFNKRHILHSSKSLVKKTRAEEGDIPYHAPQQVRFQHPEENRLLSPPIMVNKETQFPSCDNLVLCRPQSSPLLQPPAAQGTPEPCVQGPHAARVRGLAFLPHQTVTIRFPCPVSLDAKCQPCLLTRTIRSTCLVHIEGDSVKTKRVSARTNKARAPETPLSRRYDQAVTRPSRAQTQGPVKAETPKAPFQICPGPMITKTLLQTYPVVSVTLPQTYPASTMTTTPPKTSPVPKVTIIKTPAQMYPGPTVTKTAPHTCPMPTMTKIQVHPTASRTGTPRQTCPATITAKNRPQVSLLASIMKSLPQVCPGPAMAKTPPQMHPVTTPAKNPLQTCLSATMSKTSSQRSPVGVTKPSPQTRLPAMITKTPAQLRSVATILKTLCLASPTVANVKAPPQVAVAAGTPNTSGSIHENPPKAKATVNVKQAAKVVKASSPSYLAEGKIRCLAQPHPGTGVPRAAAELPLEAEKIKTGTQKQAKTDMAFKTSVAVEMAGAPSWTKVAEEGDKPPHVYVPVDMAVTLPRGQLAAPLTNASSQRHPPCLSQRPLAAPLTKASSQGHLPTELTKTPSLAHLDTCLSKMHSQTHLATGAVKVQSQAPLATCLTKTQSRGQPITDITTCLIPAHQAADLSSNTHSQVLLTGSKVSNHACQRLGGLSAPPWAKPEDRQTQPQPHGHVPGKTTQGGPCPAACEVQGMLVPPMAPTGHSTCNVESWGDNGATRAQPSMPGQAVPCQEDTVGSLLASLCAEVAGVLASQEDLRTLLAKALSQGEVWAALNQALSKEVLGATVTKALPQSMLSMALVKALSWSELRLTLSRALSRGELRAELTKVMQGKLAEVLSKALTEEEWVALSQALCQGELGALLSQSWCRVALRTGTILPKAASKSTGSGVTKTPALVKVACRRSPSAAWGPSLGPVRPQTSKGPADAGVVGGQSWNRAWEPARGAASWDTWRNKAVVPPRRSGEPMVSMQAAEEIRILAVITIQAGVRGYLARRRIRLWHRGAMVIQATWRGYRVRRNLAHLCRATTTIQSAWRGYSTRRDQARHWQMLHPVTWVELGSRAGVMSDRSWFQDGRARTVSDHRCFQSCQAHACSVCHSLSSRIGSPPSVVMLVGSSPRTCHTCGRTQPTRVVQGMGQGTEGPGAVSWASAYQLAALSPRQPHRQDKAATAIQSAWRGFKIRQQMRQQQMAAKIVQATWRGHHTRSCLKNTEALLGPADPSASSRHMHWPGI

SEQ ID NO: 22471 - protein, 1134 aa, Homo sapiens
MEKAPPQPQHEGLKSKEHLPQQPAEGKTASRRVPRLRAVVESQAFKNILVDEMDMMHARAATLIQANWRGYWLRQKLISQMMAAKAIQEAWRRFNKRHILHSSKSLVKKTRAEEGDIPYHAPQQVRFQHPEENRLLSPPIMVNKETQFPSCDNLVLCRPQSSPLLQPPAAQGTPEPCVQGPHAARVRGLAFLPHQTVTIRFPCPVSLDAKCQPCLLTRTIRSTCLVHIEGDSVKTKRVSARTNKARAPETPLSRRYDQAVTRPSRAQTQGPVKAETPKAPFQICPGPMITKTLLQTYPVVSVTLPQTYPASTMTTTPPKTSPVPKVTIIKTPAQMYPGPTVTKTAPHTCPMPTMTKIQVHPTASRTGTPRQTCPATITAKNRPQVSLLASIMKSLPQVCPGPAMAKTPPQMHPVTTPAKNPLQTCLSATMSKTSSQRSPVGVTKPSPQTRLPAMITKTPAQLRSVATILKTLCLASPTVANVKAPPQVAVAAGTPNTSGSIHENPPKAKATVNVKQAAKVVKASSPSYLAEGKIRCLAQPHPGTGVPRAAAELPLEAEKIKTGTQKQAKTDMAFKTSVAVEMAGAPSWTKVAEEGDKPPHVYVPVDMAVTLPRGQLAAPLTNASSQRHPPCLSQRPLAAPLTKASSQGHLPTELTKTPSLAHLDTCLSKMHSQTHLATGAVKVQSQAPLATCLTKTQSRGQPITDITTCLIPAHQAADLSSNTHSQVLLTGSKVSNHACQRLGGLSAPPWAKPEDRQTQPQPHGHVPGKTTQGGPCPAACEVQGMLVPPMAPTGHSTCNVESWGDNGATRAQPSMPGQAVPCQEDTGPADAGVVGGQSWNRAWEPARGAASWDTWRNKAVVPPRRSGEPMVSMQAAEEIRILAVITIQAGVRGYLARRRIRLWHRGAMVIQATWRGYRVRRNLAHLCRATTTIQSAWRGYSTRRDQARHWQMLHPVTWVELGSRAGVMSDRSWFQDGRARTVSDHRCFQSCQAHACSVCHSLSSRIGSPPSVVMLVGSSPRTCHTCGRTQPTRVVQGMGQGTEGPGAVSWASAYQLAALSPRQPHRQDKAATAIQSAWRGFKIRQQMRQQQMAAKIVQATWRGHHTRSCLKNTEALLGPADPSASSRHMHWPGI

SEQ ID NO: 22472 - protein, 122 aa, Homo sapiens
MSVPTMAWMMLLLGLLAYGSGVDSQTVVTQEPSFSVSPGGTVTLTCGLSSGSVSTSYYPSWYQQTPGQAPRTLIYSTNTRSSGVPDRFSGSILGNKAALTITGAQADDESDYYCVLYMGSGI

SEQ ID NO: 22473 - protein, 123 aa, Homo sapiens
MAWAPLLLTLLSLLTGSLSQPVLTQPPSASASLGASVTLTCTLSSGYSNYKVDWYQQRPGKGPRFVMRVGTGGIVGSKGDGIPDRFSVLGSGLNRYLTIKNIQEEDESDYHCGADHGSGSNFV

SEQ ID NO: 22474 - protein, 267 aa, Homo sapiens
MKAEATVIPSRCARGLPSWQVLSPVQPWQTSAPQNTTQPKLLAPHQHEKSQKKSSLLKELGAFHITIALLHLVFGGYLASIVKNLHLVVLKSWYPFWGAASFLISGILAITMKTFSKTYLKMLCLMTNLISLFCVLSGLFVISKDLFLESPFESPIWRMYPNSTVHIQRLELALLCFTVLELFLPVPTAVTAWRGDCPSAKNDDACLVPNTPLHLKGLPVEPPPSYQSVIQGDAQHKQHQRLREVKQVAPDTWIVTDGAAIWTQTAN

SEQ ID NO: 22475 - protein, 748 aa, Homo sapiens
MSSGGRFNFDDGGSYCGGWEDGKAHGHGVCTGPKGQGEYTGSWSHGFEVLGVYTWPSGNTYQGTWAQGKRHGIGLESKGKWVYKGEWTHGFKGRYGVRECAGNGAKYEGTWSNGLQDGYGTETYSDGGTYQGQWVGGMRQGYGVRQSVPYGMAAVIRSPLRTSINSLRSEHTNGTALHPDASPAVAGSPAVSRGGFVLVAHSDSEILKSKKKGLFRRSLLSGLKLRKSESKSSLASQRSKQSSFRSEAGMSTVSSTASDIHSTISLGEAEAELAVIEDDIDATTTETYVGEWKNDKRSGFGVSQRSDGLKYEGEWASNRRHGYGCMTFPDGTKEEGKYKQNILVGGKRKNLIPLRASKIREKVDRAVEAAERAATIAKQKAEIAASRTSHSRAKAEAALTAAQKAQEEARIARITAKEFSPSFQHRENGLEYQRPKRQTSCDDIEVLSTGTPLQQESPELYRKGTTPSDLTPDDSPLQSFPTSPAATPPPAPAARNKVAHFSRQVSVDEERGGDIQMLLEGRAGDCARSSWGEEQAGGSRGVRSGALRGGLLVDDFRTRGSGRKQPGNPKPRERRTESPPVFTWTSHHRASNHSPGGSRLLELQEEKLSNYRMEMKPLLRMETHPQKRRYSKGGACRGLGDDHRPEDRGFGVQRLRSKAQNKENFRPASSAEPAVQKLASLRLGGAEPRLLRWDLTFSPPQKSLPVALESDEENGDELKSSTGSAPILVVMVILLNIGVAILFINFFI

SEQ ID NO: 22476 - protein, 188 aa, Homo sapiens
MSSGGRFNFDDGGSYCGGWEDGKAHGHGVCTGPKGQGEYTGSWSHGFEVLGVYTWPSGNTYQGTWAQGKRHGIGLESKGKWVYKGEWTHGFKGRYGVRECAGNGAKYEGTWSNGLQDGYGTETYSDGDATAFGAEPGPEARELPAAAAAAAAAAAAAAAVRWFLCREPWPALQLPACLDSPISTPQCT

SEQ ID NO: 22477 - protein, 1575 aa, Homo sapiens
MPHEELPSLQRPRYGSIVDDERLSAEEMDERRRQNIAYEYLCHLEEAKRWMEVCLVEELPPTTELEEGLRNGVYLAKLAKFFAPKMVSEKKIYDVEQTRYKKSGLHFRHTDNTVQWLRAMESIGLPKIFYPETTDVYDRKNIPRMIYCIHALSLYLFKLGIAPQIQDLLGKVDFTEEEISNMRKELEKYGIQMPSFSKIGGILANELSVDEAALHAAVIAINEAVEKGIAEQTVVTLRNPNAVLTLVDDNLAPEYQKELWDAKKKKEENARLKNSCISEEERDAYEELLTQAEIQGNINKVNRQAAVDHINAVIPEGDPENTLLALKKPEAQLPAVYPFAAAMYQNELFNLQKQNTMNYLAHEELLIAVEMLSAVALLNQALESNDLVSVQNQLRSPAIGLNNLDKAYVERYANTLLSVKLEVLSQGQDNLSWNEIQNCIDMVNAQIQEENDRVVAVGYINEAIDEGNPLRTLETLLLPTANISDVDPAHAQHYQDVLYHAKSQKLGDSESVSKVLWLDEIQQAVDDANVDKDRAKQWVTLVVDVNQCLEGKKSSDILSVLKSSTSNANDIIPECADKYYDALVKAKELKSERVSSDGSWLKLNLHKKYDYYYNTDSKESSWVTPESCLYKESWLTGKEIEDIIEEVTVGYIRENIWSASEELLLRFQATSSGPILREEFEARKSFLHEQEENVVKIQAFWKGYKQRKEYMHRRQTFIDNTDSIVKIQSWFRMATARKSYLSRLQYFRDHNNEIVKIQSLLRANKARDDYKTLVGSENPPLTVIRKFVYLLDQSDLDFQEELEVARLREEVVTKIRANQQLEKDLNLMDIKIGLLVKNRITLEDVISHSKKLNKKKGGEMEILNNTDNQGIKSLSKERRKTLETYQQLFYLLQTNPLYLAKLIFQMPQNKSTKFMDTVIFTLYNYASNQREEYLLLKLFKTALEEEIKSKVDQVQDIVTGNPTVIKMVVSFNRGARGQNTLRQLLAPVVKEIIDDKSLIINTNPVEVYKAWVNQLETQTGEASKLPYDVTTEQALTYPEVKNKLEASIENLRRVTDKVLNSIISSLDLLPYGLRYIAKVLKNSIHEKFPDATEDELLKIVGNLLYYRYMNPAIVAPDGFDIIDMTAGGQINSDQRRNLGSVAKVLQHAASNKLFEGENEHLSSMNNYLSETYQEFRKYFKEACNVPEPEEKFNMDKYTDLVTVSKPVIYISIEEIISTHSLLLEHQDAIAPEKNDLLSELLGSLGEVPTVESFLGEGAVDPNDPNKANTLSQLSKTEISLVLTSKYDIEDGEAIDSRSLMIKTKKLIIDVIRNQPGNTLTEILETPATAQQEVDHATDMVSRAMIDSRTPEEMKHSQSMIEDAQLPLEQKKRKIQRNLRTLEQTGHVSSENKYQDILNEIAKDIRNQRIYRKLRKAELAKLQQTLNALNKKAAFYEEQINYYDTYIKTCLDNLKRKNTRRSIKLDGKGEPKGAKRAKPVKYTAAKLHEKGVLLDIDDLQTNQFKNVTFDIIATEDVGIFDVRSKFLGVEMEKVQLNIQDLLQMQYEGVAVMKMFDKVKVNVNLLIYLLNKKFYGK

SEQ ID NO: 22478 - protein, 1071 aa, Homo sapiens
MHSLPGVVAVGYINEAIDEGNPLRTLETLLLPTANISDVDPAHAQHYQDVLYHAKSQKLGDSESVSKVLWLDEIQQAVDDANVDKDRAKQWVTLVVDVNQCLEGKKSSDILSVLKSSTSNANDIIPECADKYYDALVKAKELKSERVSSDGSWLKLNLHKKYDYYYNTDSKESSWVTPESCLYKESWLTGKEIEAFWKGYKQRKEYMHRRQTFIDNTDSIVKIQSWFRMATARKSYLSRLQYFRDHNNEIVKIQSLLRANKARDDYKTLVGSENPPLTVIRKFVYLLDQSDLDFQEELEVARLREEVVTKIRANQQLEKDLNLMDIKIGLLVKNRITLEDVISHSKKLNKKKGGEMEILNNTDNQGIKSLSKERRKTLETYQQLFYLLQTNPLYLAKLIFQMPQNKSTKFMDTVIFTLYNYASNQREEYLLLKLFKTALEEEIKSKVDQVQDIVTGNPTVIKMVVSFNRGARGQNTLRQLLAPVVKEIIDDKSLIINTNPVEVYKAWVNQLETQTGEASKLPYDVTTEQALTYPEVKNKLEASIENLRRVTDKVLNSIISSLDLLPYGLRYIAKVLKNSIHEKFPDATEDELLKIVGNLLYYRYMNPAIVAPDGFDIIDMTAGGQINSDQRRNLGSVAKVLQHAASNKLFEGENEHLSSMNNYLSETYQEFRKYFKEACNVPEPEEKFNMDKYTDLVTVSKPVIYISIEEIISTHSLLLEHQDAIAPEKNDLLSELLGSLGEVPTVESFLGEGAVDPNDPNKANTLSQLSKTEISLVLTSKYDIEDGEAIDSRSLMIKTKKLIIDVIRNQPGNTLTEILETPATAQQEVDHATDMVSRAMIDSRTPEEMKHSQSMIEDAQLPLEQKKRKIQRNLRTLEQTGHVSSENKYQDILNEIAKDIRNQRIYRKLRKAELAKLQQTLNALNKKAAFYEEQINYYDTYIKTCLDNLKRKNTRRSIKLDGKGEPKGAKRAKPVKYTAAKLHEKGVLLDIDDLQTNQFKNVTFDIIATEDVGIFDVRSKFLGVEMEKVQLNIQDLLQMQYEGVAVMKMFDKVKVNVNLLIYLLNKKFYGK

SEQ ID NO: 22479 - protein, 1071 aa, Homo sapiens
MGCFKGVVAVGYINEAIDEGNPLRTLETLLLPTANISDVDPAHAQHYQDVLYHAKSQKLGDSESVSKVLWLDEIQQAVDDANVDKDRAKQWVTLVVDVNQCLEGKKSSDILSVLKSSTSNANDIIPECADKYYDALVKAKELKSERVSSDGSWLKLNLHKKYDYYYNTDSKESSWVTPESCLYKESWLTGKEIEAFWKGYKQRKEYMHRRQTFIDNTDSIVKIQSWFRMATARKSYLSRLQYFRDHNNEIVKIQSLLRANKARDDYKTLVGSENPPLTVIRKFVYLLDQSDLDFQEELEVARLREEVVTKIRANQQLEKDLNLMDIKIGLLVKNRITLEDVISHSKKLNKKKGGEMEILNNTDNQGIKSLSKERRKTLETYQQLFYLLQTNPLYLAKLIFQMPQNKSTKFMDTVIFTLYNYASNQREEYLLLKLFKTALEEEIKSKVDQVQDIVTGNPTVIKMVVSFNRGARGQNTLRQLLAPVVKEIIDDKSLIINTNPVEVYKAWVNQLETQTGEASKLPYDVTTEQALTYPEVKNKLEASIENLRRVTDKVLNSIISSLDLLPYGLRYIAKVLKNSIHEKFPDATEDELLKIVGNLLYYRYMNPAIVAPDGFDIIDMTAGGQINSDQRRNLGSVAKVLQHAASNKLFEGENEHLSSMNNYLSETYQEFRKYFKEACNVPEPEEKFNMDKYTDLVTVSKPVIYISIEEIISTHSLLLEHQDAIAPEKNDLLSELLGSLGEVPTVESFLGEGAVDPNDPNKANTLSQLSKTEISLVLTSKYDIEDGEAIDSRSLMIKTKKLIIDVIRNQPGNTLTEILETPATAQQEVDHATDMVSRAMIDSRTPEEMKHSQSMIEDAQLPLEQKKRKIQRNLRTLEQTGHVSSENKYQDILNEIAKDIRNQRIYRKLRKAELAKLQQTLNALNKKAAFYEEQINYYDTYIKTCLDNLKRKNTRRSIKLDGKGEPKGAKRAKPVKYTAAKLHEKGVLLDIDDLQTNQFKNVTFDIIATEDVGIFDVRSKFLGVEMEKVQLNIQDLLQMQYEGVAVMKMFDKVKVNVNLLIYLLNKKFYGK

SEQ ID NO: 22480 - protein, 1657 aa, Homo sapiens
MSAADEVDGLGVARPHYGSVLDNERLTAEEMDERRRQNVAYEYLCHLEEAKRWMEACLGEDLPPTTELEEGLRNGVYLAKLGNFFSPKVVSLKKIYDREQTRYKATGLHFRHTDNVIQWLNAMDEIGLPKIFYPETTDIYDRKNMPRCIYCIHALSLYLFKLGLAPQIQDLYGKVDFTEEEINNMKTELEKYGIQMPAFSKIGGILANELSVDEAALHAAVIAINEAIDRRIPADTFAALKNPNAMLVNLEEPLASTYQDILYQAKQDKMTNAKNRTENSERERDVYEELLTQAEIQGNINKVNTFSALANIDLALEQGDALALFRALQSPALGLRGLQQQNSDWYLKQLLSDKQQKRQSGQTDPLQKEELQSGVDAANSAAQQYQRRLAAVALINAAIQKGVAEKTVLELMNPEAQLPQVYPFAADLYQKELATLQRQSPEHNLTHPELSVAVEMLSSVALINRALESGDVNTVWKQLSSSVTGLTNIEEENCQRYLDELMKLKAQAHAENNEFITWNDIQACVDHVNLVVQEEHERILAIGLINEALDEGDAQKTLQALQIPAAKLEGVLAEVAQHYQDTLIRAKREKAQEIQDESAVLWLDEIQGGIWQSNKDTQEAQKFALGIFAINEAVESGDVGKTLSALRSPDVGLYGVIPECGETYHSDLAEAKKKKLAVGDNNSKWVKHWVKGGYYYYHNLETQEGGWDEPPNFVQNSMQLSREEIQSSISGVTAAYNREQLWLANEGLITRLQARCRGYLVRQEFRSRMNFLKKQIPAITCIQSQWRGYKQKKAYQDRLAYLRSHKDEVVKIQSLARMHQARKRYRDRLQYFRDHINDIIKIQAFIRANKARDDYKTLINAEDPPMVVVRKFVHLLDQSDQDFQEELDLMKMREEVITLIRSNQQLENDLNLMDIKIGLLVKNKITLQDVVSHSKKLTKKNKEQLSDMMMINKQKGGLKALSKEKREKLEAYQHLFYLLQTNPTYLAKLIFQMPQNKSTKFMDSVIFTLYNYASNQREEYLLLRLFKTALQEEIKSKVDQIQEIVTGNPTVIKMVVSFNRGARGQNALRQILAPVVKEIMDDKSLNIKTDPVDIYKSWVNQMESQTGEASKLPYDVTPEQALAHEEVKTRLDSSIRNMRAVTDKFLSAIVSSVDKIPYGMRFIAKVLKDSLHEKFPDAGEDELLKIIGNLLYYRYMNPAIVAPDAFDIIDLSAGGQLTTDQRRNLGSIAKMLQHAASNKMFLGDNAHLSIINEYLSQSYQKFRRFFQTACDVPELQDKFNVDEYSDLVTLTKPVIYISIGEIINTHTLLLDHQDAIAPEHNDPIHELLDDLGEVPTIESLIGESSGNLNDPNKEALAKTEVSLTLTNKFDVPGDENAEMDARTILLNTKRLIVDVIRFQPGETLTEILETPATSEQEAEHQRAMQRRAIRDAKTPDKMKKSKSVKEDSNLTLQEKKEKIQTGLKKLTELGTVDPKNKYQELINDIARDIRNQRRYRQRRKAELVKLQQTYAALNSKATFYGEQVDYYKSYIKTCLDNLASKGKVSKKPREMKGKKSKKISLKYTAARLHEKGVLLEIEDLQVNQFKNVIFEISPTEEVGDFEVKAKFMGVQMETFMLHYQDLLQLQYEGVAVMKLFDRAKVNVNLLIFLLNKKFYGK

SEQ ID NO: 22481 - protein, 514 aa, Homo sapiens
MADYLISGGTSYVPDDGLTAQQLFNCGDGLTYNDFLILPGYIDFTADQVDLTSALTKKITLKTPLVSSPMDTVTEAGMAIAMALTGGIGFIHHNCTPEFQANEVRKVKKYEQGFITDPVVLSPKDRVRDVFEAKARHGFCGIPITDTGRMGSRLVGIISSRDIDFLKEEEHDCFLEEIMTKREDLVVAPAGITLKEANEILQRSKKGKLPIVNEDDELVAIIARTDLKKNRDYPLASKDAKKQLLCGAAIGTHEDDKYRLDLLAQAGVDVVVLDSSQGNSIFQINMIKYIKDKYPNLQVIGGNVVTAAQAKNLIDAGVDALRVGMGSGSICITQEVLACGRPQATAVYKVSEYARRFGVPVIADGGIQNVGHIAKALALGASTVMMGSLLAATTEAPGEYFFSDGIRLKKYRGMGSLDAMDKHLSSQNRYFSEADKIKVAQGVSGAVQDKGSIHKFVPYLIAGIQHSCQDIGAKSLTQVRAMMYSGELKFEKRTSSAQVEGGVHSLHSYEKRLF

SEQ ID NO: 22482 - protein, 152 aa, Homo sapiens
MIGIFHIFMWYFLLVLYMGQIKGAFGTYEPVTYKTGCTLWGIFFIIAGVFLIRVTKYPTRSGIISTLIINIICIITTITAVTLTIIELSHFNSVSYRNYGQAKLGREVSRILLFFYGLEFSIALTHSIYSCSNLFRRQNDLTSVTEEAESTP

SEQ ID NO: 22483 - protein, 112 aa, Homo sapiens
MIGIFHIFMWYFLLVLYMGQIKGAFGTYEPVTYKTGCTLWGIFFIIAGVFLIRVTKYPTRSGKLGREVSRILLFFYGLEFSIALTHSIYSCSNLFRRQNDLTSVTEEAESTP

SEQ ID NO: 22484 - protein, 93 aa, Homo sapiens
MIGIFHIFMWYFLLVLYMGQIKGAFGTYEPVTYKTGCTLWGIFKLGREVSRILLFFYGLEFSIALTHSIYSCSNLFRRQNDLTSVTEEAESTP

SEQ ID NO: 22485 - protein, 222 aa, Homo sapiens
MEIPPTNYPASRAALVAQNYINYQQGTPHRVFEVQKVKQASMEDIPGRGHKYHLKFAVEEIIQKQVKVNCTAEVLYPSTGQETAPEVNFTFEGETGKNPDEEDNTFYQRLKSMKEPLEAQNIPDNFGNVSPEMTLVLHLAWVACGYIIWQNSTEDTWYKMVKIQTVKQVQRNDDFIELDYTILLHNIASQEIIPWQMQVLWHPQYGTKVKHNSRLPKEVQLE

SEQ ID NO: 22486 - protein, 462 aa, Homo sapiens
MAKFRRRTCIILALFILFIFSLMMGLKMLRPNTATFGAPFGLDLLPELHQRTIHLGKNFDFQKSDRINSETNTKNLKSVEITMKPSKASELNLDELPPLNNYLHVFYYSWYGNPQFDGKYIHWNHPVLEHWDPRIAKNYPQGRHNPPDDIGSSFYPELGSYSSRDPSVIETHMRQMRSASIGVLALSWYPPDVNDENGEPTDNLVPTILDKAHKYNLKVTFHIEPYSNRDDQNMYKNVKYIIDKYGNHPAFYRYKTKTGNALPMFYVYDSYITKPEKWANLLTTSGSRSIRNSPYDGLFIALLVEEKHKYDILQSGFDGIYTYFATNGFTYGSSHQNWASLKLFCDKYNLIFIPSVGPGYIDTSIRPWNTQNTRNRINGKYYEIGLSAALQTRPSLISITSFNEWHEGTQIEKAVPKRTSNTVYLDYRPHKPGLYLELTRKWSEKYSKERATYALDRQLPVS

SEQ ID NO: 22487 - protein, 1027 aa, Homo sapiens
MAQNTENHDPVGSILIQIHEDLYQLKEKLTKFSPEEKGETLDIQSLETAIKRTEVGLRIHIEKYLNVVNQNVLTTSVNDESLYTPQASKWLLPTVIDQKSFIFPQESEGTFWQPQRQHSSSLPVFPRAKIKVSKLIKGSNISSLTVLPSSHCTDPYFTPIPVLQADAHKGILSMIERGLIPPTARITFQNPPITPRAAPLHSFDEARKIPTVATFTIPREPPPSPAEVKFFPKKQRSKGKSRRSRGHHDRKAMKVKTPLRALKSLWDYDFLIYDGVIDNTAPDFLAFKEHFSLAWGGIFSLLEHVEKFLRNYAIPEVKIKGNNLVALLPEFELTNKLTRYDLLSVLEDPAHVQMLINLPGQRYKGQDGNSEAAMKIQATWKCYKARKFFLFYRQQKWASGVIAIAWLLYCHKTRLKKILKESRQRHLENFRIRAKHLAANWNRIRTSRRTIIHIPSLGYSQPVREHIADFNTQQNMQLGRLCDILDANVNVIYICSHHMNDELVLYYKKILSLHAAVKSGNLEDRSDLQDRFKIITPEAVNIFPKHHMCLATHLMYSPKAIKRIKNLIRGTEAYIVSGLLHRDDLAVADMLDIPILGSEPELAHLYSTKSGGKRVFDSANVAVPPGIYDIYSQQQMIEQLSQLITDHLQIQRWLFKMDSEFRGNGTAFCDIPSYLKCYKWVLKESSRYGLEDWRKKWAQEPALVKISEELAGILAQHAQPVNEKRFPTWRKFLQTFLSQGGVIEAFPPADNVTNLTVDMLIEPNGKISVLSTGDQLHAESPFISSGTTVPQTSVDPQVLTYLCLQIGKACRMRDVVGYFSIDLVTFIDPSTLEQQVWATGLNLAYSDQLALTQLTLYLTNGHLDCSLSTLEVPRFVPKERKKTKCMSALSMPMLATSRYAVMTTQLRHSNLSLVFHYVFLQICRAHGIGYDVEERQGTVFILYEHLKRHKLGMLTIGEDLQGVLMTFARHLFIIHQEISAPNMQGETNFKTTIADIETILRVTKENKMRFEEEQQSKDDKNLSKPKK

SEQ ID NO: 22488 - protein, 684 aa, Homo sapiens
MKVKTPLRALKSLWDYDFLIYDGVIDNTAPDFLAFKEHFSLAWGGIFSLLEHVEKFLRNYAIPEVKIKGNNLVALLPEFELTNKLTRYDLLSVLEDPAHVQMLINLPGQRYKGQDGNSEAAMKIQATWKCYKARKFFLFYRQQKWASGVIAIAWLLYCHKTRLKKILKESRQRHLENFRIRAKHLAANWNRIRTSRRTIIHIPSLGYSQPVREHIADFNTQQNMQLGRLCDILDANVNVIYICSHHMNDELVLYYKKILSLHAAVKSGNLEDRSDLQDRFKIITPEAVNIFPMIEQLSQLITDHLQIQRWLFKMDSEFRGNGTAFCDIPSYLKCYKWVLKESSRYGLEDWRKKWAQEPALVKISEELAGILAQHAQPVNEKRFPTWRKFLQTFLSQGGVIEAFPPADNVTNLTVDMLIEPNGKISVLSTGDQLHAESPFISSGTTVPQTSVDPQVLTYLCLQIGKACRMRDVVGYFSIDLVTFIDPSTLEQQVWATGLNLAYSDQLALTQLTLYLTNGHLDCSLSTLEVPRFVPKERKKTKCMSALSMPMLATSRYAVMTTQLRHSNLSLVFHYVFLQICRAHGIGYDVEERQGTVFILYEHLKRHKLGMLTIGEDLQGVLMTFARHLFIIHQEISAPNMQGETNFKTTIADIETILRVTKENKMRFEEEQQSKDDKNLSKPKK

SEQ ID NO: 22489 - protein, 305 aa, Homo sapiens
MIERGLIPPTARITFQNPPITPRAAPLHSFDEARKIPTVATFTIPREPPPSPAEVKFFPKKQRSKGKSRRSRGHHDRKAMKVKTPLRALKSLWDYDFLIYDGVIDNTAPDFLAFKEHFSLAWGGIFSLLEHVEKFLRNYAIPEVKIKGNNLVALLPEFELTNKLTRYDLLSVLEDPAHVQMLINLPGQRYKGQDGNSEAAMKIQATWKCYKARKFFLFYRQQKWASGVIAIAWLLYCHKTRLKKILKESRQRHLENFRIRAKHLAANWNRIRTSRRTIIHIPSLGITLLPANLSATSITHHIMAP

SEQ ID NO: 22490 - protein, 621 aa, Homo sapiens
MTKAMKVKTPLRALKSLWDYDFLIYDGVIDNTAPDFLAFKEHFSLAWGGIFSLLEHVEKFLRNYAIPEVKIKGNNLVALLPEFELTNKLTRYDLLSVLEDPAHVQMLINLPGQRYKGQDGNSEAAMKIQATWKCYKARKFFLFYRQQKWASGVIAIAWLLYCHKTRLKKILKESRQRHLENFRIRAKHLAANWNRIRTSRRTIIHIPSLGYSQPVREHIADFNTQQNMQLGRLCDILDANVNVIYICSHHMNDELVLYYKKILSLHAAVKSGNLEDRSDLQDRFKIITPEAVNIFPMIEQLSQLITDHLQIQRWLFKMDSEFRGNGTAFCDIPSYLKCYKWVLKESSRYGLEDWRKKWAQEPALVKISEELAGILAQHAQPVNEKRFPTWRKFLQTFLSQGGVIEAFPPADNVTNLTVDMLIEPNGKISVLSTGDQLHAESPFISSGTTVPQTSVDPQVLTYLCLQIGKACRMRDVVGYFSIDLVTFIDPSTLEQQVWATGLNLAYSDQLALTQLTLYLTNGHLDCSLSTLEVPRFVPKERKKTKCMSALSMPMLATSRYAVMTTQLRHSNLSLVFHYVFLQICRAHGIGYDVENNRRGSPGGPHDLCSPSLHHPSRNIST

SEQ ID NO: 22491 - protein, 168 aa, Homo sapiens
MAQNTENHDPVGSILIQIHEDLYQLKEKLTKFSPEEKGETLDIQSLETAIKRTEVGLRIHIEKYLNVVNQNVLTTSVNDESLYTPQASKWLLPTVIDQKSFIFPQESEGTFWQPQRQHSSSLPVFPRAKRKIGLNVKILQDPENIHHRAAVNANYGISLPYINQRKAC

SEQ ID NO: 22492 - protein, 264 aa, Homo sapiens
MAPASRLLALWALAAVALPGSGAEGDGGWRPGGPGAVAEEERCTVERRADLTYAEFVQQYAFVRPVILQGLTDNSRFRALCSRDRLLASFGDRVVRLSTANTYSYHKVDLPFQEYVEQLLHPQDPTSLGNDTLYFFGDNNFTEWASLFRHYSPPPFGLLGTAPAYSFGIAGAGSGVPFHWHGPGYSEVIYGRKRWFLYPPEKTPEFHPNKTTLAWLRDTYPALPPSARPLECTIRAGEVLYFPDRWWHATLNLDTSVFISTFLG

SEQ ID NO: 22493 - protein, 234 aa, Homo sapiens
MAPASRLLALWALAAVALPGSGAEGDGGWYAFVRPVILQGLTDNSRFRALCSRDRLLASFGDRVVRLSTANTYSYHKVDLPFQEYVEQLLHPQDPTSLGNDTLYFFGDNNFTEWASLFRHYSPPPFGLLGTAPAYSFGIAGAGSGVPFHWHGPGYSEVIYGRKRWFLYPPEKTPEFHPNKTTLAWLRDTYPALPPSARPLECTIRAGEVLYFPDRWWHATLNLDTSVFISTFLG

SEQ ID NO: 22494 - protein, 530 aa, Homo sapiens
MHPGRTTGKGPSTHTQIDQQPPRLLIVHIALPSWADICTNLCEALQNFFSLACSLMGPSRMSLFSLYMVQDQHECILPFVQVKGNFARLQTCISELRMLQREGCFRSQGASLRLAVEDGLQQFKQYSRHVTTRAALTYTSLEITILTSQPGKEVVKQLEEGLKDTDLARVRRFQVVEVTKGILEHVDSASPVEDTSNDESSILGTDIDLQTIDNDIVSMEIFFKAWLHNSGTDQEQIHLLLSSQCFSNISRPRDNPMCLKCDLQERLLCPSLLAGTADGSLRMDDPKGDFITLYQMASQSSASHYKLQVIKALKSSGLCESLTYGLPFILRPTSCWQLDWDELETNQQHFHALCHSLLKREWLLLAKGEPPGPGHSQRIPASTFYVIMPSHSLTLLVKAVATRELMLPSTFPLLPEDPHDDSLKNVESMLDSLELEPTYNPLHVQSHLYSHLSSIYAKPQGRLHPHWESRAPRKHPCKTGQLQTNRARATVAPLPMTPVPGRASKMPAASKSSSDAFFLPSEWEKDPSRP

SEQ ID NO: 22495 - protein, 365 aa, Homo sapiens
MHPGRTTGKGPSTHTQIDQQPPRLLIVHIALPSWADICTNLCEALQNFFSLACSLMGPSRMSLFSLYMVQDQHECILPFVQVKGNFARLQTCISELRMLQREGCFRSQGASLRLAVEDGLQQFKQYSRHVTTRAALTYTSLEITILTSQPGKEVVKQLEEGLKDTDLARVRRFQVVEVTKGILEHVDSASPVEDTSNDESSILGTDIDLQTIDNDIVSMEIFFKAWLHNSGTDQEQIHLLLSSQCFSNISRPRDNPMCLKCDLQERLLCPSLLAGTADGSLRMDDPKGDFITLYQMASQSSASHYKLQVIKALKSSGLCESLTYGLPFILRPTSCWQLDWDELETNQQHFHALCHSLLVSTHVPR

SEQ ID NO: 22496 - protein, 179 aa, Homo sapiens
MDDPKGDFITLYQMASQSSASHYKLQVIKALKSSGLCESLTYGLPFILRPTSCWQLDWDELETNQQHFHALCHSLLSMLDSLELEPTYNPLHVQSHLYSHLSSIYAKPQGRLHPHWESRAPRKHPCKTGQLQTNRARATVAPLPMTPVPGRASKMPAASKSSSDAFFLPSEWEKDPSRP

SEQ ID NO: 22497 - protein, 526 aa, Homo sapiens
MHPGRTTGKGPSTHTQIDQQPPRLLIVHIALPSWADICTNLCEALQNFFSLACSLMGPSRMSLFSLYMVQDQHECILPFVQVKGNFARLQTCISELRMLQREGCFRSQGASLRLAVEDGLQQFKQYSRHVTTRAALTYTSLEITILTSQPGKEVVKQLEEGLKDTDLARVRRFQVVEVTKGILEHVDSASPVEDTSNDESSILGTDIDLQTIDNDIVSMEIFFKAWLHNSGTDQEQIHLLLSSQCFSNISRPRDNPMCLKCDLQERLLCPSLLAGTADGSLRMDDPKGDFITLYQMASQSSASHYKLQVIKALKSSGLCESLTYGLPFILRPTSCWQLDWDELETNQQHFHALCHSLLKREWLLLAKGEPPGPGHSQRIPASTFYVIMPSHSLTLLVKAVATRELMLPSTFPLLPEDPHDDSLKNVESMLDSLELEPTYNPLHVQSHLYSHLSSIYAKPQGRLHPHWESRAPRKTGQLQTNRARATVAPLPMTPVPGRASKMPAASKSSSDAFFLPSEWEKDPSRP

SEQ ID NO: 22498 - protein, 61 aa, Homo sapiens
MDPNCSCAAGGSYACAGSCKCKKCKCTSCKKSCCSCCPLGCAKCAQGCIRKGASEKCSCCA

SEQ ID NO: 22499 - protein, 378 aa, Homo sapiens
MVWGKICWFSQRAGWTVFAESQISLSCSLCLHSGDQEAQNPNLVSQLCGVFLQNETNETIHMQMSMAVGQQALPLNIIAPKAVLVSLCGVLLNGTVFWLLCCGATNPYMVYILHLVAADVIYLCCSAVGFLQVTLLTYHGVVFFIPDFLAILSPFSFEVCLCLLVAISTERCVCVLFPIWYRCHRPKYTSNVVCTLIWGLPFCINIVKSLFLTYWKHVKACVIFLKLSGLFHAILSLVMCVSSLTLLIRFLCCSQQQKATRVYAVVQISAPMFLLWALPLSVAPLITDFKMFVTTSYLISLFLIINSSANPIIYFFVGSLRKKRLKESLRVILQRALADKPEVGRNKKAAGIDPMEQPHSTQHVENLLPREHRVDVET

SEQ ID NO: 22500 - protein, 140 aa, Homo sapiens
MLPAAMKGLGLALLAVLLCSAPAHGLWCQDCTLTTNSSHCTPKQCQPSDTVCASVRITDPSSSRKDHSVNKMCASSCDFVKRHFFSDYLMGFINSGILKVDVDCCEKDLCNGAAGAGHSPWALAGGLLLSLGPALLWAGP

SEQ ID NO: 22501 - protein, 161 aa, Homo sapiens
MLAPQRTRAPSPRAAPRPTRSMLPAAMKGLGLALLAVLLCSAPAHGLWCQDCTLTTNSSHCTPKQCQPSDTVCASVRITDPSSSRKDHSVNKMCASSCDFVKRHFFSDYLMGFINSGILKVDVDCCEKDLCNGAAGAGHSPWALAGGLLLSLGPALLWAGP

SEQ ID NO: 22502 - protein, 340 aa, Homo sapiens
MHVAEVAVNVILLLSMGWTSDSLCSPTIFYRDCWIRRFPGLLINLEESQKLGAQFLKYYSESTGQKCSRSCCLRKDVSCNLAVFYHSPIHDNINCLHVHCPTLESCILEPGTSAILYNITDGIDPDLLVFEQSPTYLNTRSSSNRWDRLRILKAMNLDKQTTTINGMLPSTEAPSSTTHQDLVVNTNSTSYSKELTTDFWARFTSLNESITTKINKVSPSTDFISNPDNKTISPFFEPIDTKLSHMPVPPGLNSSKQLLNKTKGYNSRNHTSANEDEVSVTSKTWLVSVALCTSVIFLGCCIVILASGCCGKQQGQYKPGQRKSGSLQIKNRNHMKENSS

SEQ ID NO: 22503 - protein, 699 aa, Homo sapiens
MRWLLLYYALCFSLSKASAHTVELNNMFGQIQSPGYPDSYPSDSEVTWNITVPDGFRIKLYFMHFNLESSYLCEYDYVKVETEDQVLATFCGRETTDTEQTPGQEVVLSPGSFMSITFRSDFSNEERFTGFDAHYMAVDVDECKEREDEELSCDHYCHNYIGGYYCSCRFGYILHTDNRTCRVECSDNLFTQRTGVITSPDFPNPYPKSSECLYTIELEEGFMVNLQFEDIFDIEDHPEVPCPYDYIKIKVGPKVLGPFCGEKAPEPISTQSHSVLILFHSDNSGENRGWRLSYRAAGNECPELQPPVHGKIEPSQAKYFFKDQVLVSCDTGYKVLKDNVEMDTFQIECLKDGTWSNKIPTCKIVDCRAPGELEHGLITFSTRNNLTTYKSEIKYSCQEPYYKMLNNNTGIYTCSAQGVWMNKVLGRSLPTCLPVCGLPKFSRKLMARIFNGRPAQKGTTPWIAMLSHLNGQPFCGGSLLGSSWIVTAAHCLHQSLDPEDPTLRDSDLLSPSDFKIILGKHWRLRSDENEQHLGVKHTTLHPQYDPNTFENDVALVELLESPVLNAFVMPICLPEGPQQEGAMVIVSGWGKQFLQRFPETLMEIEIPIVDHSTCQKAYAPLKKKVTRDMICAGEKEGGKDACAGDSGGPMVTLNRERGQWYLVGTVSWGDDCGKKDRYGVYSYIHHNKDWIQRVTGVRN

SEQ ID NO: 22504 - protein, 728 aa, Homo sapiens
MRWLLLYYALCFSLSKASAHTVELNNMFGQIQSPGYPDSYPSDSEVTWNITVPDGFRIKLYFMHFNLESSYLCEYDYVKVETEDQVLATFCGRETTDTEQTPGQEVVLSPGSFMSITFRSDFSNEERFTGFDAHYMAVDVDECKEREDEELSCDHYCHNYIGGYYCSCRFGYILHTDNRTCRVECSDNLFTQRTGVITSPDFPNPYPKSSECLYTIELEEGFMVNLQFEDIFDIEDHPEVPCPYDYIKIKVGPKVLGPFCGEKAPEPISTQSHSVLILFHSDNSGENRGWRLSYRAAGNECPELQPPVHGKIEPSQAKYFFKDQVLVSCDTGYKVLKDNVEMDTFQIECLKDGTWSNKIPTCKIVDCRAPGELEHGLITFSTRNNLTTYKSEIKYSCQEPYYKMLNNNTGIYTCSAQGVWMNKVLGRSLPTCLPECGQPSRSLPSLVKRIIGGRNAEPGLFPWQALIVVEDTSRVPNDKWFGSGALLSASWILTAAHVLRSQRRDTTVIPVSKEHVTVYLGLHDVRDKSGAVNSSAARVVLHPDFNIQNYNHDIALVQLQEPVPLGPHVMPVCLPRLEPEGPAPHMLGLVAGWGISNPNVTVDEIISSGTRTLSDVLQYVKLPVVPHAECKTSYESRSGNYSVTENMFCAGYYEGGKDTCLGDSGGAFVIFDDLSQRWVVQGLVSWGGPEECGSKQVYGVYTKVSNYVDWVWEQMGLPQSVVEPQVER

SEQ ID NO: 22505 - protein, 380 aa, Homo sapiens
MRWLLLYYALCFSLSKASAHTVELNNMFGQIQSPGYPDSYPSDSEVTWNITVPDGFRIKLYFMHFNLESSYLCEYDYVKVETEDQVLATFCGRETTDTEQTPGQEVVLSPGSFMSITFRSDFSNEERFTGFDAHYMAVDVDECKEREDEELSCDHYCHNYIGGYYCSCRFGYILHTDNRTCRVECSDNLFTQRTGVITSPDFPNPYPKSSECLYTIELEEGFMVNLQFEDIFDIEDHPEVPCPYDYIKIKVGPKVLGPFCGEKAPEPISTQSHSVLILFHSDNSGENRGWRLSYRAAGNECPELQPPVHGKIEPSQAKYFFKDQVLVSCDTGYKVLKDNVEMDTFQIECLKDGTWSNKIPTCKKNEIDLESELKSEQVTE

SEQ ID NO: 22506 - protein, 615 aa, Homo sapiens
MSITFRSDFSNEERFTGFDAHYMAVDVDECKEREDEELSCDHYCHNYIGGYYCSCRFGYILHTDNRTCRVECSDNLFTQRTGVITSPDFPNPYPKSSECLYTIELEEGFMVNLQFEDIFDIEDHPEVPCPYDYIKIKVGPKVLGPFCGEKAPEPISTQSHSVLILFHSDNSGENRGWRLSYRAAGNECPELQPPVHGKIEPSQAKYFFKDQVLVSCDTGYKVLKDNVEMDTFQIECLKDGTWSNKIPTCKIVDCRAPGELEHGLITFSTRNNLTTYKSEIKYSCQEPYYKMLNNNTGIYTCSAQGVWMNKVLGRSLPTCLPECGQPSRSLPSLVKRIIGGRNAEPGLFPWQALIVVEDTSRVPNDKWFGSGALLSASWILTAAHVLRSQRRDTTVIPVSKEHVTVYLGLHDVRDKSGAVNSSAARVVLHPDFNIQNYNHDIALVQLQEPVPLGPHVMPVCLPRLEPEGPAPHMLGLVAGWGISNPNVTVDEIISSGTRTLSDVLQYVKLPVVPHAECKTSYESRSGNYSVTENMFCAGYYEGGKDTCLGDSGGAFVIFDDLSQRWVVQGLVSWGGPEECGSKQVYGVYTKVSNYVDWVWEQMGLPQSVVEPQVER

SEQ ID NO: 22507 - protein, 1766 aa, Homo sapiens
MGGKNKQRTKGNLRPSNSGRAAELLAKEQGTVPGFIGFGTSQSDLGYVPAIQGAEEIDSLVDSDFRMVLRKLSKKDVTTKLKAMQEFGTMCTERDTETVKGVLPYWPRIFCKISLDHDRRVREATQQAFEKLILKVKKQLAPYLKSLMGYWLMAQCDTYTPAAFAAKDAFEAAFPPSKQPEAIAFCKDEITSVLQDHLIKETPDTLSDPQTVPEEEREAKFYRVVTCSLLALKRLLCLLPDNELDSLEEKFKSLLSQNKFWKYGKHSVPQIRSAYFELVSALCQRIPQLMKEEASKVSPSVLLSIDDSDPIVCPALWEAVLYTLTTIEDCWLHVNAKKSVFPKLSTVIREGGRGLATVIYPYLLPFISKLPQSITNPKLDFFKNFLTSLVAGLSTERTKTSSLESSAVISAFFECLRFIMQQNLGEEEIEQMLVNDQLIPFIDAVLKDPGLQHGQLFNHLAETLSSWEAKADTEKDEKTAHNLENVLIHFWERLSEICVAKISEPEADVESVLGVSNLLQVLQKPKSSLKSSKKKNGKVRFADEILESNKENEKCVSSEGEKIEGWELTTEPSLTHNSSGLLSPLRKKPLEDLVCKLADISINYVNERKSEQHLRFLSTLLDSFSSSRVFKMLLGDEKQSIVQAKPLEIAKLVQKNPAVQFLYQKLIGWLNEDQRKDFGFLVDILYSALRCCDNDMERKKVLDDLTKVDLKWNSLLKIIEKACPSSDKHALVTPWLKGDILGEKLVNLADCLCNEDLESRVSSESHFSERWTLLSLVLSQHVKNDYLIGDVYVERIIVRLHETLFKTKKLSEAESSDSSVSFICDVAYNYFSSAKGCLLMPSSEDLLLTLFQLCAQSKEKTHLPDFLICKLKNTWLSGVNLLVHQTDSSYKESTFLHLSALWLKNQVQASSLDINSLQVLLSAVDDLLNTLLESEDSYLMGVYIGSVMPNDSEWEKMRQSLPMQWLHRPLLEGRLSLNYECFKTDFKEQDIKTLPSHLCTSALLSKMVLIALRKETVLENNELEKIIAELLYSLQWCEELDNPPIFLIGFCEILQKMNITYDNLRVLGNTSGLLQLLFNRSREHGTLWSLIIAKLILSRSISSDEVKPHYKRKESFFPLTEGNLHTIQSLCPFLSKEEKKEFSAQCIPALLGWTKKDLCSTNGGFGHLAIFNSCLQTKSIDDGELLHGILKIIISWKKEHEDIFLFSCNLSEASPEVLGVNIEIIRFLSLFLKYCSSPLAESEWDFIMCSMLAWLETTSENQALYSIPLVQLFACVSCDLACDLSAFFDSTTLDTIGNLPVNLISEWKEFFSQGIHSLLLPILVTVTGENKDVSETSFQNAMLKPMCETLTYISKEQLLSHKLPARLVADQKTNLPEYLQTLLNTLAPLLLFRARPVQIAVYHMLYKLMPELPQYDQDNLKSYGDEEEEPALSPPAALMSLLSIQEDLLENVLGCIPVGQIVTIKPLSEDFCYVLGYLLTWKLILTFFKAASSQLRALYSMYLRKTKSLNKLLYHLFRLMPENPTYAETAVEVPNKDPKTFFTEELQLSIRETTMLPYHIPHLACSVYHMTLKDLPAMVRLWWNSSEKRVFNIVDRFTSKYVSSVLSFQEISSVQTSTQLFNGMTVKARATTREVMATYTIEDIVIELIIQLPSNYPLGSIIVESGKRVGVAVQQWRNWMLQLSTYLTHQNGSIMEGLALWKNNVDKRFEGVEDCMICFSVIHGFNYSLPKKACRTCKKKFHSACLYKWFTSSNKSTCPLCRETFF

SEQ ID NO: 22508 - protein, 437 aa, Homo sapiens
MGGKNKQRTKGNLRPSNSGRAAELLAKEQGTVPGFIGFGTSQSDLGYVPAIQGAEEIDSLVDSDFRMVLRKLSKKDVTTKLKAMQEFGTMCTERDTETVKGVLPYWPRIFCKISLDHDRRVREATQQAFEKLILKVKKQLAPYLKSLMGYWLMAQCDTYTPAAFAAKDAFEAAFPPSKQPEAIAFCKDEITSVLQDHLIKETPDTLSDPQTVPEEEREAKFYRVVTCSLLALKRLLCLLPDNELDSLEEKFKSLLSQNKFWKYGKHSVPQIRSAYFELVSALCQRIPQLMKEEASKVSPSVLLSIDDSDPIVCPALWEAVLYTLTTIEDCWLHVNAKKSVFPKLSTVIREGGRGLATVIYPYLLPFISKLPQSITNPKLDFFKNFLTSLVAGLSTERTKTSSLESSAVISAFFECLRFIMQQNLGEEEIEQMLVNDQ

SEQ ID NO: 22509 - protein, 1812 aa, Homo sapiens
MDRVGGGKGPGGSYYRVSSSAARSRKLCPGRVNRGLSAQSTAATATMGGKNKQRTKGNLRPSNSGRAAELLAKEQGTVPGFIGFGTSQSDLGYVPAIQGAEEIDSLVDSDFRMVLRKLSKKDVTTKLKAMQEFGTMCTERDTETVKGVLPYWPRIFCKISLDHDRRVREATQQAFEKLILKVKKQLAPYLKSLMGYWLMAQCDTYTPAAFAAKDAFEAAFPPSKQPEAIAFCKDEITSVLQDHLIKETPDTLSDPQTVPEEEREAKFYRVVTCSLLALKRLLCLLPDNELDSLEEKFKSLLSQNKFWKYGKHSVPQIRSAYFELVSALCQRIPQLMKEEASKVSPSVLLSIDDSDPIVCPALWEAVLYTLTTIEDCWLHVNAKKSVFPKLSTVIREGGRGLATVIYPYLLPFISKLPQSITNPKLDFFKNFLTSLVAGLSTERTKTSSLESSAVISAFFECLRFIMQQNLGEEEIEQMLVNDQLIPFIDAVLKDPGLQHGQLFNHLAETLSSWEAKADTEKDEKTAHNLENVLIHFWERLSEICVAKISEPEADVESVLGVSNLLQVLQKPKSSLKSSKKKNGKVRFADEILESNKENEKCVSSEGEKIEGWELTTEPSLTHNSSGLLSPLRKKPLEDLVCKLADISINYVNERKSEQHLRFLSTLLDSFSSSRVFKMLLGDEKQSIVQAKPLEIAKLVQKNPAVQFLYQKLIGWLNEDQRKDFGFLVDILYSALRCCDNDMERKKVLDDLTKVDLKWNSLLKIIEKACPSSDKHALVTPWLKGDILGEKLVNLADCLCNEDLESRVSSESHFSERWTLLSLVLSQHVKNDYLIGDVYVERIIVRLHETLFKTKKLSEAESSDSSVSFICDVAYNYFSSAKGCLLMPSSEDLLLTLFQLCAQSKEKTHLPDFLICKLKNTWLSGVNLLVHQTDSSYKESTFLHLSALWLKNQVQASSLDINSLQVLLSAVDDLLNTLLESEDSYLMGVYIGSVMPNDSEWEKMRQSLPMQWLHRPLLEGRLSLNYECFKTDFKEQDIKTLPSHLCTSALLSKMVLIALRKETVLENNELEKIIAELLYSLQWCEELDNPPIFLIGFCEILQKMNITYDNLRVLGNTSGLLQLLFNRSREHGTLWSLIIAKLILSRSISSDEVKPHYKRKESFFPLTEGNLHTIQSLCPFLSKEEKKEFSAQCIPALLGWTKKDLCSTNGGFGHLAIFNSCLQTKSIDDGELLHGILKIIISWKKEHEDIFLFSCNLSEASPEVLGVNIEIIRFLSLFLKYCSSPLAESEWDFIMCSMLAWLETTSENQALYSIPLVQLFACVSCDLACDLSAFFDSTTLDTIGNLPVNLISEWKEFFSQGIHSLLLPILVTVTGENKDVSETSFQNAMLKPMCETLTYISKEQLLSHKLPARLVADQKTNLPEYLQTLLNTLAPLLLFRARPVQIAVYHMLYKLMPELPQYDQDNLKSYGDEEEEPALSPPAALMSLLSIQEDLLENVLGCIPVGQIVTIKPLSEDFCYVLGYLLTWKLILTFFKAASSQLRALYSMYLRKTKSLNKLLYHLFRLMPENPTYAETAVEVPNKDPKTFFTEELQLSIRETTMLPYHIPHLACSVYHMTLKDLPAMVRLWWNSSEKRVFNIVDRFTSKYVSSVLSFQEISSVQTSTQLFNGMTVKARATTREVMATYTIEDIVIELIIQLPSNYPLGSIIVESGKRVGVAVQQWRNWMLQLSTYLTHQNGSIMEGLALWKNNVDKRFEGVEDCMICFSVIHGFNYSLPKKACRTCKKKFHSACLYKWFTSSNKSTCPLCRETFF

SEQ ID NO: 22510 - protein, 165 aa, Homo sapiens
MALLALLLVVALPRVWTDANLTARQRDPEDSQRTDEGDNRVWCHVCERENTFECQNPRRCKWTEPYCVIAAVKIFPRFFMVAKQCSAGCAAMERPKPEEKRFLLEEPMPFFYLKCCKIRYCNLEGPPINSSVFKEYAGSMGESCGGLWLAILLLLASIAAGLSLS

SEQ ID NO: 22511 - protein, 105 aa, Homo sapiens
MALLALLLVVALPRVWTDANLTARQRDPEDSQRTDEGDNRVWCHVCERENTFECQNPRRCKWTEPYCVIAAVTVLRWLCSDGETQARGEAVSPGRAHALLLPQVL

SEQ ID NO: 22512 - protein, 138 aa, Homo sapiens
MERLVLTLCTLPLAVASAGCATTPARNLSCYQCFKVSSWTECPPTWCSPLDQVCISNEVVVSFKWSVRVLLSKRCAPRCPNDNMKFEWSPAPMVQGVITRRCCSWALCNRALTPQEGRWALRGGLLLQVGLSLLRALL

SEQ ID NO: 22513 - protein, 153 aa, Homo sapiens
MASPDPPATSYAPSDVPSGVALFLTIPFAFFLPELIFGFLVWTMVAATHIVYPLLQGWVMYVSLTSFLISLMFLLSYLFGFYKRFESWRVLDSLYHGTTGILYMSAAVLQVHATIVSEKLLDPRIYYINSAASFFAFIATLLYILHAFSIYYH

SEQ ID NO: 22514 - protein, 1722 aa, Homo sapiens
MRTGWATPRRPAGLLMLLFWFFDLAEPSGRAANDPFTIVHGNTGKCIKPVYGWIVADDCDETEDKLWKWVSQHRLFHLHSQKCLGLDITKSVNELRMFSCDSSAMLWWKCEHHSLYGAARYRLALKDGHGTAISNASDVWKKGGSEESLCDQPYHEIYTRDGNSYGRPCEFPFLIDGTWHHDCILDEDHSGPWCATTLNYEYDRKWGICLKPENGCEDNWEKNEQFGSCYQFNTQTALSWKEAYVSCQNQGADLLSINSAAELTYLKEKEGIAKIFWIGLNQLYSARGWEWSDHKPLNFLNWDPDRPSAPTIGGSSCARMDAESGLWQSFSCEAQLPYVCRKPLNNTVELTDVWTYSDTRCDAGWLPNNGFCYLLVNESNSWDKAHAKCKAFSSDLISIHSLADVEVVVTKLHNEDIKEEVWIGLKNINIPTLFQWSDGTEVTLTYWDENEPNVPYNKTPNCVSYLGELGQWKVQSCEEKLKYVCKRKGEKLNDASSDKMCPPDEGWKRHGETCYKIYEDEVPFGTNCNLTITSRFEQEYLNDLMKKYDKSLRKYFWTGLRDVDSCGEYNWATVGGRRRAVTFSNWNFLEPASPGGCVAMSTGKSVGKWEVKDCRSFKALSICKKMSGPLGPEEASPKPDDPCPEGWQSFPASLSCYKVFHAERIVRKRNWEEAERFCQALGAHLSSFSHVDEIKEFLHFLTDQFSGQHWLWIGLNKRSPDLQGSWQWSDRTPVSTIIMPNEFQQDYDIRDCAAVKVFHRPWRRGWHFYDDREFIYLRPFACDTKLEWVCQIPKGRTPKTPDWYNPDRAGIHGPPLIIEGSEYWFVADLHLNYEEAVLYCASNHSFLATITSFVGLKAIKNKIANISGDGQKWWIRISEWPIDDHFTYSRYPWHRFPVTFGEECLYMSAKTWLIDLGKPTDCSTKLPFICEKYNVSSLEKYSPDSAAKVQCSEQWIPFQNKCFLKIKPVSLTFSQASDTCHSYGGTLPSVLSQIEQDFITSLLPDMEATLWIGLRWTAYEKINKWTDNRELTYSNFHPLLVSGRLRIPENFFEEESRYHCALILNLQKSPFTGTWNFTSCSERHFVSLCQKYSEVKSRQTLQNASETVKYLNNLYKIIPKTLTWHSAKRECLKSNMQLVSITDPYQQAFLSVQALLHNSSLWIGLFSQDDELNFGWSDGKRLHFSRWAETNGQLEDCVVLDTDGFWKTVDCNDNQPGAICYYSGNETEKEVKPVDSVKCPSPVLNTPWIPFQNCCYNFIITKNRHMATTQDEVHTKCQKLNPKSHILSIRDEKENNFVLEQLLYFNYMASWVMLGITYRNKSLMWFDKTPLSYTHWRAGRPTIKNEKFLAGLSTDGFWDIQTFKVIEEAVYFHQHSILACKIEMVDYKEEYNTTLPQFMPYEDGIYSVIQKKVTWYEALNMCSQSGGHLASVHNQNGQLFLEDIVKRDGFPLWVGLSSHDGSESSFEWSDGSTFDYIPWKGQTSPGNCVLLDPKGTWKHEKCNSVKDGAICYKPTKSKKLSRLTYSSRCPAAKENGSRWIQYKGHCYKSDQALHSFSEAKKLCSKHDHSATIVSIKDEDENKFVSRLMRENNNITMRVWLGLSQHSVDQSWSWLDGSEVTFVKWENKSKSGVGRCSMLIASNETWKKVECEHGFGRVVCKVPLGPDYTAIAIIVATLSILVLMGGLIWFLFQRHRLHLAGFSSVRYAQGVNEDEIMLPSFHD

SEQ ID NO: 22515 - protein, 1873 aa, Homo sapiens
MRTGWATPRRPAGLLMLLFWFFDLAEPSGRAANDPFTIVHGNTGKCIKPVYGWIVADDCDETEDKLWKWVSQHRLFHLHSQKCLGLDITKSVNELRMFSCDSSAMLWWKCEHHSLYGAARYRLALKDGHGTAISNASDVWKKGGSEESLCDQPYHEIYTRDGNSYGRPCEFPFLIDGTWHHDCILDEDHSGPWCATTLNYEYDRKWGICLKPENGCEDNWEKNEQFGSCYQFNTQTALSWKEAYVSCQNQGADLLSINSAAELTYLKEKEGIAKIFWIGLNQLYSARGWEWSDHKPLNFLNWDPDRPSAPTIGGSSCARMDAESGLWQSFSCEAQLPYVCRKPLNNTVELTDVWTYSDTRCDAGWLPNNGFCYLLVNESNSWDKAHAKCKAFSSDLISIHSLADVEVVVTKLHNEDIKEEVWIGLKNINIPTLFQWSDGTEVTLTYWDENEPNVPYNKTPNCVSYLGELGQWKVQSCEEKLKYVCKRKGEKLNDASSDKMCPPDEGWKRHGETCYKIYEDEVPFGTNCNLTITSRFEQEYLNDLMKKYDKSLRKYFWTGLRDVDSCGEYNWATVGGRRRAVTFSNWNFLEPASPGGCVAMSTGKSVGKWEVKDCRSFKALSICKKMSGPLGPEEASPKPDDPCPEGWQSFPASLSCYKVFHAERIVRKRNWEEAERFCQALGAHLSSFSHVDEIKEFLHFLTDQFSGQHWLWIGLNKRSPDLQGSWQWSDRTPVSTIIMPNEFQQDYDIRDCAAVKVFHRPWRRGWHFYDDREFIYLRPFACDTKLEWVCQIPKGRTPKTPDWYNPDRAGIHGPPLIIEGSEYWFVADLHLNYEEAVLYCASNHSFLATITSFVGLKAIKNKIANISGDGQKWWIRISEWPIDDHFTYSRYPWHRFPVTFGEECLYMSAKTWLIDLGKPTDCSTKLPFICEKYNVSSLEKYSPDSAAKVQCSEQWIPFQNKCFLKIKPVSLTFSQASDTCHSYGGTLPSVLSQIEQDFITSLLPDMEATLWIGLRWTAYEKINKWTDNRELTYSNFHPLLVSGRLRIPENFFEEESRYHCALILNLQKSPFTGTWNFTSCSERHFVSLCQKYSEVKSRQTLQNASETVKYLNNLYKIIPKTLTWHSAKRECLKSNMQLVSITDPYQQAFLSVQALLHNSSLWIGLFSQDDELNFGWSDGKRLHFSRWAETNGQLEDCVVLDTDGFWKTVDCNDNQPGAICYYSGNETEKEVKPVDSVKCPSPVLNTPWIPFQNCCYNFIITKNRHMATTQDEVHTKCQKLNPKSHILSIRDEKENNFVLEQLLYFNYMASWVMLGITYRNKSLMWFDKTPLSYTHWRAGRPTIKNEKFLAGLSTDGFWDIQTFKVIEEAVYFHQHSILACKIEMVDYKEEYNTTLPQFMPYEDGIYSVIQKKVTWYEALNMCSQSGGHLASVHNQNGQLFLEDIVKRDGFPLWVGLSSHDGSESSFEWSDGSTFDYIPWKGQTSPGNCVLLDPKGTWKHEKCNSVKDGAICYKPTKSKKLSRLTYSSRCPAAKENGSRWIQYKGHCYKSDQALHSFSEAKKLCSKHDHSATIVSIKDEDENKFVSRLMRENNNITMRVWLGLSQHSVDQSWSWLDGSEVTFVKWENKSKSGVGRCSMLIASNETWKKVECEHGFGRVVCKVPLDCPSSTWIQFQDSCYIFLQEAIKVESIEDVRNQCTDHGADMISIHNEEENAFILDTLKKQWKGPDDILLGMFYDTDDASFKWFDNSNMTFDKWTDQDDDEDLVDTCAFLHIKTGEWKKGNCEVSSVEGTLCKTAIPYKRKYLSDNHILISALVIASTVILTVLGAIIWFLYKKHSDSRFTTVFSTAPQSPYNEDCVLVVGEENEYPVQFD

SEQ ID NO: 22516 - protein, 1817 aa, Homo sapiens
MRTGWATPRRPAGLLMLLFWFFDLAEPSGRAANDPFTIVHGNTGKCIKPVYGWIVADDCDETEDKLWKWVSQHRLFHLHSQKCLGLDITKSVNELRMFSCDSSAMLWWKCEHHSLYGAARYRLALKDGHGTAISNASDVWKKGGSEESLCDQPYHEIYTRDGNSYGRPCEFPFLIDGTWHHDCILDEDHSGPWCATTLNYEYDRKWGICLKPENGCEDNWEKNEQFGSCYQFNTQTALSWKEAYVSCQNQGADLLSINSAAELTYLKEKEGIAKIFWIGLNQLYSARGWEWSDHKPLNFLNWDPDRPSAPTIGGSSCARMDAESGLWQSFSCEAQLPYVCRKPLNNTVELTDVWTYSDTRCDAGWLPNNGFCYLLVNESNSWDKAHAKCKAFSSDLISIHSLADVEVVVTKLHNEDIKEEVWIGLKNINIPTLFQWSDGTEVTLTYWDENEPNVPYNKTPNCVSYLGELGQWKVQSCEEKLKYVCKRKGEKLNDASSDKMCPPDEGWKRHGETCYKIYEDEVPFGTNCNLTITSRFEQEYLNDLMKKYDKSLRKYFWTGLRDVDSCGEYNWATVGGRRRAVTFSNWNFLEPASPGGCVAMSTGKSVGKWEVKDCRSFKALSICKKMSGPLGPEEASPKPDDPCPEGWQSFPASLSCYKVFHAERIVRKRNWEEAERFCQALGAHLSSFSHVDEIKEFLHFLTDQFSGQHWLWIGLNKRSPDLQGSWQWSDRTPVSTIIMPNEFQQDYDIRDCAAVKVFHRPWRRGWHFYDDREFIYLRPFACDTKLEWVCQIPKGRTPKTPDWYNPDRAGIHGPPLIIEGSEYWFVADLHLNYEEAVLYCASNHSFLATITSFVGLKAIKNKIANISGDGQKWWIRISEWPIDDHFTYSRYPWHRFPVTFGEECLYMSAKTWLIDLGKPTDCSTKLPFICEKYNVSSLEKYSPDSAAKVQCSEQWIPFQNKCFLKIKPVSLTFSQASDTCHSYGGTLPSVLSQIEQDFITSLLPDMEATLWIGLRWTAYEKINKWTDNRELTYSNFHPLLVSGRLRIPENFFEEESRYHCALILNLQKSPFTGTWNFTSCSERHFVSLCQKYSEVKSRQTLQNASETVKYLNNLYKIIPKTLTWHSAKRECLKSNMQLVSITDPYQQAFLSVQALLHNSSLWIGLFSQDDELNFGWSDGKRLHFSRWAETNGQLEDCVVLDTDGFWKTVDCNDNQPGAICYYSGNETEKEVKPVDSVKCPSPVLNTPWIPFQNCCYNFIITKNRHMATTQDEVHTKCQKLNPKSHILSIRDEKENNFVLEQLLYFNYMASWVMLGITYRNKSLMWFDKTPLSYTHWRAGRPTIKNEKFLAGLSTDGFWDIQTFKVIEEAVYFHQHSILACKIEMVDYKEEYNTTLPQFMPYEDGIYSVIQKKVTWYEALNMCSQSGGHLASVHNQNGQLFLEDIVKRDGFPLWVGLSSHDGSESSFEWSDGSTFDYIPWKGQTSPGNCVLLDPKGTWKHEKCNSVKDGAICYKPTKSKKLSRLTYSSRCPAAKENGSRWIQYKGHCYKSDQALHSFSEAKKLCSKHDHSATIVSIKDEDENKFVSRLMRENNNITMRVWLGLSQHSVDCPSSTWIQFQDSCYIFLQEAIKVESIEDVRNQCTDHGADMISIHNEEENAFILDTLKKQWKGPDDILLGMFYDTDDASFKWFDNSNMTFDKWTDQDDDEDLVDTCAFLHIKTGEWKKGNCEVSSVEGTLCKTAIPYKRKYLSDNHILISALVIASTVILTVLGAIIWFLYKKHSDSRFTTVFSTAPQSPYNEDCVLVVGEENEYPVQFD

SEQ ID NO: 22517 - protein, 686 aa, Homo sapiens
MRLLTLLGLLCGSVATPLGPKWPEPVFGRLASPGFPGEYANDQERRWTLTAPPGYRLRLYFTHFDLELSHLCEYDFVKLSSGAKVLATLCGQESTDTERAPGKDTFYSLGSSLDITFRSDYSNEKPFTGFEAFYAAEDIDECQVAPGEAPTCDHHCHNHLGGFYCSCRAGYVLHRNKRTCSALCSGQVFTQRSGELSSPEYPRPYPKLSSCTYSISLEEGFSVILDFVESFDVETHPETLCPYDFLKIQTDREEHGPFCGKTLPHRIETKSNTVTITFVTDESGDHTGWKIHYTSTAQPCPYPMAPPNGHVSPVQAKYILKDSFSIFCETGYELLQGHLPLKSFTAVCQKDGSWDRPMPACSIVDCGPPDDLPSGRVEYITGPGVTTYKAVIQYSCEETFYTMKVNDGKYVCEADGFWTSSKGEKSLPVCEPVCGLSARTTGGRIYGGQKAKPGDFPWQVLILGGTTAAGALLYDNWVLTAAHAVYEQKHDASALDIRMGTLKRLSPHYTQAWSEAVFIHEGYTHDAGFDNDIALIKLNNKVVINSNITPICLPRKEAESFMRTDDIGTASGWGLTQRGFLARNLMYVDIPIVDHQKCTAAYEKPPYPRGSVTANMLCAGLESGGKDSCRGDSGGALVFLDSETERWFVGGIVSWGSMNCGEAGQYGVYTKVINYIPWIENIISDF

SEQ ID NO: 22518 - protein, 185 aa, Homo sapiens
MRLLTLLGLLCGSVATPLGPKWPEPVFGRLASPGFPGEYANDQERRWTLTAPPGYRLRLYFTHFDLELSHLCEYDFVKLSSGAKVLATLCGQESTDTERAPGKDTFYSLGSSLDITFRSDYSNEKPFTGFEAFYAAEDIDECQVAPGEAPTCDHHCHNHLGGFYCSCRAGYVLHRNKRTCSEQSL

SEQ ID NO: 22519 - protein, 162 aa, Homo sapiens
MKGFTATLFLWTLIFPSCSGGGGGKAWPTHVVCSDSGLEVLYQSCDPLQDFGFSVEKCSKQLKSNINIRFGIILREDIKELFLDLALMSQGSSVLNFSYPICEAALPKFSFCGRRKGEQIYYAGPVNNPEFTIPQGEYQVLLELYTEKRSTVACANATIMCS

SEQ ID NO: 22520 - protein, 137 aa, Homo sapiens
MAGSQDIFDAIVMADERFHGEGYREGYEEGSSLGVMEGRQHGTLHGAKIGSEIGCYQGFAFAWKCLLHSCTTEKDSRKMKVLESLIGMIQKFPYDDPTYDKLHEDLDKIRGKFKQFCSLLNVQPDFKISAEGSGLSF

SEQ ID NO: 22521 - protein, 1570 aa, Homo sapiens
MSDSLWTALSNFSMPSFPGGSMFRRTKSCRTSNRKSLILTSTSPTLPRPHSPLPGHLGSSPLDSPRNFSPNTPAHFSFASSRRADGRRWSLASLPSSGYGTNTPSSTVSSSCSSQERLHQLPYQPTVDELHFLSKHFGSTESITDEDGGRRSPAVRPRSRSLSPGRSPSSYDNEIVMMNHVYKERFPKATAQMEEKLRDFTRAYEPDSVLPLADGVLSFIHHQIIELARDCLTKSRDGLITTVYFYELQENLEKLLQDAYERSESLEVAFVTQLVKKLLIIISRPARLLECLEFNPEEFYHLLEAAEGHAKEGHLVKTDIPRYIIRQLGLTRDPFPDVVHLEEQDSGGSNTPEQDDLSEGRSSKAKKPPGENDFDTIKLISNGAYGAVYLVRHRDTRQRFAMKKINKQNLILRNQIQQAFVERDILTFAENPFVVGMFCSFETRRHLCMVMEYVEGGDCATLLKNIGALPVEMARMYFAETVLALEYLHNYGIVHRDLKPDNLLITSMGHIKLTDFGLSKMGLMSLTTNLYEGHIEKDAREFLDKQVCGTPEYIAPEVILRQGYGKPVDWWAMGIILYEFLVGCVPFFGDTPEELFGQVISDDILWPEGDEALPTEAQLLISSLLQTNPLVRLGAGGAFEVKQHSFFRDLDWTGLLRQKAEFIPHLESEDDTSYFDTRSDRYHHVNSYDEDDTTEEEPVEIRQFSSCSPRFSKVYSSMEQLSQHEPKTPVAAAGSSKREPSTKGPEEKVAGKREGLGGLTLREKTWRGGSPEIKRFSASEASFLEGEASPPLGARRRFSALLEPSRFSAPQEDEDEARLRRPPRPSSDPAGSLDARAPKEETQGEGTSSAGDSEATDRPRPGDLCPPSKDGDASGPRATNDLVLRRARHQQMSGDVAVEKRPSRTGGKVIKSASATALSVMIPAVDPHGSSPLASPMSPRSLSSNPSSRDSSPSRDYSPAVSGLRSPITIQRSGKKYGFTLRAIRVYMGDTDVYSVHHIVWHVEEGGPAQEAGLCAGDLITHVNGEPVHGMVHPEVVELILKSGNKVAVTTTPFENTSIRIGPARRSSYKAKMARRNKRPSAKEGQESKKRSSLFRKITKQSNLLHTSRSLSSLNRSLSSSDSLPGSPTHGLPARSPTHSYRSTPDSAYLGASSQSSSPASSTPNSPASSASHHIRPSTLHGLSPKLHRQYRSARCKSAGNIPLSPLAHTPSPTQASPPPLPGHTVGSSHTTQSFPAKLHSSPPVVRPRPKSAEPPRSPLLKRVQSAEKLGASLSADKKGALRKHSLEVGHPDFRKDFHGELALHSLAESDGETPPVEGLGAPRQVAVRRLGRQESPLSLGADPLLPEGASRPPVSSKEKESPGGAEACTPPRATTPGGRTLERDVGCTRHQSVQTEDGTGGMARAVAKAALSPVQEHETGRRSSSGEAGTPLVPIVVEPARPGAKAVVPQPLGADSKGLQEPAPLAPSVPEAPRGRERWVLEVVEERTTLSGPRSKPASPKLSPEPQTPSLAPAKCSAPSSAVTPVPPASLLGSGTKPQVGLTSRCPAEAVPPAGLTKKGVSSPAPPGP

SEQ ID NO: 22522 - protein, 160 aa, Homo sapiens [sequence omitted]

SEQ ID NO: 22523 - protein, 130 aa, Homo sapiens
MLPFLFFSTLFSSIFTEAQKQYWVCNSSDASISYTYCGRDLKQLYFNLYITVNTMNLPKRKEVICRGSDDDYSFCRALKGETVNTTISFSFKGIKFSKGKYKCVVEAISGSPEEMLFCLEFVILHQPNSN

SEQ ID NO: 22524 - protein, 161 aa, Homo sapiens
MGCCYSSENEDSDQDREERKLLLDPSSPPTKALNGAEPNYHSLPSARTDEQALLSSILAKTASNIIDVSAADSQGMEQHEYMDRARQYSTRLAVLSSSLTHWKKLPPLPSLTSQPHQVLASEPIPFSDLQQVSRIAAYAYSALSQIRVDAKEELVVQFGIP

SEQ ID NO: 22525 - protein, 2156 aa, Homo sapiens
MLFFLDRMLAFPMNETFCCLWIACVFNSTLAQQGTESFQCDNGVSLPPDSICDFTDQCGDSSDERHCLNYERCDFEDGLCHMTQDQSLQPSWTKRSGMIGLSPPFYDHNGDVSAHFLSLVSRVDSISSSLRSRVFLPTNDQHDCQITFYYFSCQVSGKLMVGLQTACGGPIQHLWQNTAALPNQWERNVIKIQSSQRFQVVFEGQMASTYEQDEVIAIDDISFSSGCLPANDGILLCQEALNAERELCHPDTDLCRFDATDEELRLCQACGFEFDMCEWTSEASAGQISWMRTKAREIPAFESTPQQDQGGDDEGYYVWVGAKHGFTLNHLDSRAYLNSSVCHCLGKSCHLQFYYAMESSVLRVRLYNNKEEEIFWTYNISTHSQWVKADVLIPEDLKTFKIIFEGTLLSQRSFIALDHLWVYACGQTQSRKLCSADEFPCTSGQCIAKESVCDSRQDCSDESDEDPATCSKHLTCDFESGFCGWEPFLTEDSHWKLMKGLNNGEHHFPAADHTANINHGSFIYLEAQRSPGVAKLGSPVLTKLLTASTPCQVQFWYHLSQHSNLSVFTRTSLDGNLQKQGKIIRFSESQWSHAKIDLIAEAGESTLPFQLILEATVLSSNATVALDDISVSQECEISYKSLPRTSTQSKFSKCDFEANSCDWFEAISGDHFDWIRSSQSELSADFEHQAPPRDHSLNASQGHFMFILKKSSSLWQVAKLQSPTFSQTGPGCILSFWFYNYGLSVGAAELQLHMENSHDSTVIWRVLYNQGKQWLEATIQLGRLSQPFHLSLDKVSLGIYDGVSAIDDIRFENCTLPLPAESCEGLDHFWCRHTRACIEKLRLCDLVDDCGDRTDEVNCAPELQCNFETGICNWEQDAKDDFDWTRSQGPTPTLNTGPMKDNTLGTAKGHYLYIESSEPQAFQDSAALLSPILNATDTKGCTFRFYYHMFGKRIYRLAIYQRIWSDSRGQLLWQIFGNQGNRWIRKHLNISSRQPFQILVEASVGDGFTGDIAIDDLSFMDCTLYPGNLPADLPTPPETSVPVTLPPHNCTDNEFICRSDGHCIEKMQKCDFKYDCPDKSDEASCVMEVCSFEKRSLCKWYQPIPVHLLQDSNTFRWGLGNGISIHHGEENHRPSVDHTQNTTDGWYLYADSSNGKFGDTADILTPIISLTGPKCTLVFWTHMNGATVGSLQVLIKKDNVTSKLWAQTGQQGAQWKRAEVFLGIRSHTQIVFRAKRGISYIGDVAVDDISFQDCSPLLSPERKCTDHEFMCANKHCIAKDKLCDFVNDCADNSDETTFICRTSSGRCDFEFDLCSWKQEKDEDFDWNLKASSIPAAGTEPAADHTLGNSSGHYIFIKSLFPQQPMRAARISSPVISKRSKNCKIIFHYHMYGNGIGALTLMQVSVTNQTKVLLNLTVEQGNFWRREELSLFGDEDFQLKFEGRVGKGQRGDIALDDIVLTENCLSLHDSVQEELAVPLPTGFCPLGYRECHNGKCYRLEQSCNFVDNCGDNTDENECGSSCTFEKGWCGWQNSQADNFDWVLGVGSHQSLRPPKDHTLGNENGHFMYLEATAVGLRGDKAHFRSTMWRESSAACTMSFWYFVSAKATGSIQILIKTEKGLSKVWQESKQNPGNHWQKADILLGKLRNFEVIFQGIRTRDLGGGAAIDDIEFKNCTTVGEISELCPEITDFLCRDKKCIASHLLCDYKPDCSDRSDEAHCAHYTSTTGSCNFETSSGNWTTACSLTQDSEDDLDWAIGSRIPAKALIPDSDHTPGSGQHFLYVNSSGSKEGSVARITTSKSFPASLGMCTVRFWFYMIDPRSMGILKVYTIEESGLNILVWSVIGNKRTGWTYGSVPLSSNSPFKVAFEADLDGNEDIFIALDDISFTPECVTGGPVPVQPSPCEADQFSCIYTLQCVPLSGKCDGHEDCIDGSDEMDCPLSPTPPLCSNMEFPCSTDECIPSLLLCDGVPDCHFNEDELICSNKSCSNGALVCASSNSCIPAHQRCDGFADCMDFQLDESSCSECPLNYCRNGGTCVVEKNGPMCRCRQGWKGNRCHIKFNPPATDFTYAQNNTWTLLGIGLAFLMTHITVAVLCFLANRKVPIRKTEGSGNCAFVNPVYGNWSNPEKTESSVYSFSNPLYGTTSGSLETLSHHLK

SEQ ID NO: 22526 - protein, 1798 aa, Homo sapiens
MKRSRCRDRPQPPPPDRREDGVQRAAELSQSLPPRRRAPPGRQRLEERTGPAGPEGKEQDVVTGVSPLLFRKLSNPDIFSSTGKVKLQRQLSQDDCKLWRGNLASSLSGKQLLPLSSSVHSSVGQVTWQSSGEASNLVRMRNQSLGQSAPSLTAGLKELSLPRRGSFCRTSNRKSLIVTSSTSPTLPRPHSPLHGHTGNSPLDSPRNFSPNAPAHFSFVPARRTDGRRWSLASLPSSGYGTNTPSSTVSSSCSSQEKLHQLPFQPTADELHFLTKHFSTESVPDEEGRQSPAMRPRSRSLSPGRSPVSFDSEIIMMNHVYKERFPKATAQMEERLAEFISSNTPDSVLPLADGALSFIHHQVIEMARDCLDKSRSGLITSQYFYELQDNLEKLLQDAHERSESSEVAFVMQLVKKLMIIIARPARLLECLEFDPEEFYHLLEAAEGHAKEGQGIKCDIPRYIVSQLGLTRDPLEEMAQLSSCDSPDTPETDDSIEGHGASLPSKKTPSEEDFETIKLISNGAYGAVFLVRHKSTRQRFAMKKINKQNLILRNQIQQAFVERDILTFAENPFVVSMFCSFDTKRHLCMVMEYVEGGDCATLLKNIGALPVDMVRLYFAETVLALEYLHNYGIVHRDLKPDNLLITSMGHIKLTDFGLSKIGLMSLTTNLYEGHIEKDAREFLDKQVCGTPEYIAPEVILRQGYGKPVDWWAMGIILYEFLVGCVPFFGDTPEELFGQVISDEIVWPEGDEALPPDAQDLTSKLLHQNPLERLGTGSAYEVKQHPFFTGLDWTGLLRQKAEFIPQLESEDDTSYFDTRSERYHHMDSEDEEEVSEDGCLEIRQFSSCSPRFNKVYSSMERLSLLEERRTPPPTKRSLSEEKEDHSDGLAGLKGRDRSWVIGSPEILRKRLSVSESSHTESDSSPPMTVRRRCSGLLDAPRFPEGPEEASSTLRRQPQEGIWVLTPPSGEGVSGPVTEHSGEQRPKLDEEAVGRSSGSSPAMETRGRGTSQLAEGATAKAISDLAVRRARHRLLSGDSTEKRTARPVNKVIKSASATALSLLIPSEHHTCSPLASPMSPHSQSSNPSSRDSSPSRDFLPALGSMRPPIIIHRAGKKYGFTLRAIRVYMGDSDVYTVHHMVWHVEDGGPASEAGLRQGDLITHVNGEPVHGLVHTEVVELILKSGNKVAISTTPLENTSIKVGPARKGSYKAKMARRSKRSRGKDGQESRKRSSLFRKITKQASLLHTSRSLSSLNRSLSSGESGPGSPTHSHSLSPRSPTQGYRVTPDAVHSVGGNSSQSSSPSSSVPSSPAGSGHTRPSSLHGLAPKLQRQYRSPRRKSAGSIPLSPLAHTPSPPPPTASPQRSPSPLSGHVAQAFPTKLHLSPPLGRQLSRPKSAEPPRSPLLKRVQSAEKLAAALAASEKKLATSRKHSLDLPHSELKKELPPREVSPLEVVGARSVLSGKGALPGKGVLQPAPSRALGTLRQDRAERRESLQKQEAIREVDSSEDDTEEGPENSQGAQELSLAPHPEVSQSVAPKGAGESGEEDPFPSRDPRSLGPMVPSLLTGITLGPPRMESPSGPHRRLGSPQAIEEAASSSSAGPNLGQSGATDPIPPEGCWKAQHLHTQALTALSPSTSGLTPTSSCSPPSSTSGKLSMWSWKSLIEGPDRASPSRKATMAGGLANLQDLENTTPAQPKNLSPREQGKTQPPSAPRLAHPSYEDPSQGWLWESECAQAVKEDPALSITQVPDASGDRRQDVPCRGCPLTQKSEPSLRRGQEPGGHQKHRDLALVPDELLKQT

SEQ ID NO: 22527 - protein, 1608 aa, Homo sapiens
MKRSRCRDRPQPPPPDRREDGVQRAAELSQSLPPRRRAPPGRQRLEERTGPAGPEGKEQDVVTGVSPLLFRKLSNPDIFSSTGKVKLQRQLSQDDCKLWRGNLASSLSGKQLLPLSSSVHSSVGQVTWQSSGEASNLVRMRNQSLGQSAPSLTAGLKELSLPRRGSFCRTSNRKSLIVTSSTSPTLPRPHSPLHGHTGNSPLDSPRNFSPNAPAHFSFVPARRTDGRRWSLASLPSSGYGTNTPSSTVSSSCSSQEKLHQLPFQPTADELHFLTKHFSTESVPDEEGRQSPAMRPRSRSLSPGRSPVSFDSEIIMMNHVYKERFPKAHERSESSEVAFVMQLVKKLMIIIARPARLLECLEFDPEEFYHLLEAAEGHAKEGQGIKCDIPRYIVSQLGLTRDPLEEMAQLSSCDSPDTPETDDSIEGHGASLPSKKTPSEEDFETIKLISNGAYGAVFLVRHKSTRQRFAMKKINKQNLILRNQIQQAFVERDILTFAENPFVVSMFCSFDTKRHLCMVMEYVEGGDCATLLKNIGALPVDMVRLYFAETVLALEYLHNYGIVHRDLKPDNLLITSMGHIKLTDFGLSKIGLMSLTTNLYEGHIEKDAREFLDKQVCGTPEYIAPEVILRQGYGKPVDWWAMGIILYEFLVGCVPFFGDTPEELFGQVISDEIVWPEGDEALPPDAQDLTSKLLHQNPLERLGTGSAYEVKQHPFFTGLDWTGLLRQKAEFIPQLESEDDTSYFDTRSERYHHMDSEDEEEVSEDGCLEIRQFSSCSPRFNKVYSSMERLSLLEERRTPPPTKRSLSEEKEDHSDGLAGLKGRDRSWVIGSPEILRKRLSVSESSHTESDSSPPMTVRRRCSGLLDAPRFPEGPEEASSTLRRQPQEGIWVLTPPSGEGVSGPVTEHSGEQRPKLDEEAVGRSSGSSPAMETRGRGTSQLAEGATAKAISDLAVRRARHRLLSGDSTEKRTARPVNKVIKSASATALSLLIPSEHHTCSPLASPMSPHSQSSNPSSRDSSPYGFTLRAIRVYMGDSDVYTVHHMVWHVEDGGPASEAGLRQGDLITHVNGEPVHGLVHTEVVELILKSGNKVAISTTPLENTSIKVGPARKGSYKAKMARRSKRSRGKDGQESRKRSSLFRKITKQASLLHTSRSLSSLNRSLSSGESGPGSPTHSHSLSPRSPTQGYRVTPDAVHSQLSRPKSAEPPRSPLLKRVQSAEKLAAALAASEKKLATSRKHSLDLPHSELKKELPPREVSPLEVVGARSVLSGKGALPGKGVLQPAPSRALGTLRQDRAERRESLQKQEAIREVDSSEDDTEEGPENSQGAQELSLAPHPEVSQSVAPKGAGESGEEDPFPSRDPRSLGPMVPSLLTGITLGPPRMESPSGPHRRLGSPQAIEEAASSSSAGPNLGQSGATDPIPPEGCWKAQHLHTQALTALSPSTSGLTPTSSCSPPSSTSGKLSMWSWKSLIEGPDRASPSRKATMAGGLANLQDLENTTPAQPKNLSPREQGKTQPPSAPRLAHPSYEDPSQGWLWESECAQAVKEDPALSITQVPDASGDRRQDVPCRGCPLTQKSEPSLRRGQEPGGHQKHRDLALVPDELLKQT

SEQ ID NO: 22528 - protein, 655 aa, Homo sapiens
MVAPKSHTDDWAPGPFSSKPQRSQLQIFSSVLQTSLLFLLMGLRASGKDSAPTVVSGILGGSVTLPLNISVDTEIENVIWIGPKNALAFARPKENVTIMVKSYLGRLDITKWSYSLCISNLTLNDAGSYKAQINQRNFEVTTEEEFTLFVYEQLQEPQVTMKSVKVSENFSCNITLMCSVKGAEKSVLYSWTPREPHASESNGGSILTVSRTPCDPDLPYICTAQNPVSQRSSLPVHVGQFCTDPGASRGGTTGETVVGVLGEPVTLPLALPACRDTEKVVWLFNTSIISKEREEAATADPLIKSRDPYKNRVWVSSQDCSLKISQLKIEDAGPYHAYVCSEASSVTSMTHVTLLIYRRLRKPKITWSLRHSEDGICRISLTCSVEDGGNTVMYTWTPLQKEAVVSQGESHLNVSWRSSENHPNLTCTASNPVSRSSHQFLSENICSGPERNTKLWIGLFLMVCLLCVGIFSWCIWKRKGRCSVPAFCSSQAEAPADTPEPTAGHTLYSVLSQGYEKLDTPLRPARQQPTPTSDSSSDSNLTTEEDEDRPEVHKPISGRYEVFDQVTQEGAGHDPAPEGQADYDPVTPYVTEVESVVGENTMYAQVFNLQGKTPVSQKEESSATIYCSIRKPQVVPPPQQNDLEIPESPTYENFT

SEQ ID NO: 22529 - protein, 641 aa, Homo sapiens
MVAPKSHTDDWAPGPFSSKPQRSQLQIFSSVLQTSLLFLLMGLRASGKDSAPTVVSGILGGSVTLPLNISVDTEIENVIWIGPKNALAFARPKENVTIMVKSYLGRLDITKWSYSLCISNLTLNDAGSYKAQINQRNFEVTTEEEFTLFVYEQLQEPQVTMKSVKVSENFSCNITLMCSVKGAEKSVLYSWTPREPHASESNGGSILTVSRTPCDPDLPYICTAQNPVSQRSSLPVHVGQFCTDPGASRGGTTGETVVGVLGEPVTLPLALPACRDTEKVVWLFNTSIISKEREEAATADPLIKSRDPYKNRVWVSSQDCSLKISQLKIEDAGPYHAYVCSEASSVTSMTHVTLLIYRRLRKPKITWSLRHSEDGICRISLTCSVEDGGNTVMYTWTPLQKEAVVSQGESHLNVSWRSSENHPNLTCTASNPVSRSSHQFLSENICSGPERNTKLWIGLFLMVCLLCVGIFSWCIWKRKGRCSVPAFCSSQAEAPADTPGYEKLDTPLRPARQQPTPTSDSSSDSNLTTEEDEDRPEVHKPISGRYEVFDQVTQEGAGHDPAPEGQADYDPVTPYVTEVESVVGENTMYAQVFNLQGKTPVSQKEESSATIYCSIRKPQVVPPPQQNDLEIPESPTYENFT

SEQ ID NO: 22530 - protein, 521 aa, Homo sapiens
MVAPKSHTDDWAPGPFSSKPQRSQLQIFSSVLQTSLLFLLMGLRASGKDSAPTVVSGILGGSVTLPLNISVDTEIENVIWIGPKNALAFARPKENVTIMVKSYLGRLDITKWSYSLCISNLTLNDAGSYKAQINQRNFEVTTEEEFTLFVYEQLQEPQVTMKSVKVSENFSCNITLMCSVKGAEKSVLYSWTPREPHASESNGGSILTVSRTPCDPDLPYICTAQNPVSQRSSLPVHVGQFCTDPGASRGGTTGETVVGVLGEPVTLPLALPACRDTEKVVWLFNTSIISKEREEAATADPLIKSRDPYKNRVWVSSQDCSLKISQLKIEDAGPYHAYVCSEASSVTSMTHVTLLIYRPERNTKLWIGLFLMVCLLCVGIFSWCIWKRKGRCSVPAFCSSQAEAPADTPGYEKLDTPLRQPISGRYEVFDQVTQEGAGHDPAPEGQADYDPVTPYVTEVESVVGENTMYAQVFNLQGKTPVSQKEESSATIYCSIRKPQVVPPPQQNDLEIPESPTYENFT

SEQ ID NO: 22531 - protein, 655 aa, Homo sapiens
MVAPKSHTDDWAPGPFSSKPQRSQLQIFSSVLQTSLLFLLMGLRASGKDSAPTVVSGILGGSVTLPLNISVDTEIENVIWIGPKNALAFARPKENVTIMVKSYLGRLDITKWSYSLCISNLTLNDAGSYKAQINQRNFEVTTEEEFTLFVYAPFIEKLSVHVIEGDHRTLLEGSGLESIISTLAEPRVSVREGREPHASESNGGSILTVSRTPCDPDLPYICTAQNPVSQRSSLPVHVGQFCTDPGASRGGTTGETVVGVLGEPVTLPLALPACRDTEKVVWLFNTSIISKEREEAATADPLIKSRDPYKNRVWVSSQDCSLKISQLKIEDAGPYHAYVCSEASSVTSMTHVTLLIYRRLRKPKITWSLRHSEDGICRISLTCSVEDGGNTVMYTWTPLQKEAVVSQGESHLNVSWRSSENHPNLTCTASNPVSRSSHQFLSENICSGPERNTKLWIGLFLMVCLLCVGIFSWCIWKRKGRCSVPAFCSSQAEAPADTPEPTAGHTLYSVLSQGYEKLDTPLRPARQQPTPTSDSSSDSNLTTEEDEDRPEVHKPISGRYEVFDQVTQEGAGHDPAPEGQADYDPVTPYVTEVESVVGENTMYAQVFNLQGKTPVSQKEESSATIYCSIRKPQVVPPPQQNDLEIPESPTYENFT

SEQ ID NO: 22532 - protein, 1309 aa, Homo sapiens
MDESSLLRRRGLQKELSLPRRGRGCRSGNRKSLVVGTPSPTLSRPLSPLSVPTAGSSPLDSPRNFSAASALNFPFARRADGRRWSLASLPSSGYGTNTPSSTLSSSSSSRERLHQLPFQPTPDELHFLSKHFRSSENVLDEEGGRSPRLRPRSRSLSPGRATGTFDNEIVMMNHVYRERFPKATAQMEGRLQEFLTAYAPGARLALADGVLGFIHHQIVELARDCLAKSGENLVTSRYFLEMQEKLERLLQDAHERSDSEEVSFIVQLVRKLLIIISRPARLLECLEFDPEEFYHLLEAAEGHAREGQGIKTDLPQYIIGQLGLAKDPLEEMVPLSHLEEEQPPAPESPESRALVGQSRRKPCESDFETIKLISNGAYGAVYLVRHRDTRQRFAIKKINKQNLILRNQIQQVFVERDILTFAENPFVVSMFCSFETRRHLCMVMEYVEGGDCATLLKNMGPLPVDMARLYFAETVLALEYLHNYGIVHRDLKPDNLLITSLGHIKLTDFGLSKIGLMSMATNLYEGHIEKDAREFIDKQVCGTPEYIAPEVIFRQGYGKPVDWWAMGVVLYEFLVGCVPFFGDTPEELFGQVVSDEIMWPEGDEALPADAQDLITRLLRQSPLDRLGTGGTHEVKQHPFFLALDWAGLLRHKAEFVPQLEAEDDTSYFDTRSERYRHLGSEDDETNDEESSTEIPQFSSCSHRFSKVYSSSEFLAVQPTPTFAERSFSEDREEGWERSEVDYGRRLSADIRLRSWTSSGSSCQSSSSQPERGPSPSLLNTISLDTMPKFAFSSEDEGVGPGPAGPKRPVFILGEPDPPPAATPVMPKPSSLSADTAALSHARLRSNSIGARHSTPRPLDAGRGRRLGGPRDPAPEKSRASSSGGSGGGSGGRVPKSASVSALSLIITADDGSGGPLMSPLSPRSLSSNPSSRDSSPSRDPSPVCGSLRPPIVIHSSGKKYGFSLRAIRVYMGDSDVYTVHHVVWSVEDGSPAQEAGLRAGDLITHINGESVLGLVHMDVVELLLKSGNKISLRTTALENTSIKVGPARKNVAKGRMARRSKRSRRRETQDRRKSLFKKISKQTSVLHTSRSFSSGLHHSLSSSESLPGSPTHSLSPSPTTPCRSPAPDVPADTTASPPSASPSSSSPASPAAAGHTRPSSLHGLAAKLGPPRPKTGRRKSTSSIPPSPLACPPISAPPPRSPSPLPGHPPAPARSPRLRRGQSADKLGTGERLDGEAGRRTRGPEAELVVMRRLHLSERRDSFKKQEAVQEVSFDEPQEEATGLPTSVPQIAVEGEEAVPVALGPTGRD

SEQ ID NO: 22533 - protein, 824 aa, Homo sapiens
MSLLGDPLQALPPSAAPTGPLLAPPAGATLNRLREPLLRRLSELLDQAPEGRGWRRLAELAGSRGRLRLSCLDLEQCSLKVLEPEGSPSLCLLKLMGEKGCTVTELSDFLQAMEHTEVLQLLSPPGIKITVNPESKAVLAGQFVKLCCRATGHPFVQYQWFKMNKEIPNGNTSELIFNAVHVKDAGFYVCRVNNNFTFEFSQWSQLDVCDIPESFQRSVDGVSESKLQICVEPTSQKLMPGSTLVLQCVAVGSPIPHYQWFKNELPLTHETKKLYMVPYVDLEHQGTYWCHVYNDRDSQDSKKVEIIIGRTDEAVECTEDELNNLGHPDNKEQTTDQPLAKDKVALLIGNMNYREHPKLKAPLVDVYELTNLLRQLDFKVVSLLDLTEYEMRNAVDEFLLLLDKGVYGLLYYAGHGYENFGNSFMVPVDAPNPYRSENCLCVQNILKLMQEKETGLNVFLLDMCRKRNDYDDTIPILDALKVTANIVFGYATCQGAEAFEIQHSGLANGIFMKFLKDRLLEDKKITVLLDEVAEDMGKCHLTKGKQALEIRSSLSEKRALTDPIQGTEYSAESLVRNLQWAKAHELPESMCLKFDCGVQIQLGFAAEFSNVMIIYTSIVYKPPEIIMCDAYVTDFPLDLDIDPKDANKGTPEETGSYLVSKDLPKHCLYTRLSSLQKLKEHLVFTVCLSYQYSGLEDTVEDKQEVNVGKPLIAKLDMHRGLGRKTCFQTCLMSNGPYQSSAATSGGAGHYHSLQDPFHGVYHSHPGNPSNVTPADSCHCSRTPDAFISSFAHHASCHFSRSNVPVETTDEIPFSFSDRLRISEK

SEQ ID NO: 22534 - protein, 813 aa, Homo sapiens
MSLLGDPLQALPPSAAPTGPLLAPPAGATLNRLREPLLRRLSELLDQAPEGRGWRRLAELAGSRGRLRLSCLDLEQCSLKVLEPEGSPSLCLLKLMGEKGCTVTELSDFLQAMEHTEVLQLLSPPGIKITVNPESKAVLAGQFVKLCCRATGHPFVQYQWFKMNKEIPNGNTSELIFNAVHVKDAGFYVCRVNNNFTFEFSQWSQLDVCDIPESFQRSVDGVSESKLQICVEPTSQKLMPGSTLVLQCVAVGSPIPHYQWFKNELPLTHETKKLYMVPYVDLEHQGTYWCHVYNDRDSQDSKKVEIIIDELNNLGHPDNKEQTTDQPLAKDKVALLIGNMNYREHPKLKAPLVDVYELTNLLRQLDFKVVSLLDLTEYEMRNAVDEFLLLLDKGVYGLLYYAGHGYENFGNSFMVPVDAPNPYRSENCLCVQNILKLMQEKETGLNVFLLDMCRKRNDYDDTIPILDALKVTANIVFGYATCQGAEAFEIQHSGLANGIFMKFLKDRLLEDKKITVLLDEVAEDMGKCHLTKGKQALEIRSSLSEKRALTDPIQGTEYSAESLVRNLQWAKAHELPESMCLKFDCGVQIQLGFAAEFSNVMIIYTSIVYKPPEIIMCDAYVTDFPLDLDIDPKDANKGTPEETGSYLVSKDLPKHCLYTRLSSLQKLKEHLVFTVCLSYQYSGLEDTVEDKQEVNVGKPLIAKLDMHRGLGRKTCFQTCLMSNGPYQSSAATSGGAGHYHSLQDPFHGVYHSHPGNPSNVTPADSCHCSRTPDAFISSFAHHASCHFSRSNVPVETTDEIPFSFSDRLRISEK

SEQ ID NO: 22535 - protein, 379 aa, Homo sapiens
MVFFTCNACGESVKKIQVEKHVSVCRNCECLSCIDCGKDFWGDDYKNHVKCISEDQKYGGKGYEGKTHKGDIKQQAWIQKISELIKRPNVSPKVRELLEQISAFDNVPRKKAKFQNWMKNSLKVHNESILDQVWNIFSEASNSEPVNKEQDQRPLHPVANPHAEISTKVPASKVKDAVEQQGEVKKNKRERKEERQKKRKREKKELKLENHQENSRNQKPKKRKKGQEADLEAGGEEVPEANGSAGKRSKKKKQRKDSASEEEAHVGAGKRKRRHSEVETDSKKKKMKLPEHPEGGEPEDDEAPAKGKFNWKGTIKAILKQAPDNEITIKKLRKKVLAQYYTVTDEHHRSEEELLVIFNKKISKNPTFKLLKDKVKLVK

SEQ ID NO: 22536 - protein, 194 aa, Homo sapiens
MSALWLLLGLLALMDLSESSNWGCYGNIQSLDTPGASCGIGRRHGLNYCGVRASERLAEIDMPYLLKYQPMMQTIGQKYCMDPAVIAGVLSRKSPGDKILVNMGDRTSMVQDPGSQAPTSWISESQVSQTTEVLTTRIKEIQRRFPTWTPDQYLRGGLCAYSGGAGYVRSSQDLSCDFCNDVLARAKYLKRHGF

SEQ ID NO: 22537 - protein, 153 aa, Homo sapiens
MAPAAATGGSTLPSGFSVFTTLPDLLFIFEFIFGGLVWILVASSLVPWPLVQGWVMFVSVFCFVATTTLIILYIIGAHGGETSWVTLDAAYHCTAALFYLSASVLEALATITMQDGFTYRHYHENIAAVVFSYIATLLYVVHAVFSLIRWKSS

SEQ ID NO: 22538 - protein, 111 aa, Homo sapiens
MAPAAATGGSTLPSGFSVFTTLPDLLFIFEFIFGGLVWILVASSLVPWPLVQGWVMFVSVFCFVATTTLIILYIIGAHGGETSWVTLVFSYIATLLYVVHAVFSLIRWKSS

SEQ ID NO: 22539 - protein, 97 aa, Homo sapiens
MAPAAATGGSTLPSGFSVFTTLPDLLFIFEFDAAYHCTAALFYLSASVLEALATITMQDGFTYRHYHENIAAVVFSYIATLLYVVHAVFSLIRWKSS

SEQ ID NO: 22540 - protein, 55 aa, Homo sapiens
MAPAAATGGSTLPSGFSVFTTLPDLLFIFEFVFSYIATLLYVVHAVFSLIRWKSS

SEQ ID NO: 22541 - protein, 212 aa, Homo sapiens
MLSSVVFWGLIALIGTSRGSYPFSHSMKPHLHPRLYHGCYGDIMTMKTSGATCDANSVMNCGIRGSEMFAEMDLRAIKPYQTLIKEVGQRHCVDPAVIAAIISRESHGGSVLQDGWDHRGLKFGLMQLDKQTYHPVGAWDSKEHLSQATGILTERIKAIQKKFPTWSVAQHLKGGLSAFKSGIEAIATPSDIDNDFVNDIIARAKFYKRQSF

SEQ ID NO: 22542 - protein, 178 aa, Homo sapiens
MLSSVVFWGLIALIGTSRGSYPFSHSMKPHLHPRLYHGCYGDIMTMKTSGATCDANSVMNCGIRGSEMFAEMDLRAIKPYQTLIKEVGQRHCVDPAVIAAIISRESHGGSVLQDGWDHRGLKFGLMQLDKQTYHPVGAWDSKEHLSQATGILTERIKAIQKKFPTWSVAQHLKGFFLL

SEQ ID NO: 22543 - protein, 280 aa, Homo sapiens
MCPPQAQAEVGPTMTEKAEMVCAPSPAPAPPPKPASPGPPQVEEVGHRGGSSPPRLPPGVPVISLGHSRPPGVAMPTTELGTLRPPLLQLSTLGTAPPTLALHYHPHPFLNSVYIGPAGPFSIFPSSRLKRRPSHCELDLAEGHQPQKVARRVFTNSRERWRQQNVNGAFAELRKLLPTHPPDRKLSKNEVLRLAMKYIGFLVRLLRDQAAALAAGPTPPGPRKRPVHRVPDDGARRGSGRRAEAAARSQPAPPADPDGSPGGAARPIKMEQTALSPEVR

SEQ ID NO: 22544 - protein, 686 aa, Homo sapiens
MLLRGVLLALQALQLAGALDLPAGSCAFEESTCGFDSVLASLPWILNEEGHYIYVDTSFGKQGEKAVLLSPDLQAEEWSCLRLVYQITTSSESLSDPSQLNLYMRFEDESFDRLLWSAKEPSDSWLIASLDLQNSSKKFKILIEGVLGQGNTASIALFEIKMTTGYCIECDFEENHLCGFVNRWNPNVNWFVGGGSIRNVHSILPQDHTFKSELGHYMYVDSVYVKHFQEVAQLISPLTTAPMAGCLSFYYQIQQGNDNVFSLYTRDVAGLYEEIWKADRPGNAAWNLAEVEFSAPYPMEVIFEVAFNGPKGGYVALDDISFSPVHCQNQTELLFSAVEASCNFEQDLCNFYQDKEGPGWTRVKVKPNMYRAGDHTTGLGYYLLANTKFTSQPGYIGRLYGPSLPGNLQYCLRFHYAIYGFLKMSDTLAVYIFEENHVVQEKIWSVLESPRGVWMQAEITFKKPMPTKVVFMSLCKSFWDCGLVALDDITIQLGSCSSSEKLPPPPGECTFEQDECTFTQEKRNRSSWHRRRGETPTSYTGPKGDHTTGVGYYMYIEASHMVYGQKARLLSRPLRGVSGKHCLTFFYHMYGGGTGLLSVYLKKEEDSEESLLWRRRGEQSISWLRALIEYSCERQHQIIFEAIRGVSIRSDIAIDDVKFQAGPCGEMEDTTQQSSGYSEDLNEIEY

SEQ ID NO: 22545 - protein, 133 aa, Homo sapiens
MYIEASHMVYGQKARLLSRPLRGVSGKHCLTFFYHMYGGGTGLLSVYLKKEEDSEESLLWRRRGEQSISWLRALIEYSCERQHQIIFEAIRGVSIRSDIAIDDVKFQAGPCGEMEDTTQQSSGYSEDLNEIEY

SEQ ID NO: 22546 - protein, 116 aa, Homo sapiens
MTPLLTLILVVLMGLPLAQALDCHVCAYNGDNCFNPMRCPAMVAYCMTTRTYYTPTRMKVSKSCVPRCFETVYDGYSKHASTTSCCQYDLCNGTGLATPATLALAPILLATLWGLL

SEQ ID NO: 22547 - protein, 131 aa, Homo sapiens
MTPLLTLILVVLMGLPLAQALDCHVCAYNGDNCFNPMRCPAMVAYCMTTRTSAAEAIWCHQCTGFGGCSHGSRCLRDSTHCVTTATRVLSNTEDLPLVTKMCHIGCPDIPSLGLGPYVSIACCQTSLCNHD

SEQ ID NO: 22548 - protein, 774 aa, Homo sapiens
MDDWKSRLVIKSMLPHFAMVGNRQEPRKLQESGKKPSWMEEEDLSFLYKSSPGRKHQGTVKRRQEEDHFQFPDMADGGYPNKIKRPCLEDVTLAMGPGAHPSTACAELQVPPLTINPSPAAMGVAGQSLLLENNPMNGNIMGSPFVVPQTTEVGLKGPTVPYYEKINSVPAVDQELQELLEELTKIQDPSPNELDLEKILGTKPEEPLVLDHPQATLSTTPKPSVQMSHLESLASSKEFASSCSQVTGMSLQIPSSSTGISYSIPSTSKQIVSPSSSMAQSKSQVQAMLPVALPPLPVPQWHHAHQLKALAASKQGSATKQQGPTPSWSGLPPPGLSPPYRPVPSPHPPPLPLPPPPPPFSPQSLMVSCMSSNTLSGSTLRGSPNALLSSMTSSSNAALGPAMPYAPEKLPSPALTQQPQFGPQSSILANLMSSTIKTPQGHLMSALPASNPGPSPPYRPEKLSSPGLPQQSFTPQCSLIRSLTPTSNLLSQQQQQQQQQQQANVIFKPISSNSSKTLSMIMQQGMASSSPGATEPFTFGNTKPLSHFVSEPGPQKMPSMPTTSRQPSLLHYLQQPTPTQASSATASSTATATLQLQQQQQQQQQQPDHSSFLLQQMMQQPQRFQRSVASDSMPALPRQGCCHLFAWTSAASSVKPQHQHGNSFTSRQDPQPGDVSPSNITHVDKACKLGEARHPQVSLGRQPPSCQALGSESFLPGSSFAHELARVTSSYSTSEAAPWGSWDPKAWRQVPAPLLPSCDATARGTEIRSYGNDP

SEQ ID NO: 22549 - protein, 998 aa, Homo sapiens
MDDWKSRLVIKSMLPHFAMVGNRQEPRKLQESGTVKRRQEEDHFQFPDMADGGYPNKIKRPCLEDVTLAMGPGAHPSTACAELQVPPLTINPSPAAMGVAGQSLLLENNPMNGNIMGSPFVVPQTTEVGLKGPTVPYYEKINSVPAVDQELQELLEELTKIQDPSPNELDLEKILGTKPEEPLVLDHPQATLSTTPKPSVQMSHLESLASSKEFASSCSQVTGMSLQIPSSSTGISYSIPSTSKQIVSPSSSMAQSKSQVQAMLPVALPPLPVPQWHHAHQLKALAASKQGSATKQQGPTPSWSGLPPPGLSPPYRPVPSPHPPPLPLPPPPPPFSPQSLMVSCMSSNTLSGSTLRGSPNALLSSMTSSSNAALGPAMPYAPEKLPSPALTQQPQFGPQSSILANLMSSTIKTPQGHLMSALPASNPGPSPPYRPEKLSSPGLPQQSFTPQCSLIRSLTPTSNLLSQQQQQQQQQQQANVIFKPISSNSSKTLSMIMQQGMASSSPGATEPFTFGNTKPLSHFVSEPGPQKMPSMPTTSRQPSLLHYLQQPTPTQASSATASSTATATLQLQQQQQQQQQQPDHSSFLLQQMMQQPQRFQRSVASDSMPALPRQQEEQRSGLMAMTPERQNAYISQQMSPFEAVQEQVTSKCSRIKASPPSSKHLMPPRTGLLQNNLSPGMIPLTRHQSCEGMGVISPTLGKRQGIFTSSPQCPILSHSGQTPLGRLDSVCQHMQSPKATPPEVPLPGFCPSSLGTQSLSPHQLRRPSVPRMPTAFNNAAWVTAAAAVTTAVSGKTPLSQVDNSVQQHSPSGQACLQRPSDWEAQVPAAMGTQVPLANNPSFSLLGSQSLRQSPVQGPVPVANTTKFLQQGMASFSPLSPIQGIEPPSYVAAAATAAAASAVAASQFPGPFDRTDIPPELPPADFLRQPQPPLNDLISSPDCNEVDFIEALLKGSCVSPDEDWVCNLRLIDDILEQHAAAQNATAQNSGQVTQDAGAL

SEQ ID NO: 22550 - protein, 749 aa, Homo sapiens
MDDWKSRLVIKSMLPHFAMVGNRQEPRKLQESGTVKRRQEEDHFQFPDMADGGYPNKIKRPCLEDVTLAMGPGAHPSTACAELQVPPLTINPSPAAMGVAGQSLLLENNPMNGNIMGSPFVVPQTTEVGLKGPTVPYYEKINSVPAVDQELQELLEELTKIQDPSPNELDLEKILGTKPEEPLVLDHPQATLSTTPKPSVQMSHLESLASSKEFASSCSQVTGMSLQIPSSSTGISYSIPSTSKQIVSPSSSMAQSKSQVQAMLPVALPPLPVPQWHHAHQLKALAASKQGSATKQQGPTPSWSGLPPPGLSPPYRPVPSPHPPPLPLPPPPPPFSPQSLMVSCMSSNTLSGSTLRGSPNALLSSMTSSSNAALGPAMPYAPEKLPSPALTQQPQFGPQSSILANLMSSTIKTPQGHLMSALPASNPGPSPPYRPEKLSSPGLPQQSFTPQCSLIRSLTPTSNLLSQQQQQQQQQQQANVIFKPISSNSSKTLSMIMQQGMASSSPGATEPFTFGNTKPLSHFVSEPGPQKMPSMPTTSRQPSLLHYLQQPTPTQASSATASSTATATLQLQQQQQQQQQQPDHSSFLLQQMMQQPQRFQRSVASDSMPALPRQGCCHLFAWTSAASSVKPQHQHGNSFTSRQDPQPGDVSPSNITHVDKACKLGEARHPQVSLGRQPPSCQALGSESFLPGSSFAHELARVTSSYSTSEAAPWGSWDPKAWRQVPAPLLPSCDATARGTEIRSYGNDP

SEQ ID NO: 22551 - protein, 512 aa, Homo sapiens
MGCIKSKGKDSLSDDGVDLKTQPVRNTERTIYVRDPTSNKQQRPVPESQLLPGQRFQTKDPEEQGDIVVALYPYDGIHPDDLSFKKGEKMKVLEEHGEWWKAKSLLTKKEGFIPSNYVAKLNTLETEEWFFKDITRKDAERQLLAPGNSAGAFLIRESETLKGSFSLSVRDFDPVHGDVIKHYKIRSLDNGGYYISPRITFPCISDMIKHYQKQADGLCRRLEKACISPKPQKPWDKDAWEIPRESIKLVKRLGAGQFGEVWMGYYNNSTKVAVKTLKPGTMSVQAFLEEANLMKTLQHDKLVRLYAVVTREEPIYIITEYMAKGSLLDFLKSDEGGKVLLPKLIDFSAQIAEGMAYIERKNYIHRDLRAANVLVSESLMCKIADFGLARVIEDNEYTAREGAKFPIKWTAPEAINFGCFTIKSDVWSFGILLYEIVTYGKIPYPGRTNADVMTALSQGYRMPRVENCPDELYDIMKMCWKEKAEERPTFDYLQSVLDDFYTATEGQYQQQP

SEQ ID NO: 22552 - protein, 491 aa, Homo sapiens
MGCIKSKGKDSLSDDGVDLKTQPVPESQLLPGQRFQTKDPEEQGDIVVALYPYDGIHPDDLSFKKGEKMKVLEEHGEWWKAKSLLTKKEGFIPSNYVAKLNTLETEEWFFKDITRKDAERQLLAPGNSAGAFLIRESETLKGSFSLSVRDFDPVHGDVIKHYKIRSLDNGGYYISPRITFPCISDMIKHYQKQADGLCRRLEKACISPKPQKPWDKDAWEIPRESIKLVKRLGAGQFGEVWMGYYNNSTKVAVKTLKPGTMSVQAFLEEANLMKTLQHDKLVRLYAVVTREEPIYIITEYMAKGSLLDFLKSDEGGKVLLPKLIDFSAQIAEGMAYIERKNYIHRDLRAANVLVSESLMCKIADFGLARVIEDNEYTAREGAKFPIKWTAPEAINFGCFTIKSDVWSFGILLYEIVTYGKIPYPGRTNADVMTALSQGYRMPRVENCPDELYDIMKMCWKEKAEERPTFDYLQSVLDDFYTATEGQYQQQP

SEQ ID NO: 22553 - protein, 475 aa, Homo sapiens
MPHRKKKPFIEKKKAVSFHLVHRSQRDPLAADESAPQRVLLPTQKIDNEERRAEQRKYGVFFDDDYDYLQHLKEPSGPSELIPSSTFSAHNRREEKEETLVIPSTGIKLPSSVFASEFEEDVGLLNKAAPVSGPRLDFDPDIVAALDDDFDFDDPDNLLEDDFILQANKATGEEEGMDIQKSENEDDSEWEDVDDEKGDSNDDYDSAGLLSDEDCMSVPGKTHRAIADHLFWSEETKSRFTEYSMTSSVMRRNEQLTLHDERFEKFYEQYDDDEIGALDNAELEGSIQVDSNRLQEVLNDYYKEKAENCVKLNTLEPLEDQDLPMNELDESEEEEMITVVLEEAKEKWDCESICSTYSNLYNHPQLIKYQPKPKQIRISSKTGIPLNVLPKKGLTAKQTERIQMINGSDLPKVSTQPRSKNESKEDKRARKQAIKEERKERRVEKKANKLAFKLEKRRQEKELLNLKKNVEGLKL

SEQ ID NO: 22554 - protein, 417 aa, Homo sapiens
MRFAWTVLLLGPLQLCALVHCAPPAAGQQQPPREPPAAPGAWRQQIQWENNGQVFSLLSLGSQYQPQRRRDPGAAVPGAANASAQQPRTPILLIRDNRTAAARTRTAGSSGVTAGRPRPTARHWFQAGYSTSRAREAGASRAENQTAPGEVPALSNLRPPSRVDGMVGDDPYNPYKYSDDNPYYNYYDTYERPRPGGRYRPGYGTGYFQYGLPDLVADPYYIQASTYVQKMSMYNLRCAAEENCLASTAYRADVRDYDHRVLLRFPQRVKNQGTSDFLPSRPRYSWEWHSCHQHYHSMDEFSHYDLLDANTQRRVAEGHKASFCLEDTSCDYGYHRRFACTAHTQGLSPGCYDTYGADIDCQWIDITDVKPGNYILKVSVNPSYLVPESDYTNNVVRCDIRYTGHHAYASGCTISPY

SEQ ID NO: 22555 - protein, 1016 aa, Homo sapiens
MVLPTCPMAEFALPRHSAVMERLRRRIELCRRHHSTCEARYEAVSPERLELERQHTFALHQRCIQAKAKRAGKHRQPPAATAPAPAAPAPRLDAADGPEHGRPATHLHDTVKRNLDSATSPQNGDQQNGYGDLFPGHKKTRREAPLGVAISSNGLPPASPLGQSDKPSGADALQSSGKHSLGLDSLNKKRLADSSLHLNGGSNPSESFPLSLNKELKQEPVEDLPCMITGTVGSISQSNLMPDLNLNEQEWKELIEELNRSVPDEDMKDLFNEDFEEKKDPESSGSATQTPLAQDINIKTEFSPAAFEQEQLGSPQVRAGSAGQTFLGPSSAPVSTDSPSLGGSQTLFHTSGQPRADNPSPNLMPASAQAQNAQRALAGVVLPSQGPGGASELSSAHQLQQIAAKQKREQMLQNPQQATPAPAPGQMSTWQQTGPSHSSLDVPYPMEKPASPSSYKQDFTNSKLLMMPSVNKSSPRPGGPYLQPSHVNLLSHQPPSNLNQNSANNQGSVLDYGNTKPLSHYKADCGQGSPGSGQSKPALMAYLPQQLSHISHEQNSLFLMKPKPGNMPFRSLVPPGQEQNPSSVPVQAQATSVGTQPPAVSVASSHNSSPYLSSQQQAAVMKQHQLLLDQQKQREQQQKHLQQQQFLQRQQHLLAEQEKQQFQRHLTRPPPQYQDPTQGSFPQQVGQFTGSSAAVPGMNTLGPSNSSCPRVFPQAGNLMPMGPGHASVSSLPTNSGQQDRGVAQFPGSQNMPQSSLYGMASGITQIVAQPPPQATNGHAHIPRQTNVGQNTSVSAAYGQNSLGSSGLSQQHNKGTLNPGLTKPPVPRVSPAMGGQNSSWQHQGMPNLSGQTPGNSNVSPFTAASSFHMQQQAHLKMSSPQFSQAVPNRPMAPMSSAAAVGSLLPPVSAQQRTSAPAPAPPPTAPQQGLPGLSPAGPELGAFSQSPASQMGGRAGLHCTQAYPVRTAGQELPFAYSGQPGGSGLSSVAGHTDLIDSLLKNRTSEEWMSDLDDLLGSQ

SEQ ID NO: 22556 - protein, 1156 aa, Homo sapiens
MGDTAPPQAPAGGLGGASGAGLLGGGSVTPRVHSAIVERLRARIAVCRQHHLSCEGRYERGRAESSDRERESTLQLLSLVQHGQGARKAGKHTKATATAATTTAPPPPPAAPPAASQAAATAAPPPPPDYHHHHQQHLLNSSNNGGSGGINGEQQPPASTPGDQRNSALIALQGSLKRKQVVNLSPANSKRPNGFVDNSFLDIKRIRVGENLSAGQGGLQINNGQSQIMSGTLPMSQAPLRKTNTLPSHTHSPGNGLFNMGLKEVKKEPGETLSCSKHMDGQMTQENIFPNRYGDDPGEQLMDPELQELFNELTNISVPPMSDLELENMINATIKQDDPFNIDLGQQSQRSTPRPSLPMEKIVIKSEYSPGLTQGPSGSPQLRPPSAGPAFSMANSALSTSSPIPSVPQSQAQPQTGSGASRALPSWQEVSHAQQLKQIAANRQQHARMQQHQQQHQPTNWSALPSSAGPSPGPFGQEKIPSPSFGQQTFSPQSSPMPGVAGGSGQSKVMANYMYKAGPSAQGGHLDVLMQQKPQDLSRSFINNPHPAMEPRQGNTKPLFHFNSDQANQQMPSVLPSQNKPSLLHYTQQQQQQQQQQQQQQQQQQQQQQQQQQQQQQQQQQSSISAQQQQQQQSSISAQQQQQQQQQQQQQQQQQQQQQQQQQQQPSSQPAQSLPSQPLLRSPLPLQQKLLLQQMQNQPIAGMGYQVSQQQRQDQHSVVGQNTGPSPSPNPCSNPNTGSGYMNSQQSLLNQQLMGKKQTLQRQIMEQKQQLLLQQQMLADAEKIAPQDQINRHLSRPPPDYKDQRRNVGNMQPTAQYSGGSSTISLNSNQALANPVSTHTILTPNSSLLSTSHGTRMPSLSTAVQNMGMYGNLPCNQPNTYSVTSGMNQLTQQRNPKQLLANQNNPMMPRPPTLGPSNNNNVATFGAGSVGNSQQLRPNLTHSMASMPPQRTSNVMITSNTTAPNWASQEGTSKQQEALTSAGVRFPTGTPAAYTPNQSLQQAVGSQQFSQRAVAPPNQLTPAVQMRPMNQMSQTLNGQTMGPLRGLNLRPNQLSTQILPNLNQSGTGLNQSRTGINQPPSLTPSNFPSPNQSSRAFQGTDHSSDLAFDFLSQQNDNMGPALNSDADFIDSLLKTEPGNDDWMKDINLDEILGNNS

SEQ ID NO: 22557 - protein, 1138 aa, Homo sapiens
MGDFAAPAAAANGSSICINSSLNSSLGGAGIGVNNTPNSTPAAPSSNHPAAGGCGGSGGPGGGSAAVPKHSTVVERLRQRIEGCRRHHVNCENRYQQAQVEQLELERRDTVSLYQRTLEQRAKKSGAGTGKQQHPSKPQQDAEAASAEQRNHTLIMLQETVKRKLEGARSPLNGDQQNGACDGNFSPTSKRIRKDISAGMEAINNLPSNMPLPSASPLHQLDLKPSLPLQNSGTHTPGLLEDLSKNGRLPEIKLPVNGCSDLEDSFTILQSKDLKQEPLDDPTCIDTSETSLSNQNKLFSDINLNDQEWQELIDELANTVPEDDIQDLFNEDFEEKKEPEFSQPATETPLSQESASVKSDPSHSPFAHVSMGSPQARPSSSGPPFSTVSTATSLPSVASTPAAPNPASSPANCAVQSPQTPNQAHTPGQAPPRPGNGYLLNPAAVTVAGSASGPVAVPSSDMSPAEQLKQMAAQQQQRAKLMQQKQQQQQQQQQQQQQQQQQQQQQQQQQHSNQTSNWSPLGPPSSPYGAAFTAEKPNSPMMYPQAFNNQNPIVPPMANNLQKTTMNNYLPQNHMNMINQQPNNLGTNSLNKQHNILTYGNTKPLTHFNADLSQRMTPPVANPNKNPLMPYIQQQQQQQQQQQQQQQQQQPPPPQLQAPRAHLSEDQKRLLLMKQKGVMNQPMAYAALPSHGQEQHPVGLPRTTGPMQSSVPPGSGGMVSGASPAGPGFLGSQPQAAIMKQMLIDQRAQLIEQQKQQFLREQRQQQQQQQQQILAEQQLQQSHLPRQHLQPQRNPYPVQQVNQFQGSPQDIAAVRSQAALQSMRTSRLMAQNAGMMGIGPSQNPGTMATAAAQSEMGLAPYSTTPTSQPGMYNMSTGMTQMLQHPNQSGMSITHNQAQGPRQPASGQGVGMVSGFGQSMLVNSAITQQHPQMKGPVGQALPRPQAPPRLQSLMGTVQQGAQSWQQRSLQGMPGRTSGELGPFNNGASYPLQAGQPRLTKQHFPQGLSQSVVDANTGTVRTLNPAAMGRQMMPSLPGQQGTSQARPMVMSGLSQGVPGMPAFSQPPAQQQIPSGSFAPSSQSQAYERNAPQDVSYNYSGDGAGGSFPGLPDGADLVDSIIKGGPGDEWMQELDELFGNP

SEQ ID NO: 22558 - protein, 230 aa, Homo sapiens
MCGNNMSTPLPAIVPAARKATAAVIFLHGLGDTGHGWAEAFAGIRSSHIKYICPHAPVRPVTLNMNVAMPSWFDIIGLSPDSQEDESGIKQAAENIKALIDQEVKNGIPSNRIILGGFSQGGALSLYTALTTQQKLAGVTALSCWLPLRASFPQGPIGGANRDISILQCHGDCDPLVPLMFGSLTVEKLKTLVNPANVTFKTYEGMMHSSCQQEMMDVKQFIDKLLPPID

SEQ ID NO: 22559 - protein, 214 aa, Homo sapiens
MCGNNMSTPLPAIVPAARKATAAVIFLHGLGDTGHGWAEAFAGIRSSHIKYICPHAFDIIGLSPDSQEDESGIKQAAENIKALIDQEVKNGIPSNRIILGGFSQGGALSLYTALTTQQKLAGVTALSCWLPLRASFPQGPIGGANRDISILQCHGDCDPLVPLMFGSLTVEKLKTLVNPANVTFKTYEGMMHSSCQQEMMDVKQFIDKLLPPID

SEQ ID NO: 22560 - protein, 231 aa, Homo sapiens
MCGNTMSVPLLTDAATVSGAERETAAVIFLHGLGDTGHSWADALSTIRLPHVKYICPHAPRIPVTLNMKMVMPSWFDLMGLSPDAPEDEAGIKKAAENIKALIEHEMKNGIPANRIVLGGFSQGGALSLYTALTCPHPLAGIVALSCWLPLHRAFPQAANGSAKDLAILQCHGELDPMVPVRFGALTAEKLRSVVTPARVQFKTYPGVMHSSCPQEMAAVKEFLEKLLPPV

SEQ ID NO: 22561 - protein, 141 aa, Homo sapiens
MWVLGIAATFCGLFLLPGFALQIQCYQCEEFQLNNDCSSPEFIVNCTVNVQDMCQKEVMEQSAGIMYRKSCASSAACLIASAGYQSFCSPGKLNSVCISCCNTPLCNGPRPKKRGSSASALRPGLRTTILFLKLALFSAHC

SEQ ID NO: 22562 - protein, 164 aa, Homo sapiens
MQAPRAAPAAPLSYDRRPRDSGRMWVLGIAATFCGLFLLPGFALQIQCYQCEEFQLNNDCSSPEFIVNCTVNVQDMCQKEVMEQSAGIMYRKSCASSAACLIASAGYQSFCSPGKLNSVCISCCNTPLCNGPRPKKRGSSASALRPGLRTTILFLKLALFSAHC

SEQ ID NO: 22563 - protein, 157 aa, Homo sapiens
MQAPRAAPAAPLSYDRRLRGSIAATFCGLFLLPGFALQIQCYQCEEFQLNNDCSSPEFIVNCTVNVQDMCQKEVMEQSAGIMYRKSCASSAACLIASAGYQSFCSPGKLNSVCISCCNTPLCNGPRPKKRGSSASALRPGLRTTILFLKLALFSAHC

SEQ ID NO: 22564 - protein, 89 aa, Homo sapiens
MCQKEVMEQSAGIMYRKSCASSAACLIASAGYQSFCSPGKLNSVCISCCNTPLCNGPRPKKRGSSASALRPGLRTTILFLKLALFSAHC

SEQ ID NO: 22565 - protein, 125 aa, Homo sapiens
MRGTRLALLALVLAACGELAPALRCYVCPEPTGVSDCVTIATCTTNETMCKTTLYSREIVYPFQGDSTVTKSCASKCKPSDVDGIGQTLPVSCCNTELCNVDGAPALNSLHCGALTLLPLLSLRL

SEQ ID NO: 22566 - protein, 346 aa, Homo sapiens [sequence omitted]

SEQ ID NO: 22567 - protein, 246 aa, Homo sapiens
MGPQHLRLVQLFCLLGAISTLPRAGALLCYEATASRFRAVAFHNWKWLLMRNMVCKLQEGCEETLVFIETGTARGVVGFKGCSSSSSYPAQISYLVSPPGVSIASYSRVCRSYLCNNLTNLEPFVKLKASTPKSITSASCSCPTCVGEHMKDCLPNFVTTNSCPLAASTCYSSTLKFQAGFLNTTFLLMGCAREHNQLLADFHHIGSIKVTEVLNILEKSQIVGAASSRQDPAWGVVLGLLFAFRD

SEQ ID NO: 22568 - protein, 211 aa, Homo sapiens
MGPQHLRLVQLFCLLGAISTLPRMSCGAGCYKTQKGTARGVVGFKGCSSSSSYPAQISYLVSPPGVSIASYSRVCRSYLCNNLTNLEPFVKLKASTPKSITSASCSCPTCVGEHMKDCLPNFVTTNSCPLAASTCYSSTLKFQAGFLNTTFLLMGCAREHNQLLADFHHIGSIKVTEVLNILEKSQIVGAASSRQDPAWGVVLGLLFAFRD

SEQ ID NO: 22569 - protein, 251 aa, Homo sapiens
MAMGVPRVILLCLFGAALCLTGSQALQCYSFEHTYFGPFDLRAMKLPSISCPHECFEAILSLDTGYRAPVTLVRKGCWTGPPAGQTQSNADALPPDYSVVRGCTTDKCNAHLMTHDALPNLSQAPDPPTLSGAECYACIGVHQDDCAIGRSRRVQCHQDQTACFQGNGRMTVGNFSVPVYIRTCHRPSCTTEGTTSPWTAIDLQGSCCEGYLCNRKSMTQPFTSASATTPPRALQVLALLLPVLLLVGLSA

SEQ ID NO: 22570 - protein, 208 aa, Homo sapiens
MKLPSISCPHECFEAILSLDTGYRAPVTLVRKGCWTGPPAGQTQSNADALPPDYSVVRGCTTDKCNAHLMTHDALPNLSQAPDPPTLSGAECYACIGVHQDDCAIGRSRRVQCHQDQTACFQGNGRMTVGNFSVPVYIRTCHRPSCTTEGTTSPWTAIDLQGSCCEGYLCNRKSMTQPFTSASATTPPRALQVLALLLPVLLLVGLSA

SEQ ID NO: 22571 - protein, 371 aa, Homo sapiens
MSAQAQMRALLDQLMGTARDGDETRQRVKFTDDRVCKSHLLDCCPHDILAGTRMDLGECTKIHDLALRADYEIASKERDLFFELDAMDHLESFIAECDRRTELAKKRLAETQEEISAEVSAKAEKVHELNEEIGKLLAKAEQLGAEGNVDESQKILMEVEKVRAKKKEAEEEYRNSMPASSFQQQKLRVCEVCSAYLGLHDNDRRLADHFGGKLHLGFIQIREKLDQLRKTVAEKQEKRNQDRLRRREEREREERLSRRSGSRTRDRRRSRSRDRRRRRSRSTSRERRKLSRSRSRDRHRRHRSRSRSHSRGHRRASRDRSAKYKFSRERASREESWESGRSERGPPDWRLESSNGKMASRRSEEKEAGEI

SEQ ID NO: 22572 - protein, 325 aa, Homo sapiens
MSAQAQMRALLDQLMGTARDGDETRQRVKFTDDRVCKSHLLDCCPHDILAGTRMDLGECTKIHDLALRADYEIASKERDLFFELDAMDHLESFIAECDRRTELAKKRLAETQEEISAEVSAKAEKVHELNEEIGKLLAKAEQLGAEGNVDESQKILMEVEKVRAKKKEAEEEYRNSMPASSFQQQKLRVCEVCSAYLGLHDNDRRLADHFGGKLHLGFIQIREKLDQLRKTVAEKQEKRNQDRLRRREEREREERLSRRSGSRTRDRRRSRSRDRRRRRSRSTSRERRKLSRSRSRDRHRRHRSRSRSHSRGHRRASRDRSAKYK

SEQ ID NO: 22573 - protein, 354 aa, Homo sapiens
MQMGDETRQRVKFTDDRVCKSHLLDCCPHDILAGTRMDLGECTKIHDLALRADYEIASKERDLFFELDAMDHLESFIAECDRRTELAKKRLAETQEEISAEVSAKAEKVHELNEEIGKLLAKAEQLGAEGNVDESQKILMEVEKVRAKKKEAEEEYRNSMPASSFQQQKLRVCEVCSAYLGLHDNDRRLADHFGGKLHLGFIQIREKLDQLRKTVAEKQEKRNQDRLRRREEREREERLSRRSGSRTRDRRRSRSRDRRRRRSRSTSRERRKLSRSRSRDRHRRHRSRSRSHSRGHRRASRDRSAKYKFSRERASREESWESGRSERGPPDWRLESSNGKMASRRSEEKEAGEI

SEQ ID NO: 22574 - protein, 171 aa, Homo sapiens
MEPGPALAWLLLLSLLADCLKAAQSRDFTVKDIIYLHPSTTPYPGGFKCFTCEKAADNYECNRWAPDIYCPRETRYCYTQHTMEVTGNSISVTKRCVPLEECLSTGCRDSEHEGHKVCTSCCEGNICNLPLPRNETDATFATTSPINQTNGHPRCMSVIVSCLWLWLGLML

SEQ ID NO: 22575 - protein, 76 aa, Homo sapiens
MEPGPALAWLLLLSLLADCLKAAQSRDFTVKDIIYLHPSTTPYPGGFKCFTCEKAADNYECNRWAPDIYCPRGTMI

SEQ ID NO: 22576 - protein, 237 aa, Homo sapiens
MKGILVAGITAVLVAAVESLSCVQCNSWEKSCVNSIASECPSHANTSCISSSASSSLETPVRLYQNMFCSAENCSEETHITAFTVHVSAEEHFHFVSQCCQGKECSNTSDALDPPLKNVSSNAECPACYESNGTSCHGKPWKCYEEEQCVFLVAELKNDIESKSLVLKGCSNVSNATCQFLSGENKTLGGVIFRKFECANVNSLTPTSAPTTSHNVGSKASLYLLALASLLLRGLLP

SEQ ID NO: 22577 - protein, 237 aa, Homo sapiens
MAAASGSVLQRCIVSPAGRHSASLIFLHGSGDSGQGLRMWIKQVLNQDLTFQHIKIIYPTAPPRSYTPMKGGISNVWFDRFKITNDCPEHLESIDVMCQVLTDLIDEEVKSGIKKNRILIGGFSMGGCMAIHLAYRNHQDVAGVFALSSFLNKASAVYQALQKSNGVLPELFQCHGTADELVLHSWAEETNSMLKSLGVTTKFHSFPNVYHELSKTELDILKLWILTKLPGEMEKQK

SEQ ID NO: 22578 - protein, 221 aa, Homo sapiens
MAAASGSVLQRCIVSPAGRHSASLIFLHGSGDSGQGLRMWIKQVLNQDLTFQHIKIIYPTAPPRFKITNDCPEHLESIDVMCQVLTDLIDEEVKSGIKKNRILIGGFSMGGCMAIHLAYRNHQDVAGVFALSSFLNKASAVYQALQKSNGVLPELFQCHGTADELVLHSWAEETNSMLKSLGVTTKFHSFPNVYHELSKTELDILKLWILTKLPGEMEKQK

SEQ ID NO: 22579 - protein, 582 aa, Homo sapiens
MAARSWQDELAQQAEEGSARLREMLSVGLGFLRTELGLDLGLEPKRYPGWVILVGTGALGLLLLFLLGYGWAAACAGARKKRRSPPRKREEAAAVPAAAPDDLALLKNLRSEEQKKKNRKKLSEKPKPNGRTVEVAEGEAVRTPQSVTAKQPPEIDKKNEKSKKNKKKSKSDAKAVQNSSRHDGKEVDEGAWETKISHREKRQQRKRDKVLTDSGSLDSTIPGIENTITVTTEQLTTASFPVGSKKNKGDSHLNVQVSNFKSGKGDSTLQVSSGLNENLTVNGGGWNEKSVKLSSQISAGEEKWNSVSPASAGKRKTEPSAWSQDTGDANTNGKDWGRSWSDRSIFSGIGSTAEPVSQSTTSDYQWDVSRNQPYIDDEWSGLNGLSSADPNSDWNAPAEEWGNWVDEERASLLKSQEPIPDDQKVSDDDKEKGEGALPTGKSKKKKKKKKKQGEDNSTAQDTEELEKEIREDLPVNTSKTRPKQEKAFSLKTISTSDPAEVLVKNSQPIKTLPPATSTEPSVILSKSDSDKSSSQVPPILQETDKSKSNTKQNSVPPSQTKSETSWESPKQIKKKKKARRET

SEQ ID NO: 22580 - protein, 338 aa, Homo sapiens
MSLSAFTLFLALIGGTSGQYYDYDFPLSIYGQSSPNCAPECNCPESYPSAMYCDELKLKSVPMVPPGIKYLYLRNNQIDHIDEKAFENVTDLQWLILDHNLLENSKIKGRVFSKLKQLKKLHINHNNLTESVGPLPKSLEDLQLTHNKITKLGSFEGLVNLTFIHLQHNRLKEDAVSAAFKGLKSLEYLDLSFNQIARLPSGLPVSLLTLYLDNNKISNIPDEYFKRFNALQYLRLSHNELADSGIPGNSFNVSSLVELDLSYNKLKNIPTVNENLENYYLEVNQLEKFDIKSFCKILGPLSYSKIKHLRLDGNRISETSLPPDMYECLRVANEVTLN

SEQ ID NO: 22581 - protein, 231 aa, Homo sapiens
MEDSPLPDLRDIELKLGRKVPESLVRSLRGEEPVPRERDRDPCGGSGGGGGGGGGGGGCSSSSSYCSFPPSLSSSSSSSPTSGSPRGSHSSALERLETKLHLLRQEMVNLRATDVRLMRQLLVINESIESIKWMIEEKATITSRGSSLSGSLCSLLESQSTSLRGSYNSLHDGSDGLDGISVGSYLDTLADDVPGHQTPSDLDQFSDSSLIEDSQALHKRPKLDSEYYCFG

SEQ ID NO: 22582 - protein, 445 aa, Homo sapiens
MLKKQSAGLVLWGAILFVAWNALLLLFFWTRPAPGRPPSVSALDGDPASLTREVIRLAQDAEVELERQRGLLQQIGDALSSQRGRVPTAAPPAQPRVPVTPAPAVIPILVIACDRSTVRRCLDKLLHYRPSAELFPIIVSQDCGHEETAQAIASYGSAVTHIRQPDLSSIAVPPDHRKFQGYYKIARHYRWALGQVFRQFRFPAAVVVEDDLEVAPDFFEYFRATYPLLKADPSLWCVSAWNDNGKEQMVDASRPELLYRTDFFPGLGWLLLAELWAELEPKWPKAFWDDWMRRPEQRQGRACIRPEISRTMTFGRKGVSHGQFFDQHLKFIKLNQQFVHFTQLDLSYLQREAYDRDFLARVYGAPQLQVEKVRTNDRKELGEVRVQYTGRDSFKAFAKALGVMDDLKSGVPRAGYRGIVTFQFRGRRVHLAPPLTWEGYDPSWN

SEQ ID NO: 22583 - protein, 447 aa, Homo sapiens
MRFRIYKRKVLILTLVVAACGFVLWSSNGRQRKNEALAPPLLDAEPARGAGGRGGDHPSVAVGIRRVSNVSAASLVPAVPQPEADNLTLRYRSLVYQLNFDQTLRNVDKAGTWAPRELVLVVQVHNRPEYLRLLLDSLRKAQGIDNVLVIFSHDFWSTEINQLIAGVNFCPVLQVFFPFSIQLYPNEFPGSDPRDCPRDLPKNAALKLGCINAEYPDSFGHYREAKFSQTKHHWWWKLHFVWERVKILRDYAGLILFLEEDHYLAPDFYHVFKKMWKLKQQECPECDVLSLGTYSASRSFYGMADKVDVKTWKSTEHNMGLALTRNAYQKLIECTDTFCTYDDYNWDWTLQYLTVSCLPKFWKVLVPQIPRIFHAGDCGMHHKKTCRPSTQSAQIESLLNNNKQYMFPETLTISEKFTVVAISPPRKNGGWGDIRDHELCKSYRRLQ

SEQ ID NO: 22584 - protein, 741 aa, Homo sapiens
MAEPVSPLKHFVLAKKAITAIFDQLLEFVTEGSHFVEATYKNPELDRIATEDDLVEMQGYKDKLSIIGEVLSRRHMKVAFFGRTSSGKSSVINAMLWDKVLPSGIGHITNCFLSVEGTDGDKAYLMTEGSDEKKSVKTVNQLAHALHMDKDLKAGCLVRVFWPKAKCALLRDDLVLVDSPGTDVTTELDSWIDKFCLDADVFVLVANSESTLMNTEKHFFHKVNERLSKPNIFILNNRWDASASEPEYMEDVRRQHMERCLHFLVEELKVVNALEAQNRIFFVSAKEVLSARKQKAQGMPESGVALAEGFHARLQEFQNFEQIFEECISQSAVKTKFEQHTIRAKQILATVKNIMDSVNLAAEDKRHYSVEEREDQIDRLDFIRNQMNLLTLDVKKKIKEVTEEVANKVSCAMTDEICRLSVLVDEFCSEFHPNPDVLKIYKSELNKHIEDGMGRNLADRCTDEVNALVLQTQQEIIENLKPLLPAGIQDKLHTLIPCKKFDLSYNLNYHKLCSDFQEDIVFRFSLGWSSLVHRFLGPRNAQRVLLGLSEPIFQLPRSLASTPTAPTTPATPDNASQEELMITLVTGLASVTSRTSMGIIIVGGVIWKTIGWKLLSVSLTMYGALYLYERLSWTTHAKERAFKQQFVNYATEKLRMIVSSTSANCSHQVKQQIATTFARLCQQVDITQKQLEEEIARLPKEIDQLEKIQNNSKLLRNKAVQLENELENFTKQFLPSSNEES

SEQ ID NO: 22585 - protein, 370 aa, Homo sapiens
MAEPVSPLKHFVLAKKAITAIFDQLLEFVTEGSHFVEATYKNPELDRIATEDDLVEMQGYKDKLSIIGEVLSRRHMKVAFFGRTSSGKSSVINAMLWDKVLPSGIGHITNCFLSVEGTDGDKAYLMTEGSDEKKSVKTVNQLAHALHMDKDLKAGCLVRVFWPKAKCALLRDDLVLVDSPGTDVTTELDSWIDKFCLDADVFVLVANSESTLMNTEKHFFHKVNERLSKPNIFILNNRWDASASEPEYMEDVRRQHMERCLHFLVEELKVVNALEAQNRIFFVSAKEVLSARKQKAQGMPESGVALAEGFHARLQEFQNFEQIFEECISQSAVKTKFEQHTIRAKQILATVKNIMDSVNLAAEDKRFHVQ

SEQ ID NO: 22586 - protein, 630 aa, Homo sapiens
MAEPVSPLKHFVLAKKAITAIFDQLLEFVTEGSHFVEATYKNPELDRIATEDDLVEMQGYKDKLSIIGEVLSRRHMKVAFFGRTSSGKSSVINAMLWDKVLPSGIGHITNCFLSVEGTDGDKAYLMTEGSDEKKSVKTVNQLAHALHMDKDLKAGCLVRVFWPKAKCALLRDDLVLVDSPGTDVTTELDSWIDKFCLDADVFVLVANSESTLMNTEKHFFHKVNERLSKPNIFILNNRWDASASEPEYMEDVRRQHMERCLHFLVEELKVVNALEAQNRIFFVSAKEVLSARKQKAQGMPESGVALAEGFHARLQEFQNFEQIFEECISQSAVKTKFEQHTIRAKQILATVKNIMDSVNLAAEDKRHYSVEEREDQIDRLDFIRNQMNLLTLDVKKKIKEVTEEVANKVSCAMTDEICRLSVLVDEFCSEFHPNPDVLKIYKSLPRSLASTPTAPTTPATPDNASQEELMITLVTGLASVTSRTSMGIIIVGGVIWKTIGWKLLSVSLTMYGALYLYERLSWTTHAKERAFKQQFVNYATEKLRMIVSSTSANCSHQVKQQIATTFARLCQQVDITQKQLEEEIARLPKEIDQLEKIQNNSKLLRNKAVQLENELENFTKQFLPSSNEES

SEQ ID NO: 22587 - protein, 533 aa, Homo sapiens
MKMRRYKLFLMFCMAGLCLISFLHFFKTLSYVTFPRELASLSPNLVSSFFWNNAPVTPQASPEPGGPDLLRTPLYSHSPLLQPLPPSKAAEELHRVDLVLPEDTTEYFVRTKAGGVCFKPGTKMLERPPPGRPEEKPEGANGSSARRPPRYLLSARERTGGRGARRKWVECVCLPGWHGPSCGVPTVVQYSNLPTKERLVPREVPRRVINAINVNHEFDLLDVRFHELGDVVDAFVVCESNFTAYGEPRPLKFREMLTNGTFEYIRHKVLYVFLDHFPPGGRQDGWIADDYLRTFLTQDGVSRLRNLRPDDVFIIDDADEIPARDGVLFLKLYDGWTEPFAFHMRKSLYGFFWKQPGTLEVVSGCTVDMLQAVYGLDGIRLRRRQYYTMPNFRQYENRTGHILVQWSLGSPLHFAGWHCSWCFTPEGIYFKLVSAQNGDFPRWGDYEDKRDLNYIRGLIRTGGWFDGTQQEYPPADPSEHMYAPKYLLKNYDRFHYLLDNPYQEPRSTAAGGWRHRGPEGRPPARGKLDEAEV

SEQ ID NO: 22588 - protein, 472 aa, Homo sapiens
MSVVHQLSAGWLLDHLSFINKINYQLHQHHEPCCRKKEFTTSVHFESLQMDSVSSSGVCAAFIASDSSTKPENDDGGNYEMFTRKFVFRPELFDVTKPYITPAVHKECQQSNEKEDLMNGVKKEISISIIGKKRKRCVVFNQGELDAMEYHTKIRELILDGSLQLIQEGLKSGFLYPLFEKQDKGSKPITLPLDACSLSELCEMAKHLPSLNEMEHQTLQLVEEDTSVTEQDLFLRVVENNSSFTKVITLMGQKYLLPPKSSFLLSDISCMQPLLNYRKTFDVIVIDPPWQNKSVKRSNRYSYLSPLQIQQIPIPKLAAPNCLLVTWVTNRQKHLRFIKEELYPSWSVEVVAEWHWVKITNSGEFVFPLDSPHKKPYEGLILGRVQEKTALPLRNADVNVLPIPDHKLIVSVPCTLHSHKPPLAEVLKDYIKPDGEYLELFARNLQPGWTSWGNEVLKFQHVDYFIAVESGS

SEQ ID NO: 22589 - protein, 176 aa, Homo sapiens
MARLPKLAVFDLDYTLWPFWVDTHVDPPFHKSSDGTVRDRRGQDVRLYPEVPEVLKRLQSLGVPGAAASRTSEIEGANQLLELFDLFRYFVHREIYPGSKITHFERLQQKTGIPFSQMIFFDDERRNIVDVSKLGVTCIHIQNGMNLQTLSQGLETFAKAQTGPLRSSLEESPFEA

SEQ ID NO: 22590 - protein, 127 aa, Homo sapiens
MARLPKLAVFDLDYTLWPFWVDTHVDPPFHKSSDGTVRDRRGQDVRLYPEVPEVLKRLQSLGVPGAAASRTSEIEGANQLLELFDLFRYFVHREIYPGSKITHFERYAEIREEQGEKVSERPGKPRY

SEQ ID NO: 22591 - protein, 122 aa, Homo sapiens
MARLPKLAVFDLDYTLWPFWVDTHVDPPFHKSSDGTVRDRRGQDVRLYPEVPEVLKRLQSLGVPGAAASRTSEIEGANQLLELFDLFRCYLHSHPEWNESSNSKSRVRDICEGPNWAFEVQP

SEQ ID NO: 22592 - protein, 131 aa, Homo sapiens
MARSLVCLGVIILLSAFSGPGVRGGPMPKLADRKLCADQECSHPISMAVALQDYMAPDCRFLTIHRGQVVYVFSKLKGRGRLFWGGSVQGDYYGDLAARLGYFPSSIVREDQTLKPGKVDVKTDKWDFYCQ

SEQ ID NO: 22593 - protein, 60 aa, Homo sapiens
MARSLVCLGVIILLSAFSGPGVRGGPMPKLADRKLCADQECSRSGRLLWRSGCSPGLFPQ

SEQ ID NO: 22594 - protein, 209 aa, Homo sapiens
MKKVRLKELESRLQQVDGFEKPKLLLEQYPTRPHIAACMLYTIHNTYDDIENKVVADLGCGCGVLSIGTAMLGAGLCVGFDIDEDALEIFNRNAEEFELTNIDMVQCDVCLLSNRMSKSFDTVIMNPPFGTKNNKGTDMAFLKTALEMARTAVYSLHKSSTREHVQKKAAEWKIKIDIIAELRYDLPASYKFHKKKSVDIEVDLIRFSF

SEQ ID NO: 22595 - protein, 284 aa, Homo sapiens
MASLQRKGLQARILTSEEEEKLKRDQTLVSDFKQQKLEQEAQKNWDLFYKRNSTNFFKDRHWTTREFEELRSCREFEDQKLTMLEAGCGVGNCLFPLLEEDPNIFAYACDFSPRAIEYVKQNPLYDTERCKVFQCDLTKDDLLDHVPPESVDVVMLIFVLSAVHPDKMHLVLQNIYKVLKPGKSVLFRDYGLYDHAMLRFKASSKLGENFYVRQDGTRSYFFTDDFLAQLFMDTGYEEVVNEYVFRETVNKKEGLCVPRVFLQSKFLKPPKNPSPVVLGLDPKS

SEQ ID NO: 22596 - protein, 240 aa, Homo sapiens
MASLQRKGLQARILTSEEEEKLKRDQTLVSDFKQQKLEQEAQKNWDLFYKRNSTNFFKDRHWTTREFEELRSCREFEDQKLTMLEAGCGVGNCLFPLLEEDPNIFAYACDFSPRAIEYVKQNPLYDTERCKVFQCDLTKDDLLDHVPPESVDVVMLIFVLSAVHPDKMHLVLQNIYKCHGCSSELRQPWDKDDFAVTWDPWSPAIRVLLCHSGWSAVAWTWLTAASTSWAQAVLPPQPLK

SEQ ID NO: 22597 - protein, 1006 aa, Homo sapiens
MSNSRNNRVMVEGVGARVVRGPDWKWGKQDGGEGHVGTVRSFESPEEVVVVWDNGTAANYRCSGAYDLRILDSAPTGIKHDGTMCDTCRQQPIIGIRWKCAECTNYDLCTVCYHGDKHHLRHRFYRITTPGSERVLLESRRKSKKITARGIFAGARVVRGVDWQWEDQDGGNGRRGKVTEIQDWSASSPHSAAYVLWDNGAKNLYRVGFEGMSDLKCVQDAKGGSFYRDHCPVLGEQNGNRNPGGLQIGDLVNIDLDLEIVQSLQHGHGGWTDGMFETLTTTGTVCGIDEDHDIVVQYPSGNRWTFNPAVLTKANIVRSGDAAQGAEGGTSQFQVGDLVQVCYDLERIKLLQRGHGEWAEAMLPTLGKVGRVQQIYSDSDLKVEVCGTSWTYNPAAVSKVASAGSAISNASGERLSQLLKKLFETQESGDLNEELVKAAANGDVAKVEDLLKRPDVDVNGQCAGHTAMQAASQNGHVDILKLLLKQNVDVEAEDKDGDRAVHHAAFGDEGAVIEVLHRGSADLNARNKRRQTPLHIAVNKGHLQVVKTLLDFGCHPSLQDSEGDTPLHDAISKKRDDILAVLLEAGADVTITNNNGFNALHHAALRGNPSAMRVLLSKLPRPWIVDEKKDDGYTALHLAALNNHVEVAELLVHQGNANLDIQNVNQQTALHLAVERQHTQIVRLLVRAGAKLDIQDKDGDTPLHEALRHHTLSQLRQLQDMQDVGKVDAAWEPSKNTLIMGLGTQGAEKKSAASIACFLAANGADLSIRNKKGQSPLDLCPDPNLCKALAKCHKEKVSGQVGSRSPSMISNDSETLEECMVCSDMKRDTLFGPCGHIATCSLCSPRVKKCLICKEQVQSRTKIEECVVCSDKKAAVLFQPCGHMCACENCANLMKKCVQCRAVVERRVPFIMCCGGKSSEDATDDISSGNIPVLQKDKDNTNVNADVQKLQQQLQDIKEQTMCPVCLDRLKNMIFLCGHGTCQLCGDRMSECPICRKAIERRILLY

SEQ ID NO: 22598 - protein, 291 aa, Homo sapiens
MNMIWRNSISCLRLGKVPHRYQSGYHPVAPLGSRILTDPAKVFEHNMWDHMQWSKEEEAAARKKVKENSAVRVLLEEQVKYEREASKYWDTFYKIHKNKFFKDRNWLLREFPEILPVDQKPEEKARESSWDHVKTSATNRFSRMHCPTVPDEKNHYEKSSGSSEGQSKTESDFSNLDSEKHKKGPMETGLFPGSNATFRILEVGCGAGNSVFPILNTLENSPESFLYCCDFASGAVELVKSHSSYRATQCFAFVHDVCDDGLPYPFPDGILDVILLVFVLSSIHPDRTLFI

SEQ ID NO: 22599 - protein, 241 aa, Homo sapiens
MQWSKEEEAAARKKVKENSAVRVLLEEQVKYEREASKYWDTFYKIHKNKFFKDRNWLLREFPEILPVDQKPEEKARESSWDHVKTSATNRFSRMHCPTVPDEKNHYEKSSGSSEGQSKTESDFSNLDSEKHKKGPMETGLFPGSNATFRILEVGCGAGNSVFPILNTLENSPESFLYCCDFASGAVELVKSHSSYRATQCFAFVHDVCDDGLPYPFPDGILDVILLVFVLSSIHPDRTLFI

SEQ ID NO: 22600 - protein, 318 aa, Homo sapiens
MRLLAGWLCLSLASVWLARRMWTLRSPLTRSLYVNMTSGPGGPAAAAGGRKENHQWYVCNREKLCESLQAVFVQSYLDQGTQIFLNNSIEKSGWLFIQLYHSFVSSVFSLFMSRTSINGLLGRGSMFVFSPDQFQRLLKINPDWKTHRLLDLGAGDGEVTKIMSPHFEEIYATELSETMIWQLQKKKYRVLGINEWQNTGFQYDVISCLNLLDRCDQPLTLLKDIRSVLEPTRGRVILALVLPFHPYVENVGGKWEKPSEILEIKGQNWEEQVNSLPEVFRKAGFVIEAFTRLPYLCEGDMYNDYYVLDDAVFVLKPV

SEQ ID NO: 22601 - protein, 317 aa, Homo sapiens
MRLLAGWLCLSLASVWLARRMWTLRSPLTRSLYVNMTSGPGGPAAAAGGRKENHQWYVCNREKLCESLQAVFVQSYLDQGTQIFLNNSIEKSGWLFIQLYHSFVSSVFSLFMSRTSINGLLGRGSMFVFSPDQFQRLLKINPDWKTHRLLDLGAGDGEVTKIMSPHFEEIYATELSETMIWQLQKKKYRVLGINEWQNTGFQYDVISCLNLLDRCDQPLTLLKDIRSVLEPTRGRVILALVLPFHPYVENGGKWEKPSEILEIKGQNWEEQVNSLPEVFRKAGFVIEAFTRLPYLCEGDMYNDYYVLDDAVFVLKPV

SEQ ID NO: 22602 - protein, 1013 aa, Homo sapiens
MGWKPSEARGQSQSFQASGLQPRSLKAARRATGRPDRSRAARPTMDPSAHRSRAAPPNMDPDPQAGVQVGMRVVRGVDWKWGQQDGGEGGVGTVVELGRHGSPSTPDRTVVVQWDQGTRTNYRAGYQGAHDLLLYDNAQIGVRHPNIICDCCKKHGLRGMRWKCRVCLDYDLCTQCYMHNKHELAHAFDRYETAHSRPVTLSPRQGLPRIPLRGIFQGAKVVRGPDWEWGSQDGGEGKPGRVVDIRGWDVETGRSVASVTWADGTTNVYRVGHKGKVDLKCVGEAAGGFYYKDHLPRLGKPAELQRRVSADSQPFQHGDKVKCLLDTDVLREMQEGHGGWNPRMAEFIGQTGTVHRITDRGDVRVQFNHETRWTFHPGALTKHHSFWVGDVVRVIGDLDTVKRLQAGHGEWTDDMAPALGRVGKVVKVFGDGNLRVAVAGQRWTFSPSCLVAYRPEEDANLDVAERARENKSSLSVALDKLRAQKSDPEHPGRLVVEVALGNAARALDLLRRRPEQVDTKNQGRTALQVAAYLGQVELIRLLLQARAGVDLPDDEGNTALHYAALGNQPEATRVLLSAGCRADAINSTQSTALHVAVQRGFLEVVRALCERGCDVNLPDAHSDTPLHSAISAGTGASGIVEVLTEVPNIDVTATNSQGFTLLHHASLKGHALAVRKILARARQLVDAKKEDGFTALHLAALNNHREVAQILIREGRCDVNVRNRKLQSPLHLAVQQAHVGLVPLLVDAGCSVNAEDEEGDTALHVALQRHQLLPLVADGAGGDPGPLQLLSRLQASGLPGSAELTVGAAVACFLALEGADVSYTNHRGRSPLDLAAEGRVLKALQGCAQRFRERQAGGGAAPGPRQTLGTPNTVTNLHVGAAPGPEAAECLVCSELALLVLFSPCQHRTVCEECARRMKKCIRCQVVVSKKLRPDGSEVASAAPAPGPPRQLVEELQSRYRQMEERITCPICIDSHIRLVFQCGHGACAPCGSALSACPICRQPIRDRIQIFV

SEQ ID NO: 22603 - protein, 999 aa, Homo sapiens
MGWKPSEARGQSQSFQASGLQPRSLKAARRATGRPDRSRAAPPNMDPDPQAGVQVGMRVVRGVDWKWGQQDGGEGGVGTVVELGRHGSPSTPDRTVVVQWDQGTRTNYRAGYQGAHDLLLYDNAQIGVRHPNIICDCCKKHGLRGMRWKCRVCLDYDLCTQCYMHNKHELAHAFDRYETAHSRPVTLSPRQGLPRIPLRGIFQGAKVVRGPDWEWGSQDGGEGKPGRVVDIRGWDVETGRSVASVTWADGTTNVYRVGHKGKVDLKCVGEAAGGFYYKDHLPRLGKPAELQRRVSADSQPFQHGDKVKCLLDTDVLREMQEGHGGWNPRMAEFIGQTGTVHRITDRGDVRVQFNHETRWTFHPGALTKHHSFWVGDVVRVIGDLDTVKRLQAGHGEWTDDMAPALGRVGKVVKVFGDGNLRVAVAGQRWTFSPSCLVAYRPEEDANLDVAERARENKSSLSVALDKLRAQKSDPEHPGRLVVEVALGNAARALDLLRRRPEQVDTKNQGRTALQVAAYLGQVELIRLLLQARAGVDLPDDEGNTALHYAALGNQPEATRVLLSAGCRADAINSTQSTALHVAVQRGFLEVVRALCERGCDVNLPDAHSDTPLHSAISAGTGASGIVEVLTEVPNIDVTATNSQGFTLLHHASLKGHALAVRKILARARQLVDAKKEDGFTALHLAALNNHREVAQILIREGRCDVNVRNRKLQSPLHLAVQQAHVGLVPLLVDAGCSVNAEDEEGDTALHVALQRHQLLPLVADGAGGDPGPLQLLSRLQASGLPGSAELTVGAAVACFLALEGADVSYTNHRGRSPLDLAAEGRVLKALQGCAQRFRERQAGGGAAPGPRQTLGTPNTVTNLHVGAAPGPEAAECLVCSELALLVLFSPCQHRTVCEECARRMKKCIRCQVVVSKKLRPDGSEVASAAPAPGPPRQLVEELQSRYRQMEERITCPICIDSHIRLVFQCGHGACAPCGSALSACPICRQPIRDRIQIFV

SEQ ID NO: 22604 - protein, 1009 aa, Homo sapiens
MGWKPSEARGQSQSFQASGLQPRSLKAARRATGRPDRSRAARPTMDPSAHRSRAAPPNMDPDPQAGVQVGMRVVRGVDWKWGQQDGGEGGVGTVVELGRHGSPSTPDRTVVVQWDQGTRTNYRAGYQGAHDLLLYDNAQIGVRHPNIICDCCKKHGLRGMRWKCRVCLDYDLCTQCYMHNKHELAHAFDRYETAHSRPVTLSPRQGLPRIPLRGIFQGAKVVRGPDWEWGSQDGGEGKPGRVVDIRGWDVETGRSVASVTWADGTTNVYRVGHKGKVDLKCVGEAAGGFYYKDHLPRLGKPAELQRRVSADSQPFQHGDKVKCLLDTDVLREMQEGHGGWNPRMAETGTVHRITDRGDVRVQFNHETRWTFHPGALTKHHSFWVGDVVRVIGDLDTVKRLQAGHGEWTDDMAPALGRVGKVVKVFGDGNLRVAVAGQRWTFSPSCLVAYRPEEDANLDVAERARENKSSLSVALDKLRAQKSDPEHPGRLVVEVALGNAARALDLLRRRPEQVDTKNQGRTALQVAAYLGQVELIRLLLQARAGVDLPDDEGNTALHYAALGNQPEATRVLLSAGCRADAINSTQSTALHVAVQRGFLEVVRALCERGCDVNLPDAHSDTPLHSAISAGTGASGIVEVLTEVPNIDVTATNSQGFTLLHHASLKGHALAVRKILARARQLVDAKKEDGFTALHLAALNNHREVAQILIREGRCDVNVRNRKLQSPLHLAVQQAHVGLVPLLVDAGCSVNAEDEEGDTALHVALQRHQLLPLVADGAGGDPGPLQLLSRLQASGLPGSAELTVGAAVACFLALEGADVSYTNHRGRSPLDLAAEGRVLKALQGCAQRFRERQAGGGAAPGPRQTLGTPNTVTNLHVGAAPGPEAAECLVCSELALLVLFSPCQHRTVCEECARRMKKCIRCQVVVSKKLRPDGSEVASAAPAPGPPRQLVEELQSRYRQMEERITCPICIDSHIRLVFQCGHGACAPCGSALSACPICRQPIRDRIQIFV

SEQ ID NO: 22605 - protein, 948 aa, Homo sapiens
MGWKPSEARGQSQSFQASGLQPRSLKAARRATGRPDRSRAARPTMDPSAHRSRAAPPNMDPDPQAGVQVGMRVVRGVDWKWGQQDGGEGGVGTVVELGRHGSPSTPDRTVVVQWDQGTRTNYRAGYQGAHDLLLYDNAQIGVRHPNIICDCCKKHGLRGMRWKCRVCLDYDLCTQCYMHNKHELAHAFDRYETAHSRPVTLSPRQGLPRIPLRGIFQGAKVVRGPDWEWGSQDGKPAELQRRVSADSQPFQHGDKVKCLLDTDVLREMQEGHGGWNPRMAEFIGQTGTVHRITDRGDVRVQFNHETRWTFHPGALTKHHSFWVGDVVRVIGDLDTVKRLQAGHGEWTDDMAPALGRVGKVVKVFGDGNLRVAVAGQRWTFSPSCLVAYRPEEDANLDVAERARENKSSLSVALDKLRAQKSDPEHPGRLVVEVALGNAARALDLLRRRPEQVDTKNQGRTALQVAAYLGQVELIRLLLQARAGVDLPDDEGNTALHYAALGNQPEATRVLLSAGCRADAINSTQSTALHVAVQRGFLEVVRALCERGCDVNLPDAHSDTPLHSAISAGTGASGIVEVLTEVPNIDVTATNSQGFTLLHHASLKGHALAVRKILARARQLVDAKKEDGFTALHLAALNNHREVAQILIREGRCDVNVRNRKLQSPLHLAVQQAHVGLVPLLVDAGCSVNAEDEEGDTALHVALQRHQLLPLVADGAGGDPGPLQLLSRLQASGLPGSAELTVGAAVACFLALEGADVSYTNHRGRSPLDLAAEGRVLKALQGCAQRFRERQAGGGAAPGPRQTLGTPNTVTNLHVGAAPGPEAAECLVCSELALLVLFSPCQHRTVCEECARRMKKCIRCQVVVSKKLRPDGSEVASAAPAPGPPRQLVEELQSRYRQMEERITCPICIDSHIRLVFQCGHGACAPCGSALSACPICRQPIRDRIQIFV

SEQ ID NO: 22606 - protein, 978 aa, Homo sapiens
MGWKPSEARGQSQSFQASGLQPRSLKAARRATGRPDRSRAARPTMDPSAHRSRAAPPNMDPDPQAGVQVGMRVVRGVDWKWGQQDGGEGGVGTVVELGRHGSPSTPDRTVVVQWDQGTRTNYRAGYQGAHDLLLYDNAQIGVRHPNIICDCCKKHGLRGMRWKCRVCLDYDLCTQCYMHNKHELAHAFDRYETAHSRPVTLSPRQGLPRIPLRGIFQGAKVVRGPDWEWGSQDGGEGKPGRVVDIRGWDVETGRSVASVTWADGTTNVYRVGHKGKVDLKCVGEAAGGFYYKDHLPRLGKPAELQRRVSADSQPFQHGDKVKCLLDTDVLREMQEGHGGWNPRMAEFIGQTGTVHRITDRGDVRVQFNHETRWTFHPGALTKALGRVGKVVKVFGDGNLRVAVAGQRWTFSPSCLVAYRPEEDANLDVAERARENKSSLSVALDKLRAQKSDPEHPGRLVVEVALGNAARALDLLRRRPEQVDTKNQGRTALQVAAYLGQVELIRLLLQARAGVDLPDDEGNTALHYAALGNQPEATRVLLSAGCRADAINSTQSTALHVAVQRGFLEVVRALCERGCDVNLPDAHSDTPLHSAISAGTGASGIVEVLTEVPNIDVTATNSQGFTLLHHASLKGHALAVRKILARARQLVDAKKEDGFTALHLAALNNHREVAQILIREGRCDVNVRNRKLQSPLHLAVQQAHVGLVPLLVDAGCSVNAEDEEGDTALHVALQRHQLLPLVADGAGGDPGPLQLLSRLQASGLPGSAELTVGAAVACFLALEGADVSYTNHRGRSPLDLAAEGRVLKALQGCAQRFRERQAGGGAAPGPRQTLGTPNTVTNLHVGAAPGPEAAECLVCSELALLVLFSPCQHRTVCEECARRMKKCIRCQVVVSKKLRPDGSEVASAAPAPGPPRQLVEELQSRYRQMEERITCPICIDSHIRLVFQCGHGACAPCGSALSACPICRQPIRDRIQIFV

SEQ ID NO: 22607 - protein, 753 aa, Homo sapiens
MDPDPQAGVQVGMRVVRGVDWKWGQQDGGEGGVGTVVELGRHGSPSTPDRTVVVQWDQGTRTNYRAGYQGAHDLLLYDNAQIGVRHPNIICDCCKKHGLRGMRWKCRVCLDYDLCTQCYMHNKHELAHAFDRYETAHSRPVTLSPRQGLPRIPLRGIFQGAKVVRGPDWEWGSQDGKPAELQRRVSADSQPFQHGDKVKCLLDTDVLREMQEGHGGWNPRMAEFIGQTGTVHRITDRGDVRVQFNHETRWTFHPGALTKHHSFWVGDVVRVIGDLDTVKRLQAGHGEWTDDMAPALGRVGKVVKVFGDGNLRVAVAGQRWTFSPSCLVAYRPEEDANLDVAERARENKSSLSVALDKLRAQKSDPEHPGRLVVEVALGNAARALDLLRRRPEQVDTKNQGRTALQVAAYLGQVELIRLLLQARAGVDLPDDEGNTALHYAALGNQPEATRVLLSAGCRADAINSTQSTALHVAVQRGFLEVVRALCERGCDVNLPDAHSDTPLHSAISAGTGASGIVEVLTEVPNIDVTATNSQGFTLLHHASLKGHALAVRKILARARQLVDAKKEDGFTALHLAALNNHREVAQILIREGRCDVNVRNRKLQSPLHLAVQQAHVGLVPLLVDAGCSVNAEDEEGDTALHVALQRHQLLPLVADGAGGDPGPLQLLSRLQASGLPGSAELTVGAAVACFLALEGADVSYTNHRGRSPLDLAAEGRVLKALQGCAQRFRVRAQDEEVHQVPGGRQQETAPRRL

SEQ ID NO: 22608 - protein, 854 aa, Homo sapiens
MRWKCRVCLDYDLCTQCYMHNKHELAHAFDRYETAHSRPVTLSPRQGLPRIPLRGIFQGAKVVRGPDWEWGSQDGGEGKPGRVVDIRGWDVETGRSVASVTWADGTTNVYRVGHKGKVDLKCVGEAAGGFYYKDHLPRLGKPAELQRRVSADSQPFQHGDKVKCLLDTDVLREMQEGHGGWNPRMAEFIGQTGTVHRITDRGDVRVQFNHETRWTFHPGALTKHHSFWVGDVVRVIGDLDTVKRLQAGHGEWTDDMAPALGRVGKVVKVFGDGNLRVAVAGQRWTFSPSCLVAYRPEEDANLDVAERARENKSSLSVALDKLRAQKSDPEHPGRLVVEVALGNAARALDLLRRRPEQVDTKNQGRTALQVAAYLGQVELIRLLLQARAGVDLPDDEGNTALHYAALGNQPEATRVLLSAGCRADAINSTQSTALHVAVQRGFLEVVRALCERGCDVNLPDAHSDTPLHSAISAGTGASGIVEVLTEVPNIDVTATNSQGFTLLHHASLKGHALAVRKILARARQLVDAKKEDGFTALHLAALNNHREVAQILIREGRCDVNVRNRKLQSPLHLAVQQAHVGLVPLLVDAGCSVNAEDEEGDTALHVALQRHQLLPLVADGAGGDPGPLQLLSRLQASGLPGSAELTVGAAVACFLALEGADVSYTNHRGRSPLDLAAEGRVLKALQGCAQRFRERQAGGGAAPGPRQTLGTPNTVTNLHVGAAPGPEAAECLVCSELALLVLFSPCQHRTVCEECARRMKKCIRCQVVVSKKLRPDGSEVASAAPAPGPPRQLVEELQSRYRQMEERITCPICIDSHIRLVFQCGHGACAPCGSALSACPICRQPIRDRIQIFV

SEQ ID NO: 22609 - protein, 802 aa, Homo sapiens
MDPDPQAGVQVGMRVVRGVDWKWGQQDGGEGGVGTVVELGRHGSPSTPDRTVVVQWDQGTRTNYRAGYQGAHDLLLYDNAQIGVRHPNIICDCCKKHGLRGMRWKCRVCLDYDLCTQCYMHNKHELAHAFDRYETAHSRPVTLSPRQGLPRIPLRGIFQGAKVVRGPDWEWGSQDGGEGKPGRVVDIRGWDVETGRSVASVTWADGTTNVYRVGHKGKVDLKCVGEAAGGFYYKDHLPRLGKPAELQRRVSADSQPFQHGDKVKCLLDTDVLREMQEGHGGWNPRMAEFIGQTGTVHRITDRGDVRVQFNHETRWTFHPGALTKHHSFWVGDVVRVIGDLDTVKRLQAGHGEWTDDMAPALGRVGKVVKVFGDGNLRVAVAGQRWTFSPSCLVAYRPEEDANLDVAERARENKSSLSVALDKLRAQKSDPEHPGRLVVEVALGNAARALDLLRRRPEQVDTKNQGRTALQVAAYLGQVELIRLLLQARAGVDLPDDEGNTALHYAALGNQPEATRVLLSAGCRADAINSTQSTALHVAVQRGFLEVVRALCERGCDVNLPDAHSDTPLHSAISAGTGASGIVEVLTEVPNIDVTATNSQGFTLLHHASLKGHALAVRKILARARQLVDAKKEDGFTALHLAALNNHREVAQILIREGRCDVNVRNRKLQSPLHLAVQQAHVGLVPLLVDAGCSVNAEDEEGDTALHVALQRHQLLPLVADGAGGDPGPLQLLSRLQASGLPGSAELTVGAAVACFLALEGADVSYTNHRGRSPLDLAAEGRVLKALQGCAQRFRERQAGRGR

SEQ ID NO: 22610 - protein, 672 aa, Homo sapiens
MGWKPSEARGQSQSFQASGLQPRSLKAARRATGRPDRSRAARPTMDPSAHRSRAAPPNMDPDPQAGVQVGMRVVRGVDWKWGQQDGGEGGVGTVVELGRHGSPSTPDRTVVVQWDQGTRTNYRAGYQGAHDLLLYDNAQIGVRHPNIICDCCKKHGLRGMRWKCRVCLDYDLCTQCYMHNKHELAHAFDRYETAHSRPVTLSPRQGLPRIPLRGIFQGAKVVRGPDWEWGSQDGGEGKPGRVVDIRGWDVETGRSVASVTWADGTTNVYRVGHKGKVDLKCVGEAAGGFYYKDHLPRLGKPAELQRRVSADSQPFQHGDKVKCLLDTDVLREMQEGHGGWNPRMAEFIGQTGTVHRITDRGDVRVQFNHETRWTFHPGALTKHHSFWVGDVVRVIGDLDTVKRLQAGHGEWTDDMAPALGRVGKVVKVFGDGNLRVAVAGQRWTFSPSCLVAYRPEEDANLDVAERARENKSSLSVALDKLRAQKSDPEHPGRLVVEVALGNAARALDLLRRRPEQVDTKNQGRTALQVAAYLGQVELIRLLLQARAGVDLPDDEGNTALHYAALGNQPEATRVLLSAGCRADAINSTQSTALHVAVQRGFLEVVRALCERGCDVNLPDAHSDTPLHSAISAGTGASGIVEVLTEVPNIDVTATNSQGFTLLHHASLKGHAL

SEQ ID NO: 22611 - protein, 977 aa, Homo sapiens
MGWKPSEARGQSQSFQASGLQPRSLKAARRATGRPDRSRAARPTMDPSAHRSRAAPPNMDPDPQAGVQVGMRVVRGVDWKWGQQDGGEGGVGTVVELGRHGSPSTPDRTVVVQWDQGTRTNYRAGYQGAHDLLLYDNAQIGVRHPNIICDCCKKHGLRGMRWKCRVCLDYDLCTQCYMHNKHELAHAFDRYETAHSRPVTLSPRQGLPRIPLRGIFQGAKVVRGPDWEWGSQDGGEGKPGRVVDIRGWDVETGRSVASVTWADGTTNVYRVGHKGKVDLKCVGEAAGGFYYKDHLPRLGKPAELQRRVSADSQPFQHGDKVKCLLDTDVLREMQEGHGGWNPRMAEHHSFWVGDVVRVIGDLDTVKRLQAGHGEWTDDMAPALGRVGKVVKVFGDGNLRVAVAGQRWTFSPSCLVAYRPEEDANLDVAERARENKSSLSVALDKLRAQKSDPEHPGRLVVEVALGNAARALDLLRRRPEQVDTKNQGRTALQVAAYLGQVELIRLLLQARAGVDLPDDEGNTALHYAALGNQPEATRVLLSAGCRADAINSTQSTALHVAVQRGFLEVVRALCERGCDVNLPDAHSDTPLHSAISAGTGASGIVEVLTEVPNIDVTATNSQGFTLLHHASLKGHALAVRKILARARQLVDAKKEDGFTALHLAALNNHREVAQILIREGRCDVNVRNRKLQSPLHLAVQQAHVGLVPLLVDAGCSVNAEDEEGDTALHVALQRHQLLPLVADGAGGDPGPLQLLSRLQASGLPGSAELTVGAAVACFLALEGADVSYTNHRGRSPLDLAAEGRVLKALQGCAQRFRERQAGGGAAPGPRQTLGTPNTVTNLHVGAAPGPEAAECLVCSELALLVLFSPCQHRTVCEECARRMKKCIRCQVVVSKKLRPDGSEVASAAPAPGPPRQLVEELQSRYRQMEERITCPICIDSHIRLVFQCGHGACAPCGSALSACPICRQPIRDRIQIFV

SEQ ID NO: 22612 - protein, 1056 aa, Homo sapiens
MAGALRRGRALGSRPSGPTVSSRRSPQCPVAQEGLGARSRPRVAPRSLARCGPSSRLMGWKPSEARGQSQSFQASGLQPRSLKAARRATGRPDRSRAAPPNMDPDPQAGVQVGMRVVRGVDWKWGQQDGGEGGVGTVVELGRHGSPSTPDRTVVVQWDQGTRTNYRAGYQGAHDLLLYDNAQIGVRHPNIICDCCKKHGLRGMRWKCRVCLDYDLCTQCYMHNKHELAHAFDRYETAHSRPVTLSPRQGLPRIPLRGIFQGAKVVRGPDWEWGSQDGGEGKPGRVVDIRGWDVETGRSVASVTWADGTTNVYRVGHKGKVDLKCVGEAAGGFYYKDHLPRLGKPAELQRRVSADSQPFQHGDKVKCLLDTDVLREMQEGHGGWNPRMAEFIGQTGTVHRITDRGDVRVQFNHETRWTFHPGALTKHHSFWVGDVVRVIGDLDTVKRLQAGHGEWTDDMAPALGRVGKVVKVFGDGNLRVAVAGQRWTFSPSCLVAYRPEEDANLDVAERARENKSSLSVALDKLRAQKSDPEHPGRLVVEVALGNAARALDLLRRRPEQVDTKNQGRTALQVAAYLGQVELIRLLLQARAGVDLPDDEGNTALHYAALGNQPEATRVLLSAGCRADAINSTQSTALHVAVQRGFLEVVRALCERGCDVNLPDAHSDTPLHSAISAGTGASGIVEVLTEVPNIDVTATNSQGFTLLHHASLKGHALAVRKILARARQLVDAKKEDGFTALHLAALNNHREVAQILIREGRCDVNVRNRKLQSPLHLAVQQAHVGLVPLLVDAGCSVNAEDEEGDTALHVALQRHQLLPLVADGAGGDPGPLQLLSRLQASGLPGSAELTVGAAVACFLALEGADVSYTNHRGRSPLDLAAEGRVLKALQGCAQRFRERQAGGGAAPGPRQTLGTPNTVTNLHVGAAPGPEAAECLVCSELALLVLFSPCQHRTVCEECARRMKKCIRCQVVVSKKLRPDGSEVASAAPAPGPPRQLVEELQSRYRQMEERITCPICIDSHIRLVFQCGHGACAPCGSALSACPICRQPIRDRIQIFV

SEQ ID NO: 22613 - protein, 1005 aa, Homo sapiens
MAGALRRGRALGSRPSGPTVSSRRSPQCPVAQEGLGARSRPRVAPRSLARCGPSSRLMGWKPSEARGQSQSFQASGLQPRSLKAARRATGRPDRSRAARPTMDPSAHRSRAAPPNMDPDPQAGVQVGMRVVRGVDWKWGQQDGGEGGVGTVVELGRHGSPSTPDRTVVVQWDQGTRTNYRAGYQGAHDLLLYDNAQIGVRHPNIICDCCKKHGLRGMRWKCRVCLDYDLCTQCYMHNKHELAHAFDRYETAHSRPVTLSPRQGLPRIPLRGIFQGAKVVRGPDWEWGSQDGKPAELQRRVSADSQPFQHGDKVKCLLDTDVLREMQEGHGGWNPRMAEFIGQTGTVHRITDRGDVRVQFNHETRWTFHPGALTKHHSFWVGDVVRVIGDLDTVKRLQAGHGEWTDDMAPALGRVGKVVKVFGDGNLRVAVAGQRWTFSPSCLVAYRPEEDANLDVAERARENKSSLSVALDKLRAQKSDPEHPGRLVVEVALGNAARALDLLRRRPEQVDTKNQGRTALQVAAYLGQVELIRLLLQARAGVDLPDDEGNTALHYAALGNQPEATRVLLSAGCRADAINSTQSTALHVAVQRGFLEVVRALCERGCDVNLPDAHSDTPLHSAISAGTGASGIVEVLTEVPNIDVTATNSQGFTLLHHASLKGHALAVRKILARARQLVDAKKEDGFTALHLAALNNHREVAQILIREGRCDVNVRNRKLQSPLHLAVQQAHVGLVPLLVDAGCSVNAEDEEGDTALHVALQRHQLLPLVADGAGGDPGPLQLLSRLQASGLPGSAELTVGAAVACFLALEGADVSYTNHRGRSPLDLAAEGRVLKALQGCAQRFRERQAGGGAAPGPRQTLGTPNTVTNLHVGAAPGPEAAECLVCSELALLVLFSPCQHRTVCEECARRMKKCIRCQVVVSKKLRPDGSEVASAAPAPGPPRQLVEELQSRYRQMEERITCPICIDSHIRLVFQCGHGACAPCGSALSACPICRQPIRDRIQIFV

SEQ ID NO: 22614 - protein, 1066 aa, Homo sapiens
MAGALRRGRALGSRPSGPTVSSRRSPQCPVAQEGLGARSRPRVAPRSLARCGPSSRLMGWKPSEARGQSQSFQASGLQPRSLKAARRATGRPDRSRAARPTMDPSAHRSRAAPPNMDPDPQAGVQVGMRVVRGVDWKWGQQDGGEGGVGTVVELGRHGSPSTPDRTVVVQWDQGTRTNYRAGYQGAHDLLLYDNAQIGVRHPNIICDCCKKHGLRGMRWKCRVCLDYDLCTQCYMHNKHELAHAFDRYETAHSRPVTLSPRQGLPRIPLRGIFQGAKVVRGPDWEWGSQDGGEGKPGRVVDIRGWDVETGRSVASVTWADGTTNVYRVGHKGKVDLKCVGEAAGGFYYKDHLPRLGKPAELQRRVSADSQPFQHGDKVKCLLDTDVLREMQEGHGGWNPRMAETGTVHRITDRGDVRVQFNHETRWTFHPGALTKHHSFWVGDVVRVIGDLDTVKRLQAGHGEWTDDMAPALGRVGKVVKVFGDGNLRVAVAGQRWTFSPSCLVAYRPEEDANLDVAERARENKSSLSVALDKLRAQKSDPEHPGRLVVEVALGNAARALDLLRRRPEQVDTKNQGRTALQVAAYLGQVELIRLLLQARAGVDLPDDEGNTALHYAALGNQPEATRVLLSAGCRADAINSTQSTALHVAVQRGFLEVVRALCERGCDVNLPDAHSDTPLHSAISAGTGASGIVEVLTEVPNIDVTATNSQGFTLLHHASLKGHALAVRKILARARQLVDAKKEDGFTALHLAALNNHREVAQILIREGRCDVNVRNRKLQSPLHLAVQQAHVGLVPLLVDAGCSVNAEDEEGDTALHVALQRHQLLPLVADGAGGDPGPLQLLSRLQASGLPGSAELTVGAAVACFLALEGADVSYTNHRGRSPLDLAAEGRVLKALQGCAQRFRERQAGGGAAPGPRQTLGTPNTVTNLHVGAAPGPEAAECLVCSELALLVLFSPCQHRTVCEECARRMKKCIRCQVVVSKKLRPDGSEVASAAPAPGPPRQLVEELQSRYRQMEERITCPICIDSHIRLVFQCGHGACAPCGSALSACPICRQPIRDRIQIFV

SEQ ID NO: 22615 - protein, 1070 aa, Homo sapiens
MAGALRRGRALGSRPSGPTVSSRRSPQCPVAQEGLGARSRPRVAPRSLARCGPSSRLMGWKPSEARGQSQSFQASGLQPRSLKAARRATGRPDRSRAARPTMDPSAHRSRAAPPNMDPDPQAGVQVGMRVVRGVDWKWGQQDGGEGGVGTVVELGRHGSPSTPDRTVVVQWDQGTRTNYRAGYQGAHDLLLYDNAQIGVRHPNIICDCCKKHGLRGMRWKCRVCLDYDLCTQCYMHNKHELAHAFDRYETAHSRPVTLSPRQGLPRIPLRGIFQGAKVVRGPDWEWGSQDGGEGKPGRVVDIRGWDVETGRSVASVTWADGTTNVYRVGHKGKVDLKCVGEAAGGFYYKDHLPRLGKPAELQRRVSADSQPFQHGDKVKCLLDTDVLREMQEGHGGWNPRMAEFIGQTGTVHRITDRGDVRVQFNHETRWTFHPGALTKHHSFWVGDVVRVIGDLDTVKRLQAGHGEWTDDMAPALGRVGKVVKVFGDGNLRVAVAGQRWTFSPSCLVAYRPEEDANLDVAERARENKSSLSVALDKLRAQKSDPEHPGRLVVEVALGNAARALDLLRRRPEQVDTKNQGRTALQVAAYLGQVELIRLLLQARAGVDLPDDEGNTALHYAALGNQPEATRVLLSAGCRADAINSTQSTALHVAVQRGFLEVVRALCERGCDVNLPDAHSDTPLHSAISAGTGASGIVEVLTEVPNIDVTATNSQGFTLLHHASLKGHALAVRKILARARQLVDAKKEDGFTALHLAALNNHREVAQILIREGRCDVNVRNRKLQSPLHLAVQQAHVGLVPLLVDAGCSVNAEDEEGDTALHVALQRHQLLPLVADGAGGDPGPLQLLSRLQASGLPGSAELTVGAAVACFLALEGADVSYTNHRGRSPLDLAAEGRVLKALQGCAQRFRERQAGGGAAPGPRQTLGTPNTVTNLHVGAAPGPEAAECLVCSELALLVLFSPCQHRTVCEECARRMKKCIRCQVVVSKKLRPDGSEVASAAPAPGPPRQLVEELQSRYRQMEERITCPICIDSHIRLVFQCGHGACAPCGSALSACPICRQPIRDRIQIFV

SEQ ID NO: 22616 - protein, 198 aa, Homo sapiens
MFKVIQRSVGPASLSLLTFKVYAAPKKDSPPKNSVKVDELSLYSVPEGQSKYVEEARSQLEESISQLRHYCEPYTTWCQETYSQTKPKMQSLVQWGLDSYDYLQNAPPGFFPRLGVIGFAGLIGLLLARGSKIKKLVYPPGFMGLAASLYYPQQAIVFAQVSGERLYDWGLRGYIVIEDLWKENFQKPGNVKNSPGTK

SEQ ID NO: 22617 - protein, 180 aa, Homo sapiens
MFKVIQRSVGPASLSLLTFKVYAAPKKDSPPKNSVKVDELSLYSVPEGQSKYVEEARSQLEESISQLRHYCEPYTTWCQTAMTISKMHLLDFFPRLGVIGFAGLIGLLLARGSKIKKLVYPPGFMGLAASLYYPQQAIVFAQVSGERLYDWGLRGYIVIEDLWKENFQKPGNVKNSPGTK

SEQ ID NO: 22618 - protein, 579 aa, Homo sapiens
MKDFSDVILCMEATESSKTEFCNPAFEPESGPPCPPPVFPEDASYSVPAPWHGRRPRGLRPDCRFSWLCVLLLSSLLLLLLGLLVAIILAQLQAAPPSGASHSPLPAGGLTTTTTTPTITTSQAAGTPKGQQESGVSPSPQSTCGGLLSGPRGFFSSPNYPDPYPPNTHCVWHIQVATDHAIQLKIEALSIESVASCLFDRLELSPEPEGPLLRVCGRVPPPTLNTNASHLLVVFVSDSSVEGFGFHAWYQAMAPGRGSCAHDEFRCDQLICLLPDSVCDGFANCADGSDETNCSAKFSGCGGNLTGLQGTFSTPSYLQQYPHQLLCTWHISVPAGHSIELQFHNFSLEAQDECKFDYVEVYETSSSGAFSLLGRFCGAEPPPHLVSSHHELAVLFRTDHGISSGGFSATYLAFNATENPCGPSELSCQAGGCKGVQWMCDMWRDCTDGSDDNCSGPLFPPPELACEPVQVEMCLGLSYNTTAFPNIWVGMITQEEVVEVLSGYKSLTSLPCYQHFRRLLCGLLVPRCTPLGSVLPPCRSVCQEAEHQCQSGLALLGTPWPFNCNRLPEAADLEACAQP

SEQ ID NO: 22619 - protein, 461 aa, Homo sapiens
MKDFSDVILCMEATESSKTEFCNPAFEPESGPPCPPPVFPEDASYSVPAPWHGRRPRGLRPDCRFSWLCVLLLSSLLLLLLGLLVAIILAQLQAAPPSGASHSPLPAGGLTTTTTTPTITTSQAAGTPKGQQESGVSPSPQSTCGGLLSGPRGFFSSPNYPDPYPPNTHCVWHIQVATDHAIQLKIEALSIESVASCLFDRLELSPEPEGPLLRVCGRVPPPTLNTNASHLLVVFVSDSSVEGFGFHAWYQAMAPGRGSCAHDEFRCDQLICLLPDSVCDGFANCADGSDETNCSAKFSGSVEQSHPPTSSPRTMSWLCCLGQIMASAVEASQPPTWPSMPRRTPVGPVSSPARQEGVRVCSGCVTCGETAPMAAMTTAAAPCSHPQSLTSLPCYQHFRRLLCGLLVPRCTPLGSVLPPCRSVCQEAEHQCQSGLALLGTPWPFNCNRLPEAADLEACAQP

SEQ ID NO: 22620 - protein, 455 aa, Homo sapiens
MGWGGGGGCTPRPPIHQQPPERRVVTVVFLGLLLDLLAFTLLLPLLPGLLESHGRAHDPLYGSWQGGVDWFATAIGMPVEKRYNSVLFGGLIGSAFSVLQFLCAPLTGATSDCLGRRPVMLLCLMGVATSYAVWATSRSFAAFLASRLIGGISKGNVSLSTAIVADLGSPLARSQGMAVIGVAFSLGFTLGPMLGASLPLEMAPWFALLFAASDLLFIFCFLPETLPLEKRAPSIALGFRDAADLLSPLALLRFSAVARGQDPPSGDRLSSLRRLGLVYFLYLFLFSGLEYTLSFLTHQRFQFSSLQQGKMFFLIGLTMATIQGAYARRIHPGGEVAAVKRALLLLVPAFLLIGWGRSLPVLGLGLLLYSFAAAVVVPCLSSVVAGYGSPGQKGTVMGTLRSLGALARAAGPLVAASVYWLAGAQACFTTWSGLFLLPFFLLQKLSYPAQTLKAE

SEQ ID NO: 22621 - protein, 268 aa, Homo sapiens
MAAIRMGKLTTMPAGLIYASVSVHAAKQEESKKQLVKPEQLPIYTAPPLQSKYVEEQPGHLQMGFASIRTATGCYIGWCKGVYVFVKNGIMDTVQFGKDAYVYLKNPPRDFLPKMGVITVSGLAGLVSARKGSKFKKITYPLGLATLGATVCYPVQSVIIAKVTAKKVYATSQQIFGAVKSLWTKSSKEESLPKPKEKTKLGSSSEIEVPAKTTHVLKHSVPLPTELSSEAKTKSESTSGATQFMPDPKLMDHGQSHPEDIDMYSTRS

SEQ ID NO: 22622 - protein, 148 aa, Homo sapiens
MAVASDFYLRYYVGHKGKFGHEFLEFEFRPDGKLRYANNSNYKNDVMIRKEAYVHKSVMEELKRIIDDSEITKEDDALWPPPDRVGRQELEIVIGDEHISFTTSKIGSLIDVNQSKDPEGLRVFYYLVQDLKCLVFSLIGLHFKIKPI

SEQ ID NO: 22623 - protein, 449 aa, Homo sapiens
MSPESKKLFNIIILGVAFMFMFTAFQTCGNVAQTVIRSLNRTDFHGSGYTSMAIIYGVFSASNLITPSVVAIVGPQLSMFASGLFYSMYIAVFIQPFPWSFYTASVFIGIAAAVLWTAQGNCLTINSDEHSIGRNSGIFWALLQSSLFFGNLYIYFAWQGKTQISESDRRTVFIALTVISLVGTVLFFLIRKPDSENVLGEDESSDDQDMEVNESAQNNLTKAVDAFKKSFKLCVTKEMLLLSITTAYTGLELTFFSGVYGTCIGATNKFGAEEKSLIGLSGIFIGIGEILGGSLFGLLSKNNRFGRNPVVLLGILVHFIAFYLIFLNMPGDAPIAPVKGTDSSAYIKSSKEVAILCSFLLGLGDSCFNTQLLSILGFLYSEDSAPAFAIFKFVQSICAAVAFFYSNYLLLHWQLLVMVIFGFFGTISFFTVEWEAAAFVARGSDYRSI

SEQ ID NO: 22624 - protein, 397 aa, Homo sapiens
MSPESKKLFNIIILGVAFMFMFTAFQTCGNVAQTVIRSLNRTDFHGSGYTSMAIIYGVFSASNLITPSVVAIVGPQLSMFASGLFYSMYIAVFIQPFPWSFYTASVFIGIAAAESDRRTVFIALTVISLVGTVLFFLIRKPDSENVLGEDESSDDQDMEVNESAQNNLTKAVDAFKKSFKLCVTKEMLLLSITTAYTGLELTFFSGVYGTCIGATNKFGAEEKSLIGLSGIFIGIGEILGGSLFGLLSKNNRFGRNPVVLLGILVHFIAFYLIFLNMPGDAPIAPVKGTDSSAYIKSSKEVAILCSFLLGLGDSCFNTQLLSILGFLYSEDSAPAFAIFKFVQSICAAVAFFYSNYLLLHWQLLVMVIFGFFGTISFFTVEWEAAAFVARGSDYRSI

SEQ ID NO: 22625 - protein, 1265 aa, Homo sapiens
MSPALQDLSQPEGLKKTLRDEINAILQKRIMVLDGGMGTMIQREKLNEEHFRGQEFKDHARPLKGNNDILSITQPDVIYQIHKEYLLAGADIIETNTFSSTSIAQADYGLEHLAYRMNMCSAGVARKAAEEVTLQTGIKRFVAGALGPTNKTLSVSPSVERPDYRNITFDELVEAYQEQAKGLLDGGVDILLIETIFDTANAKAALFALQNLFEEKYAPRPIFISGTIVDKSGRTLSGQTGEGFVISVSHGEPLCIGLNCALGAAEMRPFIEIIGKCTTAYVLCYPNAGLPNTFGDYDETPSMMAKHLKDFAMDGLVNIVGGCCGSTPDHIREIAEAVKNCKPRVPPATAFEGHMLLSGLEPFRIGPYTNFVNIGERCNVAGSRKFAKLIMAGNYEEALCVAKVQVEMGAQVLDVNMDDGMLDGPSAMTRFCNLIASEPDIAKVPLCIDSSNFAVIEAGLKCCQGKCIVNSISLKEGEDDFLEKARKIKKYGAAMVVMAFDEEGQATETDTKIRVCTRAYHLLVKKLGFNPNDIIFDPNILTIGTGMEEHNLYAINFIHATKVIKETLPGARISGGLSNLSFSFRGMEAIREAMHGVFLYHAIKSGMDMGIVNAGNLPVYDDIHKELLQLCEDLIWNKDPEATEKLLRYAQTQGTGGKKVIQTDEWRNGPVEERLEYALVKGIEKHIIEDTEEARLNQKKYPRPLNIIEGPLMNGMKIVGDLFGAGKMFLPQVIKSARVMKKAVGHLIPFMEKEREETRVLNGTVEEEDPYQGTIVLATVKGDVHDIGKNIVGVVLGCNNFRVIDLGVMTPCDKILKAALDHKADIIGLSGLITPSLDEMIFVAKEMERLAIRIPLLIGGATTSKTHTAVKIAPRYSAPVIHVLDASKSVVVCSQLLDENLKDEYFEEIMEEYEDIRQDHYESLKERRYLPLSQARKSGFQMDWLSEPHPVKPTFIGTQVFEDYDLQKLVDYIDWKPFFDVWQLRGKYPNRGFPKIFNDKTVGGEARKVYDDAHNMLNTLISQKKLRARGVVGFWPAQSIQDDIHLYAEAAVPQAAEPIATFYGLRQQAEKDSASTEPYYCLSDFIAPLHSGIRDYLGLFAVACFGVEELSKAYEDDGDDYSSIMVKALGDRLAEAFAEELHERVRRELWAYCGSEQLDVADLRRLRYKGIRPAPGYPSQPDHTEKLTMWRLADIEQSTGIRLTESLAMAPASAVSGLYFSNLKSKYFAVGKISKDQVEDYALRKNISVAEVEKWLGPILGYDTD

SEQ ID NO: 22626 - protein, 1214 aa, Homo sapiens
MSPALQDLSQPEGLKKTLRDEINAILQKRIMVLDGGMGTMIQREKLNEEHFRGQEFKDHARPLKGNNDILSITQPDVIYQIHKEYLLAGADIIETNTFSSTSIAQADYGLEHLAYRMNMCSAGVARKAAEEVTLQTGIKRFVAGALGPTNKTLSVSPSVERPDYRNITFDELVEAYQEQAKGLLDGGVDILLIETIFDTANAKAALFALQNLFEEKYAPRPIFISGTIVDKSGRTLSGQTGEGFVISVSHGEPLCIGLNCALGAAEMRPFIEIIGKCTTAYVLCYPNAGLPNTFGDYDETPSMMAKHLKDFAMDGLVNIVGGCCGSTPDHIREIAEAVKNCKPRVPPATAFEGHMLLSGLEPFRIGPYTNFVNIGERCNVAGSRKFAKLIMAGNYEEALCVAKVQVEMGAQVLDVNMDDGMLDGPSAMTRFCNLIASEPDIAKVPLCIDSSNFAVIEAGLKCCQGKCIVNSISLKEGEDDFLEKARKIKKYGAAMVVMAFDEEGQATETDTKIRVCTRAYHLLVKKLGFNPNDIIFDPNILTIGTGMEEHNLYAINFIHATKVIKETLPGARISGGLSNLSFSFRGMEAIREAMHGVFLYHAIKSGMDMGIVNAGNLPVYDDIHKELLQLCEDLIWNKDPEATEKLLRYAQTQGTGGKKVIQTDEWRNGPVEERLEYALVKVIKSARVMKKAVGHLIPFMEKEREETRVLNGTVEEEDPYQGTIVLATVKGDVHDIGKNIVGVVLGCNNFRVIDLGVMTPCDKILKAALDHKADIIGLSGLITPSLDEMIFVAKEMERLAIRIPLLIGGATTSKTHTAVKIAPRYSAPVIHVLDASKSVVVCSQLLDENLKDEYFEEIMEEYEDIRQDHYESLKERRYLPLSQARKSGFQMDWLSEPHPVKPTFIGTQVFEDYDLQKLVDYIDWKPFFDVWQLRGKYPNRGFPKIFNDKTVGGEARKVYDDAHNMLNTLISQKKLRARGVVGFWPAQSIQDDIHLYAEAAVPQAAEPIATFYGLRQQAEKDSASTEPYYCLSDFIAPLHSGIRDYLGLFAVACFGVEELSKAYEDDGDDYSSIMVKALGDRLAEAFAEELHERVRRELWAYCGSEQLDVADLRRLRYKGIRPAPGYPSQPDHTEKLTMWRLADIEQSTGIRLTESLAMAPASAVSGLYFSNLKSKYFAVGKISKDQVEDYALRKNISVAEVEKWLGPILGYDTD

SEQ ID NO: 22627 - protein, 480 aa, Homo sapiens
MGPGPPAAGAAPSPRPLSLVARLSYAVGHFLNDLCASMWFTYLLLYLHSVRAYSSRGAGLLLLLGQVADGLCTPLVGYEADRAASCCARYGPRKAWHLVGTVCVLLSFPFIFSPCLGCGAATPEWAALLYYGPFIVIFQFGWASTQISHLSLIPELVTNDHEKVELTALRYAFTVVANITVYGAAWLLLHLQGSSRVEPTQDISISDQLGGQDVPVFRNLSLLVVGVGAVFSLLFHLGTRERRRPHAEEPGEHTPLLAPATAQPLLLWKHWLREPAFYQVGILYMTTRLIVNLSQTYMAMYLTYSLHLPKKFIATIPLVMYLSGFLSSFLMKPINKCIGRNMTYFSGLLVILAFAAWVALAEGLGVAVYAAAVLLGAGCATILVTSLAMTADLIGPHTNSGAFVYGSMSFLDKVANGLAVMAIQSLHPCPSELCCRACVSFYHWAMVAVTGGVGVAAALCLCSLLLWPTRLRRWDRDARP

SEQ ID NO: 22628 - protein, 471 aa, Homo sapiens
MGPGPPAAGAAPSPRPLSLVARLSYAVGHFLNDLCASMWFTYLLLYLHSVRAYSSRGAGLLLLLGQVADGLCTPLVGYEADRAASCCARYGTVCVLLSFPFIFSPCLGCGAATPEWAALLYYGPFIVIFQFGWASTQISHLSLIPELVTNDHEKVELTALRYAFTVVANITVYGAAWLLLHLQGSSRVEPTQDISISDQLGGQDVPVFRNLSLLVVGVGAVFSLLFHLGTRERRRPHAEEPGEHTPLLAPATAQPLLLWKHWLREPAFYQVGILYMTTRLIVNLSQTYMAMYLTYSLHLPKKFIATIPLVMYLSGFLSSFLMKPINKCIGRNMTYFSGLLVILAFAAWVALAEGLGVAVYAAAVLLGAGCATILVTSLAMTADLIGPHTNSGAFVYGSMSFLDKVANGLAVMAIQSLHPCPSELCCRACVSFYHWAMVAVTGGVGVAAALCLCSLLLWPTRLRRWDRDARP

SEQ ID NO: 22629 - protein, 538 aa, Homo sapiens
MGPGPPAAGAAPSPRPLSLVARLSYAVGHFLNDLCASMWFTYLLLYLHSVRAYSSRGAGLLLLLGQVADGLCTPLVGYEADRAASCCARYGPRKAWHLVGTVCVLLSFPFIFSPCLGCGAATPEWAALLYYGPFIVIFQFGWASTQISHLSLIPELVTNDHEKVELTALRYAFTVVANITVYGAAWLLLHLQGSSRVEPTQDISISDQLGGQDVPVFRNLSLLVVGVGAVFSLLFHLGTRERRRPHAEEPGEHTPLLAPATAQPLLLWKHWLREPAFYQVGILYMTTRLIVNLSQTYMAMYLTYSLHLPKKFIATIPLVMYLSGFLSSFLMKPINKCIGRNMTYFSGLLVILAFAAWVALAEGLGVAVYAAAVLLGAGCATILVTSLAMTADLIGPHTNSGAFVYGSMSFLDKVANGLAVMAIQSLHPCPSELCCRACVSFYHWAMVAVTGGVGVAAALCLCSLLLWPTRLRRSFLAWRRGRGEDKGPGYSWIPTVLVQPPRPTSPFLWEAPLAWRCTRKKWSGAGTKPWPREDWGTH

SEQ ID NO: 22630 - protein, 473 aa, Homo sapiens
MGPGPPAAGAAPSPRPLSLVARLSYAVGHFLNDLCASMWFTYLLLYLHSVRAYSSRGAGLLLLLGQVADGLCTPLVGYEADRAASCCARYGPRKAWHLVGTVCVLLSFPFIFSPCLGCGAATPEWAALLYYGPFIVIFQFGWASTQISHLSLIPELVTNDHEKVELTALRYAFTVVANITVYGAAWLLLHLQGSSRVEPTQDISISDQLGGQDVPVFRNLSLLVVGVGAVFSLLFHLGTRERRRPHAEEPGEHTPLLAPATAQPLLLWKHWLREPAFYQVGILYMTTRLIVNLSQTYMAMYLTYSLHLPKKFIATIPLVMYLSGFLSSFLMKPINKCIGRNMTYFSGLLVILAFAAWVALAEGLGVAVYAAAVLLGAGCATILVTSLAMTADLIGPHTNSGAFVYGSMSFLDKVANGLAVMAIQSLHPCPSELCCRACVSFYHWAMVAVTGGVGVAAALCLCSLLLWPTRLRR

SEQ ID NO: 22631 - protein, 146 aa, Homo sapiens
MESDFYLRYYVGHKGKFGHEFLEFEFRPDGKLRYANNSNYKNDVMIRKEAYVHKSVMEELKRIIDDSEITKEDDALWPPPDRVGRQELEIVIGDEHISFTTSKIGSLIDVNQSKDPEGLRVFYYLVQDLKCLVFSLIGLHFKIKPI

SEQ ID NO: 22632 - protein, 109 aa, Homo sapiens
MESDFYLRYYVGHKGKFGHEFLEFEFRPDGKLRYANNSNYKNDVMIRKEELEIVIGDEHISFTTSKIGSLIDVNQSKDPEGLRVFYYLVQDLKCLVFSLIGLHFKIKPI

SEQ ID NO: 22633 - protein, 504 aa, Homo sapiens
MAAPPAPAAKGSPQPEPHAPEPGPGSAKRGREDSRAGRLSFCTKVCYGIGGVPNQIASSATAFYLQLFLLDIAQIPAAQVSLVLFGGKVSGAAADPVAGFFINRSQRTGSGRLMPWVLGCTPFIALAYFFLWFLPPFTSLRGLWYTTFYCLFQALATFFQVPYTALTMLLTPCPRERDSATAYRMTVEMAGTLMGATVHGLIVSGAHRPHRCEATATPGPVTVSPNAAHLYCIAAAVVVVTYPVCISLLCLGVKERPDPSAPASGPGLSFLAGLSLTTRHPPYLKLVISFLFISAAVQVEQSYLVLFCTHASQLHDHVQGLVLTVLVSAVLSTPLWEWVLQRFGKKTSAFGIFAMVPFAILLAAVPTAPVAYVVAFVSGVSIAVSLLLPWSMLPDVVDDFQLQHRHGPGLETIFYSSYVFFTKLSGACALGISTLSLEFSGYKAGVCKQAEEVVVTLKVLIGAVPTCMILAGLCILMVGSTPKTPSRDASSRLSLRRRTSYSLA

SEQ ID NO: 22634 - protein, 758 aa, Homo sapiens
MLRACQLSGVTAAAQSCLCGKFVLRPLRPCRRYSTSGSSGLTTGKIAGAGLLFVGGGIGGTILYAKWDSHFRESVEKTIPYSDKLFEMVLGPAAYNVPLPKKSIQSGPLKISSVSEVMKESKQPASQLQKQKGDTPASATAPTEAAQIISAAGDTLSVPAPAVQPEESLKTDHPEIGEGKPTPALSEEASSSSIRERPPEEVAARLAQQEKQEQVKIESLAKSLEDALRQTASVTLQAIAAQNAAVQAVNAHSNILKAAMDNSEIAGEKKSAQWRTVEGALKERRKAVDEAADALLKAKEELEKMKSVIENAKKKEVAGAKPHITAAEGKLHNMIVDLDNVVKKVQAAQSEAKVVSQYHELVVQARDDFKRELDSITPEVLPGWKGMSVSDLADKLSTDDLNSLIAHAHRRIDQLNRELAEQKATEKQHITLALEKQKLEEKRAFDSAVAKALEHHRSEIQAEQDRKIEEVRDAMENEMRTQLRRQAAAHTDHLRDVLRVQEQELKSEFEQNLSEKLSEQELQFRRLSQEQVDNFTLDINTAYARLRGIEQAVQSHAVAEEEARKAHQLWLSVEALKYSMKTSSAETPTIPLGSAVEAIKANCSDNEFTQALTAAIPPESLTRGVYSEETLRARFYAVQKLARRVAMIDETRNSLYQYFLSYLQSLLLFPPQQLKPPPELCPEDINTFKLLSYASYCIEHGDLELAAKFVNQLKGESRRVAQDWLKEARMTLETKQIVEILTAYASAVGIGTTQVQPE

SEQ ID NO: 22635 - protein, 747 aa, Homo sapiens
MLRACQLSGVTAAAQSCLCGKFVLRPLRPCRRYSTSGSSGLTTGKIAGAGLLFVGGGIGGTILYAKWDSHFRESVEKTIPYSDKLFEMVLGPAAYNVPLPKKSIQSGPLKISSVSEVMKESKQPASQLQKQKGDTPASATAGDTLSVPAPAVQPEESLKTDHPEIGEGKPTPALSEEASSSSIRERPPEEVAARLAQQEKQEQVKIESLAKSLEDALRQTASVTLQAIAAQNAAVQAVNAHSNILKAAMDNSEIAGEKKSAQWRTVEGALKERRKAVDEAADALLKAKEELEKMKSVIENAKKKEVAGAKPHITAAEGKLHNMIVDLDNVVKKVQAAQSEAKVVSQYHELVVQARDDFKRELDSITPEVLPGWKGMSVSDLADKLSTDDLNSLIAHAHRRIDQLNRELAEQKATEKQHITLALEKQKLEEKRAFDSAVAKALEHHRSEIQAEQDRKIEEVRDAMENEMRTQLRRQAAAHTDHLRDVLRVQEQELKSEFEQNLSEKLSEQELQFRRLSQEQVDNFTLDINTAYARLRGIEQAVQSHAVAEEEARKAHQLWLSVEALKYSMKTSSAETPTIPLGSAVEAIKANCSDNEFTQALTAAIPPESLTRGVYSEETLRARFYAVQKLARRVAMIDETRNSLYQYFLSYLQSLLLFPPQQLKPPPELCPEDINTFKLLSYASYCIEHGDLELAAKFVNQLKGESRRVAQDWLKEARMTLETKQIVEILTAYASAVGIGTTQVQPE

SEQ ID NO: 22636 - protein, 726 aa, Homo sapiens
MLRACQLSGVTAAAQSCLCGKFVLRPLRPCRRYSTSGSSGLTTGKIAGAGLLFVGGGIGGTILYAKWDSHFRESVEKTIPYSDKLFEMVLGPAAYNVPLPKKSIQSGPLKISSVSEVMKESKQPASQLQKQKGDTPASATAPTEAAQIISAAGDTLSVPAPAVQPEESLKTDHPEIGEGKPTPALSALAKSLEDALRQTASVTLQAIAAQNAAVQAVNAHSNILKAAMDNSEIAGEKKSAQWRTVEGALKERRKAVDEAADALLKAKEELEKMKSVIENAKKKEVAGAKPHITAAEGKLHNMIVDLDNVVKKVQAAQSEAKVVSQYHELVVQARDDFKRELDSITPEVLPGWKGMSVSDLADKLSTDDLNSLIAHAHRRIDQLNRELAEQKATEKQHITLALEKQKLEEKRAFDSAVAKALEHHRSEIQAEQDRKIEEVRDAMENEMRTQLRRQAAAHTDHLRDVLRVQEQELKSEFEQNLSEKLSEQELQFRRLSQEQVDNFTLDINTAYARLRGIEQAVQSHAVAEEEARKAHQLWLSVEALKYSMKTSSAETPTIPLGSAVEAIKANCSDNEFTQALTAAIPPESLTRGVYSEETLRARFYAVQKLARRVAMIDETRNSLYQYFLSYLQSLLLFPPQQLKPPPELCPEDINTFKLLSYASYCIEHGDLELAAKFVNQLKGESRRVAQDWLKEARMTLETKQIVEILTAYASAVGIGTTQVQPE

SEQ ID NO: 22637 - protein, 757 aa, Homo sapiens
MLRACQLSGVTAAAQSCLCGKFVLRPLRPCRRYSTSGSSGLTTGKIAGAGLLFVGGGIGGTILYAKWDSHFRESVEKTIPYSDKLFEMVLGPAAYNVPLPKKSIQSGPLKISSVSEVMKESKQPASQLQKQKGDTPASATAPTEAAQIISAAGDTLSVPAPAVQPEESLKTDHPEIGEGKPTPALSEASSSSIRERPPEEVAARLAQQEKQEQVKIESLAKSLEDALRQTASVTLQAIAAQNAAVQAVNAHSNILKAAMDNSEIAGEKKSAQWRTVEGALKERRKAVDEAADALLKAKEELEKMKSVIENAKKKEVAGAKPHITAAEGKLHNMIVDLDNVVKKVQAAQSEAKVVSQYHELVVQARDDFKRELDSITPEVLPGWKGMSVSDLADKLSTDDLNSLIAHAHRRIDQLNRELAEQKATEKQHITLALEKQKLEEKRAFDSAVAKALEHHRSEIQAEQDRKIEEVRDAMENEMRTQLRRQAAAHTDHLRDVLRVQEQELKSEFEQNLSEKLSEQELQFRRLSQEQVDNFTLDINTAYARLRGIEQAVQSHAVAEEEARKAHQLWLSVEALKYSMKTSSAETPTIPLGSAVEAIKANCSDNEFTQALTAAIPPESLTRGVYSEETLRARFYAVQKLARRVAMIDETRNSLYQYFLSYLQSLLLFPPQQLKPPPELCPEDINTFKLLSYASYCIEHGDLELAAKFVNQLKGESRRVAQDWLKEARMTLETKQIVEILTAYASAVGIGTTQVQPE

SEQ ID NO: 22638 - protein, 518 aa, Homo sapiens
MLCASFLGLGLSVAIVGPTFQDLATNVNRNISSLSFIFVGRALGYLSGSVIGGFLVDVMNYFLLLGISMSATTVGLYLVPFCKTAILLTVMMSIFGVSIGILDTGGNVLILAIWGDKGAPHMQALHFSFALGAFLAPLLAKLALGPTASAENHTESDFHPALNQSSDADSEALFGVPNDKNLLWAYAVIGTYMFLVSVIFFCLFLKNSSKQEKARASAETFRRAKYHNALLCLLFLFFFFYVGAEVTYGSYVFSFATTHAGMKESEAAGLNSIFWGTFAACRGLAIFFATCLQPGTMIVLSNIGSLTSSLFLVLFDKNPICLWIATSVYGASMATTFPSGVSWIEQYTTIHGKSAAFFVIGASLGEMAIPAVIGILQGKYPDLPVVLYTSLGASIATGILFPVLYKLATSPLDRQRKEDRKSEDQKALLSSSGLNEYEEENEEEDAEKWNEMDFEMIETNDTMRHSIIETSRSSLTEPTAEVYNQYPSNALVFESSPFNTGSAHVKHLPETRTKGTNV

SEQ ID NO: 22639 - protein, 103 aa, Homo sapiens
MKSLILLAILAALAVVTLCYESHESMESYELNPFINRRNANTFISPQQRWRAKVQERIRERSKPVHELNREACDDYRLCERYAMVYGYNAAYNRYFRKRRGTK

SEQ ID NO: 22640 - protein, 128 aa, Homo sapiens
MKSLILLAILAALAVVTLCYGEWQKEENFGFDIVSVLSLNWHRAQESHESMESYELNPFINRRNANTFISPQQRWRAKVQERIRERSKPVHELNREACDDYRLCERYAMVYGYNAAYNRYFRKRRGTK

SEQ ID NO: 22641 - protein, 586 aa, Homo sapiens
MSANPRWDISRALGVAKLFHLVCGVREACVTPFLTLYLRQLGLAAPWVGTLMGTKHLIAAFWAPVCAFLAKSYRKRRALLIGSLLGSVGASLLMVLVPPVDKNRVHFPCNGSSGLTSTDALPGVTLPVNITSAQESASSHPAKRTAEVEMPGFRNPPGESDRETFRDLHVYLAPSVEGARTTSQALLHPVTSGLKDHPWEVTFEVVKTALPLLPGGKGPGNPANLSGTKGKAWAFDLSLEALRRTFILSLGSVAFWELLTAPLEQVADDSLYEFLDFVDATDRYRSLWVWRLLGMSAGVCGITALVGQLDCFLMTSGPRGVVHFYGYSVVSTLALLVSIAFPIPICQQWEPSYKRVKALSIVGGDPHLILLASTTVLVGAIVSTVQNFLFWHMKDHGSGELVMGFSVALSLLGEILLHPFKATLLRKLSRTGLVGLGLSCLAGQLLYYSFLWSWWSVLPIQILSAISNRALWWAVGASVEDLATPRMERALSALFRGHFYGSGCSLGSFVGGFVVMRFSLAVLYQACCVALLLWLALLLSIQRRLPRERKIKYSKLLSMEVSDTSDSEQGTEQDWLVKAMREEHSD

SEQ ID NO: 22642 - protein, 600 aa, Homo sapiens
MGKKLDLSKLTDEEAQHVLEVVQRDFDLRRKEEERLEALKGKIKKESSKRELLSDTAHLNETHCARCLQPYQLLVNSKRQCLECGLFTCKSCGRVHPEEQGWICDPCHLARVVKIGSLEWYYEHVKARFKRFGSAKVIRSLHGRLQGGAGPELISEERSGDSDQTDEDGEPGSEAQAQAQPFGSKKKRLLSVHDFDFEGDSDDSTQPQGHSLHLSSVPEARDSPQSLTDESCSEKAAPHKAEGLEEADTGASGCHSHPEEQPTSISPSRHGALAELCPPGGSHRMALGTAAALGSNVIRNEQLPLQYLADVDTSDEESIRAHVMASHHSKRRGRASSESQIFELNKHISAVECLLTYLENTVVPPLAKGLGAGVRTEADVEEEALRRKLEELTSNVSDQETSSEEEEAKDEKAEPNRDKSVGPLPQADPEVGTAAHQTNRQEKSPQDPGDPVQYNRTTDEELSELEDRVAVTASEVQQAESEVSDIESRIAALRAAGLTVKPSGKPRRKSNLPIFLPRVAGKLGKRPEDPNADPSSEAKAMAVPYLLRRKFSNSLKSQGKDDDSFDRKSVYRGSLTQRNPNARKGMASHTFAKPVVAHQS

SEQ ID NO: 22643 - protein, 572 aa, Homo sapiens
MGKKLDLSKLTDEEAQHVLEVVQRDFDLRRKEEERLEALKGKIKKESSKRELLSDTAHLNETHCARCLQPYQLLVNSKRQCLECGLFTCKSCGRVHPEEQGWICDPCHLARVVKIGSLEWYYEHVKARFKRFGSAKVIRSLHGRLQGGAGPELISEERSGDSDQTDEDGEPGSEAQAQAQPFGSKKKRLLSVHDFDFEGDSDDSTQPQGHSLHLSSVPEARDSPQSLTDESCSEKAAPHKAEGLEEADTGASGCHSHPEEQPTSISPSRHGALAELCPPGGSHRMALGTAAALGSNVIRNEQLPLQYLADVDTSDEESIRAHVMASHHSKRRGRASSESQGLGAGVRTEADVEEEALRRKLEELTSNVSDQETSSEEEEAKDEKAEPNRDKSVGPLPQADPEVGTAAHQTNRQEKSPQDPGDPVQYNRTTDEELSELEDRVAVTASEVQQAESEVSDIESRIAALRAAGLTVKPSGKPRRKSNLPIFLPRVAGKLGKRPEDPNADPSSEAKAMAVPYLLRRKFSNSLKSQGKDDDSFDRKSVYRGSLTQRNPNARKGMASHTFAKPVVAHQS

SEQ ID NO: 22644 - protein, 480 aa, Homo sapiens
MGKKLDLSKLTDEEAQHVLEVVQRDFDLRRKEEERLEALKGKIKKESSKRELLSDTAHLNETHCARCLQPYQLLVNSKRQCLECGLFTCKSCGRVHPEEQGWICDPCHLARVVKIGSLEWYYEHVKARFKRFGSAKVIRSLHGRLQGGAGPELISEERSGDSDQTDEDGEPGSEAQAQAQPFGSKSLTDESCSEKAAPHKAEGLEEADTGASGCHSHPEEQPTSISPSRHGALAELCPPGGSHRMALGTAAALGSNVIRNEQLPLQYLADVDTSDEESIRAHVMASHHSKRRGRASSESQGLGAGVRTEADVEEEALRRKLEELTSNVSDQETSSEEEEAKDEKAEPNRDKSVGPLPQADPEVSDIESRIAALRAAGLTVKPSGKPRRKSNLPIFLPRVAGKLGKRPEDPNADPSSEAKAMAVPYLLRRKFSNSLKSQGKDDDSFDRKSVYRGSLTQRNPNARKGMASHTFAKPVVAHQS

SEQ ID NO: 22645 - protein, 551 aa, Homo sapiens
MGKKLDLSKLTDEEAQHVLEVVQRDFDLRRKEEERLEALKGKIKKESSKRELLSDTAHLNETHCARCLQPYQLLVNSKRQCLECGLFTCKSCGRVHPEEQGWICDPCHLARVVKIGSLEWYYEHVKARFKRFGSAKVIRSLHGRLQGGAGPELISEERSGDSDQTDEDGEPGSEAQAQAQPFGSKKKRLLSVHDFDFEGDSDDSTQPQGHSLHLSSVPEARDSPQSLTDESCSEKAAPHKAEGLEEADTGASGCHSHPEEQPTSISPSRHGALAELCPPGGSHRMALGTAAALGSNVIRNEQLPLQYLADVDTSDEESIRAHVMASHHSKRRGRASSESQIFELNKHISAVECLLTYLENTVVPPLAKGLGAGVRTEADVEEEALRRKLEELTSNVSDQETSSEEEEAKDEKAEPNRDKSVGPLPQADPEVGTAAHQTNRQEKSPQDPGDPVQYNRTTDEELSELEDRVAVTASEVQQAESEVSDIESRIAALRAAGLTVKPSGKPRRKSNLPALYEGTLSLCSEDLKHTHPDSVKSKRSRLNHVASCGNP

SEQ ID NO: 22646 - protein, 457 aa, Homo sapiens
MGKKLDLSKLTDEEAQHVLEVVQRDFDLRRKEEERLEALKGKIKKESSKRELLSDTAHLNETHCARCLQPYQLLVNSKRQCLECGLFTCKSCGRVHPEEQGWICDPCHLARVVKIGSLEWYYEHVKARFKRFGSAKVIRSLHGRLQGGAGPELISEERSGDSDQTDEDGEPGSEAQAQAQPFGSKKKRLLSVHDFDFEGDSDDSTQPQGHSLHLSSVPEARDSPQGLGAGVRTEADVEEEALRRKLEELTSNVSDQETSSEEEEAKDEKAEPNRDKSVGPLPQADPEVGTAAHQTNRQEKSPQDPGDPVQYNRTTDEELSELEDRVAVTASEVQQAESEVSDIESRIAALRAAGLTVKPSGKPRRKSNLPIFLPRVAGKLGKRPEDPNADPSSEAKAMAVPYLLRRKFSNSLKSQGKDDDSFDRKSVYRGSLTQRNPNARKGMASHTFAKPVVAHQS

SEQ ID NO: 22647 - protein, 465 aa, Homo sapiens
MEEEDEEARALLAGGPDEADRGAPAAPGALPALCDPSRLAHRLLVLLLMCFLGFGSYFCYDNPAALQTQVKRDMQVNTTKFMLLYAWYSWPNVVLCFFGGFLIDRVFGIRWGTIIFSCFVCIGQVVFALGGIFNAFWLMEFGRFVFGIGGESLAVAQNTYAVSWFKGKELNLVFGLQLSMARIGSTVNMNLMGWLYSKIEALLGSAGHTTLGITLMIGGITCILSLICALALAYLDQRAERILHKEQGKTGEVIKLTDVKDFSLPLWLIFIICVCYYVAVFPFIGLGKVFFTEKFGFSSQAASAINSVVYVISAPMSPVFGLLVDKTGKNIIWVLCAVAATLVSHMMLAFTMWNPWIAMCLLGLSYSLLACALWPMVAFVVPEHQLGTAYGFMQSIQNLGLAIISIIAGMILDSRGYLFLEVFFIACVSLSLLSVVLLYLVNRAQGGNLNYSARQREEIKFSHTE

SEQ ID NO: 22648 - protein, 78 aa, Homo sapiens
MEEEDEEARALLAGGPDEADRGAPAAPGALPALCDPSRLAHRLLVLLLMCFLGFGSYFCYDNPAALQTQVKRMGHNHF

SEQ ID NO: 22649 - protein, 426 aa, Homo sapiens
MEEEDEEARALLAGGPDEADRGAPAAPGALPALCDPSRLAHRLLVLLLMCFLGFAIFAMIILLPFRLKLDEWGTIIFSCFVCIGQVVFALGGIFNAFWLMEFGRFVFGIGGESLAVAQNTYAVSWFKGKELNLVFGLQLSMARIGSTVNMNLMGWLYSKIEALLGSAGHTTLGITLMIGGITCILSLICALALAYLDQRAERILHKEQGKTGEVIKLTDVKDFSLPLWLIFIICVCYYVAVFPFIGLGKVFFTEKFGFSSQAASAINSVVYVISAPMSPVFGLLVDKTGKNIIWVLCAVAATLVSHMMLAFTMWNPWIAMCLLGLSYSLLACALWPMVAFVVPEHQLGTAYGFMQSIQNLGLAIISIIAGMILDSRGYLFLEVFFIACVSLSLLSVVLLYLVNRAQGGNLNYSARQREEIKFSHTE

SEQ ID NO: 22650 - protein, 392 aa, Homo sapiens
MQVNTTKFMLLYAWYSWPNVVLCFFGGFLIDRVFGIRWGTIIFSCFVCIGQVVFALGGIFNAFWLMEFGRFVFGIGGESLAVAQNTYAVSWFKGKELNLVFGLQLSMARIGSTVNMNLMGWLYSKIEALLGSAGHTTLGITLMIGGITCILSLICALALAYLDQRAERILHKEQGKTGEVIKLTDVKDFSLPLWLIFIICVCYYVAVFPFIGLGKVFFTEKFGFSSQAASAINSVVYVISAPMSPVFGLLVDKTGKNIIWVLCAVAATLVSHMMLAFTMWNPWIAMCLLGLSYSLLACALWPMVAFVVPEHQLGTAYGFMQSIQNLGLAIISIIAGMILDSRGYLFLEVFFIACVSLSLLSVVLLYLVNRAQGGNLNYSARQREEIKFSHTE

SEQ ID NO: 22651 - protein, 475 aa, Homo sapiens
MGVALRDLPGRHVSSRSHVTAVLTVFHGRCFLPGFGVVTTFPSPSPAGAMEEEDEEARALLAGGPDEADRGAPAAPGALPALCDPSRLAHRLLVLLLMCFLGFAIFAMIILLPFRLKLNEWGTIIFSCFVCIGQVVFALGGIFNAFWLMEFGRFVFGIGGESLAVAQNTYAVSWFKGKELNLVFGLQLSMARIGSTVNMNLMGWLYSKIEALLGSAGHTTLGITLMIGGITCILSLICALALAYLDQRAERILHKEQGKTGEVIKLTDVKDFSLPLWLIFIICVCYYVAVFPFIGLGKVFFTEKFGFSSQAASAINSVVYVISAPMSPVFGLLVDKTGKNIIWVLCAVAATLVSHMMLAFTMWNPWIAMCLLGLSYSLLACALWPMVAFVVPEHQLGTAYGFMQSIQNLGLAIISIIAGMILDSRGYLFLEVFFIACVSLSLLSVVLLYLVNRAQGGNLNYSARQREEIKFSHTE

SEQ ID NO: 22652 - protein, 514 aa, Homo sapiens
MGVALRDLPGRHVSSRSHVTAVLTVFHGRCFLPGFGVVTTFPSPSPAGAMEEEDEEARALLAGGPDEADRGAPAAPGALPALCDPSRLAHRLLVLLLMCFLGFGSYFCYDNPAALQTQVKRDMQVNTTKFMLLYAWYSWPNVVLCFFGGFLIDRVFGIRWGTIIFSCFVCIGQVVFALGGIFNAFWLMEFGRFVFGIGGESLAVAQNTYAVSWFKGKELNLVFGLQLSMARIGSTVNMNLMGWLYSKIEALLGSAGHTTLGITLMIGGITCILSLICALALAYLDQRAERILHKEQGKTGEVIKLTDVKDFSLPLWLIFIICVCYYVAVFPFIGLGKVFFTEKFGFSSQAASAINSVVYVISAPMSPVFGLLVDKTGKNIIWVLCAVAATLVSHMMLAFTMWNPWIAMCLLGLSYSLLACALWPMVAFVVPEHQLGTAYGFMQSIQNLGLAIISIIAGMILDSRGYLFLEVFFIACVSLSLLSVVLLYLVNRAQGGNLNYSARQREEIKFSHTE

SEQ ID NO: 22653 - protein, 412 aa, Homo sapiens
MRGKLLPLAGLYLVQGLPYGLQSGLLPVLLRAGGLSLTRVGLAKVLYAPWLLKLAWAPLVDAQGSARAWVTRSTAGLGLVCGLLAGLPPPGAGQAGLPAAVAGLLLLLNLGAAMQDVALDALAVQLLEPAELGPGNTVQVVAYKLGAALAGGALLALLPTFSWPQLFLLLAATYWLAAALAWAAPALRRLPQQPPSEQRPHTAHLLRDVLAVPGTVWTAGFVLTYKLGEQGASSLFPLLLLDHGVSAPELGLWNGVGAVVCSIAGSSLGGTLLAKHWKLLPLLRSVLRFRLGGLACQTALVFHLDTLGASMDAGTILRGSALLSLCLQHFLGGLVTTVTFTGMMRCSQLAPRALQATHYSLLATLELLGKLLLGTLAGGLADGLGPHPCFLLLLILSAFPVLYLDLAPSTFL

SEQ ID NO: 22654 - protein, 450 aa, Homo sapiens
MLVTAYLAFVGLLASCLGLELSRCRAKPPGRACSNPSFLRFQLDFYQVYFLALAADWLQAPYLYKLYQHYYFLEGQIAILYVCGLASTVLFGLVASSLVDWLGRKNSCVLFSLTYSLCCLTKLSQDYFVLLVGRALGGLSTALLFSAFEAWYIHEHVERHDFPAEWIPATFARAAFWNHVLAVVAGVAAEAVASWIGLGPVAPFVAAIPLLALAGALALRNWGENYDRQRAFSRTCAGGLRCLLSDRRVLLLGTIQALFESVIFIFVFLWTPVLDPHGAPLGIIFSSFMAASLLGSSLYRIATSKRYHLQPMHLLSLAVLIVVFSLFMLTFSTSPGQESPVESFIAFLLIELACGLYFPSMSFLRRKVIPETEQAGVLNWFRVPLHSLACLGLLVLHDSDRKTGTRNMFSICSAVMVMALLAVVGLFTVVRHDAELRVPSPTEEPYAPEL

SEQ ID NO: 22655 - protein, 557 aa, Homo sapiens
MEVTAVGEEANQGDLLGFGQRCCSLGSSNPWLYRTAGIFPEHCTEEKKIGTYFRVAPQASKSQRSRCHGMAASEARPGEATAASYGRPFPTHPRRQEFRARVVRGPTMLVTAYLAFVGLLASCLGLELSRCRAKPPGRACSNPSFLRFQLDFYQVYFLALAADWLQAPYLYKLYQHYYFLEGQIAILYVCGLASTVLFGLVASSLVDWLGRKNSCVLFSLTYSLCCLTKLSQDYFVLLVGRALGGLSTALLFSAFEAWYIHEHVERHDFPAEWIPATFARAAFWNHVLAVVAGVAAEAVASWIGLGPVAPFVAAIPLLALAGALALRNWGENYDRQRAFSRTCAGGLRCLLSDRRVLLLGTIQALFESVIFIFVFLWTPVLDPHGAPLGIIFSSFMAASLLGSSLYRIATSKRYHLQPMHLLSLAVLIVVFSLFMLTFSTSPGQESPVESFIAFLLIELACGLYFPSMSFLRRKVIPETEQAGVLNWFRVPLHSLACLGLLVLHDSDRKTGTRNMFSICSAVMVMALLAVVGLFTVVRHDAELRVPSPTEEPYAPEL

SEQ ID NO: 22656 - protein, 833 aa, Homo sapiens
MHQLFRLVLGQKDLSRAGDLFSLDDSEIEDSLTEALEQIKIISSSSDYQTNNNDQAVVEICITRITTAIRETESIEKHAKALVGLWDSCLEHNLRPFGKDEDTPHAKIASDIMSCILQNYNRPPVMALAIPIAVKFLHRGNKELCRNMSNYLSLAAITKADLLADHTEVIVKSILQGNTMLLRVLPAVYEKQPQPINRHLTELLALMSQLEQPEQYHLLRLLHVAAKKKQLEVVQKCIPFLIGHLKDSTHNDIILNILIEIAVYEPVALNSFLPMLKEIGERFPYLTGQMARIYGAVGHVDEERARSCLTYLVSQLANMEHSFHHILLLEIKSITDTFSSILGPQSRDIFRMSNSFTAIAKLLTRQLENTKAGSGRRKISTEIEFPEKLEETKLIVTENEDHEKLQVKIQAFEDKINAGSNTPGSIRRYSLGQVSKEERKNIRFNRSKSLAFHTMLTKGVGSDDGEDENRGDIPASISLSEIDPLGQGNDKLPFKTDTERSQLGESSVSYPNIIHIDSENLSETVKENSQEETPETTASPIEYQDKLYLHLKKNLSKVKAYAMEIGKKIPVPDQCTIEDTVRSCVAKLFFTCSLKGHYCLYSKSSFILISQEPQPWIQIMFLFQQSLFPEPLSIQSHSVQFLRALWEKTQAGGAHSFETAMMESTFPQQKDLDQVQLHLEEVRFFDVFGFSETAGAWQCFMCNNPEKATVVNQDGQPLIEGKLKEKQVRWKFIKRWKTRYFTLAGNQLLFQKGKSKDDPDDCPIELSKVQSVKAVAKKRRDRSLPRAFEIFTDNKTYVFKAKDEKNAEEWLQCINVAVAQAKERESREVTTYL

SEQ ID NO: 22657 - protein, 788 aa, Homo sapiens
MHQLFRLVLGQKDLSRAGDLFSLDDSEIEDSLTEALEQIKIISSSSDYQTNNNDQAVVEICITRITTAIRETESIEKHAKALVGLWDSCLEHNLRPFGKDEDTPHAKIASDIMSCILQNYNRPPVMALAIPIAVKFLHRGNKELCRNMSNYLSLAAITKADLLADHTEVIVKSILQGNTMLLRVLPAVYEKQPQPINRHLTELLALMSQLEQPEQYHLLRLLHVAAKKKQLEVVQKCIPFLIGHLKDSTHNDIILNILIEIAVYEPVALNSFLPMLKEIGERFPYLTGQMARIYGAVGHVDEERARSCLTYLVSQLANMEHSFHHILLLEIKSITDTFSSILGPQSRDIFRMSNSFTAIAKLLTRQLENTKAGSGRRKISTEIEFPEKLEETKLIVTENEDHEKLQVKIQAFEDKINAGSNTPGSIRRYSLGQVSKEERKNIRFNRSKSLAFHTMLTKGVGSDDGEDENRGDIPASISLSEIDPLGQGNDKLPFKTDTERSQLGESSVSYPNIIHIDSENLSETVKENSQEETPETTASPIEYQDKLYLHLKKNLSKVKAYAMEIGKKIPVPDQCTIEDTVRSCVAKLFFTCSLKGHYCLYSKSSFILISQEPQPWIQIMFLFQQDLDQVQLHLEEVRFFDVFGFSETAGAWQCFMCNNPEKATVVNQDGQPLIEGKLKEKQVRWKFIKRWKTRYFTLAGNQLLFQKGKSKDDPDDCPIELSKVQSVKAVAKKRRDRSLPRAFEIFTDNKTYVFKAKDEKNAEEWLQCINVAVAQAKERESREVTTYL

SEQ ID NO: 22658 - protein, 213 aa, Homo sapiens
MHQLFRLVLGQKDLSRAGDLFSLDDSEIEDSLTEALEQIKIISSSSDYQTNNNDQAVVEICITRITTAIRETESIEKHAKALVGLWDSCLEHNLRPFGKDEDTPHAKIASDIMSCILQNYNRPPVMALAIPIAVKFLHRGNKELCRNMSNYLSLAAITKADLLADHTEVIVKSILQGMVRKLSLGTCFGRYLKVFSSSIYGLWEARPRVLEAN

SEQ ID NO: 22659 - protein, 177 aa, Homo sapiens
MHQLFRLVLGQKDLSRAGDLFSLDDSEIEDSLTEALEQIKIISSSSDYQTNNNDQAVVEICITRITTAIRETESIEKHAKALVGLWDSCLEHNLRPFGKDEDTPHAKIASDIMSCILQNYNRPPVMALAIPIAVKFLHRGNKELCRNMSNYLSLAAITKADLLADHTEVIVKSILQV

SEQ ID NO: 22660 - protein, 1067 aa, Homo sapiens [sequence omitted]

SEQ ID NO: 22661 - protein, 981 aa, Homo sapiens
MASPTSTNPAHAHFESFLQAQLCQDVLSSFQELCGALGLEPGGGLPQYHKIKDQLNYWSAKSLWTKLDKRAGQPVYQQGRACTSTKCLVVGAGPCGLRVAVELALLGARVVLVEKRTKFSRHNVLHLWPFTIHDLRALGAKKFYGRFCTGTLDHISIRQLQLLLLKVALLLGVEIHWGVTFTGLQPPPRKGSGWRAQLQPNPPAQLANYEFDVLISAAGGKFVPEGFKVREMRGKLAIGITANFVNGRTVEETQVPEISGVARIYNQSFFQSLLKATGIDLENIVYYKDDTHYFVMTAKKQCLLRLGVLRQPFWPLGTGVARGFLAAFDAAWMVKRWAEGAESLEVLAERESLYQLLSQTSPENMHRNVAQYGLDPATRYPNLNLRAVTPNQVRDLYDVLAKEPVQRNNDKTDTGMPATGSAGTQEELLRWCQEQTAGYPGVHVSDLSSSWADGLALCALVYRLQPGLLEPSELQGLGALEATAWALKVAENELGITPVVSAQAVVAGSDPLGLIAYLSHFHSAFKSMAHSPGPVSQASPGTSSAVLFLSKLQRTLQRSRAKENAEDAGGKKLRLEMEAETPSTEVPPDPEPGVPLTPPSQHQEAGAGDLCALCGEHLYVLERLCVNGHFFHRSCFRCHTCEATLWPGGYEQHPGDGHFYCLQHLPQTDHKAEGSDRGPESPELPTPSENSMPPGLSTPTASQEGAGPVPDPSQPTRRQIRLSSPERQRLSSLNLTPDPEMEPPPKPPRSCSALARHALESSFVGWGLPVQSPQALVAMEKEEKESPFSSEEEEEDVPLDSDVEQALQTFAKTSGTMNNYPTWRRTLLRRAKEEEMKRFCKAQTIQRRLNEIEAALRELEAEGVKLELALRRQSSSPEQQKKLWVGQLLQLVDKKNSLVAEEAELMITVQELNLEEKQWQLDQELRGYMNREENLKTAADRQAEDQVLRKLVDLVNQRDALIRFQEERRLSELALGTGAQG

SEQ ID NO: 22662 - protein, 332 aa, Homo sapiens
MPRLTFAPKGWPHPPTSLHPGQVTDQTTWWLFQELPTPSENSMPPGLSTPTASQEGAGPVPDPSQPTRRQIRLSSPERQRLSSLNLTPDPEMEPPPKPPRSCSALARHALESSFVGWGLPVQSPQALVAMEKEEKESPFSSEEEEEDVPLDSDVEQALQTFAKTSGTMNNYPTWRRTLLRRAKEEEMKRFCKAQTIQRRLNEIEAALRELEAEGVKLELALRRQSSSPEQQKKLWVGQLLQLVDKKNSLVAEEAELMITVQELNLEEKQWQLDQELRGYMNREENLKTAADRQAEDQVLRKLVDLVNQRDALIRFQEERRLSELALGTGAQG

SEQ ID NO: 22663 - protein, 1086 aa, Homo sapiens
MSCLSHSSLPSCCPPQEASMASPTSTNPAHAHFESFLQAQLCQDVLSSFQELCGALGLEPGGGLPQYHKIKDQLNYWSAKSLWTKLDKRAGQPVYQQGRACTSTKCLVVGAGPCGLRVAVELALLGARVVLVEKRTKFSRHNVLHLWPFTIHDLRALGAKKFYGRFCTGTLDHISIRQLQLLLLKVALLLGVEIHWGVTFTGLQPPPRKGSGWRAQLQPNPPAQLANYEFDVLISAAGGKFVPEGFKVREMRGKLAIGITANFVNGRTVEETQVPEISGVARIYNQSFFQSLLKATGIDLENIVYYKDDTHYFVMTAKKQCLLRLGVLRQDWPDTNRLLGSANVVPEALQRFTRAAADFATHGKLGKLEFAQDAHGQPDVSAFDFTSMMRAESSARVQEKHGARLLLGLVGDCLVEPFWPLGTGVARGFLAAFDAAWMVKRWAEGAESLEVLAERESLYQLLSQTSPENMHRNVAQYGLDPATRYPNLNLRAVTPNQVRDLYDVLAKEPVQRNNDKTDTGMPATGSAGTQEELLRWCQEQTAGYPGVHVSDLSSSWADGLALCALVYRLQPGLLEPSELQGLGALEATAWALKVAENELGITPVVSAQAVVAGSDPLGLIAYLSHFHSAFKSMAHSPGPVSQASPGTSSAVLFLSKLQRTLQRSRAKENAEDAGGKKLRLEMEAETPSTEVPPDPEPGVPLTPPSQHQEAGAGDLCALCGEHLYVLERLCVNGHFFHRSCFRCHTCEATLWPGGYEQHPGDGHFYCLQHLPQTDHKAEGSDRGPESPELPTPSENSMPPGLSTPTASQEGAGPVPDPSQPTRRQIRLSSPERQRLSSLNLTPDPEMEPPPKPPRSCSALARHALESSFVGWGLPVQSPQALVAMEKEEKESPFSSEEEEEDVPLDSDVEQALQTFAKTSGTMNNYPTWRRTLLRRAKEEEMKRFCKAQTIQRRLNEIEAALRELEAEGVKLELALRRQSSSPEQQKKLWVGQLLQLVDKKNSLVAEEAELMITVQELNLEEKQWQLDQELRGYMNREENLKTAADRQAEDQVLRKLVDLVNQRDALIRFQEERRLSELALGTGAQG

SEQ ID NO: 22664 - protein, 791 aa, Homo sapiens
MADDKVAILTDDEEEQKRKYVLADPFNGISREPEPPSNETPSSTETSAIPEEEIDWIEKHCVKINNDLLISKVFYFFFYSAYGSLYPLLPVYYKQLGMSPSQSGLLVGIRYFIEFCSAPFWGVVADRFKKGKIVLLFSLLCWVLFNLGIGFVKPATLRCVPKIRPTTHPTNASHQLTILPTNSSFTSFLTISPKMREKRNLLETRLNVSDTVTLPTAPNMNSEPTLQPQTGEITNRMMDLTLNSSTATPVSPGSVTKETTTVIVTTTKSLPSDQVMLVYDQQEVEAIFLVILVVVIIGEFFSASSVTIVDTVTLQYLGKHRDRYGLQRMWGSLGWGLAMLSVGIGIDYTHIEVLIDGKGCKPPEYRNYQIVFIVFGVLMTMALIVATQFRFRYNHFKNDDSKGKEVEIPQVERNNSTESSEETPTTTSHSQAFNFWDLIKLLCSVQYGSVLFVAWFMGFGYGFVFTFLYWHLEDLNGTTTLFGVCSVLSHVSELTAYFFSHKLIELIGHIRVLYIGLACNTARYIYISYLENAWTVLPMEVLQGVTHAAIWAACISYLSAAVPPELRTSAQGILQGLHLGLGRGCGAMIGGVLVNYFGAAATFRGIGMACLVILLLFALIQWLAVPDEEEDKTMLAERIPVPSSPVPIATIDLVQQQTEDVMPRIEPRLPPKKTKHQEEQEDVNKPAWGVSSSPWVTFVYALYQIKEMMQLTRDNRASEIQPLQGTNENRENSPAGRAQPVPCETHSDPSRNQPSPDAAASQTQTSPAHPSVDPCTEESEEQQAQLAAGGH

SEQ ID NO: 22665 - protein, 816 aa, Homo sapiens
MAEPLKEEDGEDGSAEPPGPVKAEPAHTAASVAAKNLALLKARSFDVTFDVGDEYEIIETIGNGAYGVVSSARRRLTGQQVAIKKIPNAFDVVTNAKRTLRELKILKHFKHDNIIAIKDILRPTVPYGEFKSVYVVLDLMESDLHQIIHSSQPLTLEHVRYFLYQLLRGLKYMHSAQVIHRDLKPSNLLVNENCELKIGDFGMARGLCTSPAEHQYFMTEYVATRWYRAPELMLSLHEYTQAIDLWSVGCIFGEMLARRQLFPGKNYVHQLQLIMMVLGTPSPAVIQAVGAERVRAYIQSLPPRQPVPWETVYPGADRQALSLLGRMLRFEPSARISAAAALRHPFLAKYHDPDDEPDCAPPFDFAFDREALTRERIKEAIVAEIEDFHARREGIRQQIRFQPSLQPVASEPGCPDVEMPSPWAPSGDCAMESPPPAPPPCPGPAPDTIDLTLQPPPPVSEPAPPKKDGAISDNTKAALKAALLKSLRSRLRDGPSAPLEAPEPRKPVTAQERQREREEKRRRRQERAKEREKRRQERERKERGAGASGGPSTDPLAGLVLSDNDRSLLERWTRMARPAAPALTSVPAPAPAPTPTPTPVQPTSPPPGPVAQPTGPQPQSAGSTSGPVPQPACPPPGPAPHPTGPPGPIPVPAPPQIATSTSLLAAQSLVPPPGLPGSSTPGVLPYFPPGLPPPDAGGAPQSSMSESPDVNLVTQQLSKSQVEDPLPPVFSGTPKGSGAGYGVGFDLEEFLNQSFDMGVADGPQDGQADSASLSASLLADWLEGHGMNPADIESLQREIQMDSPMLLADLPDLQDP

SEQ ID NO: 22666 - protein, 677 aa, Homo sapiens
MESDLHQIIHSSQPLTLEHVRYFLYQLLRGLKYMHSAQVIHRDLKPSNLLVNENCELKIGDFGMARGLCTSPAEHQYFMTEYVATRWYRAPELMLSLHEYTQAIDLWSVGCIFGEMLARRQLFPGKNYVHQLQLIMMVLGTPSPAVIQAVGAERVRAYIQSLPPRQPVPWETVYPGADRQALSLLGRMLRFEPSARISAAAALRHPFLAKYHDPDDEPDCAPPFDFAFDREALTRERIKEAIVAEIEDFHARREGIRQQIRFQPSLQPVASEPGCPDVEMPSPWAPSGDCAMESPPPAPPPCPGPAPDTIDLTLQPPPPVSEPAPPKKDGAISDNTKAALKAALLKSLRSRLRDGPSAPLEAPEPRKPVTAQERQREREEKRRRRQERAKEREKRRQERERKERGAGASGGPSTDPLAGLVLSDNDRSLLERWTRMARPAAPALTSVPAPAPAPTPTPTPVQPTSPPPGPVAQPTGPQPQSAGSTSGPVPQPACPPPGPAPHPTGPPGPIPVPAPPQIATSTSLLAAQSLVPPPGLPGSSTPGVLPYFPPGLPPPDAGGAPQSSMSESPDVNLVTQQLSKSQVEDPLPPVFSGTPKGSGAGYGVGFDLEEFLNQSFDMGVADGPQDGQADSASLSASLLADWLEGHGMNPADIESLQREIQMDSPMLLADLPDLQDP

SEQ ID NO: 22667 - protein, 533 aa, Homo sapiens
MAEPLKEEDGEDGSAEPPGPVKAEPAHTAASVAAKNLALLKARSFDVTFDVGDEYEIIETIGNGAYGVVSSARRRLTGQQVAIKKIPNAFDVVTNAKRTLRELKILKHFKHDNIIAIKDILRPTVPYGEFKSVYVVLDLMESDLHQIIHSSQPLTLEHVRYFLYQLLRGLKYMHSAQVIHRDLKPSNLLVNENCELKIGDFGMARGLCTSPAEHQYFMTEYVATRWYRAPELMLSLHEYTQAIDLWSVGCIFGEMLARRQLFPGKNYVHQLQLIMMVLGTPSPAVIQAVGAERVRAYIQSLPPRQPVPWETVYPGADRQALSLLGRMLRFEPSARISAAAALRHPFLAKYHDPDDEPDCAPPFDFAFDREALTRERIKEAIVAEIEDFHARREGIRQQIRFQPSLQPVASEPGCPDVEMPSPWAPSGDCAMESPPPAPPPCPGPAPDTIDLTLQPPPPVSEPAPPKKDGAISDNTKAALKAALLKSLRSRLRGALWAGRVGRGETWTWTRLQAFTFSPAQLPRKWPQRTPGGS

SEQ ID NO: 22668 - protein, 451 aa, Homo sapiens
MLFFHTMPSAPMGSQGKAVTCLESEGCGEDGACPWSVIRPTHASLLPSPSSYVVLDLMESDLHQIIHSSQPLTLEHVRYFLYQLLRGLKYMHSAQVIHRDLKPSNLLVNENCELKIGDFGMARGLCTSPAEHQYFMTEYVATRWYRAPELMLSLHEYTQAIDLWSVGCIFGEMLARRQLFPGKNYVHQLQLIMMVLGTPSPAVIQAVGAERVRAYIQSLPPRQPVPWETVYPGADRQALSLLGRMLRFEPSARISAAAALRHPFLAKYHDPDDEPDCAPPFDFAFDREALTRERIKEAIVAEIEDFHARREGIRQQIRFQPSLQPVASEPGCPDVEMPSPWAPSGDCAMESPPPAPPPCPGPAPDTIDLTLQPPPPVSEPAPPKKDGAISDNTKAALKAALLKSLRSRLRGALWAGRVGRGETWTWTRLQAFTFSPAQLPRKWPQRTPGGS

SEQ ID NO: 22669 - protein, 823 aa, Homo sapiens
MKRHRPVSSSDSSDESPSTSFTSGSMYRIKSKIPNEHKKPAEVFRKDLISAMKLPDSHHINPDSYYLFADTWKEEWEKGVQVPASPDTVPQPSLRIIAEKVKDVLFIRPRKYIHCSSPDTTEPGYINIMELAASVCRYDLDDMDIFWLQELNEDLAEMGCGPVDENLMEKTVEVLERHCHENMNHAIETEEGLGIEYDEDVICDVCRSPDSEEGNDMVFCDKCNVCVHQACYGILKVPEGSWLCRSCVLGIYPQCVLCPKKGGALKTTKTGTKWAHVSCALWIPEVSIACPERMEPITKISHIPPSRWALVCNLCKLKTGACIQCSIKSCITAFHVTCAFEHGLEMKTILDEGDEVKFKSYCLKHSQNRQKLGEAEYPHHRAKEQSQAKSEKTSLRAQKLRELEEEFYSLVRVEDVAAELGMPTLAVDFIYNYWKLKRKSNFNKPLFPPKEDEENGLVQPKEESIHTRMRMFMHLRQDLERVRNLCYMISRREKLKLSHNKIQEQIFGLQVQLLNQEIDAGLPLTNALENSLFYPPPRITLKLKMPKSTPEDHRNSSTETDQQPHSPDSSSSVHSIRNMQVPQESLEMRTKSYPRYPLESKNNRLLASLSHSRSEAKESSPAWRTPSSECYHGQSLGKPLVLQAALHGQSSIGNGKSQPNSKFAKSNGLEGSWSGNVTQKDSSSEMFCDQEPVFSPHLVSQGSFRKSTVEHFSRSFKETTNRWVKNTEDLQCYVKPTKNMSPKEQFWGRQVLRRSAGRAPYQENDGYCPDLELSDSEAESDGNKEKVRVRKDSSDRENPPHDSRRDCHGKSKTHPLSHSSMQR

SEQ ID NO: 22670 - protein, 426 aa, Homo sapiens
MSPAFRAMDVEPRAKGVLLEPFVHQVGGHSCVLRFNETTLCKPLVPREHQFYETLPAEMRKFTPQYKGVVSVRFEEDEDRNLCLIAYPLKGDHGIVDIVDNSDCEPKSKLLRWTTNKKHHVLETEKTPKDWVRQHRKEEKMKSHKLEEEFEWLKKSEVLYYTVEKKGNISSQLKHYNPWSMKCHQQQLQRMKENAKHRNQYKFILLENLTSRYEVPCVLDLKMGTRQHGDDASEEKAANQIRKCQQSTSAVIGVRVCGMQVYQAGSGQLMFMNKYHGRKLSVQGFKEALFQFFHNGRYLRRELLGPVLKKLTELKAVLERQESYRFYSSSLLVIYDGKERPEVVLDSDAEDLEDLSEESADESAGAYAYKPIGASSVDVRMIDFAHTTCRLYGEDTVVHEGQDAGYIFGLQSLIDIVTEISEESGE

SEQ ID NO: 22671 - protein, 97 aa, Homo sapiens
MSPAFRAMDVEPRAKGVLLEPFVHQVGGHSCVLRFNETTLCKPLVPREHQFYETLPAEMRKFTPQYKGQSQRPLVSWPSLPHFFPWSFPLWPQGSVA

SEQ ID NO: 22672 - protein, 70 aa, Homo sapiens
MSPAFRAMDVEPRAKGVLLEPFVHQVGGHSCVLRFNETTLCKPLVPREHQFYETLPAEMRKFTPQYKGVS

SEQ ID NO: 22673 - protein, 185 aa, Homo sapiens
MSLNLPEASLLSRASWPEQAKEPRREGHTDKQQTEDVLAAGLRCLPHLPAICARRMSPAFRAMDVEPRAKGVLLEPFVHQVGGHSCVLRFNETTLCKPLVPREHQFYETLPAEMRKFTPQYKGKSQLLEGLPHWRGDVRDRGHGRPWQPSLEPSLPPTLCFPSLSSFSSSWPSAQHLTPSVFNPW

SEQ ID NO: 22674 - protein, 188 aa, Homo sapiens
MNLCQSPFQEGCQSLLASWPEQAKEPRREGHTDKQQTEDVLAAGLRCLPHLPAICARRMSPAFRAMDVEPRAKGVLLEPFVHQVGGHSCVLRFNETTLCKPLVPREHQFYETLPAEMRKFTPQYKGKSQLLEGLPHWRGDVRDRGHGRPWQPSLEPSLPPTLCFPSLSSFSSSWPSAQHLTPSVFNPW

SEQ ID NO: 22675 - protein, 87 aa, Homo sapiens
MSPAFRAMDVEPRAKGVLLEPFVHQVGGHSCVLRFNETTLCKPLVPREHQFYETLPAEMRKFTPQYKGDISSHQHGGVFVGEWGSLL

SEQ ID NO: 22676 - protein, 349 aa, Homo sapiens
MGDMGDPPKKKRLISLCVGCGNQIHDQYILRVSPDLEWHAACLKCAECNQYLDESCTCFVRDGKTYCKRDYIRLYGIKCAKCSIGFSKNDFVMRARSKVYHIECFRCVACSRQLIPGDEFALREDGLFCRADHDVVERASLGAGDPLSPLHPARPLQMAAEPISARQPALRPHVHKQPEKTTRVRTVLNEKQLHTLRTCYAANPRPDALMKEQLVEMTGLSPRVIRVWFQNKRCKDKKRSIMMKQLQQQQPNDKTNIQGMTGTPMVAASPERHDGGLQANPVEVQSYQPPWKVLSDFALQSDIDQPAFQQLVNFSEGGPGSNSTGSEVASMSSQLPDTPNSMVASPIEA

SEQ ID NO: 22677 - protein, 441 aa, Homo sapiens
MCVCQTMEVGQYGKNASRAGDRGVLLEPFIHQVGGHSSMMRYDDHTVCKPLISREQRFYESLPPEMKEFTPEYKGVVSVCFEGDSDGYINLVAYPYVESETVEQDDTTEREQPRRKHSRRSLHRSGSGSDHKEEKASLSLETSESSQEAKSPKVELHSHSEVPFQMLDGNSGLSSEKISHNPWSLRCHKQQLSRMRSESKDRKLYKFLLLENVVHHFKYPCVLDLKMGTRQHGDDASAEKAARQMRKCEQSTSATLGVRVCGMQVYQLDTGHYLCRNKYYGRGLSIEGFRNALYQYLHNGLDLRRDLFEPILSKLRGLKAVLERQASYRFYSSSLLVIYDGKECRAESCLDRRSEMRLKHLDMVLPEVASSCGPSTSPSNTSPEAGPSSQPKVDVRMIDFAHSTFKGFRDDPTVHDGPDRGYVFGLENLISIMEQMRDENQ

SEQ ID NO: 22678 - protein, 276 aa, Homo sapiens
MLDGNSGLSSEKISHNPWSLRCHKQQLSRMRSESKDRKLYKFLLLENVVHHFKYPCVLDLKMGTRQHGDDASAEKAARQMRKCEQSTSATLGVRVCGMQVYQLDTGHYLCRNKYYGRGLSIEGFRNALYQYLHNGLDLRRDLFEPILSKLRGLKAVLERQASYRFYSSSLLVIYDGKECRAESCLDRRSEMRLKHLDMVLPEVASSCGPSTSPSNTSPEAGPSSQPKVDVRMIDFAHSTFKGFRDDPTVHDGPDRGYVFGLENLISIMEQMRDENQ

SEQ ID NO: 22679 - protein, 512 aa, Homo sapiens
MAEPSVESSSPGGSATSDDHEFDPSADMLVHDFDDERTLEEEEMMEGETNFSSEIEDLAREGDMPIHELLSLYGYGSTVRLPEEDEEEEEEEEEGEDDEDADNDDNSGCSGENKEENIKDSSGQEDETQSSNDDPSQSVASQDAQEIIRPRRCKYFDTNSEVEEESEEDEDYIPSEDWKKEIMVGSMFQAEIPVGICRYKENEKVYENDDQLLWDPEYLPEDKVIIFLKDASRRTGDEKGVEAIPEGSHIKDNEQALYELVKCNFDTEEALRRLRFNVKAAREELSVWTEEECRNFEQGLKAYGKDFHLIQANKVRTRSVGECVAFYYMWKKSERYDFFAQQTRFGKKKYNLHPGVTDYMDRLLDESESAASSRAPSPPPTASNSSNSQSEKEDGTVSTANQNGVSSNGPGEILNKEEVKVEGLHINGPTGGNKKPLHADMDTNGYETDNLTTDPKLAHMTARNENDFDEKSERPAKRRRVNSNGKESPGSSEFFQEAVSHGKFEELENTDD

SEQ ID NO: 22680 - protein, 565 aa, Homo sapiens
MDGASSGGGGSSEGGGGSSGSGYGVVARFSQCLAEFRTWLRTNWLRFNADKTDVMLPSVESSSPGGSATSDDHEFDPSADMLVHDFDDERTLEEEEMMEGETNFSSEIEDLAREGDMPIHELLSLYGYGSTVRLPEEDEEEEEEEEEGEDDEDADNDDNSGCSGENKEENIKDSSGQEDETQSSNDDPSQSVASQDAQEIIRPRRCKYFDTNSEVEEESEEDEDYIPSEDWKKEIMVGSMFQAEIPVGICRYKENEKVYENDDQLLWDPEYLPEDKVIIFLKDASRRTGDEKGVEAIPEGSHIKDNEQALYELVKCNFDTEEALRRLRFNVKAAREELSVWTEEECRNFEQGLKAYGKDFHLIQANKVRTRSVGECVAFYYMWKKSERYDFFAQQTRFGKKKYNLHPGVTDYMDRLLDESESAASSRAPSPPPTASNSSNSQSEKEDGTVSTANQNGVSSNGPGEILNKEEVKVEGLHINGPTGGNKKPLHADMDTNGYETDNLTTDPKLAHMTARNENDFDEKSERPAKRRRVNSNGKESPGSSEFFQEAVSHGKFEELENTDD

SEQ ID NO: 22681 - protein, 529 aa, Homo sapiens
MFMFNWFTDCLWTLFLSNYQPSVESSSPGGSATSDDHEFDPSADMLVHDFDDERTLEEEEMMEGETNFSSEIEDLAREGDMPIHELLSLYGYGSTVRLPEEDEEEEEEEEEGEDDEDADNDDNSGCSGENKEENIKDSSGQEDETQSSNDDPSQSVASQDAQEIIRPRRCKYFDTNSEVEEESEEDEDYIPSEDWKKEIMVGSMFQAEIPVGICRYKENEKVYENDDQLLWDPEYLPEDKVIIFLKDASRRTGDEKGVEAIPEGSHIKDNEQALYELVKCNFDTEEALRRLRFNVKAAREELSVWTEEECRNFEQGLKAYGKDFHLIQANKVRTRSVGECVAFYYMWKKSERYDFFAQQTRFGKKKYNLHPGVTDYMDRLLDESESAASSRAPSPPPTASNSSNSQSEKEDGTVSTANQNGVSSNGPGEILNKEEVKVEGLHINGPTGGNKKPLHADMDTNGYETDNLTTDPKLAHMTARNENDFDEKSERPAKRRRVNSNGKESPGSSEFFQEAVSHGKFEELENTDD

SEQ ID NO: 22682 - protein, 450 aa, Homo sapiens
MFMFNWFTDCLWTLFLSNYQPSVESSSPGGSATSDDHEFDPSADMLVHDFDDERTLEEEEMMEGETNFSSEIEDLAREGDMPIHELLSLYGYGSTVRLPEEDEEEEEEEEEGEDDEDADNDDNSGCSGENKEENIKDSSGQEDETQSSNDDPSQSVASQDAQEIIRPRRCKYFDTNSEVEEESEEDEDYIPSEDWKKEIMVGSMFQAEIPVGICRYKENEKVYENDDQLLWDPEYLPEDKVIIFLKDASRRTGDEKGVEAIPEGSHIKDNEQALYELVKCNFDTEEALRRLRFNVKAAREELSVWTEEECRNFEQGLKAYGKDFHLIQANKVRTRSVGECVAFYYMWKKSERYDFFAQQTRFGKKKYNLHPGVTDYMDRLLDESESAASSRAPSPPPTASNSSNSQSEKEDGTVSTANQNGVSSNGPGILQMLLPVHFSAISSRANAFLK

SEQ ID NO: 22683 - protein, 486 aa, Homo sapiens
MDGASSGGGGSSEGGGGSSGSGYGVVARFSQCLAEFRTWLRTNWLRFNADKTDVMLPSVESSSPGGSATSDDHEFDPSADMLVHDFDDERTLEEEEMMEGETNFSSEIEDLAREGDMPIHELLSLYGYGSTVRLPEEDEEEEEEEEEGEDDEDADNDDNSGCSGENKEENIKDSSGQEDETQSSNDDPSQSVASQDAQEIIRPRRCKYFDTNSEVEEESEEDEDYIPSEDWKKEIMVGSMFQAEIPVGICRYKENEKVYENDDQLLWDPEYLPEDKVIIFLKDASRRTGDEKGVEAIPEGSHIKDNEQALYELVKCNFDTEEALRRLRFNVKAAREELSVWTEEECRNFEQGLKAYGKDFHLIQANKVRTRSVGECVAFYYMWKKSERYDFFAQQTRFGKKKYNLHPGVTDYMDRLLDESESAASSRAPSPPPTASNSSNSQSEKEDGTVSTANQNGVSSNGPGILQMLLPVHFSAISSRANAFLK

SEQ ID NO: 22684 - protein, 433 aa, Homo sapiens
MAEPSVESSSPGGSATSDDHEFDPSADMLVHDFDDERTLEEEEMMEGETNFSSEIEDLAREGDMPIHELLSLYGYGSTVRLPEEDEEEEEEEEEGEDDEDADNDDNSGCSGENKEENIKDSSGQEDETQSSNDDPSQSVASQDAQEIIRPRRCKYFDTNSEVEEESEEDEDYIPSEDWKKEIMVGSMFQAEIPVGICRYKENEKVYENDDQLLWDPEYLPEDKVIIFLKDASRRTGDEKGVEAIPEGSHIKDNEQALYELVKCNFDTEEALRRLRFNVKAAREELSVWTEEECRNFEQGLKAYGKDFHLIQANKVRTRSVGECVAFYYMWKKSERYDFFAQQTRFGKKKYNLHPGVTDYMDRLLDESESAASSRAPSPPPTASNSSNSQSEKEDGTVSTANQNGVSSNGPGILQMLLPVHFSAISSRANAFLK

SEQ ID NO: 22685 - protein, 485 aa, Homo sapiens
MLVHDFDDERTLEEEEMMEGETNFSSEIEDLAREGDMPIHELLSLYGYGSTVRLPEEDEEEEEEEEEGEDDEDADNDDNSGCSGENKEENIKDSSGQEDETQSSNDDPSQSVASQDAQEIIRPRRCKYFDTNSEVEEESEEDEDYIPSEDWKKEIMVGSMFQAEIPVGICRYKENEKVYENDDQLLWDPEYLPEDKVIIFLKDASRRTGDEKGVEAIPEGSHIKDNEQALYELVKCNFDTEEALRRLRFNVKAAREELSVWTEEECRNFEQGLKAYGKDFHLIQANKVRTRSVGECVAFYYMWKKSERYDFFAQQTRFGKKKYNLHPGVTDYMDRLLDESESAASSRAPSPPPTASNSSNSQSEKEDGTVSTANQNGVSSNGPGEILNKEEVKVEGLHINGPTGGNKKPLHADMDTNGYETDNLTTDPKLAHMTARNENDFDEKSERPAKRRRVNSNGKESPGSSEFFQEAVSHGKFEELENTDD

SEQ ID NO: 22686 - protein, 470 aa, Homo sapiens
MFMFNWFTDCLWTLFLSNYQPSVESSSPGGSATSDDHEFDPSADMLVHDFDDERTLEEEEMMEGETNFSSEIEDLAREGDMPIHELLSLYGYGSTVRLPEEDEEEEEEEEEGEDDEDADNDDNSGCSGENKEENIKDSSGQEDETQSSNDDPSQSVASQDAQEIIRPRRCKYFDTNSEVEEESEEDEDYIPSEDWKKEIMVGSMFQAEIPVGICRYKENEKVYENDDQLLWDPEYLPEDKVIIFLKDASRRTGDEKGVEAIPEGSHIKDNEQALYELVKCNFDTEEALRRLRFNVKAAREELSVWTEEECRNFEQGLKAYGKDFHLIQANKVRTRSVGECVAFYYMWKKSERYDFFAQQTRFGKKKYNLHPGVTDYMDRLLDESESAASSRAPSPPPTASNSSNSQSEKEDGTVSTANQNGVSSNGPGEILNKEEVKVEGLHINGPTGILQMLLPVHFSAISSRANAFLK

SEQ ID NO: 22687 - protein, 370 aa, Homo sapiens
MPIHELLSLYGYGSTVRLPEEDEEEEEEEEEGEDDEDADNDDNSGCSGENKEENIKDSSGQEDETQSSNDDPSQSVASQDAQEIIRPRRCKYFDTNSEVEEESEEDEDYIPSEDWKKEIMVGSMFQAEIPVGICRYKENEKVYENDDQLLWDPEYLPEDKVIIFLKDASRRTGDEKGVEAIPEGSHIKDNEQALYELVKCNFDTEEALRRLRFNVKAAREELSVWTEEECRNFEQGLKAYGKDFHLIQANKVRTRSVGECVAFYYMWKKSERYDFFAQQTRFGKKKYNLHPGVTDYMDRLLDESESAASSRAPSPPPTASNSSNSQSEKEDGTVSTANQNGVSSNGPGILQMLLPVHFSAISSRANAFLK

SEQ ID NO: 22688 - protein, 81 aa, Homo sapiens
MFMFNWFTDCLWTLFLSNYQPSVESSSPGGSATSDDHEFDPSADMLVHDFDDERTLEEEEMMEGETNFSSEIEDLARVNNM

SEQ ID NO: 22689 - protein, 365 aa, Homo sapiens
MSLIRKKGFYKQDVNKTAWELPKTYVSPTHVGSGAYGSVCSAIDKRSGEKVAIKKLSRPFQSEIFAKRAYRELLLLKHMQHENVIGLLDVFTPASSLRNFYDFYLVMPFMQTDLQKIMGMEFSEEKIQYLVYQMLKGLKYIHSAGVVHRDLKPGNLAVNEDCELKILDFGLARHADAEMTGYVVTRWYRAPEVILSWMHYNQTVDIWSVGCIMAEMLTGKTLFKGKDYLDQLTQILKVTGVPGTEFVQKLNDKAAKSYIQSLPQTPRKDFTQLFPRASPQAADLLEKMLELDVDKRLTAAQALTHPFFEPFRDPEEETEAQQPFDDSLEHEKLTVDEWKQHIYKEIVNFSPIARKDSRRRSGMKL

SEQ ID NO: 22690 - protein, 257 aa, Homo sapiens
MSLIRKKGFYKQDVNKTAWELPKTYVSPTHVGSGAYGSVCSAIDKRSGEKVAIKKLSRPFQSEIFAKRAYRELLLLKHMQHENVIGLLDVFTPASSLRNFYDFYLVMPFMQTDLQKIMGMEFSEEKIQYLVYQMLKGLKYIHSAGVVHRDLKPGNLAVNEDCELKILDFGLARHADAEMTGYVVTRWYRAPEVILSWMHYNQTGQILHPVPATDPQEGFHSAVPTGQPPGCGPAGEDAGARRGQAPDGRAGPHPSLL

SEQ ID NO: 22691 - protein, 545 aa, Homo sapiens
MAEASSLGRQSPRVVSCLEHSLCPGEPGLQTTAVVSMGSGDHQFNLAEILSQNYSVRGECEEASRCPDKPKEELEKDFISQSNDMPFDELLALYGYEASDPISDRESEGGDVAPNLPDMTLDKEQIAKDLLSGEEEEETQSSADDLTPSVTSHEASDLFPNRSGSRFLADEDREPGSSASSDTEEDSLPANKCKKEIMVGPQFQADLSNLHLNRHCEKIYENEDQLLWDPSVLPEREVEEFLYRAVKRRWHEMAGPQLPEGEAVKDSEQALYELVKCNFNVEEALRRLRFNVKVIRDGLCAWSEEECRNFEHGFRVHGKNFHLIQANKVRTRSVGECVEYYYLWKKSERYDYFAQQTRLGRRKYVPSGTTDADQDLDGSDPDGPGRPRPEQDTLTGMRTDPLSVDGTAGGLDEPGVASDGLPSSEPGPCSFQQLDESPAVPLSHRPPALADPASYQPAVTAPEPDASPRLAVDFALPKELPLISSHVDLSGDPEETVAPAQVALSVTEFGLIGIGDVNPFLAAHPTCPAPGLHSEPLSHCNVMTC

SEQ ID NO: 22692 - protein, 550 aa, Homo sapiens
MAEASFGSSSPVGSLSSEDHDFDPTAEMLVHDYDDERTLEEEEMMDEGKNFSSEIEDLEKEGTMPLEDLLAFYGYEPTIPAVANSSANSSPSELADELPDMTLDKEEIAKDLLSGDDEETQSSADDLTPSVTSHETSDFFPRPLRSNTACDGDKESEVEDVETDSGNSPEDLRKEIMIGLQYQAEIPPYLGEYDGNEKVYENEDQLLWCPDVVLESKVKEYLVETSLRTGSEKIMDRISAGTHTRDNEQALYELLKCNHNIKEAIERYCCNGKASQEGMTAWTEEECRSFEHALMLFGKDFHLIQKNKVRTRTVAECVAFYYMWKKSERYDYFAQQTRFGKKRYNHHPGVTDYMDRLVDETEALGGTVNASALTSNRPEPIPDQQLNILNSFTASDLTALTNSVATVCDPTDVNCLDDSFPPLGNTPRGQVNHVPVVTEELLTLPSNGESDCFNLFETGFYHSELNPMNMCSEESERPAKRLKMGIAVPESFMNEVSVNNLGVDFENHTHHITSAKMAVSVADFGSLSANETNGFISAHALHQHAALHSE

SEQ ID NO: 22693 - protein, 555 aa, Homo sapiens
MAEASFGSSSPVCFIPVGSLSSEDHDFDPTAEMLVHDYDDERTLEEEEMMDEGKNFSSEIEDLEKEGTMPLEDLLAFYGYEPTIPAVANSSANSSPSELADELPDMTLDKEEIAKDLLSGDDEETQSSADDLTPSVTSHETSDFFPRPLRSNTACDGDKESEVEDVETDSGNSPEDLRKEIMIGLQYQAEIPPYLGEYDGNEKVYENEDQLLWCPDVVLESKVKEYLVETSLRTGSEKIMDRISAGTHTRDNEQALYELLKCNHNIKEAIERYCCNGKASQEGMTAWTEEECRSFEHALMLFGKDFHLIQKNKVRTRTVAECVAFYYMWKKSERYDYFAQQTRFGKKRYNHHPGVTDYMDRLVDETEALGGTVNASALTSNRPEPIPDQQLNILNSFTASDLTALTNSVATVCDPTDVNCLDDSFPPLGNTPRGQVNHVPVVTEELLTLPSNGESDCFNLFETGFYHSELNPMNMCSEESERPAKRLKMGIAVPESFMNEVSVNNLGVDFENHTHHITSAKMAVSVADFGSLSANETNGFISAHALHQHAALHSE

SEQ ID NO: 22694 - protein, 549 aa, Homo sapiens
MAEASFGSSSPVGSLSSEDHDFDPTAEMLVHDYDDERTLEEEEMMDEGKNFSSEIEDLEKEGTMPLEDLLAFYGYEPTIPAVANSSANSSPSELADELPDMTLDKEEIAKDLLSGDDEETQSSADDLTPSVTSHETSDFFPRPLRSNTACDGDKESEVEDVETDSGNSPEDLRKEIMIGLQYQAEIPPYLGEYDGNEKVYENEDQLLWCPDVVLESKVKEYLVETSLRTGSEKIMDRISAGTHTRDNEQALYELLKCNHNIKEAIERYCCNGKASQGMTAWTEEECRSFEHALMLFGKDFHLIQKNKVRTRTVAECVAFYYMWKKSERYDYFAQQTRFGKKRYNHHPGVTDYMDRLVDETEALGGTVNASALTSNRPEPIPDQQLNILNSFTASDLTALTNSVATVCDPTDVNCLDDSFPPLGNTPRGQVNHVPVVTEELLTLPSNGESDCFNLFETGFYHSELNPMNMCSEESERPAKRLKMGIAVPESFMNEVSVNNLGVDFENHTHHITSAKMAVSVADFGSLSANETNGFISAHALHQHAALHSE

SEQ ID NO: 22695 - protein, 487 aa, Homo sapiens
MPLEDLLAFYGYEPTIPAVANSSANSSPSELADELPDMTLDKEEIAKDLLSGDDEETQSSADDLTPSVTSHETSDFFPRPLRSNTACDGDKESEVEDVETDSGNSPEDLRKEIMIGLQYQAEIPPYLGEYDGNEKVYENEDQLLWCPDVVLESKVKEYLVETSLRTGSEKIMDRISAGTHTRDNEQALYELLKCNHNIKEAIERYCCNGKASQEGMTAWTEEECRSFEHALMLFGKDFHLIQKNKVRTRTVAECVAFYYMWKKSERYDYFAQQTRFGKKRYNHHPGVTDYMDRLVDETEALGGTVNASALTSNRPEPIPDQQLNILNSFTASDLTALTNSVATVCDPTDVNCLDDSFPPLGNTPRGQVNHVPVVTEELLTLPSNGESDCFNLFETGFYHSELNPMNMCSEESERPAKRLKMGIAVPESFMNEVSVNNLGVDFENHTHHITSAKMAVSVADFGSLSANETNGFISAHALHQHAALHSE

SEQ ID NO: 22696 - protein, 119 aa, Homo sapiens
MAEASFGSSSPVGSLSSEDHDFDPTAEMLVHDYDDERTLEEEEMMDEGKNFSSEIEDLEKEGTMPLEDLLAFYGYEPTIPAVANSSANSSPSELADELPDMTLDKISGRERNPHLGTSS

SEQ ID NO: 22697 - protein, 325 aa, Homo sapiens
MPITRMRMRPWLEMQINSNQIPGLIWINKEEMIFQIPWKHAAKHGWDINKDACLFRSWAIHTGRYKAGEKEPDPKTWKANFRCAMNSLPDIEEVKDQSRNKGSSAVRVYRMLPPLTKNQRKERKSKSSRDAKSKAKRKSCGDSSPDTFSDGLSSSTLPDDHSSYTVPGYMQDLEVEQALTPALSPCAVSSTLPDWHIPVEVVPDSTSDLYNFQVSPMPSTSEATTDEDEEGKLPEDIMKLLEQSEWQPTNVDGKGYLLNEPGVQPTSVYGDFSCKEEPEIDSPGGDIGLSLQRVFTDLKNMDATWLDSLLTPVRLPSIQAIPCAP

SEQ ID NO: 22698 - protein, 535 aa, Homo sapiens
MSVHYTLNLRVFWPLVTGLCTALVCLYHVLRGSGGARAEPADGVDGGFPLLKVAVLLLLSYVLLRCRHAVRQRFLPGSPRLEGHAAFSSRHFREPGLSILLESYYEHEVRLSPHVLGHSKAHVSRIVGELVRAGRARGSPGLIPGGALALAFRGDFIQVGSAYEQHKIRRPDSFDVLVPLRLPPLVALEPRSLGEEPALAPAFRGCFLCALKAPPSPSGASGGHWLRDCKPFADAFCVDVRGRRHLSATLVLRWFQSHLQRSLATVRYSLEGRCRVTLTPGGLEQPPTLHILPCRTDYGCCRLSMAVRLIPAVHLGDGVFLVAPPPPPLPSAPLLELPEGLRAEALWGVNTARQEQKLLSWLQERAAPGACYLKCLQLLKALRDLGARGLDSAAATQWGRILSSYVLKTVLLAVLLRKGAPGQGWDEEHLGRCLEELVQFLRDCLLRRHTLFHCVLGPGGAAAEVGPLPKALREAAPVDLLAAFDGHARELAAARLLSTWQRLPQLLRAYGGPRYLARCPPPRSQRTQGFLEGEP

SEQ ID NO: 22699 - protein, 299 aa, Homo sapiens
MGTKAQVERKLLCLFILAILLCSLALGSVTVHSSEPEVRIPENNPVKLSCAYSGFSSPRVEWKFDQGDTTRLVCYNNKITASYEDRVTFLPTGITFKSVTREDTGTYTCMVSEEGGNSYGEVKVKLIVLVPPSKPTVNIPSSATIGNRAVLTCSEQDGSPPSEYTWFKDGIVMPTNPKSTRAFSNSSYVLNPTTGELVFDPLSASDTGEYSCEARNGYGTPMTSNAVRMEAVERNVGVIVAAVLVTLILLGILVFGIWFAYSRGHFDRTKKGTSSKKVIYSQPSARSEGEFKQTSSFLV

SEQ ID NO: 22700 - protein, 250 aa, Homo sapiens
MGTKAQVERKLLCLFILAILLCSLALGSVTVHSSEPEVRIPENNPVKLSCAYSGFSSPRVEWKFDQGDTTRLVCYNNKITVPPSKPTVNIPSSATIGNRAVLTCSEQDGSPPSEYTWFKDGIVMPTNPKSTRAFSNSSYVLNPTTGELVFDPLSASDTGEYSCEARNGYGTPMTSNAVRMEAVERNVGVIVAAVLVTLILLGILVFGIWFAYSRGHFDRTKKGTSSKKVIYSQPSARSEGEFKQTSSFLV

SEQ ID NO: 22701 - protein, 451 aa, Homo sapiens; identical to SEQ ID NO: 195

SEQ ID NO: 22702 - protein, 450 aa, Homo sapiens; identical to SEQ ID NO: 196

SEQ ID NO: 22703 - protein, 977 aa, Homo sapiens
MTAREHSPRHGARARAMQRASTIDVAADMLGLSLAGNIQDPDEPILEFSLACSELHTPSLDRKPNSFVAVSVTTPPQAFWTKHAQTEIIEGTNNPIFLSSIAFFQDSLINQMTQVKLSVYDVKDRSQGTMYLLGSGTFIVKDLLQDRHHRLHLTLRSAESDRVGNITVIGWQMEEKSDQRPPVTRSVDTVNGRMVLPVDESLTEALGIRSKYASLRKDTLLKSVFGGAICRMYRFPTTDGNHLRILEQMAESVLSLHVPRQFVKLLLEEDAARVCELEELGELSPCWESLRRQIVTQYQTIILTYQENLTDLHQYRGPSFKASSLKADKKLEFVPTNLHIQRMRVQDDGGSDQNYDIVTIGAPAAHCQGFKSGGLRKKLHKFEETKKHFEECCTSSGCQSIIYIPQDVVRAKEIIAQINTLKTQVSYYAERLSRAAKDRSATGLERTLAILADKTRQLVTVCDCKLLANSIHGLNAARPDYIASKASPTSTEEEQVMLRNDQDTLMARWTGRNSRSSLQVDWHEEEWEKVWLNVDKSLECIIQRVDKLLQKERLHGEGCEDVFPCAGSCTSKKGNPDSHAYWIRPEDPFCDVPSSPCPSTMPSTACHPHLTTHCSPPPEESSPGEWSEALYPLLTTLTDCVAMMSDKAKKAMVFLLMQDSAPTIATYLSLQYRRDVVFCQTLTALICGFIIKLRNCLHDDGFLRQLYTIGLLAQFESLLSTYGEELAMLEDMSLGIMDLRNVTFKVTQATSSASADMLPVITGNRDGFNVRVPLPGPLFDALPREIQSGMLLRVQPVLFNVGINEQQTLAERFGDTSLQEVINVESLVRLNSYFEQFKEVLPEDCLPRSRSQTCLPELLRFLGQNVHARKNKNVDILWQAAEICRRLNGVRFTSCKSAKDRTAMSVTLEQCLILQHEHGMAPQVFTQALECMRSEGCRRENTMKNVGSRKYAFNSLQLKAFPKHYRPPEGTYGKVET

SEQ ID NO: 22704 - protein, 938 aa, Homo sapiens
MTAREHSPRHGARARAMQRASTIDVAADMLGLSLAGNIQDPDEPILEFSLACSELHTPSLDRKPNSFVAVSVTTPPQAFWTKHAQTEIIEGTNNPIFLSSIAFFQDSLINQMTQVKLSVYDVKDRSQGTMYLLGSGTFIVKDLLQDRHHRLHLTLRSAESDRVGNITVIGWQMEEKSDQRPPVTRSVDTVNGRMVLPVDESLTEALGIRSKYASLRKDTLLKSVFGGAICRMYRFPTTDGNHLRILEQMAESVLSLHVPRQFVKLLLEEDAARVCELEELGELSPCWESLRRQIVTQYQTIILTYQENLTDLHQYRGPSFKASSLKADKKLEFVPTNLHIQRMRVQDDGGSDQNYDIVTIGAPAAHCQGFKSGGLRKKLHKFEETKKHFEECCTSSGCQSIIYIPQDVVRAKEIIAQINTLKTQVSYYAERLSRAAKDRSATGLERTLAILADKTRQLVTVCDCKLLANSIHGLNAARPDYIASKASPTSTEEEQVMLRNDQDTLMARWTGRNSRSSLQVDWHEEEWEKVWLNVDKSLECIIQRVDKLLQKERLHGEGCEDVFPCAGSCTSKKDCSPPPEESSPGEWSEALYPLLTTLTDCVAMMSDKAKKAMVFLLMQDSAPTIATYLSLQYRRDVVFCQTLTALICGFIIKLRNCLHDDGFLRQLYTIGLLAQFESLLSTYGEELAMLEDMSLGIMDLRNVTFKVTQATSSASADMLPVITGNRDGFNVRVPLPGPLFDALPREIQSGMLLRVQPVLFNVGINEQQTLAERFGDTSLQEVINVESLVRLNSYFEQFKEVLPEDCLPRSRSQTCLPELLRFLGQNVHARKNKNVDILWQAAEICRRLNGVRFTSCKSAKDRTAMSVTLEQCLILQHEHGMAPQVFTQALECMRSEGCRRENTMKNVGSRKYAFNSLQLKAFPKHYRPPEGTYGKVET

SEQ ID NO: 22705 - protein, 972 aa, Homo sapiens
MTAREHSPRHGARARAMQRASTIDVAADMLGLSLAGNIQDPDEPILEFSLACSELHTPSLDRKPNSFVAVSVTTPPQAFWTKHAQTEIIEGTNNPIFLSSIAFFQDSLINQMTQVKLSVYDVKDRSQGTMYLLGSGTFIVKDLLQDRHHRLHLTLRSAESDRVGNITVIGWQMEEKSDQRPPVTRSVDTVNGRMVLPVDESLTEALGIRSKYASLRKDTLLKSVFGGAICRMYRFPTTDGNHLRILEQMAESVLSLHVPRQFVKLLLEEDAARVCELEELGELSPCWESLRRQIVTQYQTIILTYQENLTDLHQYRGPSFKASSLKADKKLEFVPTNLHIQRMRVQDDGGSDQNYDIVTIGAPAAHCQGFKSGGLRKKLHKFEETKKHTSSGCQSIIYIPQDVVRAKEIIAQINTLKTQVSYYAERLSRAAKDRSATGLERTLAILADKTRQLVTVCDCKLLANSIHGLNAARPDYIASKASPTSTEEEQVMLRNDQDTLMARWTGRNSRSSLQVDWHEEEWEKVWLNVDKSLECIIQRVDKLLQKERLHGEGCEDVFPCAGSCTSKKGNPDSHAYWIRPEDPFCDVPSSPCPSTMPSTACHPHLTTHCSPPPEESSPGEWSEALYPLLTTLTDCVAMMSDKAKKAMVFLLMQDSAPTIATYLSLQYRRDVVFCQTLTALICGFIIKLRNCLHDDGFLRQLYTIGLLAQFESLLSTYGEELAMLEDMSLGIMDLRNVTFKVTQATSSASADMLPVITGNRDGFNVRVPLPGPLFDALPREIQSGMLLRVQPVLFNVGINEQQTLAERFGDTSLQEVINVESLVRLNSYFEQFKEVLPEDCLPRSRSQTCLPELLRFLGQNVHARKNKNVDILWQAAEICRRLNGVRFTSCKSAKDRTAMSVTLEQCLILQHEHGMAPQVFTQALECMRSEGCRRENTMKNVGSRKYAFNSLQLKAFPKHYRPPEGTYGKVET

SEQ ID NO: 22706 - protein, 954 aa, Homo sapiens
MTAREHSPRHGARARAMQRASTIDVAADMLGLSLAGNIQDPDEPILEFSLACSELHTPSLDRKPNSFVAVSVTTPPQAFWTKHAQTEIIEGTNNPIFLSSIAFFQDSLINQMTQVKLSVYDVKDRSQGTMYLLGSGTFIVKDLLQDRHHRLHLTLRSAESDRVGNITVIGWQMEEKSDQRPPVTRSVDTVNGRMVLPVDESLTEALGIRSKYASLRKDTLLKSVFGGAICRMYRFPTTDGNHLRILEQMAESVLSLHVPRQFVKLLLEEDAARVCELEELGELSPCWESLRRQIVTQYQTIILTYQENLTDLHQYRGPSFKASSLKADKKLEFVPTNLHIQRMRVQDDGGSDQNYDIVTIGAPAAHCQGFKSGGLRKKLHKFEETKKHFEECCTSSGCQSIIYIPQDVVRAKEIIAQINTLKTQVSYYAERLSRAAKDRSATGLERTLAILADKTRQLVTVCDCKLLANSIHGLNAARPDYIASKASPTSTEEEQVMLRNDQDTLMARWTGRNSRSSLQVDWHEEEWEKVWLNVDKSLECIIQRVDKLLQKERLHGEGCEDVFPCAGSCTSKKDCSPPPEESSPGEWSEALYPLLTTLTDCVAMMSDKAKKAMVFLLMQDSAPTIATYLSLQYRRDVVFCQTLTALICGFIIKLRNCLHDDGFLRQLYTIGLLAQFESLLSTYGEELAMLEDMSLGIMDLRNVTFKVTQATSSASADMLPVITGNRDGFNVRVPLPGPLFDALPREIQSGMLLRVQPVLFNVGINEQQTLAERFGDTSLQEVINVESLVRLNSYFEQFKEVLPEDCLPRSRSQTCLPELLRFLGQNVHARKNKNVDILWQAAEICRRLNGVRFTSCKSAKDRTAMSVTLEQCLILQHEHGMAPQVFTQALECMRSIGTREVVTQKNLSGLVPIRDLRLDPSLLCSIPLLALSPNLLIVWLFLSIAYLVTKLRCK

SEQ ID NO: 22707 - protein, 467 aa, Homo sapiens
MALHPRRVRLKPWLVAQVDSGLYPGLIWLHRDSKRFQIPWKHATRHSPQQEEENTIFKAWAVETGKYQEGVDDPDPAKWKAQLRCALNKSREFNLMYDGTKEVPMNPVKIYQVCDIPQPQGSIINPGSTGSAPWDEKDNDVDEEDEEDELDQSQHHVPIQDTFPFLNINGSPMAPASVGNCSVGNCSPEAVWPKTEPLEMEVPQAPIQPFYSSPELWISSLPMTDLDIKFQYRGKEYGQTMTVSNPQGCRLFYGDLGPMPDQEELFGPVSLEQVKFPGPEHITNEKQKLFTSKLLDVMDRGLILEVSGHAIYAIRLCQCKVYWSGPCAPSLVAPNLIERQKKVKLFCLETFLSDLIAHQKGQIEKQPPFEIYLCFGEEWPDGKPLERKLILVQVIPVVARMIYEMFSGDFTRSFDSGSVRLQISTPDIKDNIVAQLKQLYRILQTQESWQPMQPTPSMQLPPALPPQ

SEQ ID NO: 22708 - protein, 372 aa, Homo sapiens
MYDGTKEVPMNPVKIYQVCDIPQPQGSIINPGSTGSAPWDEKDNDVDEEDEEDELDQSQHHVPIQDTFPFLNINGSPMAPASVGNCSVGNCSPEAVWPKTEPLEMEVPQAPIQPFYSSPELWISSLPMTDLDIKFQYRGKEYGQTMTVSNPQGCRLFYGDLGPMPDQEELFGPVSLEQVKFPGPEHITNEKQKLFTSKLLDVMDRGLILEVSGHAIYAIRLCQCKVYWSGPCAPSLVAPNLIERQKKVKLFCLETFLSDLIAHQKGQIEKQPPFEIYLCFGEEWPDGKPLERKLILVQVIPVVARMIYEMFSGDFTRSFDSGSVRLQISTPDIKDNIVAQLKQLYRILQTQESWQPMQPTPSMQLPPALPPQ

SEQ ID NO: 22709 - protein, 1167 aa, Homo sapiens
MELPFVTHLFLPLVFLTGLCSPFNLDEHHPRLFPGPPEAEFGYSVLQHVGGGQRWMLVGAPWDGPSGDRRGDVYRCPVGGAHNAPCAKGHLGDYQLGNSSHPAVNMHLGMSLLETDGDGGFMACAPLWSRACGSSVFSSGICARVDASFQPQGSLAPTAQRCPTYMDVVIVLDGSNSIYPWSEVQTFLRRLVGKLFIDPEQIQVGLVQYGESPVHEWSLGDFRTKEEVVRAAKNLSRREGRETKTAQAIMVACTEGFSQSHGGRPEAARLLVVVTDGESHDGEELPAALKACEAGRVTRYGIAVLGHYLRRQRDPSSFLREIRTIASDPDERFFFNVTDEAALTDIVDALGDRIFGLEGSHAENESSFGLEMSQIGFSTHRLKDGILFGMVGAYDWGGSVLWLEGGHRLFPPRMALEDEFPPALQNHAAYLGYSVSSMLLRGGRRLFLSGAPRFRHRGKVIAFQLKKDGAVRVAQSLQGEQIGSYFGSELCPLDTDRDGTTDVLLVAAPMFLGPQNKETGRVYVYLVGQQSLLTLQGTLQPEPPQDARFGFAMGALPDLNQDGFADVAVGAPLEDGHQGALYLYHGTQSGVRPHPAQRIAAASMPHALSYFGRSVDGRLDLDGDDLVDVAVGAQGAAILLSSRPIVHLTPSLEVTPQAISVVQRDCRRRGQEAVCLTAALCFQVTSRTPGRWDHQFYMRFTASLDEWTAGARAAFDGSGQRLSPRRLRLSVGNVTCEQLHFHVLDTSDYLRPVALTVTFALDNTTKPGPVLNEGSPTSIQKLVPFSKDCGPDNECVTDLVLQVNMDIRGSRKAPFVVRGGRRKVLVSTTLENRKENAYNTSLSLIFSRNLHLASLTPQRESPIKVECAAPSAHARLCSVGHPVFQTGAKVTFLLEFEFSCSSLLSQVFVKLTASSDSLERNGTLQDNTAQTSAYIQYEPHLLFSSESTLHRYEVHPYGTLPVGPGPEFKTTLRVQNLGCYVVSGLIISALLPAVAHGGNYFLSLSQVITNNASCIVQNLTEPPGPPVHPEELQHTNRLNGSNTQCQVVRCHLGQLAKGTEVSVGLLRLVHNEFFRRAKFKSLTVVSTFELGTEEGSVLQLTEASRWSESLLEVVQTRPILISLWILIGSVLGGLLLLALLVFCLWKLGFFAHKKIPEEEKREEKLEQ

SEQ ID NO: 22710 - protein, 124 aa, Homo sapiens
MELPFVTHLFLPLVFLTGLCSPFNLDEHHPRLFPGPPEAEFGYSVLQHVGGGQRWMLVGAPWDGPSGDRRGDVYRCPVGGAHNAPCAKGHLGDYQLGNSSHPAVNMHLGMSLLETDGDGGFMVS

SEQ ID NO: 22711 - protein, 1024 aa, Homo sapiens
MELPFVTHLFLPLVFLTGCPTYMDVVIVLDGSNSIYPWSEVQTFLRRLVGKLFIDPEQIQVGLVQYGESPVHEWSLGDFRTKEEVVRAAKNLSRREGRETKTAQAIMVACTEGFSQSHGGRPEAARLLVVVTDGESHDGEELPAALKACEAGRVTRYGIAVLGHYLRRQRDPSSFLREIRTIASDPDERFFFNVTDEAALTDIVDALGDRIFGLEGSHAENESSFGLEMSQIGFSTHRLKDGILFGMVGAYDWGGSVLWLEGGHRLFPPRMALEDEFPPALQNHAAYLGYSVSSMLLRGGRRLFLSGAPRFRHRGKVIAFQLKKDGAVRVAQSLQGEQIGSYFGSELCPLDTDRDGTTDVLLVAAPMFLGPQNKETGRVYVYLVGQQSLLTLQGTLQPEPPQDARFGFAMGALPDLNQDGFADVAVGAPLEDGHQGALYLYHGTQSGVRPHPAQRIAAASMPHALSYFGRSVDGRLDLDGDDLVDVAVGAQGAAILLSSRPIVHLTPSLEVTPQAISVVQRDCRRRGQEAVCLTAALCFQVTSRTPGRWDHQFYMRFTASLDEWTAGARAAFDGSGQRLSPRRLRLSVGNVTCEQLHFHVLDTSDYLRPVALTVTFALDNTTKPGPVLNEGSPTSIQKLVPFSKDCGPDNECVTDLVLQVNMDIRGSRKAPFVVRGGRRKVLVSTTLENRKENAYNTSLSLIFSRNLHLASLTPQRESPIKVECAAPSAHARLCSVGHPVFQTGAKVTFLLEFEFSCSSLLSQVFVKLTASSDSLERNGTLQDNTAQTSAYIQYEPHLLFSSESTLHRYEVHPYGTLPVGPGPEFKTTLRVQNLGCYVVSGLIISALLPAVAHGGNYFLSLSQVITNNASCIVQNLTEPPGPPVHPEELQHTNRLNGSNTQCQVVRCHLGQLAKGTEVSVGLLRLVHNEFFRRAKFKSLTVVSTFELGTEEGSVLQLTEASRWSESLLEVVQTRPILISLWILIGSVLGGLLLLALLVFCLWKLGFFAHKKIPEEEKREEKLEQ

SEQ ID NO: 22712 - protein, 2701 aa, Homo sapiens
MTEKMSSFLYIGDIVSLYAEGSVNGFISTLGLVDDRCVVHPEAGDLANPPKKFRDCLFKVCPMNRYSAQKQYWKAKQAKQGNHTEAALLKKLQHAAELEQKQNESENKKLLGEIVKYSNVIQLLHIKSNKYLTVNKRLPALLEKNAMRVSLDAAGNEGSWFYIHPFWKLRSEGDNIVVGDKVVLMPVNAGQPLHASNIELLDNPGCKEVNAVNCNTSWKITLFMKYSSYREDVLKGGDVVRLFHAEQEKFLTCDEYEKKQHIFLRTTLRQSATSATSSKALWEIEVVHHDPCRGGAGQWNSLFRFKHLATGNYLAAELNPDYRDAQNEGKNVRDGVPPTSKKKRQAGEKIMYTLVSVPHGNDIASLFELDATTLQRADCLVPRNSYVRLRHLCTNTWVTSTSIPIDTDEERPVMLKIGTCQTKEDKEAFAIVSVPLSEVRDLDFANDANKVLATTVKKLENGTITQNERRFVTKLLEDLIFFVADVPNNGQEVLDVVITKPNRERQKLMREQNILAQVFGILKAPFKEKAGEGSMLRLEDLGDQRYAPYKYMLRLCYRVLRHSQQDYRKNQEYIAKNFCVMQSQIGYDILAEDTITALLHNNRKLLEKHITAKEIETFVSLLRRNREPRFLDYLSDLCVSNTTAIPVTQELICKFMLSPGNADILIQTKVVSMQADNPMESSILSDDIDDEEVWLYWIDSNKEPHGKAIRHLAQEAKEGTKADLEVLTYYRYQLNLFARMCLDRQYLAINQISTQLSVDLILRCVSDESLPFDLRASFCRLMLHMHVDRDPQESVVPVRYARLWTEIPTKITIHEYDSITDSSRNDMKRKFALTMEFVEEYLKEVVNQPFPFGDKEKNKLTFEVVHLARNLIYFGFYSFSELLRLTRTLLAILDIVQAPMSSYFERLSKFQDGGNNVMRTIHGVGEMMTQMVLSRGSIFPMSVPDVPPSIHPSKQGSPTEHEDVTVMDTKLKIIEILQFILSVRLDYRISYMLSIYKKEFGEDNDNAETSASGSPDTLLPSAIVPDIDEIAAQAETMFAGRKEKNPVQLDDEGGRTFLRVLIHLIMHDYPPLLSGALQLLFKHFSQRAEVLQAFKQVQLLVSNQDVDNYKQIKADLDQLRLTVEKSELWVEKSSNYENGEIGESQVKGGEEPIEESNILSPVQDGTKKPQIDSNKSNNYRIVKEILIRLSKLCVQNKKCRNQHQRLLKNMGAHSVVLDLLQIPYEKNDEKMNEVMNLAHTFLQNFCRGNPQNQVLLHKHLNLFLTPGLLEAETMRHIFMNNYHLCNEISERVVQHFVHCIETHGRHVEYLRFLQTIVKADGKYVKKCQDMVMTELINGGEDVLIFYNDRASFPILLHMMCSERDRGDESGPLAYHITLVELLAACTEGKNVYTEIKCNSLLPLDDIVRVVTHDDCIPEVKIAYVNFVNHCYVDTEVEMKEIYTSNHIWKLFENFLVDMARVCNTTTDRKHADIFLEKCVTESIMNIVSGFFNSPFSDNSTSLQTHQPVFIQLLQSAFRIYNCTWPNPAQKASVESCIRTLAEVAKNRGIAIPVDLDSQVNTLFMKSHSNMVQRAAMGWRLSARSGPRFKEALGGPAWDYRNIIEKLQDVVASLEHQFSPMMQAEFSVLVDVLYSPELLFPEGSDARIRCGAFMSKLINHTKKLMEKEEKLCIKILQTLREMLEKKDSFVEEGNTLRKILLNRYFKGDYSIGVNGHLSGAYSKTAQVGGSFSGQDSDKMGISMSDIQCLLDKEGASELVIDVIVNTKNDRIFSEGIFLGIALLEGGNTQTQYSFYQQLHEQKKSEKFFKVLYDRMKAAQKEIRSTVTVNTIDLGNKKRDDDNELMTSGPRMRVRDSTLHLKEGMKGQLTEASSATSKAYCVYRREMDPEIDIMCTGPEAGNTEEKSAEEVTMSPAIAIMQPILRFLQLLCENHNRELQNFLRNQNNKTNYNLVCETLQFLDCICGSTTGGLGLLGLYINEKNVALVNQNLESLTEYCQGPCHENQTCIATHESNGIDIIIALILNDINPLGKYRMDLVLQLKNNASKLLLAIMESRHDSENAERILFNMRPRELVDVMKNAYNQGLECDHGDDEGGDDGVSPKDVGHNIYILAHQLARHNKLLQQMLKPGSDPDEGDEALKYYANHTAQIEIVRHDRTMEQIVFPVPNICEYLTRESKCRVFNTTERDEQGSKVNDFFQQTEDLYNEMKWQKKIRNNPALFWFSRHISLWGSISFNLAVFINLAVALFYPFGDDGDEGTLSPLFSVLLWIAVAICTSMLFFFSKPVGIRPFLVSIMLRSIYTIGLGPTLILLGAANLCNKIVFLVSFVGNRGTFTRGYRAVILDMAFLYHVAYVLVCMLGLFVHEFFYSFLLFDLVYREETLLNVIKSVTRNGRSIILTAVLALILVYLFSIIGFLFLKDDFTMEVDRLKNRTPVTGSHQVPTMTLTTMMEACAKENCSPTIPASNTADEEYEDGIERTCDTLLMCIVTVLNQGLRNGGGVGDVLRRPSKDEPLFAARVVYDLLFYFIVIIIVLNLIFGVIIDTFADLRSEKQKKEEILKTTCFICGLERDKFDNKTVSFEEHIKSEHNMWHYLYFIVLVKVKDPTEYTGPESYVAQMIVEKNLDWFPRMRAMSLVSNEGDSEQNEIRSLQEKLESTMSLVKQLSGQLAELKEQMTEQRKNKQRLGFLGSNTPHVNHHMPPH

SEQ ID NO: 22713 - protein, 181 aa, Homo sapiens
MTEKMSSFLYIGDIVSLYAEGSVNGFISTLGLVDDRCVVHPEAGDLANPPKKFRDCLFKVCPMNRYSAQKQYWKAKQAKQGNHTEAALLKKLQHAAELEQKQNESENKKLLGEIVKYSNVIQLLHIKSNKYLTVNKRLPALLEKNAMRVSLDAAGNEGSWFYIHPFWKLRSEGDNDASFWI

SEQ ID NO: 22714 - protein, 243 aa, Homo sapiens
MTGIAAASFFSNTCRFGGCGLHFPTLADLIEHIEDNHIDTDPRVLEKQELQQPTYVALSYINRFMTDAARREQESLKKKIQPKLSLTLSSSVSRGNVSTPPRHSSGSLTPPVTPPITPSSSFRSSTPTGSEYDEEEVDYEESDSDESWTTESAISSEAILSSMCMNGGEEKPFACPVPGCKKRYKNVNGIKYHAKNGHRTQIRVRKPFKCRCGKSYKTAQGLRHHTINFHPPVSAEIIRKMQQ

SEQ ID NO: 22715 - protein, 229 aa, Homo sapiens
YFVLGSLIYSDAKSKKNRNCVFITDTDPRVLEKQELQQPTYVALSYINRFMTDAARREQESLKKKIQPKLSLTLSSSVSRGNVSTPPRHSSGSLTPPVTPPITPSSSFRSSTPTGSEYDEEEVDYEESDSDESWTTESAISSEAILSSMCMNGGEEKPFACPVPGCKKRYKNVNGIKYHAKNGHRTQIRVRKPFKCRCGKSYKTAQGLRHHTINFHPPVSAEIIRKMQQ

SEQ ID NO: 22716 - protein, 181 aa, Homo sapiens
MEAMNVEKASADGNLPEVISNIKETLKIVSRTPVNITMAGDSGNGMSTFISALRNTGHEGKASPPTELVKATQRCASYFSSHFSNVVLWDLPGTGSATTTLENYLMEMQFNRYDFIMVASAQFSMNHVMLAKTAEDMGKKFYIVWTKLDMDLSTGALPEVQLLQIRENVLENLQKERVCEY

SEQ ID NO: 22717 - protein, 342 aa, Homo sapiens
MSKGTSSDTSLGRVSRAAFPSPTAAEMAEISRIQYEMEYTEGISQRMRVPEKLKVAPPNADLEQGFQEGVPNASVIMQVPERIVVAGNNEDVSFSRPADLDLIQSTPFKPLALKTPPRVLTLSERPLDFLDLERPPTTPQNEEIRAVGRLKRERSMSENAVRQNGQLVRNDSLWHRSDSAPRNKISRFQAPISAPEYTVTPSPQQARVCPPHMLPEDGANLSSARGILSLIQSSTRRAYQQILDVLDENRRPVLRGGSAAATSNPHHDNVRYGISNIDTTIEGTSDDLTVVDAASLRRQIIKLNRRLQLLEEENKERAKREMVMYSITVAFWLLNSWLWFRR

SEQ ID NO: 22718 - protein, 291 aa, Homo sapiens
MAEISRIQYEMEYTEGISQRMRVPEKLKVAPPNADLEQGFQEGVPNASVIMQVPERIVVAGNNEDVSFSRPADLDLIQSTPFKPLALKTPPRVLTLSERPLDFLDLERPPTTPQNEEIRAVGRLKRERSMSENAVRQNGQLVRNDSLVTPSPQQARVCPPHMLPEDGANLSSARGILSLIQSSTRRAYQQILDVLDENRRPVLRGGSAAATSNPHHDNVRYGISNIDTTIEGTSDDLTVVDAASLRRQIIKLNRRLQLLEEENKERAKREMVMYSITVAFWLLNSWLWFRR

SEQ ID NO: 22719 - protein, 243 aa, Homo sapiens
MAEISRIQYEMEYTEGISQRMRVPEKLKVAPPNADLEQGFQEGVPNASVIMQVPERIVVAGNNEDVSFSRPADLDLIQSTPFKPLALKTPPRVLTLSERPLDFLDLERPPTTPQNEEIRAVGRLKRERSMSENAVRQNGQLVRNDSLWHRSDSAPRNKISRFQAPISAPEYTYGISNIDTTIEGTSDDLTVVDAASLRRQIIKLNRRLQLLEEENKERAKREMVMYSITVAFWLLNSWLWFRR

SEQ ID NO: 22720 - protein, 218 aa, Homo sapiens
MAEISRIQYEMEYTEGISQRMRVPEKLKVAPPNADLEQGFQEGVPNASVIMQVPERIVVAGNNEDVSFSRPADLDLIQSTPFKPLALKTPPRVLTLSERPLDFLDLERPPTTPQNEEIRAVGRLKRERSMSENAVRQNGQLVRNDSLYGISNIDTTIEGTSDDLTVVDAASLRRQIIKLNRRLQLLEEENKERAKREMVMYSITVAFWLLNSWLWFRR

SEQ ID NO: 22721 - protein, 238 aa, Homo sapiens
MAEISRIQYEMEYTEGISQRMRVPEKLKVAPPNADLEQGFQEGVPNASVIMQVPERIVVAGNNEDVSFSRPADLDLIQSTPFKPLALKTPPRVLTLSERPLDFLDLERPPTTPQNEEIRAVGRLKRERSMSENAVRQNGQLVRNDSLPVLRGGSAAATSNPHHDNVRYGISNIDTTIEGTSDDLTVVDAASLRRQIIKLNRRLQLLEEENKERAKREMVMYSITVAFWLLNSWLWFRR

SEQ ID NO: 22722 - protein, 1181 aa, Homo sapiens
MAGARSRDPWGASGICYLFGSLLVELLFSRAVAFNLDVMGALRKEGEPGSLFGFSVALHRQLQPRPQSWLLVGAPQALALPGQQANRTGGLFACPLSLEETDCYRVDIDQGADMQKESKENQWLGVSVRSQGPGGKIVTCAHRYEARQRVDQILETRDMIGRCFVLSQDLAIRDELDGGEWKFCEGRPQGHEQFGFCQQGTAAAFSPDSHYLLFGAPGTYNWKGTARVELCAQGSADLAHLDDGPYEAGGEKEQDPRLIPVPANSYFGLLFVTNIDSSDPDQLVYKTLDPADRLPGPAGDLALNSYLGFSIDSGKGLVRAEELSFVAGAPRANHKGAVVILRKDSASRLVPEVMLSGERLTSGFGYSLAVADLNSDGWPDLIVGAPYFFERQEELGGAVYVYLNQGGHWAGISPLRLCGSPDSMFGISLAVLGDLNQDGFPDIAVGAPFDGDGKVFIYHGSSLGVVAKPSQVLEGEAVGIKSFGYSLSGSLDMDGNQYPDLLVGSLADTAVLFRARPILHVSHEVSIAPRSIDLEQPNCAGGHSVCVDLRVCFSYIAVPSSYSPTVALDYVLDADTDRRLRGQVPRVTFLSRNLEEPKHQASGTVWLKHQHDRVCGDAMFQLQENVKDKLRAIVVTLSYSLQTPRLRRQAPGQGLPPVAPILNAHQPSTQRAEIHFLKQGCGEDKICQSNLQLVRARFCTRVSDTEFQPLPMDVDGTTALFALSGQPVIGLELMVTNLPSDPAQPQADGDDAHEAQLLVMLPDSLHYSGVRALDPAEKPLCLSNENASHVECELGNPMKRGAQVTFYLILSTSGISIETTELEVELLLATISEQELHPVSARARVFIELPLSIAGMAIPQQLFFSGVVRGERAMQSERDVGSKVKYEVTVSNQGQSLRTLGSAFLNIMWPHEIANGKWLLYPMQVELEGGQGPGQKGLCSPRPNILHLDVDSRDRRRRELEPPEQQEPGERQEPSMSWWPVSSAEKKKNITLDCARGTANCVVFSCPLYSFDRAAVLHVWGRLWNSTFLEEYSAVKSLEVIVRANITVKSSIKNLMLRDASTVIPVMVYLDPMAVVAEGVPWWVILLAVLAGLLVLALLVLLLWKMGFFKRAKHPEATVPQYHAVKIPREDRQQFKEEKTGTILRNNWGSPRREGPDAHPILAADGHPELGPDGHPGPGTA

SEQ ID NO: 22723 - protein, 1141 aa, Homo sapiens
MAGARSRDPWGASGICYLFGSLLVELLFSRAVAFNLDVMGALRKEGEPGSLFGFSVALHRQLQPRPQSWLLVGAPQALALPGQQANRTGGLFACPLSLEETDCYRVDIDQGADMQKESKENQWLGVSVRSQGPGGKIVTCAHRYEARQRVDQILETRDMIGRCFVLSQDLAIRDELDGGEWKFCEGRPQGHEQFGFCQQGTAAAFSPDSHYLLFGAPGTYNWKGTARVELCAQGSADLAHLDDGPYEAGGEKEQDPRLIPVPANSYFGFSIDSGKGLVRAEELSFVAGAPRANHKGAVVILRKDSASRLVPEVMLSGERLTSGFGYSLAVADLNSDGWPDLIVGAPYFFERQEELGGAVYVYLNQGGHWAGISPLRLCGSPDSMFGISLAVLGDLNQDGFPDIAVGAPFDGDGKVFIYHGSSLGVVAKPSQVLEGEAVGIKSFGYSLSGSLDMDGNQYPDLLVGSLADTAVLFRARPILHVSHEVSIAPRSIDLEQPNCAGGHSVCVDLRVCFSYIAVPSSYSPTVALDYVLDADTDRRLRGQVPRVTFLSRNLEEPKHQASGTVWLKHQHDRVCGDAMFQLQENVKDKLRAIVVTLSYSLQTPRLRRQAPGQGLPPVAPILNAHQPSTQRAEIHFLKQGCGEDKICQSNLQLVRARFCTRVSDTEFQPLPMDVDGTTALFALSGQPVIGLELMVTNLPSDPAQPQADGDDAHEAQLLVMLPDSLHYSGVRALDPAEKPLCLSNENASHVECELGNPMKRGAQVTFYLILSTSGISIETTELEVELLLATISEQELHPVSARARVFIELPLSIAGMAIPQQLFFSGVVRGERAMQSERDVGSKVKYEVTVSNQGQSLRTLGSAFLNIMWPHEIANGKWLLYPMQVELEGGQGPGQKGLCSPRPNILHLDVDSRDRRRRELEPPEQQEPGERQEPSMSWWPVSSAEKKKNITLDCARGTANCVVFSCPLYSFDRAAVLHVWGRLWNSTFLEEYSAVKSLEVIVRANITVKSSIKNLMLRDASTVIPVMVYLDPMAVVAEGVPWWVILLAVLAGLLVLALLVLLLWKMGFFKRAKHPEATVPQYHAVKIPREDRQQFKEEKTGTILRNNWGSPRREGPDAHPILAADGHPELGPDGHPGPGTA

SEQ ID NO: 22724 - protein, 1137 aa, Homo sapiens
MAGARSRDPWGASGICYLFGSLLVELLFSRAVAFNLDVMGALRKEGEPGSLFGFSVALHRQLQPRPQSWLLVGAPQALALPGQQANRTGGLFACPLSLEETDCYRVDIDQGADMQKESKENQWLGVSVRSQGPGGKIVTCAHRYEARQRVDQILETRDMIGRCFVLSQDLAIRDELDGGEWKFCEGRPQGHEQFGFCQQGTAAAFSPDSHYLLFGAPGTYNWKGLLFVTNIDSSDPDQLVYKTLDPADRLPGPAGDLALNSYLGFSIDSGKGLVRAEELSFVAGAPRANHKGAVVILRKDSASRLVPEVMLSGERLTSGFGYSLAVADLNSDGWPDLIVGAPYFFERQEELGGAVYVYLNQGGHWAGISPLRLCGSPDSMFGISLAVLGDLNQDGFPDIAVGAPFDGDGKVFIYHGSSLGVVAKPSQVLEGEAVGIKSFGYSLSGSLDMDGNQYPDLLVGSLADTAVLFRARPILHVSHEVSIAPRSIDLEQPNCAGGHSVCVDLRVCFSYIAVPSSYSPTVALDYVLDADTDRRLRGQVPRVTFLSRNLEEPKHQASGTVWLKHQHDRVCGDAMFQLQENVKDKLRAIVVTLSYSLQTPRLRRQAPGQGLPPVAPILNAHQPSTQRAEIHFLKQGCGEDKICQSNLQLVRARFCTRVSDTEFQPLPMDVDGTTALFALSGQPVIGLELMVTNLPSDPAQPQADGDDAHEAQLLVMLPDSLHYSGVRALDPAEKPLCLSNENASHVECELGNPMKRGAQVTFYLILSTSGISIETTELEVELLLATISEQELHPVSARARVFIELPLSIAGMAIPQQLFFSGVVRGERAMQSERDVGSKVKYEVTVSNQGQSLRTLGSAFLNIMWPHEIANGKWLLYPMQVELEGGQGPGQKGLCSPRPNILHLDVDSRDRRRRELEPPEQQEPGERQEPSMSWWPVSSAEKKKNITLDCARGTANCVVFSCPLYSFDRAAVLHVWGRLWNSTFLEEYSAVKSLEVIVRANITVKSSIKNLMLRDASTVIPVMVYLDPMAVVAEGVPWWVILLAVLAGLLVLALLVLLLWKMGFFKRAKHPEATVPQYHAVKIPREDRQQFKEEKTGTILRNNWGSPRREGPDAHPILAADGHPELGPDGHPGPGTA

SEQ ID NO: 22725 - protein, 1106 aa, Homo sapiens
MAGARSRDPWGASGICYLFGSLLVELLFSRAVAFNLDVMGALRKEGEPGSLFGFSVALHRQLQPRPQSWLLVGAPQALALPGQQANRTGGLFACPLSLEETDCYRVDIDQGADMQKESKENQWLGVSVRSQGPGGKIVTCAHRYEARQRVDQILETRDMIGRCFVLSQDLAIRDELDGGEWKFCEGRPQGHEQFGFCQQGTAAAFSPDSHYLLFGAPGTYNWKGTARVELCAQGSADLAHLDDGPYEAGGEKEQDPRLIPVPANSYFGLLFVTNIDSSDPDQLVYKTLDPADRLPGPAGDLALNSYLGFSIDSGKGLVRAEELSFVAGAPRANHKGAVVILRKDSASRLVPEVMLSGERLTSGFGYSLAVADLNSDGWPDLIVGAPYFFERQEELGGAVYVYLNQGGHWAGISPLRLCGSPDSMFGISLAVLGDLNQDGFPDIAVGAPFDGDGKVFIYHGSSLGVVAKPSQVLEGEAVGIKSFGYSLSGSLDMDGNQYPDLLVGSLADTAVLFRARPILHVSHEVSIAPRSIDLEQPNCAGGHSVCVDLRVCFSYIAVPSSYSPTVALDYVLDADTDRRLRGQVPRVTFLSRNLEEPKHQASGTVWLKHQHDRVCGDAMFQLQENVKDKLRAIVVTLSYSLQTPRLRRQAPGQGLPPVAPILNAHQPSTQRAEIHFLKQGCGEDKICQSNLQLVRARFCTREKPLCLSNENASHVECELGNPMKRGAQVTFYLILSTSGISIETTELEVELLLATISEQELHPVSARARVFIELPLSIAGMAIPQQLFFSGVVRGERAMQSERDVGSKVKYEVTVSNQGQSLRTLGSAFLNIMWPHEIANGKWLLYPMQVELEGGQGPGQKGLCSPRPNILHLDVDSRDRRRRELEPPEQQEPGERQEPSMSWWPVSSAEKKKNITLDCARGTANCVVFSCPLYSFDRAAVLHVWGRLWNSTFLEEYSAVKSLEVIVRANITVKSSIKNLMLRDASTVIPVMVYLDPMAVVAEGVPWWVILLAVLAGLLVLALLVLLLWKMGFFKRAKHPEATVPQYHAVKIPREDRQQFKEEKTGTILRNNWGSPRREGPDAHPILAADGHPELGPDGHPGPGTA

SEQ ID NO: 22726 - protein, 1162 aa, Homo sapiens
MAGARSRDPWGASGICYLFGSLLVELLFSRAVAFNLDVMGALRKEGEPGSLFGFSVALHRQLQPRPQSWLLVGAPQALALPGQQANRTGGLFACPLSLEETDCYRVDIDQGADMQKESKENQWLGVSVRSQGPGGKIVTCAHRYEARQRVDQILETRDMIGRCFVLSQDLAIRDELDGGEWKFCEGRPQGHEQFGFCQQGTAAAFSPDSHYLLFGAPGTYNWKGTARVELCAQGSADLAHLDDGPYEAGGEKEQDPRLIPVPANSYFGLLFVTNIDSSDPDQLVYKTLDPADRLPGPAGDLALNSYLGFSIDSGKGLVRAEELSFVAGAPRANHKGAVVILRKDSASRLVPEVMLSGERLTSGFGYSLAVADLNSDGWPDLIVGAPYFFERQEELGGAVYVYLNQGGHWAGISPLRLCGSPDSMFGISLAVLGDLNQDGFPDIAVGAPFDGDGKVFIYHGSSLGVVAKPSQVLEGEAVGIKSFGYSLSGSLDMDGNQYPDLLVGSLADTAVLFRARPILHVSHEVSIAPRSIDLEQPNCAGGHSVCVDLRVCFSYIAVPSSYSPTVALDYVLDADTDRRLRGQVPRVTFLSRNLEEPKHQASGTVWLKHQHDRVCGDAMFQLQENVKDKLRAIVVTLSYSLQTPRLRRQAPGQGLPPVAPILNAHQPSTQRAEIHFLKQGCGEDKICQSNLQLVRARFCTRVSDTEFQPLPMDVDGTTALFALSGQPVIGLELMVTNLPSDPAQPQADGDDAHEAQLLVMLPDSLHYSGVRALDPAEKPLCLSNENASHVECELGNPMKRGAQVTFYLILSTSGISIETTELEVELLLATISEQELHPVSARARVFIELPLSIAGMAIPQQLFFSGVVRGERAMQSERDVGSKVKYEVTVSNQGQSLRTLGSAFLNIMWPHEIANGKWLLYPMQVELEGGQGPGQKGLCSPRPNILHLDVDSRDRRRRELEPPEQQEPGERQEPSMSWWPVSSAEKKKNITLDCARGTANCVVFSCPLYSFDRAAVLHVWGRLWNSTFLEEYSAVKSLEVIVRANITVKSSIKNLMLRDASTVIPVMVYLDPMAVVAEGVPWWVILLAVLAGLLVLALLVLLLWKCGFFHRSSQSSSFPTNYHRACLAVQPSAMEVGGPGTVGWDSSNGRSTPRPPCPSTMR

SEQ ID NO: 22727 - protein, 1044 aa, Homo sapiens
MAPFATPMVQALTTTRIQRQAEGFQCWRECGTRRSPFEGKETCAHRYEARQRVDQILETRDMIGRCFVLSQDLAIRDELDGGEWKFCEGRPQGHEQFGFCQQGTAAAFSPDSHYLLFGAPGTYNWKGTARVELCAQGSADLAHLDDGPYEAGGEKEQDPRLIPVPANSYFGFSIDSGKGLVRAEELSFVAGAPRANHKGAVVILRKDSASRLVPEVMLSGERLTSGFGYSLAVADLNSDGWPDLIVGAPYFFERQEELGGAVYVYLNQGGHWAGISPLRLCGSPDSMFGISLAVLGDLNQDGFPDIAVGAPFDGDGKVFIYHGSSLGVVAKPSQVLEGEAVGIKSFGYSLSGSLDMDGNQYPDLLVGSLADTAVLFRARPILHVSHEVSIAPRSIDLEQPNCAGGHSVCVDLRVCFSYIAVPSSYSPTVALDYVLDADTDRRLRGQVPRVTFLSRNLEEPKHQASGTVWLKHQHDRVCGDAMFQLQENVKDKLRAIVVTLSYSLQTPRLRRQAPGQGLPPVAPILNAHQPSTQRAEIHFLKQGCGEDKICQSNLQLVRARFCTRVSDTEFQPLPMDVDGTTALFALSGQPVIGLELMVTNLPSDPAQPQADGDDAHEAQLLVMLPDSLHYSGVRALDPAEKPLCLSNENASHVECELGNPMKRGAQVTFYLILSTSGISIETTELEVELLLATISEQELHPVSARARVFIELPLSIAGMAIPQQLFFSGVVRGERAMQSERDVGSKVKYEVTVSNQGQSLRTLGSAFLNIMWPHEIANGKWLLYPMQVELEGGQGPGQKGLCSPRPNILHLDVDSRDRRRRELEPPEQQEPGERQEPSMSWWPVSSAEKKKNITLDCARGTANCVVFSCPLYSFDRAAVLHVWGRLWNSTFLEEYSAVKSLEVIVRANITVKSSIKNLMLRDASTVIPVMVYLDPMAVVAEGVPWWVILLAVLAGLLVLALLVLLLWKMGFFKRAKHPEATVPQYHAVKIPREDRQQFKEEKTGTILRNNWGSPRREGPDAHPILAADGHPELGPDGHPGPGTA

SEQ ID NO: 22728 - protein, 696 aa, Homo sapiens
MKAPIPHLILLYATFTQSLKVVTKRGSADGCTDWSIDIKKYQVLVGEPVRIKCALFYGYIRTNYSLAQSAGLSLMWYKSSGPGDFEEPIAFDGSRMSKEEDSIWFRPTLLQDSGLYACVIRNSTYCMKVSISLTVGENDTGLCYNSKMKYFEKAELSKSKEISCRDIEDFLLPTREPEILWYKECRTKTWRPSIVFKRDTLLIREVREDDIGNYTCELKYGGFVVRRTTELTVTAPLTDKPPKLLYPMESKLTIQETQLGDSANLTCRAFFGYSGDVSPLIYWMKGEKFIEDLDENRVWESDIRILKEHLGEQEVSISLIVDSVEEGDLGNYSCYVENGNGRRHASVLLHKRELMYTVELAGGLGAILLLLVCLVTIYKCYKIEIMLFYRNHFGAEELDGDNKDYDAYLSYTKVDPDQWNQETGEEERFALEILPDMLEKHYGYKLFIPDRDLIPTGTYIEDVARCVDQSKRLIIVMTPNYVVRRGWSIFELETRLRNMLVTGEIKVILIECSELRGIMNYQEVEALKHTIKLLTVIKWHGPKCNKLNSKFWKRLQYEMPFKRIEPITHEQALDVSEQGPFGELQTVSAISMAAATSTALATAHPDLRSTFHNTYHSQMRQKHYYRSYEYDVPPTGTLPLTSIGNQHTYCNIPMTLINGQRPQTKSSREQNPDEAHTNSAILPLLPRETSISSVIW

SEQ ID NO: 22729 - protein, 1032 aa, Homo sapiens [sequence omitted]

SEQ ID NO: 22730 - protein, 195 aa, Homo sapiens
MAWEARREPGPRRAAVRETVMLLLCLGVPTGRPYNVDTESALLYQGPHNTLFGYSVVLHSHGANRWLLVGAPTANWLANASVINPGAIYRCRIGKNPGQTCEQLQLGSPNGEPCGKTCLEERDNQWLGVTLSRQPGENGSIVTCGHRWKNIFYIKNENKLPTGGCYGVPPDLRTELSKRIAPCYQGSISKYRART

SEQ ID NO: 22731 - protein, 1249 aa, Homo sapiens
MSVKEGAQRKWAALKEKLGPQDSDPTEANLESADPELCIRLLQMPSVVNYSGLRKRLEGSDGGWMVQFLEQSGLDLLLEALARLSGRGVARISDALLQLTCVSCVRAVMNSRQGIEYILSNQGYVRQLSQALDTSNVMVKKQVFELLAALCIYSPEGHVLTLDALDHYKTVCSQQYRFSIVMNELSGSDNVPYVVTLLSVINAVILGPEDLRARTQLRNEFIGLQLLDVLARLRDLEDADLLIQLEAFEEAKAEDEEELLRVSGGVDMSSHQEVFASLFHKVSCSPVSAQLLSVLQGLLHLEPTLRSSQLLWEALESLVNRAVLLASDAQECTLEEVVERLLSVKGRPRPSPLVKAHKSVQANLDQSQRGSSPQNTTTPKPSVEGQQPAAAAACEPVDHAQSESILKVSQPRALEQQASTPPPPPPPPLLPGSSAEPPPPPPPPPLPSVGAKALPTAPPPPPLPGLGAMAPPAPPLPPPLPGSCEFLPPPPPPLPGLGCPPPPPPLLPGMGWGPPPPPPPLLPCTCSPPVAGGMEEVIVAQVDHGLGSAWVPSHRRVNPPTLRMKKLNWQKLPSNVAREHNSMWASLSSPDAEAVEPDFSSIERLFSFPAAKPKEPTMVAPRARKEPKEITFLDAKKSLNLNIFLKQFKCSNEEVAAMIRAGDTTKFDVEVLKQLLKLLPEKHEIENLRAFTEERAKLASADHFYLLLLAIPCYQLRIECMLLCEGAAAVLDMVRPKAQLVLAACESLLTSRQLPIFCQLILRIGNFLNYGSHTGDADGFKISTLLKLTETKSQQNRVTLLHHVLEEAEKSHPDLLQLPRDLEQPSQAAGINLEIIRSEASSNLKKLLETERKVSASVAEVQEQYTERLQASISAFRALDELFEAIEQKQRELADYLCEDAQQLSLEDTFSTMKAFRDLFLRALKENKDRKEQAAKAERRKQQLAEEEARRPRGEDGKPVRKGPGKQEEVCVIDALLADIRKGFQLRKTARGRGDTDGGSKAASMDPPRATEPVATSNPAGDPVGSTRCPASEPGLDATTASESRGWDLVDAVTPGPQPTLEQLEEGGPRPLERRSSWYVDASDVLTTEDPQCPQPLEGAWPVTLGDAQALKPLKFSSNQPPAAGSSRQDAKDPTSLLGVLQAEADSTSEGLEDAVHSRGARPPAAGPGGDEDEDEEDTAPESALDTSLDKSFSEDAVTDSSGSGTLPRARGRASKGTGKRRKKRPSRSQEEVPPDSDDNKTKKLCVIQ

SEQ ID NO: 22732 - protein, 1240 aa, Homo sapiens
MSVKEGAQRKWAALKEKLGPQDSDPTEANLESADPELCIRLLQMPSVVNYSGLRKRLEGSDGGWMVQFLEQSGLDLLLEALARLSGRGVARISDALLQLTCVSCVRAVMNSRQGIEYILSNQGYVRQLSQALDTSNVMVKKQVFELLAALCIYSPEGHVLTLDALDHYKTVCSQQYRFSIVMNELSGSDNVPYVVTLLSVINAVILGPEDLRARTQLRNEFIGLQLLDVLARLRDLEDADLLIQLEAFEEAKAEDEEELLRVSGGVDMSSHQEVFASLFHKVSCSPVSAQLLSVLQGLLHLEPTLRSSQLLWEALESLVNRAVLLASDAQECTLEEVVERLLSVKGRPRPSPLVKAHKSVQANLDQSQRGSSPQNTTTPKPSVEGQQPAAAAACEPVDHAQSESILKVSQPRALEQQASTPPPPPPPPLLPGSSAEPPPPPPPPPLPSVGAKALPTAPPPPPLPGLGAMAPPAPPLPPPLPGSCEFLPPPPPPLPGLGCPPPPPPLLPGMGWGPPPPPPPLLPCTCSPPVAGGMEEVIVAQVDHGLGSAWVPSHRRVNPPTLRMKKLNWQKLPSNVAREHNSMWASLSSPDAEAVEPDFSSIERLFSFPAAKPKEPTMVAPRARKEPKEITFLDAKKSLNLNIFLKQFKCSNEEVAAMIRAGDTTKFDVEVLKQLLKLLPEKHEIENLRAFTEERAKLASADHFYLLLLAIPCYQLRIECMLLCEGAAAVLDMVRPKAQLVLAACESLLTSRQLPIFCQLILRIGNFLNYGSHTGDADGFKISTLLKLTETKSQQNRVTLLHHVLEEAEKSHPDLLQLPRDLEQPSQAAGINLEIIRSEASSNLKKLLETERKVSASVAEVQEQYTERLQASISAFRALDELFEAIEQKQRELADYLCEDAQQLSLEDTFSTMKAFRDLFLRALKENKDRKEQAAKAERRKQQLAEEEARRPRGEDGKPVRKGPGKQEEVCVIDALLADIRKGFQLRKTARGRGDTDGGSKAASMDPPRATEPVATSNPAGDPVGSTRCPASEPGLDATTASESRGWDLVDAVTPGPQPTLEQLEEGGPRPLERRSSWYVDASDVLTTEDPQCPQPLEGAWPVTLGDAQALKPLKFSSNQPPAAGSSRQDAKDPTSLLGVLQAEADSTSEGLEDAVHSRGARPPAAGPGGDEDEDEEDTAPESALDTSLDKSFSEDAVTDSSGSGTLPRARGRASKGTGKRRKKRPSRSQEGLRPRPKAK

SEQ ID NO: 22733 - protein, 234 aa, Homo sapiens
MSVKEGAQRKWAALKEKLGPQDSDPTEANLESADPELCIRLLQMPSVVNYSGLRKRLEGSDGGWMVQFLEQSGLDLLLEALARLSGRGVARISDALLQLTCVSCVRAVMNSRQGIEYILSNQGYVRQLSQALDTSNVMVKKQVFELLAALCIYSPEGHVLTLDALDHYKTVCSQQYRFSIVMNELSGSDNVPYVVTLLSVINAVILGPEDLRARTQLRNEFIGLQLLDVLARLR

SEQ ID NO: 22734 - protein, 446 aa, Homo sapiens
MSFPHFGHPYRGASQFLASASSSTTCCESTQRSVSDVASGSTPAPALCCAPYDSRLLGSARPELGAALGIYGAPYAAAAAAQSYPGYLPYSPEPPSLYGALNPQYEFKEAAGSFTSSLAQPGAYYPYERTLGQYQYERYGAVELSGAGRRKNATRETTSTLKAWLNEHRKNPYPTKGEKIMLAIITKMTLTQVSTWFANARRRLKKENKMTWAPKNKGGEERKAEGGEEDSLGCLTADTKEVTASQEARGLRLSDLEDLEEEEEEEEEAEDEEVVATAGDRLTEFRKGAQSLPGPCAAAREGRLERRECGLAAPRFSFNDPSGSEEADFLSAETGSPRLTMHYPCLEKPRIWSLAHTATASAVEGAPPARPRPRSPECRMIPGQPPASARRLSVPRDSACDESSCIPKAFGNPKFALQGLPLNCAPCPRRSEPVVQCQYPSGAEAG

SEQ ID NO: 22735 - protein, 564 aa, Homo sapiens
MASTSTTIRSHSSSRRGFSANSARLPGVSRSGFSSISVSRSRGSGGLGGACGGAGFGSRSLYGLGGSKRISIGGGSCAISGGYGSRAGGSYGFGGAGSGFGFGGGAGIGFGLGGGAGLAGGFGGPGFPVCPPGGIQEVTVNQSLLTPLNLQIDPAIQRVRAEEREQIKTLNNKFASFIDKVRFLEQQNKVLDTKWTLLQEQGTKTVRQNLEPLFEQYINNLRRQLDSIVGERGRLDSELRNMQDLVEDLKNKYEDEINKRTAAENEFVTLKKDVDAAYMNKVELQAKADTLTDEINFLRALYDAELSQMQTHISDTSVVLSMDNNRNLDLDSIIAEVKAQYEEIAQRSRAEAESWYQTKYEELQVTAGRHGDDLRNTKQEIAEINRMIQRLRSEIDHVKKQCASLQAAIADAEQRGEMALKDAKNKLEGLEDALQKAKQDLARLLKEYQELMNVKLALDVEIATYRKLLEGEECRLNGEGVGQVNVSVVQSTISSGYGGASGVGSGLGLGGGSSYSYGSGLGIGGGFSSSSGRAIGGGLSSVGGGSSTIKYTTTSSSSRKSYKH

SEQ ID NO: 22736 - protein, 507 aa, Homo sapiens
MGRKKIQITRIMDERNRQVTFTKRKFGLMKKAYELSVLCDCEIALIIFNSSNKLFQYASTDMDKVLLKYTEYNEPHESRTNSDIVEALNKKEHRGCDSPDPDTSYVLTPHTEEKYKKINEEFDNMMRNHKIAPGLPPQNFSMSVTVPVTSPNALSYTNPGSSLVSPSLAASSTLTDSSMLSPPQTTLHRNVSPGAPQRPPSTGNAGGMLSTTDLTVPNGAGSSPVGNGFVNSRASPNLIGATGANSLGKVMPTKSPPPPGGGNLGMNSRKPDLRVVIPPSSKGMMPPLSEEEELELNTQRISSSQATQPLATPVVSVTTPSLPPQGLVYSAMPTAYNTDYSLTSADLSALQGFNSPGMLSLGQVSAWQQHHLGQAALSSLVAGGQLSQGSNLSINTNQNISIKSEPISPPRDRMTPSGFQQQQQQQQQQQPPPPPQPQPQPPQPQPRQEMGRSPVDSLSSSSSSYDGSDREDPRGDFHSPIVLGRPPNTEDRESPSVKRMRMDAWVT

SEQ ID NO: 22737 - protein, 505 aa, Homo sapiens
MGRKKIQITRIMDERNRQVTFTKRKFGLMKKAYELSVLCDCEIALIIFNSSNKLFQYASTDMDKVLLKYTEYNEPHESRTNSDIVETLRKKGLNGCESPDADDYFEHSPLSEDRFSKLNEDSDFIFKRGPPGLPPQNFSMSVTVPVTSPNALSYTNPGSSLVSPSLAASSTLTDSSMLSPPQTTLHRNVSPGAPQRPPSTGNAGGMLSTTDLTVPNGAGSSPVGNGFVNSRASPNLIGATGANSLGKVMPTKSPPPPGGGNLGMNSRKPDLRVVIPPSSKGMMPPLSEEEELELNTQRISSSQATQPLATPVVSVTTPSLPPQGLVYSAMPTAYNTDYSLTSADLSALQGFNSPGMLSLGQVSAWQQHHLGQAALSSLVAGGQLSQGSNLSINTNQNISIKSEPISPPRDRMTPSGFQQQQQQQQQQQPPPPPQPQPQPPQPQPRQEMGRSPVDSLSSSSSSYDGSDREDPRGDFHSPIVLGRPPNTEDRESPSVKRMRMDAWVT

SEQ ID NO: 22738 - protein, 497 aa, Homo sapiens
MGRKKIQITRIMDERNRQVTFTKRKFGLMKKAYELSVLCDCEIALIIFNSSNKLFQYASTDMDKVLLKYTEYNEPHESRTNSDIVEALNKKEHRGCDSPDPDTSYVLTPHTEEKYKKINEEFDNMMRNHKIAPGLPPQNFSMSVTVPVTSPNALSYTNPGSSLVSPSLAASSTLTDSSMLSPPQTTLHRNVSPGAPQRPPSTGNAGGMLSTTDLTVPNGAGSSPVGNGFVNSRASPNLIGATGANSLGKVMPTKSPPPPGGGNLGMNSRKPDLRVVIPPSSKGMMPPLNTQRISSSQATQPLATPVVSVTTPSLPPQGLVYSAMPTAYNTDYSLTSADLSALQGFNSPGMLSLGQVSAWQQHHLGQAALSSLVAGGQLSQGSNLSINTNQNISIKSEPISPPRDRMTPSGFQQQQQQQQQPPPPPQPQPQPPQPQPRQEMGRSPVDSLSSSSSSYDGSDREDPRGDFHSPIVLGRPPNTEDRESPSVKRMRMDAWVT

SEQ ID NO: 22739 - protein, 495 aa, Homo sapiens
MGRKKIQITRIMDERNRQVTFTKRKFGLMKKAYELSVLCDCEIALIIFNSSNKLFQYASTDMDKVLLKYTEYNEPHESRTNSDIVETLRKKGLNGCESPDADDYFEHSPLSEDRFSKLNEDSDFIFKRGPPGLPPQNFSMSVTVPVTSPNALSYTNPGSSLVSPSLAASSTLTDSSMLSPPQTTLHRNVSPGAPQRPPSTGNAGGMLSTTDLTVPNGAGSSPVGNGFVNSRASPNLIGATGANSLGKVMPTKSPPPPGGGNLGMNSRKPDLRVVIPPSSKGMMPPLNTQRISSSQATQPLATPVVSVTTPSLPPQGLVYSAMPTAYNTDYSLTSADLSALQGFNSPGMLSLGQVSAWQQHHLGQAALSSLVAGGQLSQGSNLSINTNQNISIKSEPISPPRDRMTPSGFQQQQQQQQQPPPPPQPQPQPPQPQPRQEMGRSPVDSLSSSSSSYDGSDREDPRGDFHSPIVLGRPPNTEDRESPSVKRMRMDAWVT

SEQ ID NO: 22740 - protein, 499 aa, Homo sapiens
MGRKKIQITRIMDERNRQVTFTKRKFGLMKKAYELSVLCDCEIALIIFNSSNKLFQYASTDMDKVLLKYTEYNEPHESRTNSDIVEALNKKEHRGCDSPDPDTSYVLTPHTEEKYKKINEEFDNMMRNHKIAPGLPPQNFSMSVTVPVTSPNALSYTNPGSSLVSPSLAASSTLTDSSMLSPPQTTLHRNVSPGAPQRPPSTGNAGGMLSTTDLTVPNGAGSSPVGNGFVNSRASPNLIGATGANSLGKVMPTKSPPPPGGGNLGMNSRKPDLRVVIPPSSKGMMPPLNTQRISSSQATQPLATPVVSVTTPSLPPQGLVYSAMPTAYNTDYSLTSADLSALQGFNSPGMLSLGQVSAWQQHHLGQAALSSLVAGGQLSQGSNLSINTNQNISIKSEPISPPRDRMTPSGFQQQQQQQQQQQPPPPPQPQPQPPQPQPRQEMGRSPVDSLSSSSSSYDGSDREDPRGDFHSPIVLGRPPNTEDRESPSVKRMRMDAWVT

SEQ ID NO: 22741 - protein, 497 aa, Homo sapiens
MGRKKIQITRIMDERNRQVTFTKRKFGLMKKAYELSVLCDCEIALIIFNSSNKLFQYASTDMDKVLLKYTEYNEPHESRTNSDIVETLRKKGLNGCESPDADDYFEHSPLSEDRFSKLNEDSDFIFKRGPPGLPPQNFSMSVTVPVTSPNALSYTNPGSSLVSPSLAASSTLTDSSMLSPPQTTLHRNVSPGAPQRPPSTGNAGGMLSTTDLTVPNGAGSSPVGNGFVNSRASPNLIGATGANSLGKVMPTKSPPPPGGGNLGMNSRKPDLRVVIPPSSKGMMPPLNTQRISSSQATQPLATPVVSVTTPSLPPQGLVYSAMPTAYNTDYSLTSADLSALQGFNSPGMLSLGQVSAWQQHHLGQAALSSLVAGGQLSQGSNLSINTNQNISIKSEPISPPRDRMTPSGFQQQQQQQQQQQPPPPPQPQPQPPQPQPRQEMGRSPVDSLSSSSSSYDGSDREDPRGDFHSPIVLGRPPNTEDRESPSVKRMRMDAWVT

SEQ ID NO: 22742 - protein, 437 aa, Homo sapiens
MGRKKIQITRIMDERNRQTLRKKGLNGCESPDADDYFEHSPLSEDRFSKLNEDSDFIFKRGPPGLPPQNFSMSVTVPVTSPNALSYTNPGSSLVSPSLAASSTLTDSSMLSPPQTTLHRNVSPGAPQRPPSTGNAGGMLSTTDLTVPNGAGSSPVGNGFVNSRASPNLIGATGANSLGKVMPTKSPPPPGGGNLGMNSRKPDLRVVIPPSSKGMMPPLSEEEELELNTQRISSSQATQPLATPVVSVTTPSLPPQGLVYSAMPTAYNTDYSLTSADLSALQGFNSPGMLSLGQVSAWQQHHLGQAALSSLVAGGQLSQGSNLSINTNQNISIKSEPISPPRDRMTPSGFQQQQQQQQQQQPPPPPQPQPQPPQPQPRQEMGRSPVDSLSSSSSSYDGSDREDPRGDFHSPIVLGRPPNTEDRESPSVKRMRMDAWVT

SEQ ID NO: 22743 - protein, 429 aa, Homo sapiens
MGRKKIQITRIMDERNRQTLRKKGLNGCESPDADDYFEHSPLSEDRFSKLNEDSDFIFKRGPPGLPPQNFSMSVTVPVTSPNALSYTNPGSSLVSPSLAASSTLTDSSMLSPPQTTLHRNVSPGAPQRPPSTGNAGGMLSTTDLTVPNGAGSSPVGNGFVNSRASPNLIGATGANSLGKVMPTKSPPPPGGGNLGMNSRKPDLRVVIPPSSKGMMPPLNTQRISSSQATQPLATPVVSVTTPSLPPQGLVYSAMPTAYNTDYSLTSADLSALQGFNSPGMLSLGQVSAWQQHHLGQAALSSLVAGGQLSQGSNLSINTNQNISIKSEPISPPRDRMTPSGFQQQQQQQQQQQPPPPPQPQPQPPQPQPRQEMGRSPVDSLSSSSSSYDGSDREDPRGDFHSPIVLGRPPNTEDRESPSVKRMRMDAWVT

SEQ ID NO: 22744 - protein, 529 aa, Homo sapiens [sequence omitted]

SEQ ID NO: 22745 - protein, 251 aa, Homo sapiens
MAASTMSICSSACTDSWRVVDCPESCCEPCCCAPAPSLTLVCTPVSCVSSPCCQTACEPSACQSGYTSSCTTPCYQQSSCQPDCCTSSPCQQACCVPVCCVPVCCVPVCNKPVCFVPTCSESSPSCCQQSSCQPTCCTSSPCQQACCVPVCSKSVCYVPVCSGASTSCCQQSSCQPACCTASCCRPSSSVSLLCHPVCKSTCCVPVPSCGASASSCQPSCCRTASCVSLLCRPVCSRPACYSLCSGQKSSC

SEQ ID NO: 22746 - protein, 172 aa, Homo sapiens
MSYNCCSRNFSSCSHGGYLHYPGSSCGSSYPSNLVYSTDLCSPSTCQLGSSLYRGCQETCWRPNSCQTLCVESSPCHTSCYYPRTHMLCNSCLTMHVGSRGFGSNSCCSLSCGSRSCSSLGCGSNGFRYLNYRIHTSPSQSYRSRFCHPIYFPPRRWFHSSCYQPFCRSGFY

SEQ ID NO: 22747 - protein, 160 aa, Homo sapiens
MSYNCCSRNFSSRSFGGYLYYPGSYPSSLVYSTALCSPSTCQLRSSLYRDCQKTCWEPASCQKSCYRPRTSILCCPCQTTCSGSLGFRSSSCRSQGYGSRCCYSLGNGSSGFRFLKYGGCGFPSLSYGSRFCYPNYLASGAWQSSCYRPICGSRFYQFTC

SEQ ID NO: 22748 - protein, 113 aa, Homo sapiens
MNFYLLLASSILCALIVFWKYRRFQRNTGEMSSNSTALALVRPSSSGLINSNTDNNLAVYDLSRDILNNFPHSIARQKRILVNLSMVENKLVELEHTLLSKGFRGASPHRKST

SEQ ID NO: 22749 - protein, 65 aa, Homo sapiens
MCYYSNYYGGLRYGYGVLGGGYGCGCGYGHGYGGLGCGYGRGYGGYGYGCCRPSCYGRYWSCGFY

SEQ ID NO: 22750 - protein, 462 aa, Homo sapiens
MGPDRVTARELCENDDLATSLVLDPYLGFRTHKMNVSPVPPLRRQQHLRSALETFLRQRDLEAAYRALTLGGWTARYFQSRGPRQEAALKTHVYRYLRAFLPESGFTILPCTRYSMETNGAKIVSTRAWKKNEKLELLVGCIAELREADEGLLRAGENDFSIMYSTRKRSAQLWLGPAAFINHDCKPNCKFVPADGNAACVKVLRDIEPGDEVTCFYGEGFFGEKNEHCECHTCERKGEGAFRTRPREPALPPRPLDKYQLRETKRRLQQGLDSGSRQGLLGPRACVHPSPLRRDPFCAACQPLRLPACSARPDTSPLWLQWLPQPQPRVRPRKRRRPRPRRAPVLSTHHAARVSLHRWGGCGPHCRLRGEALVALGQPPHARWAPQQDWHWARRYGLPYVVRVDLRRLAPAPPATPAPAGTPGPILIPKQALAFAPFSPPKRLRLVVSHGSIDLDVGGEEL

SEQ ID NO: 22751 - protein, 97 aa, Homo sapiens
MGPDRVTARELCENDDLATSLVLDPYLGFRTHKMNVRSIATSVPSCRKVALPSCPARATPWRPTGPRSCPLVLGKRMRSWSCWWAALQSCGRQMRGC

SEQ ID NO: 22752 - protein, 210 aa, Homo sapiens
MSCPNYCSGNSNSGSLRTSRHIPLTSIDLCPTSVSCGDVLYLPTSSQDHTWVTDNCQETCGEPTSCQPVHCETGNLETSCGSSTAYYVPRPCQGSSFLPASFFSSSCLPVSCRPQRYVSSGCRPLRPLLNSYQPIGDCVPNAYRPQFCLSKSCQPQNLLTSGCQPSSCLAYRPQSLHVVSSSLRPLGPLFSGCQPLTHVFSTCRPSCSGL

SEQ ID NO: 22753 - protein, 4911 aa, Homo sapiens
MSSEEDKSVEQPQPPPPPPEEPGAPAPSPAAADKRPRGRPRKDGASPFQRARKKPRSRGKTAVEDEDSMDGLETTETETIVETEIKEQSAEEDAEAEVDNSKQLIPTLQRSVSEESANSLVSVGVEAKISEQLCAFCYCGEKSSLGQGDLKQFRITPGFILPWRNQPSNKKDIDDNSNGTYEKMQNSAPRKQRGQRKERSPQQNIVSCVSVSTQTASDDQAGKLWDELSLVGLPDAIDIQALFDSTGTCWAHHRCVEWSLGVCQMEEPLLVNVDKAVVSGSTERCAFCKHLGATIKCCEEKCTQMYHYPCAAGAGTFQDFSHIFLLCPEHIDQAPERSKEDANCAVCDSPGDLLDQFFCTTCGQHYHGMCLDIAVTPLKRAGWQCPECKVCQNCKQSGEDSKMLVCDTCDKGYHTFCLQPVMKSVPTNGWKCKNCRICIECGTRSSSQWHHNCLICDNCYQQQDNLCPFCGKCYHPELQKDMLHCNMCKRWVHLECDKPTDHELDTQLKEEYICMYCKHLGAEMDRLQPGEEVEIAELTTDYNNEMEVEGPEDQMVFSEQAANKDVNGQESTPGIVPDAVQVHTEEQQKSHPSESLDTDSLLIAVSSQHTVNTELEKQISNEVDSEDLKMSSEVKHICGEDQIEDKMEVTENIEVVTHQITVQQEQLQLLEEPETVVSREESRPPKLVMESVTLPLETLVSPHEESISLCPEEQLVIERLQGEKEQKENSELSTGLMDSEMTPTIEGCVKDVSYQGGKSIKLSSETESSFSSSADISKADVSSSPTPSSDLPSHDMLHNYPSALSSSAGNIMPTTYISVTPKIGMGKPAITKRKFSPGRPRSKQGAWSTHNTVSPPSWSPDISEGREIFKPRQLPGSAIWSIKVGRGSGFPGKRRPRGAGLSGRGGRGRSKLKSGIGAVVLPGVSTADISSNKDDEENSMHNTVVLFSSSDKFTLNQDMCVVCGSFGQGAEGRLLACSQCGQCYHPYCVSIKITKVVLSKGWRCLECTVCEACGKATDPGRLLLCDDCDISYHTYCLDPPLQTVPKGGWKCKWCVWCRHCGATSAGLRCEWQNNYTQCAPCASLSSCPVCYRNYREEDLILQCRQCDRWMHAVCQNLNTEEEVENVADIGFDCSMCRPYMPASNVPSSDCCESSLVAQIVTKVKELDPPKTYTQDGVCLTESGMTQLQSLTVTVPRRKRSKPKLKLKIINQNSVAVLQTPPDIQSEHSRDGEMDDSREGELMDCDGKSESSPEREAVDDETKGVEGTDGVKKRKRKPYRPGIGGFMVRQRSRTGQGKTKRSVIRKDSSGSISEQLPCRDDGWSEQLPDTLVDESVSVTESTEKIKKRYRKRKNKLEETFPAYLQEAFFGKDLLDTSRQSKISLDNLSEDGAQLLYKTNMNTGFLDPSLDPLLSSSSAPTKSGTHGPADDPLADISEVLNTDDDILGIISDDLAKSVDHSDIGPVTDDPSSLPQPNVNQSSRPLSEEQLDGILSPELDKMVTDGAILGKLYKIPELGGKDVEDLFTAVLSPANTQPTPLPQPPPPTQLLPIHNQDAFSRMPLMNGLIGSSPHLPHNSLPPGSGLGTFSAIAQSSYPDARDKNSAFNPMASDPNNSWTSSAPTVEGENDTMSNAQRSTLKWEKEEALGEMATVAPVLYTNINFPNLKEEFPDWTTRVKQIAKLWRKASSQERAPYVQKARDNRAALRINKVQMSNDSMKRQQQQDSIDPSSRIDSELFKDPLKQRESEHEQEWKFRQQMRQKSKQQAKIEATQKLEQVKNEQQQQQQQQFGSQHLLVQSGSDTPSSGIQSPLTPQPGNGNMSPAQSFHKELFTKQPPSTPTSTSSDDVFVKPQAPPPPPAPSRIPIQDSLSQAQTSQPPSPQVFSPGSSNSRPPSPMDPYAKMVGTPRPPPVGHSFSRRNSAAPVENCTPLSSVSRPLQMNETTANRPSPVRDLCSSSTTNNDPYAKPPDTPRPVMTDQFPKSLGLSRSPVVSEQTAKGPIAAGTSDHFTKPSPRADVFQRQRIPDSYARPLLTPAPLDSGPGPFKTPMQPPPSSQDPYGSVSQASRRLSVDPYERPALTPRPIDNFSHNQSNDPYSQPPLTPHPAVNESFAHPSRAFSQPGTISRPTSQDPYSQPPGTPRPVVDSYSQSSGTARSNTDPYSQPPGTPRPTTVDPYSQQPQTPRPSTQTDLFVTPVTNQRHSDPYAHPPGTPRPGISVPYSQPPATPRPRISEGFTRSSMTRPVLMPNQDPFLQAAQNRGPALPGPLVRPPDTCSQTPRPPGPGLSDTFSRVSPSAARDPYDQSPMTPRSQSDSFGTSQTAHDVADQPRPGSEGSFCASSNSPMHSQGQQFSGVSQLPGPVPTSGVTDTQNTVNMAQADTEKLRQRQKLREIILQQQQQKKIAGRQEKGSQDSPAVPHPGPLQHWQPENVNQAFTRPPPPYPGNIRSPVAPPLGPRYAVFPKDQRGPYPPDVASMGMRPHGFRFGFPGGSHGTMPSQERFLVPPQQIQGSGVSPQLRRSVSVDMPRPLNNSQMNNPVGLPQHFSPQSLPVQQHNILGQAYIELRHRAPDGRQRLPFSAPPGSVVEASSNLRHGNFIPRPDFPGPRHTDPMRRPPQGLPNQLPVHPDLEQVPPSQQEQGHSVHSSSMVMRTLNHPLGGEFSEAPLSTSVPSETTSDNLQITTQPSDGLEEKLDSDDPSVKELDVKDLEGVEVKDLDDEDLENLNLDTEDGKVVELDTLDNLETNDPNLDDLLRSGEFDIIAYTDPELDMGDKKSMFNEELDLPIDDKLDNQCVSVEPKKKEQENKTLVLSDKHSPQKKSTVTNEVKTEVLSPNSKVESKCETEKNDENKDNVDTPCSQASAHSDLNDGEKTSLHPCDPDLFEKRTNRETAGPSANVIQASTQLPAQDVINSCGITGSTPVLSSLLANEKSDNSDIRPSGSPPPPTLPASPSNHVSSLPPFIAPPGRVLDNAMNSNVTVVSRVNHVFSQGVQVNPGLIPGQSTVNHSLGTGKPATQTGPQTSQSGTSSMSGPQQLMIPQTLAQQNRERPLLLEEQPLLLQDLLDQERQEQQQQRQMQAMIRQRSEPFFPNIDFDAITDPIMKAKMVALKGINKVMAQNNLGMPPMVMSRFPFMGQVVTGTQNSEGQNLGPQAIPQDGSITHQISRPNPPNFGPGFVNDSQRKQYEEWLQETQQLLQMQQKYLEEQIGAHRKSKKALSAKQRTAKKAGREFPEEDAEQLKHVTEQQSMVQKQLEQIRKQQKEHAELIEDYRIKQQQQCAMAPPTMMPSVQPQPPLIPGATPPTMSQPTFPMVPQQLQHQQHTTVISGHTSPVRMPSLPGWQPNSAPAHLPLNPPRIQPPIAQLPIKTCTPAPGTVSNANPQSGPPPRVEFDDNNPFSESFQERERKERLREQQERQRIQLMQEVDRQRALQQRMEMEQHGMVGSEISSSRTSVSQIPFYSSDLPCDFMQPLGPLQQSPQHQQQMGQVLQQQNIQQGSINSPSTQTFMQTNERRQVGPPSFVPDSPSIPVGSPNFSSVKQGHGNLSGTSFQQSPVRPSFTPALPAAPPVANSSLPCGQDSTITHGHSYPGSTQSLIQLYSDIIPEEKGKKKRTRKKKRDDDAESTKAPSTPHSDITAPPTPGISETTSTPAVSTPSELPQQADQESVEPVGPSTPNMAAGQLCTELENKLPNSDFSQATPNQQTYANSEVDKLSMETPAKTEEIKLEKAETESCPGQEEPKLEEQNGSKVEGNAVACPVSSAQSPPHSAGAPAAKGDSGNELLKHLLKNKKSSSLLNQKPEGSICSEDDCTKDNKLVEKQNPAEGLQTLGAQMQGGFGCGNQLPKTDGGSETKKQRSKRTQRTGEKAAPRSKKRKKDEEEKQAMYSSTDTFTHLKQQNNLSNPPTPPASLPPTPPPMACQKMANGFATTEELAGKAGVLVSHEVTKTLGPKPFQLPFRPQDDLLARALAQGPKTVDVPASLPTPPHNNQEELRIQDHCGDRDTPDSFVPSSSPESVVGVEVSRYPDLSLVKEEPPEPVPSPIIPILPSTAGKSSESRRNDIKTEPGTLYFASPFGPSPNGPRSGLISVAITLHPTAAENISSVVAAFSDLLHVRIPNSYEVSSAPDVPSMGLVSSHRINPGLEYRQHLLLRGPPPGSANPPRLVSSYRLKQPNVPFPPTSNGLSGYKDSSHGIAESAALRPQWCCHCKVVILGSGVRKSFKDLTLLNKDSRESTKRVEKDIVFCSNNCFILYSSTAQAKNSENKESIPSLPQSPMRETPSKAFHQYSNNISTLDVHCLPQLPEKASPPASPPIAFPPAFEAAQVEAKPDELKVTVKLKPRLRAVHGGFEDCRPLNKKWRGMKWKKWSIHIVIPKGTFKPPCEDEIDEFLKKLGTSLKPDPVPKDYRKCCFCHEEGDGLTDGPARLLNLDLDLWVHLNCALWSTEVYETQAGALINVELALRRGLQMKCVFCHKTGATSGCHRFRCTNIYHFTCAIKAQCMFFKDKTMLCPMHKPKGIHEQELSYFAVFRRVYVQRDEVRQIASIVQRGERDHTFRVGSLIFHTIGQLLPQQMQAFHSPKALFPVGYEASRLYWSTRYANRRCRYLCSIEEKDGRPVFVIRIVEQGHEDLVLSDISPKGVWDKILEPVACVRKKSEMLQLFPAYLKGEDLFGLTVSAVARIAESLPGVEACENYTFRYGRNPLMELPLAVNPTGCARSEPKMSAHVKRFVLRPHTLNSTSTSKSFQSTVTGELNAPYSKQFVHSKSSQYRKMKTEWKSNVYLARSRIQGLGLYAARDIEKHTMVIEYIGTIIRNEVANRKEKLYESQNRGVYMFRMDNDHVIDATLTGGPARYINHSCAPNCVAEVVTFERGHKIIISSSRRIQKGEELCYDYKFDFEDDQHKIPCHCGAVNCRKWMN

SEQ ID NO: 22754 - protein, 4964 aa, Homo sapiens
MSSEEDKSVEQPQPPPPPPEEPGAPAPSPAAADKRPRGRPRKDGASPFQRARKKPRSRGKTAVEDEDSMDGLETTETETIVETEIKEQSAEEDAEAEVDNSKQLIPTLQRSVSEESANSLVSVGVEAKISEQLCAFCYCGEKSSLGQGDLKQFRITPGFILPWRNQPSNKKDIDDNSNGTYEKMQNSAPRKQRGQRKERSPQQNIVSCVSVSTQTASDDQAGKLWDELSLVGLPDAIDIQALFDSTGTCWAHHRCVEWSLGVCQMEEPLLVNVDKAVVSGSTERCAFCKHLGATIKCCEEKCTQMYHYPCAAGAGTFQDFSHIFLLCPEHIDQAPERSKEDANCAVCDSPGDLLDQFFCTTCGQHYHGMCLDIAVTPLKRAGWQCPECKVCQNCKQSGEDSKMLVCDTCDKGYHTFCLQPVMKSVPTNGWKCKNCRICIECGTRSSSQWHHNCLICDNCYQQQDNLCPFCGKCYHPELQKDMLHCNMCKRWVHLECDKPTDHELDTQLKEEYICMYCKHLGAEMDRLQPGEEVEIAELTTDYNNEMEVEGPEDQMVFSEQAANKDVNGQESTPGIVPDAVQVHTEEQQKSHPSESLDTDSLLIAVSSQHTVNTELEKQISNEVDSEDLKMSSEVKHICGEDQIEDKMEVTENIEVVTHQITVQQEQLQLLEEPETVVSREESRPPKLVMESVTLPLETLVSPHEESISLCPEEQLVIERLQGEKEQKENSELSTGLMDSEMTPTIEGCVKDVSYQGGKSIKLSSETESSFSSSADISKADVSSSPTPSSDLPSHDMLHNYPSALSSSAGNIMPTTYISVTPKIGMGKPAITKRKFSPGRPRSKQGAWSTHNTVSPPSWSPDISEGREIFKPRQLPGSAIWSIKVGRGSGFPGKRRPRGAGLSGRGGRGRSKLKSGIGAVVLPGVSTADISSNKDDEENSMHNTVVLFSSSDKFTLNQDMCVVCGSFGQGAEGRLLACSQCGQCYHPYCVSIKITKVVLSKGWRCLECTVCEACGKATDPGRLLLCDDCDISYHTYCLDPPLQTVPKGGWKCKWCVWCRHCGATSAGLRCEWQNNYTQCAPCASLSSCPVCYRNYREEDLILQCRQCDRWMHAVCQNLNTEEEVENVADIGFDCSMCRPYMPASNVPSSDCCESSLVAQIVTKVKELDPPKTYTQDGVCLTESGMTQLQSLTVTVPRRKRSKPKLKLKIINQNSVAVLQTPPDIQSEHSRDGEMDDSREGELMDCDGKSESSPEREAVDDETKGVEGTDGVKKRKRKPYRPGIGGFMVRQRSRTGQGKTKRSVIRKDSSGSISEQLPCRDDGWSEQLPDTLVDESVSVTESTEKIKKRYRKRKNKLEETFPAYLQEAFFGKDLLDTSRQSKISLDNLSEDGAQLLYKTNMNTGFLDPSLDPLLSSSSAPTKSGTHGPADDPLADISEVLNTDDDILGIISDDLAKSVDHSDIGPVTDDPSSLPQPNVNQSSRPLSEEQLDGILSPELDKMVTDGAILGKLYKIPELGGKDVEDLFTAVLSPANTQPTPLPQPPPPTQLLPIHNQDAFSRMPLMNGLIGSSPHLPHNSLPPGSGLGTFSAIAQSSYPDARDKNSAFNPMASDPNNSWTSSAPTVEGENDTMSNAQRSTLKWEKEEALGEMATVAPVLYTNINFPNLKEEFPDWTTRVKQIAKLWRKASSQERAPYVQKARDNRAALRINKVQMSNDSMKRQQQQDSIDPSSRIDSELFKDPLKQRESEHEQEWKFRQQMRQKSKQQAKIEATQKLEQVKNEQQQQQQQQFGSQHLLVQSGSDTPSSGIQSPLTPQPGNGNMSPAQSFHKELFTKQPPSTPTSTSSDDVFVKPQAPPPPPAPSRIPIQDSLSQAQTSQPPSPQVFSPGSSNSRPPSPMDPYAKMVGTPRPPPVGHSFSRRNSAAPVENCTPLSSVSRPLQMNETTANRPSPVRDLCSSSTTNNDPYAKPPDTPRPVMTDQFPKSLGLSRSPVVSEQTAKGPIAAGTSDHFTKPSPRADVFQRQRIPDSYARPLLTPAPLDSGPGPFKTPMQPPPSSQDPYGSVSQASRRLSVDPYERPALTPRPIDNFSHNQSNDPYSQPPLTPHPAVNESFAHPSRAFSQPGTISRPTSQDPYSQPPGTPRPVVDSYSQSSGTARSNTDPYSQPPGTPRPTTVDPYSQQPQTPRPSTQTDLFVTPVTNQRHSDPYAHPPGTPRPGISVPYSQPPATPRPRISEGFTRSSMTRPVLMPNQDPFLQAAQNRGPALPGPLVRPPDTCSQTPRPPGPGLSDTFSRVSPSAARDPYDQSPMTPRSQSDSFGTSQTAHDVADQPRPGSEGSFCASSNSPMHSQGQQFSGVSQLPGPVPTSGVTDTQNTVNMAQADTEKLRQRQKLREIILQQQQQKKIAGRQEKGSQDSPAVPHPGPLQHWQPENVNQAFTRPPPPYPGNIRSPVAPPLGPRYAVFPKDQRGPYPPDVASMGMRPHGFRFGFPGGSHGTMPSQERFLVPPQQIQGSGVSPQLRRSVSVDMPRPLNNSQMNNPVGLPQHFSPQSLPVQQHNILGQAYIELRHRAPDGRQRLPFSAPPGSVVEASSNLRHGNFIPRPDFPGPRHTDPMRRPPQGLPNQLPVHPDLEQVPPSQQEQGHSVHSSSMVMRTLNHPLGGEFSEAPLSTSVPSETTSDNLQITTQPSDGLEEKLDSDDPSVKELDVKDLEGVEVKDLDDEDLENLNLDTEDGKVVELDTLDNLETNDPNLDDLLRSGEFDIIAYTDPELDMGDKKSMFNEELDLPIDDKLDNQCVSVEPKKKEQENKTLVLSDKHSPQKKSTVTNEVKTEVLSPNSKVESKCETEKNDENKDNVDTPCSQASAHSDLNDGEKTSLHPCDPDLFEKRTNRETAGPSANVIQASTQLPAQDVINSCGITGSTPVLSSLLANEKSDNSDIRPSGSPPPPTLPASPSNHVSSLPPFIAPPGRVLDNAMNSNVTVVSRVNHVFSQGVQVNPGLIPGQSTVNHSLGTGKPATQTGPQTSQSGTSSMSGPQQLMIPQTLAQQNRERPLLLEEQPLLLQDLLDQERQEQQQQRQMQAMIRQRSEPFFPNIDFDAITDPIMKAKMVALKGINKVMAQNNLGMPPMVMSRFPFMGQVVTGTQNSEGQNLGPQAIPQDGSITHQISRPNPPNFGPGFVNDSQRKQYEEWLQETQQLLQMQQKYLEEQIGAHRKSKKALSAKQRTAKKAGREFPEEDAEQLKHVTEQQSMVQKQLEQIRKQQKEHAELIEDYRIKQQQQCAMAPPTMMPSVQPQPPLIPGATPPTMSQPTFPMVPQQLQHQQHTTVISGHTSPVRMPSLPGWQPNSAPAHLPLNPPRIQPPIAQLPIKTCTPAPGTVSNANPQSGPPPRVEFDDNNPFSESFQERERKERLREQQERQRIQLMQEVDRQRALQQRMEMEQHGMVGSEISSSRTSVSQIPFYSSDLPCDFMQPLGPLQQSPQHQQQMGQVLQQQNIQQGSINSPSTQTFMQTNERRQVGPPSFVPDSPSIPVGSPNFSSVKQGHGNLSGTSFQQSPVRPSFTPALPAAPPVANSSLPCGQDSTITHGHSYPGSTQSLIQLYSDIIPEEKGKKKRTRKKKRDDDAESTKAPSTPHSDITAPPTPGISETTSTPAVSTPSELPQQADQESVEPVGPSTPNMAAGQLCTELENKLPNSDFSQATPNQQTYANSEVDKLSMETPAKTEEIKLEKAETESCPGQEEPKLEEQNGSKVEGNAVACPVSSAQSPPHSAGAPAAKGDSGNELLKHLLKNKKSSSLLNQKPEGSICSEDDCTKDNKLVEKQNPAEGLQTLGAQMQGGFGCGNQLPKTDGGSETKKQRSKRTQRTGEKAAPRSKKRKKDEEEKQAMYSSTDTFTHLKQVRQLSLLPLMEPIIGVNFAHFLPYGSGQFNSGNRLLGTFGSATLEGVSDYYSQLIYKQNNLSNPPTPPASLPPTPPPMACQKMANGFATTEELAGKAGVLVSHEVTKTLGPKPFQLPFRPQDDLLARALAQGPKTVDVPASLPTPPHNNQEELRIQDHCGDRDTPDSFVPSSSPESVVGVEVSRYPDLSLVKEEPPEPVPSPIIPILPSTAGKSSESRRNDIKTEPGTLYFASPFGPSPNGPRSGLISVAITLHPTAAENISSVVAAFSDLLHVRIPNSYEVSSAPDVPSMGLVSSHRINPGLEYRQHLLLRGPPPGSANPPRLVSSYRLKQPNVPFPPTSNGLSGYKDSSHGIAESAALRPQWCCHCKVVILGSGVRKSFKDLTLLNKDSRESTKRVEKDIVFCSNNCFILYSSTAQAKNSENKESIPSLPQSPMRETPSKAFHQYSNNISTLDVHCLPQLPEKASPPASPPIAFPPAFEAAQVEAKPDELKVTVKLKPRLRAVHGGFEDCRPLNKKWRGMKWKKWSIHIVIPKGTFKPPCEDEIDEFLKKLGTSLKPDPVPKDYRKCCFCHEEGDGLTDGPARLLNLDLDLWVHLNCALWSTEVYETQAGALINVELALRRGLQMKCVFCHKTGATSGCHRFRCTNIYHFTCAIKAQCMFFKDKTMLCPMHKPKGIHEQELSYFAVFRRVYVQRDEVRQIASIVQRGERDHTFRVGSLIFHTIGQLLPQQMQAFHSPKALFPVGYEASRLYWSTRYANRRCRYLCSIEEKDGRPVFVIRIVEQGHEDLVLSDISPKGVWDKILEPVACVRKKSEMLQLFPAYLKGEDLFGLTVSAVARIAESLPGVEACENYTFRYGRNPLMELPLAVNPTGCARSEPKMSAHVKRPHTLNSTSTSKSFQSTVTGELNAPYSKQFVHSKSSQYRKMKTEWKSNVYLARSRIQGLGLYAARDIEKHTMVIEYIGTIIRNEVANRKEKLYESQNRGVYMFRMDNDHVIDATLTGGPARYINHSCAPNCVAEVVTFERGHKIIISSSRRIQKGEELCYDYKFDFEDDQHKIPCHCGAVNCRKWMN

SEQ ID NO: 22755 - protein, 4968 aa, Homo sapiens
MSSEEDKSVEQPQPPPPPPEEPGAPAPSPAAADKRPRGRPRKDGASPFQRARKKPRSRGKTAVEDEDSMDGLETTETETIVETEIKEQSAEEDAEAEVDNSKQLIPTLQRSVSEESANSLVSVGVEAKISEQLCAFCYCGEKSSLGQGDLKQFRITPGFILPWRNQPSNKKDIDDNSNGTYEKMQNSAPRKQRGQRKERSPQQNIVSCVSVSTQTASDDQAGKLWDELSLVGLPDAIDIQALFDSTGTCWAHHRCVEWSLGVCQMEEPLLVNVDKAVVSGSTERCAFCKHLGATIKCCEEKCTQMYHYPCAAGAGTFQDFSHIFLLCPEHIDQAPERSKEDANCAVCDSPGDLLDQFFCTTCGQHYHGMCLDIAVTPLKRAGWQCPECKVCQNCKQSGEDSKMLVCDTCDKGYHTFCLQPVMKSVPTNGWKCKNCRICIECGTRSSSQWHHNCLICDNCYQQQDNLCPFCGKCYHPELQKDMLHCNMCKRWVHLECDKPTDHELDTQLKEEYICMYCKHLGAEMDRLQPGEEVEIAELTTDYNNEMEVEGPEDQMVFSEQAANKDVNGQESTPGIVPDAVQVHTEEQQKSHPSESLDTDSLLIAVSSQHTVNTELEKQISNEVDSEDLKMSSEVKHICGEDQIEDKMEVTENIEVVTHQITVQQEQLQLLEEPETVVSREESRPPKLVMESVTLPLETLVSPHEESISLCPEEQLVIERLQGEKEQKENSELSTGLMDSEMTPTIEGCVKDVSYQGGKSIKLSSETESSFSSSADISKADVSSSPTPSSDLPSHDMLHNYPSALSSSAGNIMPTTYISVTPKIGMGKPAITKRKFSPGRPRSKQGAWSTHNTVSPPSWSPDISEGREIFKPRQLPGSAIWSIKVGRGSGFPGKRRPRGAGLSGRGGRGRSKLKSGIGAVVLPGVSTADISSNKDDEENSMHNTVVLFSSSDKFTLNQDMCVVCGSFGQGAEGRLLACSQCGQCYHPYCVSIKITKVVLSKGWRCLECTVCEACGKATDPGRLLLCDDCDISYHTYCLDPPLQTVPKGGWKCKWCVWCRHCGATSAGLRCEWQNNYTQCAPCASLSSCPVCYRNYREEDLILQCRQCDRWMHAVCQNLNTEEEVENVADIGFDCSMCRPYMPASNVPSSDCCESSLVAQIVTKVKELDPPKTYTQDGVCLTESGMTQLQSLTVTVPRRKRSKPKLKLKIINQNSVAVLQTPPDIQSEHSRDGEMDDSREGELMDCDGKSESSPEREAVDDETKGVEGTDGVKKRKRKPYRPGIGGFMVRQRSRTGQGKTKRSVIRKDSSGSISEQLPCRDDGWSEQLPDTLVDESVSVTESTEKIKKRYRKRKNKLEETFPAYLQEAFFGKDLLDTSRQSKISLDNLSEDGAQLLYKTNMNTGFLDPSLDPLLSSSSAPTKSGTHGPADDPLADISEVLNTDDDILGIISDDLAKSVDHSDIGPVTDDPSSLPQPNVNQSSRPLSEEQLDGILSPELDKMVTDGAILGKLYKIPELGGKDVEDLFTAVLSPANTQPTPLPQPPPPTQLLPIHNQDAFSRMPLMNGLIGSSPHLPHNSLPPGSGLGTFSAIAQSSYPDARDKNSAFNPMASDPNNSWTSSAPTVEGENDTMSNAQRSTLKWEKEEALGEMATVAPVLYTNINFPNLKEEFPDWTTRVKQIAKLWRKASSQERAPYVQKARDNRAALRINKVQMSNDSMKRQQQQDSIDPSSRIDSELFKDPLKQRESEHEQEWKFRQQMRQKSKQQAKIEATQKLEQVKNEQQQQQQQQFGSQHLLVQSGSDTPSSGIQSPLTPQPGNGNMSPAQSFHKELFTKQPPSTPTSTSSDDVFVKPQAPPPPPAPSRIPIQDSLSQAQTSQPPSPQVFSPGSSNSRPPSPMDPYAKMVGTPRPPPVGHSFSRRNSAAPVENCTPLSSVSRPLQMNETTANRPSPVRDLCSSSTTNNDPYAKPPDTPRPVMTDQFPKSLGLSRSPVVSEQTAKGPIAAGTSDHFTKPSPRADVFQRQRIPDSYARPLLTPAPLDSGPGPFKTPMQPPPSSQDPYGSVSQASRRLSVDPYERPALTPRPIDNFSHNQSNDPYSQPPLTPHPAVNESFAHPSRAFSQPGTISRPTSQDPYSQPPGTPRPVVDSYSQSSGTARSNTDPYSQPPGTPRPTTVDPYSQQPQTPRPSTQTDLFVTPVTNQRHSDPYAHPPGTPRPGISVPYSQPPATPRPRISEGFTRSSMTRPVLMPNQDPFLQAAQNRGPALPGPLVRPPDTCSQTPRPPGPGLSDTFSRVSPSAARDPYDQSPMTPRSQSDSFGTSQTAHDVADQPRPGSEGSFCASSNSPMHSQGQQFSGVSQLPGPVPTSGVTDTQNTVNMAQADTEKLRQRQKLREIILQQQQQKKIAGRQEKGSQDSPAVPHPGPLQHWQPENVNQAFTRPPPPYPGNIRSPVAPPLGPRYAVFPKDQRGPYPPDVASMGMRPHGFRFGFPGGSHGTMPSQERFLVPPQQIQGSGVSPQLRRSVSVDMPRPLNNSQMNNPVGLPQHFSPQSLPVQQHNILGQAYIELRHRAPDGRQRLPFSAPPGSVVEASSNLRHGNFIPRPDFPGPRHTDPMRRPPQGLPNQLPVHPDLEQVPPSQQEQGHSVHSSSMVMRTLNHPLGGEFSEAPLSTSVPSETTSDNLQITTQPSDGLEEKLDSDDPSVKELDVKDLEGVEVKDLDDEDLENLNLDTEDGKVVELDTLDNLETNDPNLDDLLRSGEFDIIAYTDPELDMGDKKSMFNEELDLPIDDKLDNQCVSVEPKKKEQENKTLVLSDKHSPQKKSTVTNEVKTEVLSPNSKVESKCETEKNDENKDNVDTPCSQASAHSDLNDGEKTSLHPCDPDLFEKRTNRETAGPSANVIQASTQLPAQDVINSCGITGSTPVLSSLLANEKSDNSDIRPSGSPPPPTLPASPSNHVSSLPPFIAPPGRVLDNAMNSNVTVVSRVNHVFSQGVQVNPGLIPGQSTVNHSLGTGKPATQTGPQTSQSGTSSMSGPQQLMIPQTLAQQNRERPLLLEEQPLLLQDLLDQERQEQQQQRQMQAMIRQRSEPFFPNIDFDAITDPIMKAKMVALKGINKVMAQNNLGMPPMVMSRFPFMGQVVTGTQNSEGQNLGPQAIPQDGSITHQISRPNPPNFGPGFVNDSQRKQYEEWLQETQQLLQMQQKYLEEQIGAHRKSKKALSAKQRTAKKAGREFPEEDAEQLKHVTEQQSMVQKQLEQIRKQQKEHAELIEDYRIKQQQQCAMAPPTMMPSVQPQPPLIPGATPPTMSQPTFPMVPQQLQHQQHTTVISGHTSPVRMPSLPGWQPNSAPAHLPLNPPRIQPPIAQLPIKTCTPAPGTVSNANPQSGPPPRVEFDDNNPFSESFQERERKERLREQQERQRIQLMQEVDRQRALQQRMEMEQHGMVGSEISSSRTSVSQIPFYSSDLPCDFMQPLGPLQQSPQHQQQMGQVLQQQNIQQGSINSPSTQTFMQTNERRQVGPPSFVPDSPSIPVGSPNFSSVKQGHGNLSGTSFQQSPVRPSFTPALPAAPPVANSSLPCGQDSTITHGHSYPGSTQSLIQLYSDIIPEEKGKKKRTRKKKRDDDAESTKAPSTPHSDITAPPTPGISETTSTPAVSTPSELPQQADQESVEPVGPSTPNMAAGQLCTELENKLPNSDFSQATPNQQTYANSEVDKLSMETPAKTEEIKLEKAETESCPGQEEPKLEEQNGSKVEGNAVACPVSSAQSPPHSAGAPAAKGDSGNELLKHLLKNKKSSSLLNQKPEGSICSEDDCTKDNKLVEKQNPAEGLQTLGAQMQGGFGCGNQLPKTDGGSETKKQRSKRTQRTGEKAAPRSKKRKKDEEEKQAMYSSTDTFTHLKQVRQLSLLPLMEPIIGVNFAHFLPYGSGQFNSGNRLLGTFGSATLEGVSDYYSQLIYKQNNLSNPPTPPASLPPTPPPMACQKMANGFATTEELAGKAGVLVSHEVTKTLGPKPFQLPFRPQDDLLARALAQGPKTVDVPASLPTPPHNNQEELRIQDHCGDRDTPDSFVPSSSPESVVGVEVSRYPDLSLVKEEPPEPVPSPIIPILPSTAGKSSESRRNDIKTEPGTLYFASPFGPSPNGPRSGLISVAITLHPTAAENISSVVAAFSDLLHVRIPNSYEVSSAPDVPSMGLVSSHRINPGLEYRQHLLLRGPPPGSANPPRLVSSYRLKQPNVPFPPTSNGLSGYKDSSHGIAESAALRPQWCCHCKVVILGSGVRKSFKDLTLLNKDSRESTKRVEKDIVFCSNNCFILYSSTAQAKNSENKESIPSLPQSPMRETPSKAFHQYSNNISTLDVHCLPQLPEKASPPASPPIAFPPAFEAAQVEAKPDELKVTVKLKPRLRAVHGGFEDCRPLNKKWRGMKWKKWSIHIVIPKGTFKPPCEDEIDEFLKKLGTSLKPDPVPKDYRKCCFCHEEGDGLTDGPARLLNLDLDLWVHLNCALWSTEVYETQAGALINVELALRRGLQMKCVFCHKTGATSGCHRFRCTNIYHFTCAIKAQCMFFKDKTMLCPMHKPKGIHEQELSYFAVFRRVYVQRDEVRQIASIVQRGERDHTFRVGSLIFHTIGQLLPQQMQAFHSPKALFPVGYEASRLYWSTRYANRRCRYLCSIEEKDGRPVFVIRIVEQGHEDLVLSDISPKGVWDKILEPVACVRKKSEMLQLFPAYLKGEDLFGLTVSAVARIAESLPGVEACENYTFRYGRNPLMELPLAVNPTGCARSEPKMSAHVKRFVLRPHTLNSTSTSKSFQSTVTGELNAPYSKQFVHSKSSQYRKMKTEWKSNVYLARSRIQGLGLYAARDIEKHTMVIEYIGTIIRNEVANRKEKLYESQNRGVYMFRMDNDHVIDATLTGGPARYINHSCAPNCVAEVVTFERGHKIIISSSRRIQKGEELCYDYKFDFEDDQHKIPCHCGAVNCRKWMN

SEQ ID NO: 22756 - protein, 181 aa, Homo sapiens
MVSSCCGSVSSEQSCGLENCCRPSCCQTTCCRTTCCRPSCCKPQCCQSVCYQPTCCHPSCCISSCCRPYCCESSCCRPCCCQTTCCRTTCCRTTCCCPSCCVSSCCRPQCCQSVCCQPTCCRPSCCISSCCHPSCCESSCCRPCCCVRPVCGRVSCHTTCYRPTCVISTCPRPLCCASSCC

SEQ ID NO: 22757 - protein, 58 aa, Homo sapiens
MYFNYKSVCGSCGFGSCYGCGYGCIHSTHCGCNGYYGCYENKYSVIDDLIFFASKKCH

SEQ ID NO: 22758 - protein, 146 aa, Homo sapiens
MVNSCCGSVCSDQGCDQGLCQETCCRPSCCQTTCCCPSCVVSSCCRPSCSQTTCCQTTCCRPSCCHPVCCQTTCRPSCGVSSCCRPLCCQTTCHPSCGMSSCCRPLCCQTTCRPSCGVSSCCRPLCCQTTCCRATCCRPSCCGSSC

SEQ ID NO: 22759 - protein, 619 aa, Homo sapiens
MSGLVLGQRDEPAGHRLSQEEILGSTRLVSQGLEALRSEHQAVLQSLSQTIECLQQGGHEEGLVHEKARQLRRSMENIELGLSEAQVMLALASHLSTVESEKQKLRAQVRRLCQENQWLRDELAGTQQRLQRSEQAVAQLEEEKKHLEFLGQLRQYDEDGHTSEEKEGDATKDSLDDLFPNEEEEDPSNGLSRGQGATAAQQGGYEIPARLRTLHNLVIQYAAQGRYEVAVPLCKQALEDLERTSGRGHPDVATMLNILALVYRDQNKYKEAAHLLNDALSIRESTLGPDHPAVAATLNNLAVLYGKRGKYKEAEPLCQRALEIREKVLGTNHPDVAKQLNNLALLCQNQGKYEAVERYYQRALAIYEGQLGPDNPNVARTKNNLASCYLKQGKYAEAETLYKEILTRAHVQEFGSVDDDHKPIWMHAEEREEMSKSRHHEGGTPYAEYGGWYKACKVSSPTVNTTLRNLGALYRRQGKLEAAETLEECALRSRRQGTDPISQTKVAELLGESDGRRTSQEGPGDSVKFEGGEDASVAVEWSGDGSGTLQRSGSLGKIRDVLRRSSELLVRKLQGTEPRPSSSNMKRAASLNYLNQPSAAPLQVSRGLSASTMDLSSSS

SEQ ID NO: 22760 - protein, 131 aa, Homo sapiens
MSGLVLGQRDEPAGHRLSQEEILGSTRLVSQGLEALRSEHQAVLQSLSQTIECLQQGGHEEGLVHEKARQLRRSMENIELGLSEAQNLELRGCAHLGDAGSSQPPEHSGVGETEAAGSGAAAMPGEPVAAG

SEQ ID NO: 22761 - protein, 637 aa, Homo sapiens
MEVTGFGVTRPGKVPQARMSGLVLGQRDEPAGHRLSQEEILGSTRLVSQGLEALRSEHQAVLQSLSQTIECLQQGGHEEGLVHEKARQLRRSMENIELGLSEAQVMLALASHLSTVESEKQKLRAQVRRLCQENQWLRDELAGTQQRLQRSEQAVAQLEEEKKHLEFLGQLRQYDEDGHTSEEKEGDATKDSLDDLFPNEEEEDPSNGLSRGQGATAAQQGGYEIPARLRTLHNLVIQYAAQGRYEVAVPLCKQALEDLERTSGRGHPDVATMLNILALVYRDQNKYKEAAHLLNDALSIRESTLGPDHPAVAATLNNLAVLYGKRGKYKEAEPLCQRALEIREKVLGTNHPDVAKQLNNLALLCQNQGKYEAVERYYQRALAIYEGQLGPDNPNVARTKNNLASCYLKQGKYAEAETLYKEILTRAHVQEFGSVDDDHKPIWMHAEEREEMSKSRHHEGGTPYAEYGGWYKACKVSSPTVNTTLRNLGALYRRQGKLEAAETLEECALRSRRQGTDPISQTKVAELLGESDGRRTSQEGPGDSVKFEGGEDASVAVEWSGDGSGTLQRSGSLGKIRDVLRRSSELLVRKLQGTEPRPSSSNMKRAASLNYLNQPSAAPLQVSRGLSASTMDLSSSS

SEQ ID NO: 22762 - protein, 315 aa, Homo sapiens
MSGLVLGQRDEPAGHRLSQEEILGSTRLVSQGLEALRSEHQAVLQSLSQTIECLQQGGHEEGLVHEKARQLRRSMENIELGLSEAQVMLALASHLSTVESEKQKLRAQVRRLCQENQWLRDELAGTQQRLQRSEQAVAQLEEEKKHLEFLGQLRQYDEDGHTSEEKEGDATKDSLDDLFPNEEEEDPSNGLSRGQGATAAQQGGYEIPARLRTLHNLVIQYAAQGRYEVAVPLCKQALEDLERTSGRGHPDVATMLNILALVYRDQNKYKEAAHLLNDALSIRESTLGPDHPAVSIPCPPHPTPRTPHHCCFGLS

SEQ ID NO: 22763 - protein, 542 aa, Homo sapiens
MSGLVLGQRDEPAGHRLSQEEILGSTRLVSQGLEALRSEHQAVLQSLSQTIECLQQGGHEEGLVHEKARQLRRSMENIELGLSEAQEEKEGDATKDSLDDLFPNEEEEDPSNGLSRGQGATAAQQGGYEIPARLRTLHNLVIQYAAQGRYEVAVPLCKQALEDLERTSGRGHPDVATMLNILALVYRDQNKYKEAAHLLNDALSIRESTLGPDHPAVAATLNNLAVLYGKRGKYKEAEPLCQRALEIREKVLGTNHPDVAKQLNNLALLCQNQGKYEAVERYYQRALAIYEGQLGPDNPNVARTKNNLASCYLKQGKYAEAETLYKEILTRAHVQEFGSVDDDHKPIWMHAEEREEMSKSRHHEGGTPYAEYGGWYKACKVSSPTVNTTLRNLGALYRRQGKLEAAETLEECALRSRRQGTDPISQTKVAELLGESDGRRTSQEGPGDSVKFEGGEDASVAVEWSGDGSGTLQRSGSLGKIRDVLRRSSELLVRKLQGTEPRPSSSNMKRAASLNYLNQPSAAPLQVSRGLSASTMDLSSSS

SEQ ID NO: 22764 - protein, 594 aa, Homo sapiens
MVLRSHPFPRQDRPQGSVPRAVPGSPVGPSTSTHSEDRHGPSSSVGTVIGTGTGGLVEAGGQPQPRSSETNGSPSPDPPPGLRGEGTREKSLDPLPQAAMPRGPAQPPAQRPPGPAASSSARRSQPVPQLRKRSRCEIAPSSEQEVRPAASGDPQGEAPGEGGSPAGRSGALTEKQEEARKLMVFLQRPGGWGVVEGPRKPSSRALEPATAAALRRRLDLGSCLDVLAFAQQHGEPGLAQETYALMSDNLLRVLGDPCLYRRLSAADRERILSLRTGRGRAVLGVLVLPSLYQGGRSGLPRGPRGEEPPAAAPVSLPLPAHLHVFNPRENTWRPLTQVPEEAPLRGCGLCTMHNYLFLAGGIRGSGAKAVCSNEVFCYNPLTNIWSQVRPMQQARAQLKLVALDGLLYAIGGECLYSMECYDPRTDAWTPRAPLPAGTFPVAHEAVACRGDIYVTGGHLFYRLLRYSPVKDAWDECPYSASHRRSSDIVALGGFLYRFDLLRGVGAAVMRYNTVTGSWSRAASLPLPAPAPLHCTTLGNTIYCLNPQVTATFTVSGGTAQFQAKELQPFPLGSTGVLSPFILTLPPEDRLQTSL

SEQ ID NO: 22765 - protein, 87 aa, Homo sapiens
MTRYFCCGSYFPGYPIYGTNFHGTFRATPLNCVVPLGSPLNYGCGCNGYSSLGYSFGGSNINNLGGCYGGSFYRPWGSGSGFGYSTY

SEQ ID NO: 22766 - protein, 406 aa, Homo sapiens
MADSQLFCVAEERSGHCAVVDGNFLYVWGGYVSIEDNEVYLPNDEIWTYDIDSGLWRMHLMEGELPASMSGSCGACINGKLYIFGGYDDKGYSNRLYFVNLRTRDETYIWEKITDFEGQPPTPRDKLSCWVYKDRLIYFGGYGCRRHSELQDCFDVHDASWEEQIFWGWHNDVHIFDTKTQTWFQPEIKGGVPPQPRAAHTCAVLGNKGYIFGGRVLQTRMNDLHYLNLDTWTWSGRITINGESPKHRSWHTLTPIADDKLFLCGGLSADNIPLSDGWIHNVTTNCWKQLTHLPKTRPRLWHTACLGKENEIMVFGGSKDDLLALDTGHCNDLLIFQTQPYSLLRSCLDCIGKNSIMLESQISLLPPKLLQQVLKKITFWAAANHREEQRVQKEETENKYQWISSN

SEQ ID NO: 22767 - protein, 337 aa, Homo sapiens
MKKMPLFSKSHKNPAEIVKILKDNLAILEKQDKKTDKASEEVSKSLQAMKEILCGTNEKEPPTEAVAQLAQELYSSGLLVTLIADLQLIDFEGKKDVTQIFNNILRRQIGTRSPTVEYISAHPHILFMLLKGYEAPQIALRCGIMLRECIRHEPLAKIILFSNQFRDFFKYVELSTFDIASDAFATFKDLLTRHKVLVADFLEQNYDTIFEDYEKLLQSENYVTKRQSLKLLGELILDRHNFAIMTKYISKPENLKLMMNLLRDKSPNIQFEAFHVFKVFVASPHKTQPIVEILLKNQPKLIEFLSSFQKERTDDEQFADEKNYLIKQIRDLKKTAP

SEQ ID NO: 22768 - protein, 146 aa, Homo sapiens
MAGELTPEEEAQYKKAFSAVDTDGNGTINAQELGAALKATGKNLSEAQLRKLISEVDSDGDGEISFQEFLTAAKKARAGLEDLQVAFRAFDQDGDGHITVDELRRAMAGLGQPLPQEELDAMIREADVDQDGRVNYEEFARMLAQE

SEQ ID NO: 22769 - protein, 218 aa, Homo sapiens
MKMIEQHNQEYREGKHSFTMAMNAFGEMTSEEFRQVVNGFQNQKHRKGKVLQEPLLHDIRKSVDWREKGYVTPVKDQCNWGSVRTDVRKTEKLVSLSVQTWWTALGFKAMLAAFLENHYFASSMLPTMEAWTLRKPFHMKKSSGDWKVQGHRGASGESLLASGESQQSPEVAQYSGKHQVQCHLIEEALQMLSGGDEDHDEDKWPHDMRNHLAGEAQV

SEQ ID NO: 22770 - protein, 202 aa, Homo sapiens
MSHYFYLTPQILLPFSPLTSQEFDLIRRKAGASWQDETRWSDSSVTTYTGSYRKKQLDKSMCSQFSFRAGQHEPECKQMSLTNSSACHLLCWAGTQETTDIKGLFPDITRPFKKSFDVKHGVAHQIWDFGDCFPTPPNYGKYCVRPKKPAQEALINYSRRGKGVLKHLHGRCDSESKVCSSEDSEADRYSDYGWGGPSSPFN

SEQ ID NO: 22771 - protein, 327 aa, Homo sapiens
MLFLLLPLLAVLPGDGNADGLKEPLSFHVTWIASFYNHSWKQNLVSGWLSDLQTHTWDSNSSTIVFLCPWSRGNFSNEEWKELETLFRIRTIRSFEGIRRYAHELQFEYPFEIQVTGGCELHSGKVSGSFLQLAYQGSDFVSFQNNSWLPYPVAGNMAKHFCKVLNQNQHENDITHNLLSDTCPRFILGLLDAGKAHLQRQVKPEAWLSHGPSPGPGHLQLVCHVSGFYPKPVWVMWMRGEQEQQGTQRGDILPSADGTWYLRATLEVAAGEAADLSCRVKHSSLEGQDIVLYWEHHSSVGFIILAVIVPLLLLIGLALWFRKRCFC

SEQ ID NO: 22772 - protein, 464 aa, Homo sapiens
MSSRSTKDLIKSKWGSKPSNSKSETTLEKLKGEIAHLKTSVDEITSGKGKLTDKERHRLLEKIRVLEAEKEKNAYQLTEKDKEIQRLRDQLKARYSTTTLLEQLEETTREGERREQVLKALSEEKDVLKQQLSAATSRIAELESKTNTLRLSQTVAPNCFNSSINNIHEMEIQLKDALEKNQQWLVYDQQREVYVKGLLAKIFELEKKTETAAHSLPQQTKKPESEGYLQEEKQKCYNDLLASAKKDLEVERQTITQLSFELSEFRRKYEETQKEVHNLNQLLYSQRRADVQHLEDDRHKTEKIQKLREENDIARGKLEEEKKRSEELLSQVQFLYTSLLKQQEEQTRVALLEQQMQACTLDFENEKLDRQHVQHQLHVILKELRKARNQITQLESLKQLHEFAITEPLVTFQGETENREKVAASPKSPTAALNESLVECPKCNIQYPATEHRDLLVHVEYCSK

SEQ ID NO: 22773 - protein, 400 aa, Homo sapiens
MSSRSTKDLIKSKWGSKPSNSKSETTLEKLKGEIAHLKTSVDEITSGKGKLTDKERHRLLEKIRVLEAEKEKNAYQLTEKDKEIQRLRDQLKARYSTTTLLEQLEETTREGERREQVLKALSEEKDVLKQQLSAATSRIAELESKTNTLRLSQTVAPNCFNSSINNIHEMEIQLKDALEKNQQWLVYDQQREVYVKGLLAKIFELEKKTETAAHSLPQQTKKPESEGYLQEEKQKCYNDLLASAKKDLEVERQTITQLSFELSEFRRKYEETQKEVHNLNQLLYSQRRADVQHLEDDRHKTEKIQKLREENDIARGKLEEEKKRSEELLSQVQFLYTSLLKQQEEQTRVALLEQQMQACTLDFENEKLDRQHVQHQLHVILKELRKARKNNTVGILETAS

SEQ ID NO: 22774 - protein, 115 aa, Homo sapiens
MSYKPNLAAHMPAAALNAAGSVHSPSTSMATSSQYRQLLSDYGPPSLGYTQGTGNSQVPQSKYAELLAIIEELGKEIRPTYAGSKSAMERLKRGIIHARGLVRECLAETERNARS

SEQ ID NO: 22775 - protein, 87 aa, Homo sapiens
MATSSQYRQLLSDYGPPSLGYTQGTGNSQVPQSKYAELLAIIEELGKEIRPTYAGSKSAMERLKRGIIHARGLVRECLAETERNARS

SEQ ID NO: 22776 - protein, 659 aa, Homo sapiens
MSLPPEKASELKQLIHQQLSKMDVHGRIREILAETIREELAPDQQHLSTEDLIKALRRRGIIDDVMKELNFVTDSVEQELPSSPKQPICFDRQSTLKKTNIDPTRRYLYLQVLGGKAFLEHLQEPEPLPGQVCSTFTLCLHYRNQRFRSKPVPCACEPDFHDGFLLEVHRESLGDGTRMADSTTMLSISDPIHMVLIKTDIFGETTLVASYFLEWRSVLGSENGVTSLTVELMGVGTESKVSVGILNIKLEMYPPLNQTLSQEVVNTQLALERQKTAEKERLFLVYAKQWWREYLQIRPSHNSRLVKIFAQDENGINRPVCSYVKPLRAGRLLDTPRQAARFVNVLGYERAPVIGGGGKQEQWCTLLAFLCRNKGDCEDHANLLCSLLLGYGLEAFVCVGTKAKGVPHAWVMTCGTDGAITFWESLTGHRYIHKPTNPDEPPVAEQPKPLYPYRTIGCVFNHQMFLGNCQPSDAVETCVFDLNDESKWKPMSEEAIKSVCAPGATTSLPPFPPLCASTIDASVTSNEIEMQLRLLVSEHRKDLGLTTVWEDQLSYLLSPALASYEFERTTSISAGNEEFQDAIRRAVPDGHTFKGFPIHFVYRNARRAFATCLRSPFCEEIICCRGDQVRLAVRVRVFTYPESACAVWIMFACKYRSVL

SEQ ID NO: 22777 - protein, 584 aa, Homo sapiens
MSLPPEKASELKQLIHQQLSKMDVHGRIREILAETIREELAPDQQHLSTEDLIKALRRRGIIDDVMKELNFVTDSVEQELPSSPKQPICFDRQSTLKKSDGTRMADSTTMLSISDPIHMVLIKTDIFGETTLVASYFLEWRSVLGSENGVTSLTVELMGVGTESKVSVGILNIKLEMYPPLNQTLSQEVVNTQLALERQKTAEKERLFLVYAKQWWREYLQIRPSHNSRLVKIFAQDENGINRPVCSYVKPLRAGRLLDTPRQAARFVNVLGYERAPVIGGGGKQEQWCTLLAFLCRNKGDCEDHANLLCSLLLGYGLEAFVCVGTKAKGVPHAWVMTCGTDGAITFWESLTGHRYIHKPTNPDEPPVAEQPKPLYPYRTIGCVFNHQMFLGNCQPSDAVETCVFDLNDESKWKPMSEEAIKSVCAPGATTSLPPFPPLCASTIDASVTSNEIEMQLRLLVSEHRKDLGLTTVWEDQLSYLLSPALASYEFERTTSISAGNEEFQDAIRRAVPDGHTFKGFPIHFVYRNARRAFATCLRSPFCEEIICCRGDQVRLAVRVRVFTYPESACAVWIMFACKYRSVL

SEQ ID NO: 22778 - protein, 267 aa, Homo sapiens
MADSTTMLSISDPIHMVLIKTDIFGETTLVASYFLEWRSVLGSENGVTSLTVELMGVGTESKVSVGILNIKLEMYPPLNQTLSQEVVNTQLALERQKTAEKERLFLVYAKQWWREYLQIRPSHNSRLVKIFAQDENGINRPVCSYVKPLRAGRLLDTPRQAARFVNVLGYERAPVIGGGGKQEQWCTLLAFLCRNKGDCEDHANLLCSLLLGYGLEAFVCVGTKAKGVPHAWVMTCGTDGAITFWESLTGHRLCFQPSDVPGKLSTL

SEQ ID NO: 22779 - protein, 465 aa, Homo sapiens
MRRAAGMEDFSAEEEESWYDQQDLEQDLHLAAELGKTLLERNKELEGSLQQMYSTNEEQVQEIEYLTKQLDTLRHVNEQHAKVYEQLDLTARDLELTNHRLVLESKAAQQKIHGLTETIERLQAQVEELQAQVEQLRGLEQLRVLREKRERRRTIHTFPCLKELCTSPRCKDAFRLHSSSLELGPRPLEQENERLQTLVGALRSQVSQERQRKERAEREYTAVLQEYSELERQLCEMEACRLRVQELEAELLELQQMKQAKTYLLGPDDHLAEALLAPLTQAPEADDPQPGRGDDLGAQDGVSSPAASPGHVVRKSCSDTALNAIVAKDPASRHAGNLTLHANSVRKRGMSILREVDEQYHALLEKYEELLSKCRQHGAGVRHAGVQTSRPISRDSSWRDLRGGEEGQGEVKAGEKSLSQHVEAVDKRLEQSQPEYKALFKEIFSRIQKTKADINATKVKTHSSK

SEQ ID NO: 22780 - protein, 647 aa, Homo sapiens
MARAGPRLVLSEEAVRAKSGLGPHRDLAELQSLSIPGTYQEKITHLGHSLMSLTGLKSLDLSRNSLVSLEGIQYLTALESLNLYYNCISSLAEVFRLHALTELVDVDFRLNPVVKVEPDYRLFVVHLLPKLQQLDDRPVRASERKASRLHFASEDSLDSKESVPASLKEGRPHHPRAKCTEALAKQSLVMDADDEAVLNLIAECEWDLGRPPGSTSFSQKGREADSRGSQESRHLLSPQLVQYQCGDSGKQGRETRRSSCRGCCLEKMPWSQLCGELPPLYGAEPEASRAPRPHTYFTPHPDSMDTEDSASSQKLDLSGEMVPGPLPAPGKCRKRRMPVGRFQTFSDQEGLGCPERTHGSSVPKESLSRQDSSESRNGRTLSQPEASETEEQRSRGVTDTREPSPGSHSALPGKKTALQAALLETLLDLVDRSWGGCRSLHSNEAFLAQARHILSSVEEFTAAQDSSAMVGEDVGSLALESKSLQSRLAEQQQQHAREMSEVTAELHHTHKELDDLRQHLDKSLEENSRLKSLLLSMKKEVKSADTAATLNLQIAGLQTSVKRLCGEIVELKQHLEHYDKIQELTQMLQESHSSLVSTNEHLLQELSQVRAQHRAEVEQMHWSYQELKKTMALFPHSSASHGGCQAC

SEQ ID NO: 22781 - protein, 193 aa, Homo sapiens
MARAGPRLVLSEEAVRAKSGLGPHRDLAELQSLSIPGTYQEKITHLGHSLMSLTGLKSLDLSRNSLVSLEGIQYLTALESLNLYYNCISSLAEVFRLHALTELVDVDFRLNPVVKVEPDYRLFVVHLLPKLQQLDDRPVRASERKASRLHFASEDSLDSKESVPASLKEGRIQTSVEPAVGTVPVWGLWEAGP

SEQ ID NO: 22782 - protein, 847 aa, Homo sapiens
MHLLGPWLLLLVLEYLAFSDSSKWVFEHPETLYAWEGACVWIPCTYRALDGDLESFILFHNPEYNKNTSKFDGTRLYESTKDGKVPSEQKRVQFLGDKNKNCTLSIHPVHLNDSGQLGLRMESKTEKWMERIHLNVSERPFPPHIQLPPEIQESQEVTLTCLLNFSCYGYPIQLQWLLEGVPMRQAAVTSTSLTIKSVFTRSELKFSPQWSHHGKIVTCQLQDADGKFLSNDTVQLNVKHTPKLEIKVTPSDAIVREGDSVTMTCEVSSSNPEYTTVSWLKDGTSLKKQNTFTLNLREVTKDQSGKYCCQVSNDVGPGRSEEVFLQVQYAPEPSTVQILHSPAVEGSQVEFLCMSLANPLPTNYTWYHNGKEMQGRTEEKVHIPKILPWHAGTYSCVAENILGTGQRGPGAELDVQYPPKKVTTVIQNPMPIREGDTVTLSCNYNSSNPSVTRYEWKPHGAWEEPSLGVLKIQNVGWDNTTIACAACNSWCSWASPVALNVQYAPRDVRVRKIKPLSEIHSGNSVSLQCDFSSSHPKEVQFFWEKNGRLLGKESQLNFDSISPEDAGSYSCWVNNSIGQTASKAWTLEVLYAPRRLRVSMSPGDQVMEGKSATLTCESDANPPVSHYTWFDWNNQSLPYHSQKLRLEPVKVQHSGAYWCQGTNSVGKGRSPLSTLTVYYSPETIGRRVAVGLGSCLAILILAICGLKLQRRWKRTQSQQGLQENSSGQSFFVRNKKVRRAPLSEGPHSLGCYNPMMEDGISYTTLRFPEMNIPRTGDAESSEMQRPPPDCDDTVTYSALHKRQVGDYENVIPDFPEDEGIHYSELIQFGVGERPQAQENVDYVILKH

SEQ ID NO: 22783 - protein, 670 aa, Homo sapiens
MHLLGPWLLLLVLEYLAFSDSSKWVFEHPETLYAWEGACVWIPCTYRALDGDLESFILFHNPEYNKNTSKFDGTRLYESTKDGKVPSEQKRVQFLGDKNKNCTLSIHPVHLNDSGQLGLRMESKTEKWMERIHLNVSERPFPPHIQLPPEIQESQEVTLTCLLNFSCYGYPIQLQWLLEGVPMRQAAVTSTSLTIKSVFTRSELKFSPQWSHHGKIVTCQLQDADGKFLSNDTVQLNVKHPPKKVTTVIQNPMPIREGDTVTLSCNYNSSNPSVTRYEWKPHGAWEEPSLGVLKIQNVGWDNTTIACAACNSWCSWASPVALNVQYAPRDVRVRKIKPLSEIHSGNSVSLQCDFSSSHPKEVQFFWEKNGRLLGKESQLNFDSISPEDAGSYSCWVNNSIGQTASKAWTLEVLYAPRRLRVSMSPGDQVMEGKSATLTCESDANPPVSHYTWFDWNNQSLPYHSQKLRLEPVKVQHSGAYWCQGTNSVGKGRSPLSTLTVYYSPETIGRRVAVGLGSCLAILILAICGLKLQRRWKRTQSQQGLQENSSGQSFFVRNKKVRRAPLSEGPHSLGCYNPMMEDGISYTTLRFPEMNIPRTGDAESSEMQRPPPDCDDTVTYSALHKRQVGDYENVIPDFPEDEGIHYSELIQFGVGERPQAQENVDYVILKH

SEQ ID NO: 22784 - protein, 759 aa, Homo sapiens
MHLLGPWLLLLVLEYLAFSDSSKWVFEHPETLYAWEGACVWIPCTYRALDGDLESFILFHNPEYNKNTSKFDGTRLYESTKDGKVPSEQKRVQFLGDKNKNCTLSIHPVHLNDSGQLGLRMESKTEKWMERIHLNVSERPFPPHIQLPPEIQESQEVTLTCLLNFSCYGYPIQLQWLLEGVPMRQAAVTSTSLTIKSVFTRSELKFSPQWSHHGKIVTCQLQDADGKFLSNDTVQLNVKHTPKLEIKVTPSDAIVREGDSVTMTCEVSSSNPEYTTVSWLKDGTSLKKQNTFTLNLREVTKDQSGKYCCQVSNDVGPGRSEEVFLQVQYPPKKVTTVIQNPMPIREGDTVTLSCNYNSSNPSVTRYEWKPHGAWEEPSLGVLKIQNVGWDNTTIACAACNSWCSWASPVALNVQYAPRDVRVRKIKPLSEIHSGNSVSLQCDFSSSHPKEVQFFWEKNGRLLGKESQLNFDSISPEDAGSYSCWVNNSIGQTASKAWTLEVLYAPRRLRVSMSPGDQVMEGKSATLTCESDANPPVSHYTWFDWNNQSLPYHSQKLRLEPVKVQHSGAYWCQGTNSVGKGRSPLSTLTVYYSPETIGRRVAVGLGSCLAILILAICGLKLQRRWKRTQSQQGLQENSSGQSFFVRNKKVRRAPLSEGPHSLGCYNPMMEDGISYTTLRFPEMNIPRTGDAESSEMQRPPPDCDDTVTYSALHKRQVGDYENVIPDFPEDEGIHYSELIQFGVGERPQAQENVDYVILKH

SEQ ID NO: 22785 - protein, 751 aa, Homo sapiens
MHLLGPWLLLLVLEYLAFSDSSKWVFEHPETLYAWEGACVWIPCTYRALDGDLESFILFHNPEYNKNTSKFDGTRLYESTKDGKVPSEQKRVQFLGDKNKNCTLSIHPVHLNDSGQLGLRMESKTEKWMERIHLNVSERPFPPHIQLPPEIQESQEVTLTCLLNFSCYGYPIQLQWLLEGVPMRQAAVTSTSLTIKSVFTRSELKFSPQWSHHGKIVTCQLQDADGKFLSNDTVQLNVKHTPKLEIKVTPSDAIVREGDSVTMTCEVSSSNPEYTTVSWLKDGTSLKKQNTFTLNLREVTKDQSGKYCCQVSNDVGPGRSEEVFLQVQYAPEPSTVQILHSPAVEGSQVEFLCMSLANPLPTNYTWYHNGKEMQGRTEEKVHIPKILPWHAGTYSCVAENILGTGQRGPGAELDVQYPPKKVTTVIQNPMPIREGDTVTLSCNYNSSNPSVTRYEWKPHGAWEEPSLGVLKIQNVGWDNTTIACAACNSWCSWASPVALNVQYAPRDVRVRKIKPLSEIHSGNSVSLQCDFSSSHPKEVQFFWEKNGRLLGKESQLNFDSISPEDAGSYSCWVNNSIGQTASKAWTLEVLYAPRRLRVSMSPGDQVMEGKSATLTCESDANPPVSHYTWFDWNNQSLPYHSQKLRLEPVKVQHSGAYWCQGTNSVGKGRSPLSTLTVYYSPETIGRRVAVGLGSCLAILILAICGLKLQRRWKRTQSQQGLQENSSGQSFFVRNKKRCRVLRDAETSPGLR

SEQ ID NO: 22786 - protein, 675 aa, Homo sapiens
MSLWLLEGVPMRQAAVTSTSLTIKSVFTRSELKFSPQWSHHGKIVTCQLQDADGKFLSNDTVQLNVKHTPKLEIKVTPSDAIVREGDSVTMTCEVSSSNPEYTTVSWLKDGTSLKKQNTFTLNLREVTKDQSGKYCCQVSNDVGPGRSEEVFLQVQYAPEPSTVQILHSPAVEGSQVEFLCMSLANPLPTNYTWYHNGKEMQGRTEEKVHIPKILPWHAGTYSCVAENILGTGQRGPGAELDVQYPPKKVTTVIQNPMPIREGDTVTLSCNYNSSNPSVTRYEWKPHGAWEEPSLGVLKIQNVGWDNTTIACAACNSWCSWASPVALNVQYAPRDVRVRKIKPLSEIHSGNSVSLQCDFSSSHPKEVQFFWEKNGRLLGKESQLNFDSISPEDAGSYSCWVNNSIGQTASKAWTLEVLYAPRRLRVSMSPGDQVMEGKSATLTCESDANPPVSHYTWFDWNNQSLPYHSQKLRLEPVKVQHSGAYWCQGTNSVGKGRSPLSTLTVYYSPETIGRRVAVGLGSCLAILILAICGLKLQRRWKRTQSQQGLQENSSGQSFFVRNKKVRRAPLSEGPHSLGCYNPMMEDGISYTTLRFPEMNIPRTGDAESSEMQRPPPDCDDTVTYSALHKRQVGDYENVIPDFPEDEGIHYSELIQFGVGERPQAQENVDYVILKH

SEQ ID NO: 22787 - protein, 592 aa, Homo sapiens
MEMYETLGKVGEGSYGTVMKCKHKNTGQIVAIKIFYERPEQSVNKIAMREIKFLKQFHHENLVNLIEVFRQKKKIHLVFEFIDHTVLDELQHYCHGLESKRLRKYLFQILRAIDYLHSNNIIHRDIKPENILVSQSGITKLCDFGFARTLAAPGDIYTDYVATRWYRAPELVLKDTSYGKPVDIWALGCMIIEMATGNPYLPSSSDLDLLHKIVLKVGNLSPHLQNIFSKSPIFAGVVLPQVQHPKNARKKYPKLNGLLADIVHACLQIDPADRISSSDLLHHEYFTRDGFIEKFMPELKAKLLQEAKVNSLIKPKESSKENELRKDERKTVYTNTLLSSSVLGKEIEKEKKPKEIKVRVIKVKGGRGDISEPKKKEYEGGLGQQDANENVHPMSPDTKLVTIEPPNPINPSTNCNGLKENPHCGGSVTMPPINLTNSNLMAANLSSNLFHPSVRLTERAKKRRTSSQSIGQVMPNSRQEDPGPIQSQMEKGIFNERTGHSDQMANENKRKLNFSRSDRKEFHFPELPVTIQSKDTKGMEVKQIKMLKRESKKTESSKIPTLLNVDQNQEKQEGGDGHCEGKNLKRNRFFFW

SEQ ID NO: 22788 - protein, 455 aa, Homo sapiens
MEMYETLGKVGEGSYGTVMKCKHKNTGQIVAIKIFYERPEQSVNKIAMREIKFLKQFHHENLVNLIEVFRQKKKIHLVFEFIDHTVLDELQHYCHGLESKRLRKYLFQILRAIDYLHSNNIIHRDIKPENILVSQSGITKLCDFGFARTLAAPGDIYTDYVATRWYRAPELVLKDTSYGKPVDIWALGCMIIEMATGNPYLPSSSDLDLLHKIVLKVGNLSPHLQNIFSKSPIFAGVVLPQVQHPKNARKKYPKLNGLLADIVHACLQIDPADRISSSDLLHHEYFTRDGFIEKFMPELKAKLLQEAKVNSLIKPKESSKENELRKDERKTVYTNTLLSSSVLGKEIEKEKKPKEIKVRVIKVKGGRGDISEPKKKEYEGGLGQQDANENVHPMSPDTKLVTIEPPNPINPSTNCNGLKENPHCGGSVTMPPINLTNSNLMAANLSSNLFHPSVR

SEQ ID NO: 22789 - protein, 341 aa, Homo sapiens
MPKRKVTFQGVGDEEDEDEIIVPKKKLVDPVAGSGGPGSRFKGKHSLDSDEEEDDDDGGSSKYDILASEDVEGQEAATLPSEGGVRITPFNLQEEMEEGHFDADGNYFLNRDAQIRDSWLDNIDWVKIRERPPGQRQASDSEEEDSLGQTSMSAQALLEGLLELLLPRETVAGALRRLGARGGGKGRKGPGQPSSPQRLDRLSGLADQMVARGNLGVYQETRERLAMRLKGLGCQTLGPHNPTPPPSLDMFAEELAEEELETPTPTQRGEAESRGDGLVDVMWEYKWENTGDAELYGPFTSAQMQTWVSEGYFPDGVYCRKLDPPGGQFYNSKRIDFDLYT

SEQ ID NO: 22790 - protein, 282 aa, Homo sapiens
MSGGWMAQVGAWRTGALGLALLLLLGLGLGLEAAASPLSTPTSAQAAGPSSGSCPPTKFQCRTSGLCVPLTWRCDRDLDCSDGSDEEECRIEPCTQKGQCPPPPGLPCPCTGVSDCSGGTDKKLRNCSRLACLAGELRCTLSDDCIPLTWRCDGHPDCPDSSDELGCGTNEILPEGDATTMGPPVTLESVTSLRNATTMGPPVTLESVPSVGNATSSSAGDQSGSPTAYGVIAAAAVLSASLVTATLLLLSWLRAQERLRPLGLLVAMKESLLLSEQKTSLP

SEQ ID NO: 22791 - protein, 240 aa, Homo sapiens
MSGGWMAQVGAWRTGALGLALLLLLGLGLGLEAAASPLSTPTSAQAAGIEPCTQKGQCPPPPGLPCPCTGVSDCSGGTDKKLRNCSRLACLAGELRCTLSDDCIPLTWRCDGHPDCPDSSDELGCGTNEILPEGDATTMGPPVTLESVTSLRNATTMGPPVTLESVPSVGNATSSSAGDQSGSPTAYGVIAAAAVLSASLVTATLLLLSWLRAQERLRPLGLLVAMKESLLLSEQKTSLP

SEQ ID NO: 22792 - protein, 168 aa, Homo sapiens
MAEPWGNELASAAARGDLEQLTSLLQNNVNVNAQNGFGRTALQVMKLGNPEIARRLLLRGANPDLKDRTGFAVIHDAARAGFLDTLQTLLEFQADVNIEDNEGNLPLHLAAKEGHLRVVEFLVKHTASNVGHRNHKGDTACDLARLYGRNEVVSLMQANGAGGATNLQ

SEQ ID NO: 22793 - protein, 138 aa, Homo sapiens
MREENKGMPSGGGSDEGLASAAARGLVEKVRQLLEAGADPNGVNRFGRRAIQVMMMGSARVAELLLLHGAEPNCADPATLTRPVHDAAREGFLDTLVVLHRAGARLDVRDAWGRLPVDLAEERGHRDVAGYLRTATGD

SEQ ID NO: 22794 - protein, 78 aa, Homo sapiens
MREENKGMPSGGGSDEGLASAAARGLVEKVRQLLEAGADPNGVNRFGRRAIQVAGAPGPRRQGARERGARPRRIGAGT

SEQ ID NO: 22795 - protein, 260 aa, Homo sapiens
MGLLDLCEEVFGTADLYRVLGVRREASDGEVRRGYHKVSLQVHPDRVGEGDKEDATRRFQILGKVYSVLSDREQRAVYDEQGTVDEDSPVLTQDRDWEAYWRLLFKKISLEDIQAFEKTYKGSEEELADIKQAYLDFKGDMDQIMESVLCVQYTEEPRIRNIIQQAIDAGEVPSYNAFVKESKQKMNARKRRAQEEAKEAEMSRKELGLDEGVDSLKAAIQSRQKDRQKEMDNFLAQMEAKYCKSSKGGGKKSALKKEKK

SEQ ID NO: 22796 - protein, 165 aa, Homo sapiens
MEMFQGLLLLLLLSMGGTWASREMLRPRCRPINATLAVEKEGCPVCITVNTTICAGYCPTMTRVLQGVLPALPQVVCNYRDVRFESIRLPGCPRGVNPVVSYAVALSCQCALCRRSTTDCGGPKDHPLTCDDPRFQASSSSKAPPPSLPSPSRLPGPSDTPILPQ

SEQ ID NO: 22797 - protein, 122 aa, Homo sapiens
MGFHFCIWIIFLLPPPCKKCLSPPTMNLRPPKSCGNVFYWVLVLNSGLLYKFCQTIKCRANWRPARAPRGWNEATERHQERRTQMETEMGGISTTYWHRLCTCTDRRAEKLVMDGNNCWFHK

SEQ ID NO: 22798 - protein, 297 aa, Homo sapiens
MEDYTKIEKIGEGTYGVVYKGRHKTTGQVVAMKKIRLESEEEGVPSTAIREISLLKELRHPNIVSLQDVLMQDSRLYLIFEFLSMDLKKYLDSIPPGQYMDSSLVKSYLYQILQGIVFCHSRRVLHRDLKPQNLLIDDKGTIKLADFGLARAFGIPIRVYTHEVVTLWYRSPEVLLGSARYSTPVDIWSIGTIFAELATKKPLFHGDSEIDQLFRIFRALGTPNNEVWPEVESLQDYKNTFPKWKPGSLASHVKNLDENGLDLLSKMLIYDPAKRISGKMALNHPYFNDLDNQIKKM

SEQ ID NO: 22799 - protein, 240 aa, Homo sapiens
MEDYTKIEKIGEGTYGVVYKGRHKTTGQVVAMKKIRLESEEEGVPSTAIREISLLKELRHPNIVSLQDVLMQDSRLYLIFEFLSMDLKKYLDSIPPGQYMDSSLVKVVTLWYRSPEVLLGSARYSTPVDIWSIGTIFAELATKKPLFHGDSEIDQLFRIFRALGTPNNEVWPEVESLQDYKNTFPKWKPGSLASHVKNLDENGLDLLSKMLIYDPAKRISGKMALNHPYFNDLDNQIKKM

SEQ ID NO: 22800 - protein, 566 aa, Homo sapiens
MFVSDFRKEFYEVVQSQRVLLFVASDVDALCACKILQALFQCDHVQYTLVPVSGWQELETAFLEHKEQFHYFILINCGANVDLLDILQPDEDTIFFVCDTHRPVNVVNVYNDTQIKLLIKQDDDLEVPAYEDIFRDEEEDEEHSGNDSDGSEPSEKRTRLEEEIVEQTMRRRQRREWEARRRDILFDYEQYEYHGTSSAMVMFELAWMLSKDLNDMLWWAIVGLTDQWVQDKITQMKYVTDVGVLQRHVSRHNHRNEDEENTLSVDCTRISFEYDLRLVLYQHWSLHDSLCNTSYTAARFKLWSVHGQKRLQEFLADMGLPLKQVKQKFQAMDISLKENLREMIEESANKFGMKDMRVQTFSIHFGFKHKFLASDVVFATMSLMESPEKDGSGTDHFIQALDSLSRSNLDKLYHGLELAKKQLRATQQTIASCLCTNLVISQGPFLYCSLMEGTPDVMLFSRPASLSLLSKHLLKSFVCSTKNRRCKLLPLVMAAPLSMEHGTVTVVGIPPETDSSDRKNFFGRAFEKAAESTSSRMLHNHFDLSVIELKAEDRSKFLDALISLLS

SEQ ID NO: 22801 - protein, 520 aa, Homo sapiens
MFVSDFRKEFYEVVQSQRVLLFVASDVDALCACKILQALFQCDHVQYTLVPVSGWQELETAFLEHKEQIKLLIKQDDDLEVPAYEDIFRDEEEDEEHSGNDSDGSEPSEKRTRLEEEIVEQTMRRRQRREWEARRRDILFDYEQYEYHGTSSAMVMFELAWMLSKDLNDMLWWAIVGLTDQWVQDKITQMKYVTDVGVLQRHVSRHNHRNEDEENTLSVDCTRISFEYDLRLVLYQHWSLHDSLCNTSYTAARFKLWSVHGQKRLQEFLADMGLPLKQVKQKFQAMDISLKENLREMIEESANKFGMKDMRVQTFSIHFGFKHKFLASDVVFATMSLMESPEKDGSGTDHFIQALDSLSRSNLDKLYHGLELAKKQLRATQQTIASCLCTNLVISQGPFLYCSLMEGTPDVMLFSRPASLSLLSKHLLKSFVCSTKNRRCKLLPLVMAAPLSMEHGTVTVVGIPPETDSSDRKNFFGRAFEKAAESTSSRMLHNHFDLSVIELKAEDRSKFLDALISLLS

SEQ ID NO: 22802 - protein, 598 aa, Homo sapiens
MFVSDFRKEFYEVVQSQRVLLFVASDVDALCACKILQALFQCDHVQYTLVPVSGWQELETAFLEHKEQFHYFILINCGANVDLLDILQPDEDTIFFVCDTHRPVNVVNVYNDTQIKLLIKQDDDLEVPAYEDIFRDEEEDEEHSGNDSDGSEPSEKRTRLEEEIVEQTMRRRQRREWEARSGSGSEPVAAALEKSSRLFAGPMSDRTAPRSPRRDILFDYEQYEYHGTSSAMVMFELAWMLSKDLNDMLWWAIVGLTDQWVQDKITQMKYVTDVGVLQRHVSRHNHRNEDEENTLSVDCTRISFEYDLRLVLYQHWSLHDSLCNTSYTAARFKLWSVHGQKRLQEFLADMGLPLKQVKQKFQAMDISLKENLREMIEESANKFGMKDMRVQTFSIHFGFKHKFLASDVVFATMSLMESPEKDGSGTDHFIQALDSLSRSNLDKLYHGLELAKKQLRATQQTIASCLCTNLVISQGPFLYCSLMEGTPDVMLFSRPASLSLLSKHLLKSFVCSTKNRRCKLLPLVMAAPLSMEHGTVTVVGIPPETDSSDRKNFFGRAFEKAAESTSSRMLHNHFDLSVIELKAEDRSKFLDALISLLS

SEQ ID NO: 22803 - protein, 223 aa, Homo sapiens
MTWRHHVRLLFTVSLALQIINLGNSYQREKHNGGREEVTKVATQKHRQSPLNWTSSHFGEVTGSAEGWGPEEPLPYSWAFGEGASARPRCCRNGGTCVLGSFCVCPAHFTGRYCEHDQRRSECGALEHGAWTLRACHLCRCIFGALHCLPLQTPDRCDPKDFLASHAHGPSAGGAPSLLLLLPCALLHRLLRPDAPAHPRSLVPSVLQRERRPCGRPGLGHRL

SEQ ID NO: 22804 - protein, 560 aa, Homo sapiens
MPQTRSQAQATISFPKRKLSRALNKAKNSSDAKLEPTNVQTVTCSPRVKALPLSPRKRLGDDNLCNTPHLPPCSPPKQGKKENGPPHSHTLKGRRLVFDNQLTIKSPSKRELAKVHQNKILSSVRKSQEITTNSEQRCPLKKESACVRLFKQEGTCYQQAKLVLNTAVPDRLPAREREMDVIRNFLREHICGKKAGSLYLSGAPGTGKTACLSRILQDLKKELKGFKTIMLNCMSLRTAQAVFPAIAQEICQEEVSRPAGKDMMRKLEKHMTAEKGPMIVLVLDEMDQLDSKGQDVLYTLFEWPWLSNSHLVLIGIANTLDLTDRILPRLQAREKCKPQLLNFPPYTRNQIVTILQDRLNQVSRDQVLDNAAVQFCARKVSAVSGDVRKALDVCRRAIEIVESDVKSQTILKPLSECKSPSEPLIPKRVGLIHISQVISEVDGNRMTLSQEGAQDSFPLQQKILVCSLMLLIRQLKIKEVTLGKLYEAYSKVCRKQQVAAVDQSECLSLSGLLEARGILGLKRNKETRLTKVFFKIEEKEIEHALKDKALIGNILATGLP

SEQ ID NO: 22805 - protein, 191 aa, Homo sapiens
MQTIKCVVVGDGAVGKTCLLISYTTNKFPSEYVPTVFDNYAVTVMIGGEPYTLGLFDTAGQEDYDRLRPLSYPQTDVFLVCFSVVSPSSFENVKEKWVPEITHHCPKTPFLLVGTQIDLRDDPSTIEKLAKNKQKPITPETAEKLARDLKAVKYVECSALTQKGLKNVFDEAILAALEPPEPKKSRRCVLL

SEQ ID NO: 22806 - protein, 191 aa, Homo sapiens
MQTIKCVVVGDGAVGKTCLLISYTTNKFPSEYVPTVFDNYAVTVMIGGEPYTLGLFDTAGQEDYDRLRPLSYPQTDVFLVCFSVVSPSSFENVKEKWVPEITHHCPKTPFLLVGTQIDLRDDPSTIEKLAKNKQKPITPETAEKLARDLKAVKYVECSALTQRGLKNVFDEAILAALEPPETQPKRKCCIF

SEQ ID NO: 22807 - protein, 258 aa, Homo sapiens
MLVLYGHSTQDLPETNARVVGGTEAGRNSWPSQISLQYRSGGSRYHTCGGTLIRQNWVMTAAHCVDYQKTFRVVAGDHNLSQNDGTEQYVSVQKIVVHPYWNSDNVAAGYDIALLRLAQSVTLNSYVQLGVLPQEGAILANNSPCYITGWGKTKTNGQLAQTLQQAYLPSVDYAICSSSSYWGSTVKNTMVCAGGDGVRSGCQGDSGGPLHCLVNGKYSVHGVTSFVSSRGCNVSRKPTVFTQVSAYISWINNVIASN

SEQ ID NO: 22808 - protein, 398 aa, Homo sapiens
MALLRRPTVSSDLENIDTGVNSKVKSHVTIRRTVLEEIGNRVTTRAAQVAKKAQNTKVPVQPTKTTNVNKQLKPTASVKPVQMEKLAPKGPSPTPEDVSMKEENLCQAFSDALLCKIEDIDNEDWENPQLCSDYVKDIYQYLRQLEVLQSINPHFLDGRDINGRMRAILVDWLVQVHSKFRLLQETLYMCVGIMDRFLQVQPVSRKKLQLVGITALLLASKYEEMFSPNIEDFVYITDNAYTSSQIREMETLILKELKFELGRPLPLHFLRRASKAGEVDVEQHTLAKYLMELTLIDYDMVHYHPSKVAAAASCLSQKVLGQGKWNLKQQYYTGYTENEVLEVMQHMAKNVVKVNENLTKFIAIKNKYASSKLLKISMIPQLNSKAVKDLASPLIGRS

SEQ ID NO: 22809 - protein, 786 aa, Homo sapiens
MGSGGVVHCRCAKCFCYPTKRRIRRRPRNLTILSLPEDVLFHILKWLSVEDILAVRAVHSQLKDLVDNHASVWACASFQELWPSPGNLKLFERAAEKGNFEAAVKLGIAYLYNEGLSVSDEARAEVNGLKASRFFSLAERLNVGAAPFIWLFIRPPWSVSGSCCKAVVHESLRAECQLQRTHKASILHCLGRVLSLFEDEEKQQQAHDLFEEAAHQGCLTSSYLLWESDRRTDVSDPGRCLHSFRKLRDYAAKGCWEAQLSLAKACANANQLGLEVRASSEIVCQLFQASQAVSKQQVFSVQKGLNDTMRYILIDWLVEVATMKDFTSLCLHLTVECVDRYLRRRLVPRYRLQLLGIACMVICTRFISKEILTIREAVWLTDNTYKYEDLVRMMGEIVSALEGKIRVPTVVDYKEVLLTLVPVELRTQHLCSFLCELSLLHTSLSAYAPARLAAAALLLARLTHGQTQPWTTQLWDLTGFSYEDLIPCVLSLHKKCFHDDAPKDYRQVSLTAVKQRFEDKRYGEISQEEVLSYSQLCAALGVTQDSPDPPTFLSTGEIHAFLSSPSGRRTKRKRENSLQEDRGSFVTTPTAELSSQEETLLGSFLDWSLDCCSGYEGDQESEGEKEGDVTAPSGILDVTVVYLNPEQHCCQESSDEEACPEDKGPQDPQALALDTQIPATPGPKPLVRTSREPGKDVTTSGYSSVSTASPTSSVDGGLGALPQPTSVLSLDSDSHTQPCHHQARKSCLQCRPPSPPESSVPQQQVKRINLCIHSEEEDMNLGLVRL

SEQ ID NO: 22810 - protein, 323 aa, Homo sapiens
MWPLVAALLLGSACCGSAQLLFNKTKSVEFTFCNDTVVIPCFVTNMEAQNTTEVYVKWKFKGRDIYTFDGALNKSTVPTDFSSAKIEVSQLLKGDASLKMDKSDAVSHTGNYTCEVTELTREGETIIELKYRVVSWFSPNENILIVIFPIFAILLFWGQFGIKTLKYRSGGMDEKTIALLVAGLVITVIVIVGAILFVPGEYSLKNATGLGLIVTSTGILILLHYYVFSTAIGLTSFVIAILVIQVIAYILAVVGLSLCIAACIPMHGPLLISGLSILALAQLLGLVYMKFVASNQKTIQPPRKAVEEPLNAFKESKGMMNDE

SEQ ID NO: 22811 - protein, 292 aa, Homo sapiens
MWPLVAALLLGSACCGSAQLLFNKTKSVEFTFCNDTVVIPCFVTNMEAQNTTEVYVKWKFKGRDIYTFDGALNKSTVPTDFSSAKIEVSQLLKGDASLKMDKSDAVSHTGNYTCEVTELTREGETIIELKYRVVSWFSPNENILIVIFPIFAILLFWGQFGIKTLKYRSGGMDEKTIALLVAGLVITVIVIVGAILFVPGEYSLKNATGLGLIVTSTGILILLHYYVFSTAIGLTSFVIAILVIQVIAYILAVVGLSLCIAACIPMHGPLLISGLSILALAQLLGLVYMKFV

SEQ ID NO: 22812 - protein, 305 aa, Homo sapiens
MWPLVAALLLGSACCGSAQLLFNKTKSVEFTFCNDTVVIPCFVTNMEAQNTTEVYVKWKFKGRDIYTFDGALNKSTVPTDFSSAKIEVSQLLKGDASLKMDKSDAVSHTGNYTCEVTELTREGETIIELKYRVVSWFSPNENILIVIFPIFAILLFWGQFGIKTLKYRSGGMDEKTIALLVAGLVITVIVIVGAILFVPGEYSLKNATGLGLIVTSTGILILLHYYVFSTAIGLTSFVIAILVIQVIAYILAVVGLSLCIAACIPMHGPLLISGLSILALAQLLGLVYMKFVASNQKTIQPPRNN

SEQ ID NO: 22813 - protein, 311 aa, Homo sapiens
MWPLVAALLLGSACCGSAQLLFNKTKSVEFTFCNDTVVIPCFVTNMEAQNTTEVYVKWKFKGRDIYTFDGALNKSTVPTDFSSAKIEVSQLLKGDASLKMDKSDAVSHTGNYTCEVTELTREGETIIELKYRVVSWFSPNENILIVIFPIFAILLFWGQFGIKTLKYRSGGMDEKTIALLVAGLVITVIVIVGAILFVPGEYSLKNATGLGLIVTSTGILILLHYYVFSTAIGLTSFVIAILVIQVIAYILAVVGLSLCIAACIPMHGPLLISGLSILALAQLLGLVYMKFVASNQKTIQPPRKAVEEPLN

SEQ ID NO: 22814 - protein, 270 aa, Homo sapiens
MMLRLLSSLLLVAVASGYGPPSSHSSSRVVHGEDAVPYSWPWQVSLQYEKSGSFYHTCGGSLIAPDWVVTAGHCISRDLTYQVVLGEYNLAVKEGPEQVIPINSEELFVHPLWNRSCVACGNDIALIKLSRSAQLGDAVQLASLPPAGDILPNKTPCYITGWGRLYTNGPLPDKLQQARLPVVDYKHCSRWNWWGSTVKKTMVCAGGYIRSGCNGDSGGPLNCPTEDGGWQVHGVTSFVSAFGCNFIWKPTVFTRVSAFIDWIEETIASH

SEQ ID NO: 22815 - protein, 139 aa, Homo sapiens
MDSLTERCRPQPLAALGPADAQLHGPAAAGGGVGPRVMLSSLCREHPWQGRCPPIPAHGKEVRQLRHLHRTRPPDTHQDMARGPGLPHTHGLPARPSHVRHQTEPVQVASRWHVPSDGLCRPCHVHQLLHPPLVPALGA

SEQ ID NO: 22816 - protein, 193 aa, Homo sapiens
MPVWGGGNKCGACGRTVYHAEEVQCDGRSFHRCCFLCMVCRKNLDSTTVAIHDEEIYCKSCYGKKYGPKGYGYGQGAGTLNMDRGERLGIKPESVQPHRPTTNPNTSKFAQKYGGAEKCSRCGDSVYAAEKIIGAGKPWHKNCFRCAKCGKSLESTTLTEKEGEIYCKGCYAKNFGPKGFGYGQGAGALVHAQ

SEQ ID NO: 22817 - protein, 263 aa, Homo sapiens
MAFLWLLSCWALLGTTFGCGVPAIHPVLSGLSRIVNGEDAVPGSWPWQVSLQDKTGFHFCGGSLISEDWVVTAAHCGVRTSDVVVAGEFDQGSDEENIQVLKIAKVFKNPKFSILTVNNDITLLKLATPARFSQTVSAVCLPSADDDFPAGTLCATTGWGKTKYNANKTPDKLQQAALPLLSNAECKKSWGRRITDVMICAGASGVSSCMGDSGGPLVCQKDGAWTLVGIVSWGSRTCSTTTPAVYARVAKLIPWVQKILAAN

SEQ ID NO: 22818 - protein, 342 aa, Homo sapiens
MAEHDYHEDYGFSSFNDSSQEEHQDFLQFSKVFLPCMYLVVFVCGLVGNSLVLVISIFYHKLQSLTDVFLVNLPLADLVFVCTLPFWAYAGIHEWVFGQVMCKSLLGIYTINFYTSMLILTCITVDRFIVVVKATKAYNQQAKRMTWGKVTSLLIWVISLLVSLPQIIYGNVFNLDKLICGYHDEAISTVVLATQMTLGFFLPLLTMIVCYSVIIKTLLHAGGFQKHRSLKIIFLVMAVFLLTQMPFNLMKFIRSTHWEYYAMTSFHYTIMVTEAIAYLRACLNPVLYAFVSLKFRKNFWKLVKDIGCLPYLGVSHQWKSSEDNSKTFSASHNVEATSMFQL

SEQ ID NO: 22819 - protein, 466 aa, Homo sapiens
MRLRTRKASQQSNQIQTQRTARAKRKYSEVDDSLPSGGEKPSKNETGLLSSIKKFIKGSTPKEERENPSKRSRIERDIDNNLITSTPRAGEKPNKQISRVRRKSQVNGEAGSYEMTNQHVKQNGKLEDNPSSGSPPRTTLLGTIFSPVFNFFSPANKNGTSGSDSPGQAVEAEEIVKQLDMEQVDEITTSTTTSTNGAAYSNQAVQVRPSLNNGLEEAEETVNRDIPPLTAPVTPDSGYSSAHAEATYEEDWEVFDPYYFIKHVPPLTEEQLNRKPALPLKTRSTPEFSLVLDLDETLVHCSLNELEDAALTFPVLFQDVIYQVYVRLRPFFREFLERMSQMYEIILFTASKKVYADKLLNILDPKKQLVRHRLFREHCVCVQGNYIKDLNILGRDLSKTIIIDNSPQAFAYQLSNGIPIESWFMDKNDNELLKLIPFLEKLVELNEDVRPHIRDRFRLHDLLPPD

SEQ ID NO: 22820 - protein, 394 aa, Homo sapiens
MRLRTRKASQQSNQIQTQRTARAKRKYSEVDDSLPSGGEKPSKNETGLLSSIKKFIKGSTPKEERENPSKRSRIERDIDNNLITSTPRAGEKPNKQISRVRRKSQVNGEAGSYEMTNQHVKQNGKLEDNPSSGSPPRTTLLGTIFSPVFNFFSPANKNAPVTPDSGYSSAHAEATYEEDWEVFDPYYFIKHVPPLTEEQLNRKPALPLKTRSTPEFSLVLDLDETLVHCSLNELEDAALTFPVLFQDVIYQVYVRLRPFFREFLERMSQMYEIILFTASKKVYADKLLNILDPKKQLVRHRLFREHCVCVQGNYIKDLNILGRDLSKTIIIDNSPQAFAYQLSNGIPIESWFMDKNDNELLKLIPFLEKLVELNEDVRPHIRDRFRLHDLLPPD

SEQ ID NO: 22821 - protein, 530 aa, Homo sapiens
MAAYQQEEQMQLPRADAIRSRLIDTFSLIEHLQGLSQAVPRHTIRELLDPSRQKKLVLGDQHQLVRFSIKPQRIEQISHAQRLLSRLHVRCSQRPPLSLWAGWVLECPLFKNFIIFLVFLNTIILMVEIELLESTNTKLWPLKLTLEVAAWFILLIFILEILLKWLSNFSVFWKSAWNVFDFVVTMLSLLPEVVVLVGVTGQSVWLQLLRICRVLRSLKLLAQFRQIQIIILVLVRALKSMTFLLMLLLIFFYIFAVTGVYVFSEYTRSPRQDLEYHVFFSDLPNSLVTVFILFTLDHWYALLQDVWKVPEVSRIFSSIYFILWLLLGSIIFRSIIVAMMVTNFQNIRKELNEEMARREVQLKADMFKRQIIQRRKNMSHEALTSSHSKIEDSSRGASQQRESLDLSEVSEVESNYGATEEDLITSASKTEETLSKKREYQSSSCVSSTSSSYSSSSESRFSESIGRLDWETLVHENLPGLMEMDQDDRVWPRDSLFRYFELLEKLQYNLEERKKLQEFAVQALMNLEDK

SEQ ID NO: 22822 - protein, 528 aa, Homo sapiens
MAAYQQEEQMQLPRADAIRSRLIDTFSLIEHLQGLSQAVPRHTIRELLDPSRQKKLVLGDQHQLVRFSIKPQRIEQISHAQRLLSRLHVRCSQRPPLSLWAGWVLECPLFKNFIIFLVFLNTIILMVEIELLESTNTKLWPLKLTLEVAAWFILLIFILEILLKWLSNFSVFWKSAWNVFDFVVTMLSLLPEVVVLVGVTGQSVWLQLLRICRVLRSLKLLAQFRQIQIIILVLVRALKSMTFLLMLLLIFFYIFAVTGVYVFSEYTRSPRQDLEYHVFFSDLPNSLVTVFILFTLDHWYALLQDVWKVPEVSRIFSSIYFILWLLLGSIIFRSIIVAMMVTNFQNIRKELNEEMARREVQLKADMFKRQIIQRRKNMSHEALTSSHSKIEDRGASQQRESLDLSEVSEVESNYGATEEDLITSASKTEETLSKKREYQSSSCVSSTSSSYSSSSESRFSESIGRLDWETLVHENLPGLMEMDQDDRVWPRDSLFRYFELLEKLQYNLEERKKLQEFAVQALMNLEDK

SEQ ID NO: 22823 - protein, 414 aa, Homo sapiens
MAAYQQEEQMQLPRADAIRSRLIDTFSLIEHLQGLSQAVPRHTIRELLDPSRQKKLVLGDQHQLVRFSIKPQRIEQISHAQRLLSRLHVRCSQRPPLSLWAGWVLECPLFKNFIIFLVFLNTIILMVEIELLESTNTKLWPLKLTLEVAAWFILLIFILEILLKWLSNFSVFWKSAWNVFDFVVTMLSLLPEVVVLVGVTGQSVWLQLLRICRVLRSLKLLAQFRQIQIIILVLVRALKSMTFLLMLLLIFFYIFAVTGVYVFSEYTRSPRQDLEYHVFFSDLPNSLVTVFILFTLDHWYALLQDVWKVPEVSRIFSSIYFILWLLLGSIIFRSIIVAMMVTNFQNIRKELNEEMARREVQLKADMFKRQIIQRRKNMSHEALTSSHSKIEDRSFGLGDSCARKSARANGNGSG

SEQ ID NO: 22824 - protein, 199 aa, Homo sapiens
MAAYQQEEQMQLPRADAIRSRLIDTFSLIEHLQGLSQAVPRHTIRELLDPSRQKKLVLGDQHQLVRFSIKPQRIEQISHAQRLLSRLHVRCSQRPPLSLWAGWVLECPLFKNFIIFLVFLNTIILMVEIELLESTNTKLWPLKLTLEVAAWFILLIFILEILLKWLSNFSVFWKSAWNVFDFVVTMLVRIEILRVRLVG

SEQ ID NO: 22825 - protein, 951 aa, Homo sapiens
MSAREVAVLLLWLSCYGSALWRYSTNSPNYRIFSTRSTIKLEYEGTLFTEWSVPETCFVLNKSSPTTELRCSSPGVHAIKPIVTGPDEEERYLFVESSHTCFLWYYRVRHFFNNFTQLITVWAYDPESADPDELLGNAEEPSINSIVLSTQMATLGQKPVIHTVLKRKVYSSNEKMRRGTWRIVVPMTKDDALKEIRGNQVTFQDCFIADFLILLTFPLLTIPEIPGYLPISSPRGSQLMASWDACVVASAVLVTDMETFHTTDSFKSWTRIRVPPDILSDDERRSVAHVILSRDGIVFLINGVLYIKSFRGFIRLGGIVNLPDGGITGISSRKWCWVNYLLKAKGRRSTFAVWTENEIYLGSILLKFARLVTTTELKNILSLSVTATLTIDRVEYTGHPLEIAVFLNYCTVCNVTKKIFLVIYNEDTKQWVSQDFTLDAPIDSVTMPHFTFSALPGLLLWNKHSIYYCYHNFTFTGILQTPAGHGNLSMLSNDSIIHEVFIDYYGDILVKMENNVIFYSKINTRDAVKLHLWTNYTTRAFIFLSTSGQTYFLYALDDGTIQIQDYPLHLEAQSIAFTTKDKCPYMAFHNNVAHVFYFLDKGEALTVWTQIVYPENTGLYVIVESYGPKILQESHEISFEAAFGYCTKTLTLTFYQNVDYERISDYFETQDKHTGLVLVQFRPSEYSKACPIAQKVFQIAVGCDDKKFIAIKGFSKKGCHHHDFSYVIEKSYLRHQPSKNLRVRYIWGEYGCPLRLDFTEKFQPVVQLFDDNGYVKDVEANFIVWEIHGRDDYSFNNTMAQSGCLHEAQTWKSMIELNKHLPLEEVWGPENYKHCFSYAIGKPGDLNQPYEIINSSNGNHIFWPMGHSGMYVFRVKILDPNYSFCNLTAMFAIETFGLIPSPSVYLVASFLFVLMLLFFTILVLSYFRYMRIYRRYIYEPLHKPQRKRKKN

SEQ ID NO: 22826 - protein, 832 aa, Homo sapiens
MSAREVAVLLLWLSCYGSALWRYSTNSPNYRIFSTRSTIKLEYEGTLFTEWSVPETCFVLNKSSPTTELRCSSPGVHAIKPIVTGPDEEERYLFVESSHTCFLWYYRVRHFFNNFTQLITVWAYDPESADPDELLGNAEEPSINSIVLSTQMATLGQKPVIHTVLKRKVYSSNEKMRRGTWRIVVPMTKDDALKEIRGNQVTFQDCFIADFLILLTFPLLTIPEIPGYLPISSPRGSQLMASWDACVVASAVLVTDMETFHTTDSFKSWTRIRVPPDILSDDERRSVAHVILSRDGIVFLINGVLYIKSFRGFIRLGGIVNLPDGGITGISSRKWCWVNYLLKAKGRRSTFAVWTENEIYLGSILLKFARLVTTTELKNILSLSVTATLTIDRVEYTGHPLEIAVFLNYCTVCNVTKKIFLVIYNEDTKQWVSQDFTLDAPIDSVTMPHFTFSALPGLLLWNKHSIYYCYHNFTFTGILQTPAGHGNLSMLSNDSIIHEVFIDYYGDILVKMENNVIFYSKINTRDAVKLHLWTNYTTRAFIFLSTSGQTYFLYALDDGTIQIQDYPLHLEAQSIAFTTKDKCPYMAFHNNVAHVFYFLDKGEALTVWTQIVYPENTGLYVIVESYGPKILQESHEISFEAAFGYCTKTLTLTFYQNVDYERISDYFETQDKHTGLVLVQFRPSEYSKACPIAQKVFQIAVGCDDKKFIAIKGFSKKGCHHHDFSYVIEKSYLRHQPSKNLRVRYIWGEYGCPLRLDFTEKFQPVVQLFDDNGYVKDVEANFIVWEIHGRDDYSFNNTMAQSGCLHEAQTWKSMIELNKHLPLEEVWGPEFL

SEQ ID NO: 22827 - protein, 800 aa, Homo sapiens
MATLGQKPVIHTVLKRKVYSSNEKMRRGTWRIVVPMTKDDALKEIRGNQVTFQDCFIADFLILLTFPLLTIPEIPGYLPISSPRGSQLMASWDACVVASAVLVTDMETFHTTDSFKSWTRIRVPPDILSDDERRSVAHVILSRDGIVFLINGVLYIKSFRGFIRLGGIVNLPDGGITGISSRKWCWVNYLLKAKGRRSTFAVWTENEIYLGSILLKFARLVTTTELKNILSLSVTATLTIDRVEYTGHPLEIAVFLNYCTVCNVTKKIFLVIYNEDTKQWVSQDFTLDAPIDSVTMPHFTFSALPGLLLWNKHSIYYCYHNFTFTGILQTPAGHGNLSMLSNDSIIHEVFIDYYGDILVKMENNVIFYSKINTRDAVKLHLWTNYTTRAFIFLSTSGQTYFLYALDDGTIQIQDYPLHLEAQSIAFTTKDKCPYMAFHNNVAHVFYFLDKGEALTVWTQIVYPENTGLYVIVESYGPKILQESHEISFEAAFGYCTKTLTLTFYQNVDYERISDYFETQDKHTGLVLVQFRPSEYSKACPIAQKVFQIAVGCDDKKFIAIKGFSKKGCHHHDFSYVIEKSYLRHQPSKNLRVRYIWGEYGCPLRLDFTEKFQPVVQLFDDNGYVKDVEANFIVWEIHGRDDYSFNNTMAQSGCLHEAQTWKSMIELNKHLPLEEVWGPENYKHCFSYAIGKPGDLNQPYEIINSSNGNHIFWPMGHSGMYVFRVKILDPNYSFCNLTAMFAIETFGLIPSPSVYLVASFLFVLMLLFFTILVLSYFRYMRIYRRYIYEPLHKPQRKRKKN

SEQ ID NO: 22828 - protein, 782 aa, Homo sapiens
MDSSIHLSSLISRHDDEATRTSTSEGLEEGEVEGETLLIVESEDQASVDLSHDQSGDSLNSDEGDVSWMEEQLSYFCDKCQKWIPASQLREQLSYLKGDNFFRFTCSDCSADGKEQYERLKLTWQQVVMLAMYNLSLEGSGRQGYFRWKEDICAFIEKHWTFLLGNRKKTSTWWSTVAGCLSVGSPMYFRSGAQEFGEPGWWKLVHNKPPTMKPEGEKLSASTLKIKAASKPTLDPIITVEGLRKRASRNPVESAMELKEKRSRTQEAKDIRRAQKEAAGFLDRSTSSTPVKFISRGRRPDVILEKGEVIDFSSLSSSDRTPLTSPSPSPSLDFSAPGTPASHSATPSLLSEADLIPDVMPPQALFHDDDEMEGDGVIDPGMEYVPPPAGSVASGPVVGVRKKVRGPEQIKQEVESEEEKPDRMDIDSEDTDSNTSLQTRAREKRKPQLEKDTKPKEPRYTPVSIYEEKLLLKRLEACPGAVAMTPEARRLKRKLIVRQAKRDRGLPLFDLDQVVNAALLLVDGIYGAKEGGISRLPAGQATYRTTCQDFRILDRYQTSLPSRKGFRHQTTKFLYRLVGSEDMAVDQSIVSPYTSRILKPYIRRDYETKPPKLQLLSQIRSHLHRSDPHWTPEPDAPLDYCYVRPNHIPTINSMCQEFFWPGIDLSECLQYPDFSVVVLYKKVIIAFGFMVPDVKYNEAYISFLFVHPEWRRAGIATFMIYHLIQTCMGKDVTLHVSASNPAMLLYQKFGFKTEEYVLDFYDKYYPLESTECKHAFFLRLRR

SEQ ID NO: 22829 - protein, 654 aa, Homo sapiens
MLAMYNLSLEGSGRQGYFRWKEDICAFIEKHWTFLLGNRKKTSTWWSTVAGCLSVGSPMYFRSGAQEFGEPGWWKLVHNKPPTMKPEGEKLSASTLKIKAASKPTLDPIITVEGLRKRASRNPVESAMELKEKRSRTQEAKDIRRAQKEAAGFLDRSTSSTPVKFISRGRRPDVILEKGEVIDFSSLSSSDRTPLTSPSPSPSLDFSAPGTPASHSATPSLLSEADLIPDVMPPQALFHDDDEMEGDGVIDPGMEYVPPPAGSVASGPVVGVRKKVRGPEQIKQEVESEEEKPDRMDIDSEDTDSNTSLQTRAREKRKPQLEKDTKPKEPRYTPVSIYEEKLLLKRLEACPGAVAMTPEARRLKRKLIVRQAKRDRGLPLFDLDQVVNAALLLVDGIYGAKEGGISRLPAGQATYRTTCQDFRILDRYQTSLPSRKGFRHQTTKFLYRLVGSEDMAVDQSIVSPYTSRILKPYIRRDYETKPPKLQLLSQIRSHLHRSDPHWTPEPDAPLDYCYVRPNHIPTINSMCQEFFWPGIDLSECLQYPDFSVVVLYKKVIIAFGFMVPDVKYNEAYISFLFVHPEWRRAGIATFMIYHLIQTCMGKDVTLHVSASNPAMLLYQKFGFKTEEYVLDFYDKYYPLESTECKHAFFLRLRR

SEQ ID NO: 22830 - protein, 189 aa, Homo sapiens; identical to SEQ ID NO: 14927

SEQ ID NO: 22831 - protein, 78 aa, Homo sapiens
MNLCLSALLFFLVILLPSGKGMFGNDGVKVRTCTSQKAVCFFGCPPGYRWIAFCHNILSCCKNMTRFQPPQAKDPWVH

SEQ ID NO: 22832 - protein, 662 aa, Homo sapiens
MMEPEEYRERGREMVDYICQYLSTVRERRVTPDVQPGYLRAQLPESAPEDPDSWDSIFGDIERIIMPGVVHWQSPHMHAYYPALTSWPSLLGDMLADAINCLGFTWASSPACTELEMNVMDWLAKMLGLPEHFLHHHPSSQGGGVLQSTVSESTLIALLAARKNKILEMKTSEPDADESCLNARLVAYASDQAHSSVEKAGLISLVKMKFLPVDDNFSLRGEALQKAIEEDKQRGLVPVFVCATLGTTGVCAFDCLSELGPICAREGLWLHIDAAYAGTAFLCPEFRGFLKGIEYADSFTFNPSKWMMVHFDCTGFWVKDKYKLQQTFSVNPIYLRHANSGVATDFMHWQIPLSRRFRSVKLWFVIRSFGVKNLQAHVRHGTEMAKYFESLVRNDPSFEIPAKRHLGLVVFRLKGPNCLTENVLKEIAKAGRLFLIPATIQDKLIIRFTVTSQFTTRDDILRDWNLIRDAATLILSQHCTSQPSPRVGNLISQIRGARAWACGTSLQSVSGAGDDPVQARKIIKQPQRVGAGPMKRENGLHLETLLDPVDDCFSEEAPDATKHKLSSFLFSYLSVQTKKKTVRSLSCNSVPVSAQKPLPTEASVKNGGSSRVRIFSRFPEDMMMLKKSAFKKLIKFYSVPSFPECSSQCGLQLPCCPLQAMV

SEQ ID NO: 22833 - protein, 629 aa, Homo sapiens
MMEPEEYRERGREMVDYICQYLSTVRERRVTPDVQPGYLRAQLPESAPEDPDSWDSIFGDIERIIMPGVVHWQSPHMHAYYPALTSWPSLLGDMLADAINCLGFTWASSPACTELEMNVMDWLAKMLGLPEHFLHHHPSSQGGGVLQSTVSESTLIALLAARKNKILEMKTSEPDADESCLNARLVAYASDQAHSSVEKAGLISLVKMKFLPVDDNFSLRGEALQKAIEEDKQRGLVPVFVCATLGTTGVCAFDCLSELGPICAREGLWLHIDAAYAGTAFLCPEFRGFLKGIEYADSFTFNPSKWMMVHFDCTGFWVKDKYKLQQTFSVNPIYLRHANSGVATDFMGTEMAKYFESLVRNDPSFEIPAKRHLGLVVFRLKGPNCLTENVLKEIAKAGRLFLIPATIQDKLIIRFTVTSQFTTRDDILRDWNLIRDAATLILSQHCTSQPSPRVGNLISQIRGARAWACGTSLQSVSGAGDDPVQARKIIKQPQRVGAGPMKRENGLHLETLLDPVDDCFSEEAPDATKHKLSSFLFSYLSVQTKKKTVRSLSCNSVPVSAQKPLPTEASVKNGGSSRVRIFSRFPEDMMMLKKSAFKKLIKFYSVPSFPECSSQCGLQLPCCPLQAMV

SEQ ID NO: 22834 - protein, 389 aa, Homo sapiens
MRVLVRRCWGPPLAHGARRGRPSPQWRALARLGWEDCRDSRVREKPPWRVLFFGTDQFAREALRALHAARENKEEELIDKLEVVTMPSPSPKGLPVKQYAVQSQLPVYEWPDVGSGEYDVGVVASFGRLLNEALILKFPYGILNVHPSCLPRWRGPAPVIHTVLHGDTVTGVTIMQIRPKRFDVGPILKQETVPVPPKSTAKELEAVLSRLGANMLISVLKNLPESLSNGRQQPMEGATYAPKISAGTSCIKWEEQTSEQIFRLYRAIGNIIPLQTLWMANTIKLLDLVEVNSSVLADPKLTGQALIPGSVIYHKQSQILLVYCKDGWIGVRSVMLKKSLTATDFYNGYLHPWYQKNSQAQPSQCRFQTLRLPTKKKQKKTVAMQQCIE

SEQ ID NO: 22835 - protein, 144 aa, Homo sapiens
MRVLVRRCWGPPLAHGARRGRPSPQWRALARLGWEDCRDSRVREKPPWRVLFFGTDQFAREALRALHAARENKEEELIDKLEVVTMPSPSPKGLPVKQYAVQSQLPVYEWPDVGSGEYDVGVVASFGRLLNEALILKFPYSFQF

SEQ ID NO: 22836 - protein, 970 aa, Homo sapiens
MANETQKVGAIHFPFPFTPYSIQEDFMAELYRVLEAGKIGIFESPTGTGKSLSLICGALSWLRDFEQKKREEEARLLETGTGPLHDEKDESLCLSSSCEGAAGTPRPAGEPAWVTQFVQKKEERDLVDRLKAEQARRKQREERLQQLQHRVQLKYAAKRLRQEEEERENLLRLSREMLETGPEAERLEQLESGEEELVLAEYESDEEKKVASRVDEDEDDLEEEHITKIYYCSRTHSQLAQFVHEVKKSPFGKDVRLVSLGSRQNLCVNEDVKSLGSVQLINDRCVDMQRSRHEKKKGAEEEKPKRRRQEKQAACPFYNHEQMGLLRDEALAEVKDMEQLLALGKEARACPYYGSRLAIPAAQLVVLPYQMLLHAATRQAAGIRLQDQVVIIDEAHNLIDTITGMHSVEVSGSQLCQAHSQLLQYVERYGKRLKAKNLMYLKQILYLLEKFVAVLGGNIKQNPNTQSLSQTGTELKTINDFLFQSQIDNINLFKVQRYCEKSMISRKLFGFTERYGAVFSSREQPKLAGFQQFLQSLQPRTTEALAAPADESQASTLRPASPLMHIQGFLAALTTANQDGRVILSRQGSLSQSTLKFLLLNPAVHFAQVVKECRAVVIAGGTMQPVSDFRQQLLACAGVEAERVVEFSCGHVIPPDNILPLVICSGISNQPLEFTFQKRELPQMMDEVGRILCNLCGVVPGGVVCFFPSYEYLRQVHAHWEKGGLLGRLAARKKIFQEPKSAHQVEQVLLAYSRCIQACGQERGQVTGALLLSVVGGKMSEGINFSDNLGRCVVMVGMPFPNIRSAELQEKMAYLDQTLSPRPGTPREGSGGEPVHEGRQPVHRQGHQAPEGFCQRSAPGPAICPAPCPGQAAGLDPSPCGGQSYLWPRHCCCAEVSPGEVGLFLMGNHTTAWRRALPLSCPLETVFVVGVVCGDPVTKVKPRRRVWSPECCQDPGTGVSSRRRKWGNPE

SEQ ID NO: 22837 - protein, 906 aa, Homo sapiens
MANETQKVGAIHFPFPFTPYSIQEDFMAELYRVLEAGKIGIFESPTGTGKSLSLICGALSWLRDFEQKKREEEARLLETGTGPLHDEKDESLCLSSSCEGAAGTPRPAGEPAWVTQFVQKKEERDLVDRLKAEQARRKQREERLQQLQHRVQLKYAAKRLRQEEEERENLLRLSREMLETGPEAERLEQLESGEEELVLAEYESDEEKKVASRVDEDEDDLEEEHITKIYYCSRTHSQLAQFVHEVKKSPFGKDVRLVSLGSRQNLCVNEDVKSLGSVQLINDRCVDMQRSRHEKKKGAEEEKPKRRRQEKQAACPFYNHEQMGLLRDEALAEVKDMEQLLALGKEARACPYYGSRLAIPAAQLVVLPYQMLLHAATRQAAGIRLQDQVVIIDEAHNLIDTITGMHSVEVSGSQLCQAHSQLLQYVERYGKRLKAKNLMYLKQILYLLEKFVAVLGGNIKQNPNTQSLSQTGTELKTINDFLFQSQIDNINLFKVQRYCEKSMISRKLFGFTERYGAVFSSREQPKLAGFQQFLQSLQPRTTEALAAPADESQASTLRPASPLMHIQGFLAALTTANQDGRVILSRQGSLSQSTLKFLLLNPAVHFAQVVKECRAVVIAGGTMQPVSDFRQQLLACAGVEAERVVEFSCGHVIPPDNILPLVICSGISNQPLEFTFQKRELPQMMDEVGRILCNLCGVVPGGVVCFFPSYEYLRQVHAHWEKGGLLGRLAARKKIFQEPKSAHQVEQVLLAYSRCIQACGQERGQVTGALLLSVVGGKMSEGINFSDNLGRCVVMVGMPFPNIRSAELQEKMAYLDQTLPRAPGQAPPGKALVENLCMKAVNQSIGRAIRHQKDFASVVLLDQRYARPPVLAKLPAWIRARVEVKATFGPAIAAVQKFHREKSASS

SEQ ID NO: 22838 - protein, 880 aa, Homo sapiens
MAELYRVLEAGKIGIFESPTGTGKSLSLICGALSWLRDFEQKKREEEARLLETGTGPLHDEKDESLCLSSSCEGAAGTPRPAGEPAWVTQFVQKKEERDLVDRLKAEQARRKQREERLQQLQHRVQLKYAAKRLRQEEEERENLLRLSREMLETGPEAERLEQLESGEEELVLAEYESDEEKKVASRVDEDEDDLEEEHITKIYYCSRTHSQLAQFVHEVKKSPFGKDVRLVSLGSRQNLCVNEDVKSLGSVQLINDRCVDMQRSRHEKKKGAEEEKPKRRRQEKQAACPFYNHEQMGLLRDEALAEVKDMEQLLALGKEARACPYYGSRLAIPAAQLVVLPYQMLLHAATRQAAGIRLQDQVVIIDEAHNLIDTITGMHSVEVSGSQLCQAHSQLLQYVERYGKRLKAKNLMYLKQILYLLEKFVAVLGGNIKQNPNTQSLSQTGTELKTINDFLFQSQIDNINLFKVQRYCEKSMISRKLFGFTERYGAVFSSREQPKLAGFQQFLQSLQPRTTEALAAPADESQASTLRPASPLMHIQGFLAALTTANQDGRVILSRQGSLSQSTLKFLLLNPAVHFAQVVKECRAVVIAGGTMQPVSDFRQQLLACAGVEAERVVEFSCGHVIPPDNILPLVICSGISNQPLEFTFQKRELPQMMDEVGRILCNLCGVVPGGVVCFFPSYEYLRQVHAHWEKGGLLGRLAARKKIFQEPKSAHQVEQVLLAYSRCIQACGQERGQVTGALLLSVVGGKMSEGINFSDNLGRCVVMVGMPFPNIRSAELQEKMAYLDQTLPRAPGQAPPGKALVENLCMKAVNQSIGRAIRHQKDFASVVLLDQRYARPPVLAKLPAWIRARVEVKATFGPAIAAVQKFHREKSASS

SEQ ID NO: 22839 - protein, 856 aa, Homo sapiens
MANETQKVGAIHFPFPFTPYSIQEDFMAELYRVLEAGKIGIFESPTGTGKSLSLICGALSWLRDFEQKKREEEARLLETGTGPLHDEKDESLCLSSSCEGAAGTPRPAGEPAWVTQFVQKKEERDLVDRLKAEQARRKQREERLQQLQHRVQLKYAAKRLRQEEEERENLLRLSREMLETGPEAERLEQLESGEEELVLAEYESDEEKKVASRVDEDEDDLEEEHITKIYYCSRTHSQLAQFVHEVKKSPFGKDVRLVSLGSRQNLCVNEDVKSLGSVQLINDRCVDMQRSRHEKKKGAEEEKPKRRRQEKQAACPFYNHEQMGLLRDEALAEVKDMEQLLALGKEARACPYYGSRLAIPAAQLVVLPYQMLLHAATRQAAGIRLQDQVVIIDEAHNLIDTITGMHSVEVSGSQLCQAHSQLLQYVERYGKRLKAKNLMYLKQILYLLEKFVAVLGGNIKQNPNTQSLSQTGTELKTINDFLFQSQIDNINLFKVQRYCEKSMISRKLFGFTERYGAVFSSREQPKLAGFQQFLQSLQPRTTEALAAPADESQASTLRPASPLMHIQGFLAALTTANQDGRVILSRQGSLSQSTLKFLLLNPAVHFAQVVKECRAVVIAGGTMQPVSDFRQQLLACAGVEAERVVEFSCGHVIPPDNILPLVICSGISNQPLEFTFQKRELPQMIFQEPKSAHQVEQVLLAYSRCIQACGQERGQVTGALLLSVVGGKMSEGINFSDNLGRCVVMVGMPFPNIRSAELQEKMAYLDQTLPRAPGQAPPGKALVENLCMKAVNQSIGRAIRHQKDFASVVLLDQRYARPPVLAKLPAWIRARVEVKATFGPAIAAVQKFHREKSASS

SEQ ID NO: 22840 - protein, 288 aa, Homo sapiens
MANETQKVGAIHFPFPFTPYSIQEDFMAELYRVLEAGKIGIFESPTGTGKSLSLICGALSWLRDFEQKKREEEARLLETGTGPLHDEKDESLCLSSSCEGAAGTPRPAGEPAWVTQFVQKKEERDLVDRLKAEQARRKQREERLQQLQHRVQLKYAAKRLRQEEEERENLLRLSREMLETGPEAERLEQLESGEEELVLAEYESDEEKKVASRAPSDATSSRHPPDASFPAALNFLQRTRPSSVLSEDLLMQRAVAKHPALLPWQMSSSPLRPGSEWMRMRMTWRKNT

SEQ ID NO: 22841 - protein, 708 aa, Homo sapiens
MSFKDKDERISCLEAYVTLTSKSSRFTDETEILKMSQRHSGQAGTEAGNGADSPPIVNSKYSTFRDFCSTSSFQDSGYNELKSCSFDNIDKEYLGKKEKGPTLLYEHPETSGLGLTHPLESPTQKKKCILPRKEKDKTPELCETPKISGKKCLPRRRLNVSFALLKGDFESQNSSLESSISQVINLEKNIPSSASGFSRANNFSPLVTSTLKTEEVTSCSQKLRLNFSQQKTSTIDDSKDDCSLFEVECISPIQGNNFKDSITHDFSDSSLCINDENACPELLGSSVSGTTCGTDEDIFVTPISNLVANIRFNASQILSPSPEVRGSISTPEDSGFNSLSLEKSEDSLSDQEGSFQELLQKHKGTPKVGDTIRKTRHLGRSRRLSTLREQSSQSETEEEKQIVHPDSEKRAAAASAISEGQLSSDESGDLTFSLKNLSKTPALQLVHELFMKSKRKRLQENSGHEFLEQGDGEKIAVLQCILAGLIGKKMGIEKLDILTELKYRNLKHILAMVLESLTAESLCSVWKVSRNWREIVVQDKNANRRRKFYITQLKTDSEGAVLNVEDAATRLQLLNRSALRSVQAQARIPGSQREQGSTLSPWGEVLTPLASSSVTHLSSKQEEYVKVAKTLFTDEALKPCPRCQSPAKYQPYKKRGLCSRTACGFDFCVLCLCAYHGSEECSRGAAKPRNRKDALPGSAQSKRNLKRL

SEQ ID NO: 22842 - protein, 324 aa, Homo sapiens
MASYYEILDVPRSASADDIKKAYRRKALQWHPDKNPDNKEFAEKKFKEVAEAYEVLSDKHKREIYDRYGREGLTGTGTGPSRAEAGSGGPGFTFTFRSPEEVFREFFGSGDPFAELFDDLGPFSELQNRGSRHSGPFFTFSSSFPGHSDFSSSSFSFSPGAGAFRSVSTSTTFVQGRRITTRRIMENGQERVEVEEDGQLKSVTINGVPDDLALGLELSRREQQPSVTSRSGGTQVQQTPASCPLDSDLSEDEDLQLAMAYSLSEMEAAGKKPAGGREAQHRRQGRPKAQHQDPGLGGTQEGARGEATKRSPSPEEKASRCLIL

SEQ ID NO: 22843 - protein, 277 aa, Homo sapiens
MASYYEILDVPRSASADDIKKAYRRKALQWHPDKNPDNKEFAEKKFKEVAEAYEVLSDKHKREIYDRYGREGLTGTGTGPSRAEAGSGGPGFTFTFRSPEEVFREFFGSGDPFAELFDDLGPFSELQNRGSRHSGPFFTFSSSFPGHSDFSSSSFSFSPGAGAFRSVSTSTTFVQGRRITTRRIMENGQERVEVEEDGQLKSVTINGVPDDLALGLELSRREQQPSVTSRSGGTQVQQTPASCPLDSDLSEDEDLQLAMAYSLSEMEAAGKKPADVF

SEQ ID NO: 22844 - protein, 337 aa, Homo sapiens
MGKDYYCILGIEKGASDEDIKKAYRKQALKFHPDKNKSPQAEEKFKEVAEAYEVLSDPKKREIYDQFGEEGLKGGAGGTDGQGGTFRYTFHGDPHATFAAFFGGSNPFEIFFGRRMGGGRDSEEMEIDGDPFSAFGFSMNGYPRDRNSVGPSRLKQDPPVIHELRVSLEEIYSGCTKRMKISRKRLNADGRSYRSEDKILTIEIKKGWKEGTKITFPREGDETPNSIPADIVFIIKDKDHPKFKRDGSNIIYTAKISLREALCGCSINVPTLDGRNIPMSVNDIVKPGMRRRIIGYGLPFPKNPDQRGDLLIEFEVSFPDTISSSSKEVLRKHLPAS

SEQ ID NO: 22845 - protein, 74 aa, Homo sapiens
MIKHSWIHLYVMASAMSSSPIFFFFQRWSLTLSLRLECSSAIIKPTAASNSCVQVNLPPSMCDYRHEPLCLAFL

SEQ ID NO: 22846 - protein, 1524 aa, Homo sapiens
MAMSNGNNDFVVLSNSSIATSAANPSPLTPCDGDHAAQQLTPKEATRTKVSPNGCLQLNGTVKSSFLPLDNQRMPQMLPQCCHPCPYHHPLTSHSSHQECHPEAGPAAPSALASCCMQPHSEYSASLCPNHSPVYQTTCCLQPSPSFCLHHPWPDHFQHQPVQQHIANIRPSRPFKLPKSYAALIADWPVVVLGMCTMFIVVCALVGVLVPELPDFSDPLLGFEPRGTAIGQRLVTWNNMVKNTGYKATLANYPFKYADEQAKSHRDDRWSDDHYEREKREVDWNFHKDSFFCDVPSDRYSRVVFTSSGGETLWNLPAIKSMCNVDNSRIRSHPQFGDLCQRTTAASCCPSWTLGNYIAILNNRSSCQKIVERDVSHTLKLLRTCAKHYQNGTLGPDCWDMAARRKDQLKCTNVPRKCTKYNAVYQILHYLVDKDFMTPKTADYATPALKYSMLFSPTEKGESMMNIYLDNFENWNSSDGVTTITGIEFGIKHSLFQDYLLMDTVYPAIAIVIVLLVMCVYTKSMFITLMTMFAIISSLIVSYFLYRVVFHFEFFPFMNLTALIILVGIGADDAFVLCDVWNYTKFDKPHAETSETVSITLQHAALSMFVTSFTTAAAFYANYVSNITAIRCFGVYAGTAILVNYVLMVTWLPAVVVLHERYLLNIFTCFKKPQQQIYDNKSCWTVACQKCHKVLFAISEASRIFFEKVLPCIVIKFRYLWLFWFLALTVGGAYIVCINPKMKLPSLELSEFQVFRSSHPFERYDAEYKKLFMFERVHHGEELHMPITVIWGVSPEDNGNPLNPKSKGKLTLDSSFNIASPASQAWILHFCQKLRNQTFFYQTDEQDFTSCFIETFKQWMENQDCDEPALYPCCSHWSFPYKQEIFELCIKRAIMELERSTGYHLDSKTPGPRFDINDTIRAVVLEFQSTYLFTLAYEKMHQFYKEVDSWISSELSSAPEGLSNGWFVSNLEFYDLQDSLSDGTLIAMGLSVAVAFSVMLLTTWNIIISLYAIISIAGTIFVTVGSLVLLGWELNVLESVTISVAVGLSVDFAVHYGVAYRLAPDPDREGKVIFSLSRVGSAMAMAALTTFVAGAMMMPSTVLAYTQLGTFMMLIMCISWAFATFFFQCMCRCLGPQGTCGQIPLPKKLQCSAFSHALSTSPSDKGQSKTHTINAYHLDPRGPKSELEHEFYELEPLASHSCTAPEKTTYEETHICSEFFNSQAKNLGMPVHAAYNSELSKSTESDAGSALLQPPLEQHTVCHFFSLNQRCSCPDAYKHLNYGPHSCQQMGDCLCHQCSPTTSSFVQIQNGVAPLKATHQAVEGFVHPITHIHHCPCLQGRVKPAGMQNSLPRNFFLHPVQHIQAQEKIGKTNVHSLQRSIEEHLPKMAEPSSFVCRSTGSLLKTCCDPENKQRELCKNRDVSNLESSGGTENKAGGKVELSLSQTDASVNSEHFNQNEPKVLFNHLMGEAGCRSCPNNSQSCGRIVRVKCNSVDCQMPNMEANVPAVLTHSELSGESLLIKTL

SEQ ID NO: 22847 - protein, 504 aa, Homo sapiens
MERSQCGSRDRGVSGRPHLAPGLVVAAPPPPSPALPVPSGMQVPPAFLRPPSLFLRAAAAAAAAAAATSGSGGCPPAPGLESGVGAVGCGYPRTPKCARCRNHGVVSALKGHKRFCRWRDCACAKCTLIAERQRVMAAQVALRRQQAQEESEARGLQRLLCSGLSWPPGGRASGGGGRAENPQSTGGPAAGAALGLGALRQASGSATPAFEVFQQDYPEEKQEQKESKCESCQNGQEELISKSHQLYLGSSSRSNGVIGKQSIGSSISEYSNKPDSILSPHPGEQSGGEESPRSLSSSDLESGNESEWVKDLTATKASLPTVSSRPRDPLDILTKIFPNYRRSRLEGILRFCKGDVVQAIEQVLNGKEHKPDNRNLANSEELENTAFQRASSFSLAGIGFGTLGNKSAFSPLQTTSASYGGDSSLYGVNPRVGISPLRLAYSSAGRGLSGFMSPYLTPGLVPTLPFRPALDYAFSGMIRDSSYLSSKDSITCGRLYFRPNQDNP

SEQ ID NO: 22848 - protein, 230 aa, Homo sapiens [sequence omitted]

SEQ ID NO: 22849 - protein, 524 aa, Homo sapiens
MGKPARKGCEWKRFLKNNWVLLSTVAAVVLGITTGVLVREHSNLSTLEKFYFAFPGEILMRMLKLIILPLIISSMITGVAALDSNVSGKIGLRAVVYYFCTTLIAVILGIVLVVSIKPGVTQKVGEIARTGSTPEVSTVDAMLDLIRNMFPENLVQACFQQYKTKREEVKPPSDPEMNMTEESFTAVMTTAISKNKTKEYKIVGMYSDGINVLGLIVFCLVFGLVIGKMGEKGQILVDFFNALSDATMKIVQIIMCYMPLGILFLIAGKIIEVEDWEIFRKLGLYMATVLTGLAIHSIVILPLIYFIVVRKNPFRFAMGMAQALLTALMISSSSATLPVTFRCAEENNQVDKRITRFVLPVGATINMDGTALYEAVAAVFIAQLNDLDLGIGQIITISITATSASIGAAGVPQAGLVTMVIVLSAVGLPAEDVTLIIAVDWLLDRFRTMVNVLGDAFGTGIVEKLSKKELEQMDVSSEVNIVNPFALESTILDNEDSDTKKSYVNGGFAVDKSDTISFTQTSQF

SEQ ID NO: 22850 - protein, 438 aa, Homo sapiens
MVQWKRLCQLHYLWALGCYMLLATVALKLSFRLKCDSDHLGLESRESQSQYCRNILYNFLKLPAKRSINCSGVTRGDQEAVLQAILNNLEVKKKREPFTDTHYLSLTRDCEHFKAERKFIQFPLSKEEVEFPIAYSMVIHEKIENFERLLRAVYAPQNIYCVHVDEKSPETFKEAVKAIISCFPNVFIASKLVRVVYASWSRVQADLNCMEDLLQSSVPWKYFLNTCGTDFPIKSNAEMVQALKMLNGRNSMESEVPPKHKETRWKYHFEVVRDTLHLTNKKKDPPPYNLTMFTGNAYIVASRDFVQHVLKNPKSQQLIEWVKDTYSPDEHLWATLQRARWMPGSVPNHPKYDISDMTSIARLVKWQGHEGDIDKGAPYAPCSGIHQRAICVYGAGDLNWMLQNHHLLANKFDPKVDDNALQCLEEYLRYKAIYGTEL

SEQ ID NO: 22851 - protein, 198 aa, Homo sapiens
MDSLQKQDLRRPKIHGAVQASPYQPPTLASLQRLLWVRQAATLNHIDEVWPSLFLGDAYAARDKSKLIQLGITHVVNAAAGKFQVDTGAKFYRGMSLEYYGIEADDNPFFDLSVYFLPVARYIRAALSVPQGRVLVHCAMGVSRSATLVLAFLMICENMTLVEAIQTVQAHRNICPNSGFLRQLQVLDNRLGRETGRF

SEQ ID NO: 22852 - protein, 248 aa, Homo sapiens
MAETSLPELGGEDKATPCPSILELEELLRAGKSSCSRVDEVWPNLFIGDAMDSLQKQDLRRPKIHGAVQASPYQPPTLASLQRLLWVRQAATLNHIDEVWPSLFLGDAYAARDKSKLIQLGITHVVNAAAGKFQVDTGAKFYRGMSLEYYGIEADDNPFFDLSVYFLPVARYIRAALSVPQGRVLVHCAMGVSRSATLVLAFLMICENMTLVEAIQTVQAHRNICPNSGFLRQLQVLDNRLGRETGRF

SEQ ID NO: 22853 - protein, 740 aa, Homo sapiens
MASHLRPPSPLLVRVYKSGPRVRRKLESYFQSSKSSGGGECTVSTQEHEAPGTFRVEFSERAAKERVLKKGEHQILVDEKPVPIFLVPTENSIKKNTRPQISSLTQSQAETPSGDMHQHEGHIPNAVDSCLQKIFLTVTADLNCNLFSKEQRAYITTLCPSIRKMEGHDGIEKVCGDFQDIERIHQFLSEQFLESEQKQQFSPSMTERKPLSQQERDSCISPSEPETKAEQKSNYFEVPLPYFEYFKYICPDKINSIEKRFGVNIEIQESSPNMVCLDFTSSRSGDLEAARESFASEFQKNTEPLKQECVSLADSKQANKFKQELNHQFTKLLIKEKGGELTLLGTQDDISAAKQKISEAFVKIPVKLFAANYMMNVIEVDSAHYKLLETELLQEISEIEKRYDICSKVSEKGQKTCILFESKDRQVDLSVHAYASFIDAFQHASCQLMREVLLLKSLGKERKHLHQTKFADDFRKRHPNVHFVLNQESMTLTGLPNHLAKAKQYVLKGGGMSSLAGKKLKEGHETPMDIDSDDSKAASPPLKGSVSSEASELDKKEKGICVICMDTISNKKVLPKCKHEFCAPCINKAMSYKPICPTCQTSYGIQKGNQPEGSMVFTVSRDSLPGYESFGTIVITYSMKAGIQTEEHPNPGKRYPGIQRTAYLPDNKEGRKVLKLLYRAFDQKLIFTVGYSRVLGVSDVITWNDIHHKTSRFGGPEMYGYPDPSYLKRVKEELKAKGIE

SEQ ID NO: 22854 - protein, 228 aa, Homo sapiens
MASHLRPPSPLLVRVYKSGPRVRRKLESYFQSSKSSGGGECTVSTQEHEAPGTFRVEFSERAAKERVLKKGEHQILVDEKPVPIFLVPTENSIKKNTRPQISSLTQSQAETPSGDMHQHEGHIPNAVDSCLQKEEHPNPGKRYPGIQRTAYLPDNKEGRKVLKLLYRAFDQKLIFTVGYSRVLGVSDVITWNDIHHKTSRFGGPEMYGYPDPSYLKRVKEELKAKGIE

SEQ ID NO: 22855 - protein, 326 aa, Homo sapiens
MATNFSDIVKQGYVKMKSRKLGIYRRCWLVFRKSSSKGPQRLEKYPDEKSVCLRGCPKVTEISNVKCVTRLPKETKRQAVAIIFTDDSARTFTCDSELEAEEWYKTLSVECLGSRLNDISLGEPDLLAPGVQCEQTDRFNVFLLPCPNLDVYGECKLQITHENIYLWDIHNPRVKLVSWPLCSLRRYGRDATRFTFEAGRMCDAGEGLYTFQTQEGEQIYQRVHSATLAIAEQHKRVLLEMEKNVRLLNKGTEHYSYPCTPTTMLPRSAYWHHITGSQNIAEASSYAGEGYGAAQASSETDLLNRFILLKPKPSQGDSSEAKTPSQ

SEQ ID NO: 22856 - protein, 496 aa, Homo sapiens
MTRGARLRSDARAQLNQLSLDGGTGSGQKGKCEEFPSSLSSVSPGLEAAALLLAVTMDPLETPIKDGILYQQHVKFGKKCWRKVWALLYAGGPSGVARLESWEVRDGGLGAAGDRSAGPGRRGERRVIRLADCVSVLPADGESCPRDTGAFLLTTTERSHLLAAQHRQAWMGPICQLAFPGTGEASSGSTDAQSPKRGLVPMEENSIYSSWQEVGEFPVVVQRTEAATRCQLKGPALLVLGPDAIQLREAKGTQALYSWPYHFLRKFGSDKGVFSFEAGRRCHSGEGLFAFSTPCAPDLCRAVAGAIARQRERLPELTRPQPCPLPRATSLPSLDTPGELREMPPGPEPPTSRKMHLAEPGPQSLPLLLGPEPNDLASGLYASVCKRASGPPGNEHLYENLCVLEASPTLHGGEPEPHEGPGSRSPTTSPIYHNGQDLSWPGPANDSTLEAQYRRLLELDQVEGTGRPDPQAGFKAKLVTLLSRERRKGPAPCDRP

SEQ ID NO: 22857 - protein, 216 aa, Homo sapiens
MGPICQLAFPGTGEASSGSTDAQSPKRGLVPMEENSIYSSWQEVGEFPVVVQRTEAATRCQLKGPALLVLGPDAIQLREAKGTQALYSWPYHFLRKFGSDKILLGTPGVSLLICKGERTDDVSGIILDESLLRAYSVPGAGGHSRVQDSLGPVLREPTFQGERSFLKTSMLRSLLCSCSWRHPRSQPRTQASCLQGSDCPAPHRNSTSAAHTLGTS

SEQ ID NO: 22858 - protein, 330 aa, Homo sapiens
MDPLETPIKDGILYQQHVKFGKKCWRKVWALLYAGGPSGVARLESWEVRDGGLGAAGDRSAGPGRRGERRVIRLADCVSVLPADGESCPRDTGAFLLTTTERSHLLAAQHRQAWMGPICQLAFPGTGEASSGSTDAQSPKRGLVPMEENSIYSSWQEVGEFPVVVQRTEAATRCQLKGPALLVLGPDAIQLREAKGTQALYSWPYHFLRKFGSDKILLGTPGVSLLICKGERTDDVSGIILDESLLRAYSVPGAGGHSRVQDSLGPVLREPTFQGERSFLKTSMLRSLLCSCSWRHPRSQPRTQASCLQGSDCPAPHRNSTSAAHTLGTS

SEQ ID NO: 22859 - protein, 228 aa, Homo sapiens
MDPLETPIKDGILYQQHVKFGKGTGEASSGSTDAQSPKRGLVPMEENSIYSSWQEVGEFPVVVQRTEAATRCQLKGPALLVLGPDAIQLREAKGTQALYSWPYHFLRKFGSDKILLGTPGVSLLICKGERTDDVSGIILDESLLRAYSVPGAGGHSRVQDSLGPVLREPTFQGERSFLKTSMLRSLLCSCSWRHPRSQPRTQASCLQGSDCPAPHRNSTSAAHTLGTS

SEQ ID NO: 22860 - protein, 306 aa, Homo sapiens [sequence omitted]

SEQ ID NO: 22861 - protein, 198 aa, Homo sapiens
MECVGTRINDISLGEPDLLATGVEREQSERFNVYLMPSPNLDVHGECALQITYEYICLWDVQNPRVKLISWPLSALRRYGRDTTWFTFEAGRMCETGEGLFIFQTRDGEAIYQKVHSAALAIAEQHERLLQSVKNSMLQMKMSERAASLSTMVPLPRSAYWQHITRQHSTGQLYRLQDVSSPLKLHRTETFPAYRSEH

SEQ ID NO: 22862 - protein, 113 aa, Homo sapiens
MEDYQAAEETAFVVDEVSNIVKEAIESAIGGNAYQHSKVNQWTTNVVEQTLSQLTKLGKPFKYIVTCVIMQKNGAGLHTASSCFWDSSTDGSCTVRWENKTMYCIVSAFGLSI

SEQ ID NO: 22863 - protein, 864 aa, Homo sapiens
MGNRGMEDLIPLVNRLQDAFSAIGQNADLDLPQIAVVGGQSAGKSSVLENFVGRDFLPRGSGIVTRRPLVLQLVNATTEYAEFLHCKGKKFTDFEEVRLEIEAETDRVTGTNKGISPVPINLRVYSPHVLNLTLVDLPGMTKVPVGDQPPDIEFQIRDMLMQFVTKENCLILAVSPANSDLANSDALKVAKEVDPQGQRTIGVITKLDLMDEGTDARDVLENKLLPLRRGYIGVVNRSQKDIDGKKDITAALAAERKFFLSHPSYRHLADRMGTPYLQKVLNQQLTNHIRDTLPGLRNKLQSQLLSIEKEVEEYKNFRPDDPARKTKALLQMVQQFAVDFEKRIEGSGDQIDTYELSGGARINRIFHERFPFELVKMEFDEKELRREISYAIKNIHGIRTGLFTPDMAFETIVKKQVKKIREPCLKCVDMVISELISTVRQCTKKLQQYPRLREEMERIVTTHIREREGRTKEQVMLLIDIELAYMNTNHEDFIGFANAQQRSNQMNKKKTSGNQDEILVIRKGWLTINNIGIMKGGSKEYWFVLTAENLSWYKDDEEKEKKYMLSVDNLKLRDVEKGFMSSKHIFALFNTEQRNVYKDYRQLELACETQEEVDSWKASFLRAGVYPERVGDKEKASETEENGSDSFMHSMDPQLERQVETIRNLVDSYMAIVNKTVRDLMPKTIMHLMINNTKEFIFSELLANLYSCGDQNTLMEESAEQAQRRDEMLRMYHALKEALSIIGDINTTTVSTPMPPPVDDSWLQVQSVPAGRRSPTSSPTPQRRAPAVPPARPGSRGPAPGPPPAGSALGGAPPVPSRPGASPDPFGPPPQVPSRPNRAPPGVPSRSGQASPSRPESPRPPFDL

SEQ ID NO: 22864 - protein, 864 aa, Homo sapiens
MGNRGMEDLIPLVNRLQDAFSAIGQNADLDLPQIAVVGGQSAGKSSVLENFVGRDFLPRGSGIVTRRPLVLQLVNATTEYAEFLHCKGKKFTDFEEVRLEIEAETDRVTGTNKGISPVPINLRVYSPHVLNLTLVDLPGMTKVPVGDQPPDIEFQIRDMLMQFVTKENCLILAVSPANSDLANSDALKVAKEVDPQGQRTIGVITKLDLMDEGTDARDVLENKLLPLRRGYIGVVNRSQKDIDGKKDITAALAAERKFFLSHPSYRHLADRMGTPYLQKVLNQQLTNHIRDTLPGLRNKLQSQLLSIEKEVEEYKNFRPDDPARKTKALLQMVQQFAVDFEKRIEGSGDQIDTYELSGGARINRIFHERFPFELVKMEFDEKELRREISYAIKNIHGIRTGLFTPDLAFEATVKKQVQKLKEPSIKCVDMVVSELTATIRKCSEKLQQYPRLREEMERIVTTHIREREGRTKEQVMLLIDIELAYMNTNHEDFIGFANAQQRSNQMNKKKTSGNQDEILVIRKGWLTINNIGIMKGGSKEYWFVLTAENLSWYKDDEEKEKKYMLSVDNLKLRDVEKGFMSSKHIFALFNTEQRNVYKDYRQLELACETQEEVDSWKASFLRAGVYPERVGDKEKASETEENGSDSFMHSMDPQLERQVETIRNLVDSYMAIVNKTVRDLMPKTIMHLMINNTKEFIFSELLANLYSCGDQNTLMEESAEQAQRRDEMLRMYHALKEALSIIGDINTTTVSTPMPPPVDDSWLQVQSVPAGRRSPTSSPTPQRRAPAVPPARPGSRGPAPGPPPAGSALGGAPPVPSRPGASPDPFGPPPQVPSRPNRAPPGVPSRSGQASPSRPESPRPPFDL

SEQ ID NO: 22865 - protein, 851 aa, Homo sapiens
MGNRGMEDLIPLVNRLQDAFSAIGQNADLDLPQIAVVGGQSAGKSSVLENFVGRDFLPRGSGIVTRRPLVLQLVNATTEYAEFLHCKGKKFTDFEEVRLEIEAETDRVTGTNKGISPVPINLRVYSPHVLNLTLVDLPGMTKVPVGDQPPDIEFQIRDMLMQFVTKENCLILAVSPANSDLANSDALKVAKEVDPQGQRTIGVITKLDLMDEGTDARDVLENKLLPLRRGYIGVVNRSQKDIDGKKDITAALAAERKFFLSHPSYRHLADRMGTPYLQKVLNQQLTNHIRDTLPGLRNKLQSQLLSIEKEVEEYKNFRPDDPARKTKALLQMVQQFAVDFEKRIEGSGDQIDTYELSGGARINRIFHERFPFELVKMEFDEKELRREISYAIKNIHGIRTGLFTPDMAFETIVKKQVKKIREPCLKCVDMVISELISTVRQCTKKLQQYPRLREEMERIVTTHIREREGRTKEQVMLLIDIELAYMNTNHEDFIGFANAQQRSNQMNKKKTSGNQDEILVIRKGWLTINNIGIMKGGSKEYWFVLTAENLSWYKDDEEKEKKYMLSVDNLKLRDVEKGFMSSKHIFALFNTEQRNVYKDYRQLELACETQEEVDSWKASFLRAGVYPERVGDKEKASETEENGSDSFMHSMDPQLERQVETIRNLVDSYMAIVNKTVRDLMPKTIMHLMINNTKEFIFSELLANLYSCGDQNTLMEESAEQAQRRDEMLRMYHALKEALSIIGDINTTTVSTPMPPPVDDSWLQVQSVPAGRRSPTSSPTPQRRAPAVPPARPGSRGPAPGPPPAGSALGGAPPVPSRPGASPDPFGPPPQVPSRPNRAPPGVPRITISDP

SEQ ID NO: 22866 - protein, 851 aa, Homo sapiens
MGNRGMEDLIPLVNRLQDAFSAIGQNADLDLPQIAVVGGQSAGKSSVLENFVGRDFLPRGSGIVTRRPLVLQLVNATTEYAEFLHCKGKKFTDFEEVRLEIEAETDRVTGTNKGISPVPINLRVYSPHVLNLTLVDLPGMTKVPVGDQPPDIEFQIRDMLMQFVTKENCLILAVSPANSDLANSDALKVAKEVDPQGQRTIGVITKLDLMDEGTDARDVLENKLLPLRRGYIGVVNRSQKDIDGKKDITAALAAERKFFLSHPSYRHLADRMGTPYLQKVLNQQLTNHIRDTLPGLRNKLQSQLLSIEKEVEEYKNFRPDDPARKTKALLQMVQQFAVDFEKRIEGSGDQIDTYELSGGARINRIFHERFPFELVKMEFDEKELRREISYAIKNIHGIRTGLFTPDLAFEATVKKQVQKLKEPSIKCVDMVVSELTATIRKCSEKLQQYPRLREEMERIVTTHIREREGRTKEQVMLLIDIELAYMNTNHEDFIGFANAQQRSNQMNKKKTSGNQDEILVIRKGWLTINNIGIMKGGSKEYWFVLTAENLSWYKDDEEKEKKYMLSVDNLKLRDVEKGFMSSKHIFALFNTEQRNVYKDYRQLELACETQEEVDSWKASFLRAGVYPERVGDKEKASETEENGSDSFMHSMDPQLERQVETIRNLVDSYMAIVNKTVRDLMPKTIMHLMINNTKEFIFSELLANLYSCGDQNTLMEESAEQAQRRDEMLRMYHALKEALSIIGDINTTTVSTPMPPPVDDSWLQVQSVPAGRRSPTSSPTPQRRAPAVPPARPGSRGPAPGPPPAGSALGGAPPVPSRPGASPDPFGPPPQVPSRPNRAPPGVPRITISDP

SEQ ID NO: 22867 - protein, 361 aa, Homo sapiens
MKQKMMARLLRTSFALLFLGLFGVLGAATISCRNEEGKAVDWFTFYKLPKRQNKESGETGLEYLYLDSTTRSWRKSEQLMNDTKSVLGRTLQQLYEAYASKSNNTAYLIYNDGVPKPVNYSRKYGHTKGLLLWNRVQGFWLIHSIPQFPPIPEEGYDYPPTGRRNGQSGICITFKYNQYEAIDSQLLVCNPNVYSCSIPATFHQELIHMPQLCTRASSSEIPGRLLTTLQSAQGQKFLHFAKSDSFLDDIFAAWMAQRLKTHLLTETWQRKRQELPSNCSLPYHVYNIKAIKLSRHSYFSSYQDHAKWCISQKGTKNRWTCIGDLNRSPHQAFRSGGFICTQNWQIYQAFQGLVLYYESCK

SEQ ID NO: 22868 - protein, 153 aa, Homo sapiens
MPQLCTRASSSEIPGRLLTTLQSAQGQKFLHFAKSDSFLDDIFAAWMAQRLKTHLLTETWQRKRQELPSNCSLPYHVYNIKAIKLSRHSYFSSYQDHAKWCISQKGTKNRWTCIGDLNRSPHQAFRSGGFICTQNWQIYQAFQGLVLYYESCK

SEQ ID NO: 22869 - protein, 441 aa, Homo sapiens
MGGPRAWALLCLGLLLPGGGAAWSIGAAPFSGRRNWCSYVVTRTISCHVQNGTYLQRVLQNCPWPMSCPGSSYRTVVRPTYKVMYKIVTAREWRCCPGHSGVSCEEASSASLEPMWSGSTMRRMALRPTAFSGCLNCSKVSELTERLKVLEAKMTMLTVIEQPVPPTPATPEDPAPLWGPPPAQGSPGDGGLQDQVGAWGLPGPTGPKGDAGSRGPMGMRGPPGPQGPPGSPGRAGAVGTPGERGPPGPPGPPGPPGPPAPVGPPHARISQHGDPLLSNTFTETNNHWPQGPTGPPGPPGPMGPPGPPGPTGVPGSPGHIGPPGPTGPKGISGHPGEKGERGLRGEPGPQGSAGQRGEPGPKGDPGEKSHWGEGLHQLREALKILAERVLILETMIGLYEPELGSGAGPAGTGTPSLLRGKRGGHATNYRIVAPRSRDERG

SEQ ID NO: 22870 - protein, 439 aa, Homo sapiens
MGGPRAWALLCLGLLLPGGGAAWSIGAAPFSGRRNWCSYVVTRTISCHVQNGTYLQRVLQNCPWPMSCPGSRTVVRPTYKVMYKIVTAREWRCCPGHSGVSCEEASSASLEPMWSGSTMRRMALRPTAFSGCLNCSKVSELTERLKVLEAKMTMLTVIEQPVPPTPATPEDPAPLWGPPPAQGSPGDGGLQDQVGAWGLPGPTGPKGDAGSRGPMGMRGPPGPQGPPGSPGRAGAVGTPGERGPPGPPGPPGPPGPPAPVGPPHARISQHGDPLLSNTFTETNNHWPQGPTGPPGPPGPMGPPGPPGPTGVPGSPGHIGPPGPTGPKGISGHPGEKGERGLRGEPGPQGSAGQRGEPGPKGDPGEKSHWGEGLHQLREALKILAERVLILETMIGLYEPELGSGAGPAGTGTPSLLRGKRGGHATNYRIVAPRSRDERG

SEQ ID NO: 22871 - protein, 443 aa, Homo sapiens
MGGPRAWALLCLGLLLPGGGAAWSIGAAPFSGRRNWCSYVVTRTISCHVQNGTYLQRVLQNCPWPMSCPGSSYRTVVRPTYKVMYKIVTAREWRCCPGHSGVSCEEVAASSASLEPMWSGSTMRRMALRPTAFSGCLNCSKVSELTERLKVLEAKMTMLTVIEQPVPPTPATPEDPAPLWGPPPAQGSPGDGGLQDQVGAWGLPGPTGPKGDAGSRGPMGMRGPPGPQGPPGSPGRAGAVGTPGERGPPGPPGPPGPPGPPAPVGPPHARISQHGDPLLSNTFTETNNHWPQGPTGPPGPPGPMGPPGPPGPTGVPGSPGHIGPPGPTGPKGISGHPGEKGERGLRGEPGPQGSAGQRGEPGPKGDPGEKSHWGEGLHQLREALKILAERVLILETMIGLYEPELGSGAGPAGTGTPSLLRGKRGGHATNYRIVAPRSRDERG

SEQ ID NO: 22872 - protein, 242 aa, Homo sapiens
MAAALWGFFPVLLLLLLSGDVQSSEVPGAAAEGSGGSGVGIGDRFKIEGRAVVPGVKPQDWISAARVLVDGEEHVGFLKTDGSFVVHDIPSGSYVVEVVSPAYRFDPVRVDITSKGKMRARYVNYIKTSEVVRLPYPLQMKSSGPPSYFIKRESWGWTDFLMNPMVMMMVLPLLIFVLLPKVVNTSDPDMRREMEQSMNMLNSNHELPDVSEFMTRLFSSKSSGKSSSGSSKTGKSGAGKRR

SEQ ID NO: 22873 - protein, 393 aa, Homo sapiens
MADRRRRLRPGTLAPVREGVNCRSRCFTKHKNGLKFPTSLHSRQLVFPRKGLDDFRKGCPPCTGLVTQVPVEGFLPQIYHRAPQLAPKKRQIKLLKEADVLSKLSPAQQARKAFLEDVEAHLTPHPLALYLNLEEAMPIELLSKVLEVLDPDRKLEDTWAYCQDTRKGMKEPTKLLKKHSTQVYLGPSKKTSVSNAGQWLYEEKPHKMDLLHENGPRPGLHENGISDIDEEFILKQFDIDYETKPSHDALHTMKLNQVPLELKRSVGLSKLQETEFFQKLGYERKLQKPQNPYKPKWVKMRYGAWYLNPKLWKKQRVDEPLVDPEVSHKAQEENFKKELQEQEELLADLHGTVAFKDFILSRGYRTPRFLENMYIGKECKRACNKTPIKRTQA

SEQ ID NO: 22874 - protein, 295 aa, Homo sapiens
MQMSVPCVLSSLQNHEPNKPLFTTQSQLLSKVLEVLDPDRKLEDTWAYCQDTRKGMKEPTKLLKKHSTQVYLGPSKKTSVSNAGQWLYEEKPHKMDLLHENGPRPGLHENVCKAVSDFCKWVTTFGISDIDEEFILKQFDIDYETKPSHDALHTMKLNQVPLELKRSVGLSKLQETEFFQKLGYERKLQKPQNPYKPKWVKMRYGAWYLNPKLWKKQRVDEPLVDPEVSHKAQEENFKKELQEQEELLADLHGTVAFKDFILSRGYRTPRFLENMYIGKECKRACNKTPIKRTQA

SEQ ID NO: 22875 - protein, 351 aa, Homo sapiens
MADRRRRLRPGTLAPVREGVNCRSRCFTKHKNGLKFPTSLHSRQLVFPRKGLDDFRKGCPPCTGLVTQVPVEGFLPQIYHRAPQLAPKKRQIKLLKEADVLSKLSPAQQARKAFLEDVEAHLTPHPLALYLNLEEAMPIELLSKVLEVLDPDRKLEDTWAYCQDTRKGMKEPTKLLKKHSTQVYLGPSKKTSVSNAGQWLYEEKPHKMDLLHENGPRPGLHENGISDIDEEFILKQFDIDYETKPSHDALHTMKLNQVPLELKRSVGLSKLQETEFFQKLGYERKLQKPQNPYKPKWVKMRYGAWYLNPKLWKKQRVDEPLVDPEVSHKAQEENFKKELQEQSIFKKAMDI

SEQ ID NO: 22876 - protein, 586 aa, Homo sapiens
MPKPINVRVTTMDAELEFAIQPNTTGKQLFDQVVKTIGLREVWYFGLHYVDNKGFPTWLKLDKKVSAQEVRKENPLQFKFRAKFYPEDVAEELIQDITQKLFFLQVKEGILSDEIYCPPETAVLLGSYAVQAKFGDYNKEVHKSGYLSSERLIPQRVMDQHKLTRDQWEDRIQVWHAEHRGMLKDNAMLEYLKIAQDLEMYGINYFEIKNKKGTDLWLGVDALGLNIYEKDDKLTPKIGFPWSEIRNISFNDKKFVIKPIDKKAPDFVFYAPRLRINKRILQLCMGNHELYMRRRKPDTIEVQQMKAQAREEKHQKQLERQQLETEKKRRETVEREKEQMMREKEELMLRLQDYEEKTKKAERELSEQIQRALQLEEERKRAQEEAERLEADRMAALRAKEELERQAVDQIKSQEQLAAELAEYTAKIALLEEARRRKEDEVEEWQHRAKEAQDDLVKTKEELHLVMTAPPPPPPPVYEPVSYHVQESLQDEGAEPTGYSAELSSEGIRDDRNEEKRITEAEKNERVQRQLLTLSSELSQARDENKRTHNDIIHNENMRQGRDKYKTLRQIRQGNTKQRIDEFEAL

SEQ ID NO: 22877 - protein, 134 aa, Homo sapiens
MAGHPKEKVIPDEVHQNQILRELYLKELRTQKLYTQYHVNPLRKIHTVTRKPMSWHDNLEEPADARFLNLIHHAAQGPRKKYPETQTENQEVGWDLEPLINPERHDRRLNHFRVCSDITLYKAKTWGLGDDHHK

SEQ ID NO: 22878 - protein, 59 aa, Homo sapiens
MDKEVPKGSPREPALNIKKSDKSFKRKKPTENVLIFLINRQLGRHRSDIDLSRWVWMLS

SEQ ID NO: 22879 - protein, 413 aa, Homo sapiens
MAEGPEEARGHPPGQDDGGGDHEPVPSLRGPPTTAVPCPRDDPQAEPQAPGRPTAPGLAAAAAADKLEPPRELRKRGEAASGSGAELQEQAGCEAPEAAAPRERPARLSAREYSRQVHEWLWQSYCGYLTWHSGLAAFPAYCSPQPSPQSFPSGGAAVPQAAAPPPPQLGYYNPFYFLSPGAAGPDPRTAAGISTPAPVAGLGPRAPHVQASVRATPVTRVGSAAPSRSPSETGRQAGREYVIPSLAHRFMAEMVDFFILFFIKATIVLSIMHLSGIKDISKFAMHYIIEEIDEDTSMEDLQKMMVVALIYRLLVCFYEIICIWGAGGATPGKFLLGLRVVTCDTSVLIAPSRVLVIPSSNVSITTSTIRALIKNFSIASFFPAFITLLFFQHNRTAYDIVAGTIVVKRNGVR

SEQ ID NO: 22880 - protein, 632 aa, Homo sapiens
MTTSALRRQVKNIVHNYSEAEIKVREATSNDPWGPPSSLMSEIADLTFNTVAFTEVMGMLWRRLNDSGKNWRHVYKALTLLDYLLKTGSERVAHQCRENLYTIQTLKDFQYIDRDGKDQGVNVREKVKQVMALLKDEERLRQERTHALKTKERMALEGIGIGSGQLGFSRRYGEDYSRSRGSPSSYNSSSSSPRYTSDLEQARPQTSGEEELQLQLALAMSREEAEKPVPPASHRDEDLQLQLALRLSRQEHEKEVRSWQGDGSPMANGAGAVVHHQRDREPEREERKEEEKLKTSQSSILDLADIFVPALAPPSTHCSADPWDIPGFRPNTEASGSSWGPSADPWSPIPSGTVLSRSQPWDLTPMLSSSEPWGRTPVLPAGPPTTDPWALNSPHHKLPSTGADPWGASLETSDTPGGASTFDPFAKPPESTETKEGLEQALPSGKPSSPVELDLFGDPSPSSKQNGTKEPDALDLGILGEALTQPSKEARACRTPESFLGPSASSLVNLDSLVKAPQVAKTRNPFLTGLSAPSPTNPFGAGEPGRPTLNQMRTGSPALGLAGGPVGAPLGSMTYSASLPLPLSSVPAGLTLPASVSVFPQAGAFAPQPLLPTPSSAGPRPPPPQTGTNPFL

SEQ ID NO: 22881 - protein, 208 aa, Homo sapiens
MTTSALRRQVKNIVHNYSEAEIKVREATSNDPWGPPSSLMSEIADLTFNTVAFTEVMGMLWRRLNDSGKNWRHVYKALTLLDYLLKTGSERVAHQCRENLYTIQTLKDFQYIDRDGKDQGVNVREKVKQVMALLKDEERLRQERTHALKTKERMALEGIGIGSGQLGFSRRYGEDYSRSRGSPSSYNCPASDVRGRGTAAAAGPRHEP

SEQ ID NO: 22882 - protein, 886 aa, Homo sapiens
MRAEEPCAPGAPSALGAQRTPGPELRLSSQLLPELCTFVVRVLFYLGPVYLAGYLGLSITWLLLGALLWMWWRRNRRGKLGRLAAAFEFLDNEREFISRELRGQHLPAWIHFPDVERVEWANKIISQTWPYLSMIMESKFREKLEPKIREKSIHLRTFTFTKLYFGQKCPRVNGVKAHTNTCNRRRVTVDLQICYIGDCEISVELQKIQAGVNGIQLQGTLRVILEPLLVDKPFVGAVTVFFLQKPHLQINWTGLTNLLDAPGINDVSDSLLEDLIATHLVLPNRVTVPVKKGLDLTNLRFPLPCGVIRVHLLEAEQLAQKDNFLGLRGKSDPYAKVSIGLQHFRSRTIYRNLNPTWNEVFEFMVYEVPGQDLEVDLYDEDTDRDDFLGSLQICLGDVMTNRVVDEWFVLNDTTSGRLHLRLEWLSLLTDQEVLTEDHGGLSTAILVVFLESACNLPRNPFDYLNGEYRAKKLSRFARNKVSKDPSSYVKLSVGKKTHTSKTCPHNKDPVWSQVFSFFVHNVATERLHLKVLDDDQECALGMLEVPLCQILPYADLTLEQRFQLDHSGLDSLISMRLVLRFLQVEERELGSPYTGPEALKKGPLLIKKVATNQGPKAQPQEEGPTDLPCPPDPASDTKDVSRSTTTTTSATTVATEPTSQETGPEPKGKDSAKRFCEPIGEKKSPATIFLTVPGPHSPGPIKSPRPMKCPASPFAWPPKRLAPSMSSLNSLASSCFDLADISLNIEGGDLRRRQLGEIQLTVRYVCLRRCLSVLINGCRNLTPCTSSGADPYVRVYLLPERKWACRKKTSVKRKTLEPLFDETFEFFVPMEEVKKRSLDVAVKNSRPLGSHRRKELGKVLIDLSKEDLIKGFSQWYELTPNGQPRS

SEQ ID NO: 22883 - protein, 501 aa, Homo sapiens
MRAEEPCAPGAPSALGAQRTPGPELRLSSQLLPELCTFVVRVLFYLGPVYLAGYLGLSITWLLLGALLWMWWRRNRRGKLGRLAAAFEFLDNEREFISRELRGQHLPAWIHFPDVERVEWANKIISQTWPYLSMIMESKFREKLEPKIREKSIHLRTFTFTKLYFGQKCPRVNGVKAHTNTCNRRRVTVDLQICYIGDCEISVELQKIQAGVNGIQLQGTLRVILEPLLVDKPFVGAVTVFFLQKPHLQINWTGLTNLLDAPGINDVSDSLLEDLIATHLVLPNRVTVPVKKGLDLTNLRFPLPCGVIRVHLLEAEQLAQKDNFLGLRGKSDPYAKVSIGLQHFRSRTIYRNLNPTWNEVFEFMVYEVPGQDLEVDLYDEDTDRDDFLGSLQICLGDVMTNRVVDEWFVLNDTTSGRLHLRLEWLSLLTDQEVLTEDHGGLSTAILVVFLESACNLPRNPFDYLNGEYRAKKLSRFARVKQGQQRPFFLCQTICRQEDTYK

SEQ ID NO: 22884 - protein, 154 aa, Homo sapiens
MQGIDRWIPSIPPLQNHSAVNRRHFSAPQKLHADCEKEMLDGGVPGTTVRVSFDFSCLEMVRELWMWNVEEEEHEVGISTWGGQHCGCPAKSLPGPHPGGVSAPQSASQLMVKLLVWQKSVHKLRKIAAQSEEWSCVLNKISTHPFVSKEHDGT

SEQ ID NO: 22885 - protein, 392 aa, Homo sapiens
MLAPCSGWELGCFRLCLRQVRLWAGAGRWACWACQARPYSSGGSERWPGSETEVPPPGPGRRTLKEWTLQVSPFGRLRARLPCHLAVRPLDPLTYPDGDRVLVAVCGVEGGVRGLDGLQVKYDEDLEEMAIVSDTIHPQASVEVNAPLKFGLDIKSSGSGCVKVQSIEGDNCKIETEHGTSILQSVKGQKLHVQTKGGKVICLGTVYGNIDIHASDKSAVTIDKLQGSSVTVSTEDGLLKAKYLYTESSFLSSAAGDITLGSVHGNITLQSKMGNITVDSSSGCLKASTNQGAIDVYVSQLGKVELKSHKGSIIVKVPSSLQAHLQLSGKEVDVNSEVHVQEMAEVRKDDVVTVTGLMNQASKREKWIKADAPKGTVSFRRQSWFQSLKLQD

SEQ ID NO: 22886 - protein, 144 aa, Homo sapiens
MLAPCSGWELGCFRLCLRQVRLWAGAGRWACWACQARPYSSGGSERWPGSETEVPPPGPGRRTLKEWTLQVSPFGRLRARLPCHLAVRPLDPLTYPDGDRVLVAVCGVEGGVRGLDGLQVKYDEDLEEMAIVSDTIHPQASVEV

SEQ ID NO: 22887 - protein, 275 aa, Homo sapiens
MLAPCSGWELGCFRLCLRQVRLWAGAGRWACWACQARPYSSGGSERWPGSETEVPPPGPGRRTLKEWTLQGQKLHVQTKGGKVICLGTVYGNIDIHASDKSAVTIDKLQGSSVTVSTEDGLLKAKYLYTESSFLSSAAGDITLGSVHGNITLQSKMGNITVDSSSGCLKASTNQGAIDVYVSQLGKVELKSHKGSIIVKVPSSLQAHLQLSGKEVDVNSEVHVQEMAEVRKDDVVTVTGLMNQASKREKWIKADAPKGTVSFRRQSWFQSLKLQD

SEQ ID NO: 22888 - protein, 360 aa, Homo sapiens
MMKKKKFKFKVDFELEELSSVPFVNGVLFCKMRLLDGGSFTAESSREVVQANCVRWRKKFSFMCKMSASAATGILDPCIYRVSVRKELKGGKAYAKLGFADLNLAEFAGSGNTTRRCLLEGYDTKNTRQDNSILKVLISMQLMSGDPCFKTPPSTSMSIPIAGESESLQEDRKGGETLKVHLGIADLSAKSASVPDELGACGHSRTSSYASQQSKVSGYSTCHSRSSSFSELCHRRNTSVGSTSTGVESILEPCDEIEQKIAEPNLDTADKEDTASEKLSRCPVKQDSVESQLKRVDDTRVDADDIVEKILQSQDFSLDSSAEEEGLRLFVGPGGSTTFGSHHLPNRVGSGAYEQVVIKR

SEQ ID NO: 22889 - protein, 355 aa, Homo sapiens
MMKKKKFKFKVDFELEELSSVPFVNGVLFCKMRLLDGGSFTAESSREVVQANCVRWRKKFSFMCKMSASAATGILDPCIYRVSVRKELKGGKAYAKLGFADLNLAEFAGSGNTTRRCLLEGYDTKNTRQDNSILKVLISMQLMSGDPCFKTPPSTSMSIPIAGESESLQEDRKGGETLKVHLGIADLSAKSASVPDELGACGHSRTSSYASQQSKVSGYSTCHSRSSSFSELCHRRNTSVGSTSTGVESILEPCDEIEQKIAEPNLDTADKEDTASEKLSRCPVKQDSVESQLKRVDDTRVDADDIVEKILQSQDFSLDSSAEEEGLRLFVGPGGSTTFGSHHLPNSALEAPSLL

SEQ ID NO: 22890 - protein, 2351 aa, Homo sapiens
MQIELSTCFFLCLLRFCFSATRRYYLGAVELSWDYMQSDLGELPVDARFPPRVPKSFPFNTSVVYKKTLFVEFTDHLFNIAKPRPPWMGLLGPTIQAEVYDTVVITLKNMASHPVSLHAVGVSYWKASEGAEYDDQTSQREKEDDKVFPGGSHTYVWQVLKENGPMASDPLCLTYSYLSHVDLVKDLNSGLIGALLVCREGSLAKEKTQTLHKFILLFAVFDEGKSWHSETKNSLMQDRDAASARAWPKMHTVNGYVNRSLPGLIGCHRKSVYWHVIGMGTTPEVHSIFLEGHTFLVRNHRQASLEISPITFLTAQTLLMDLGQFLLFCHISSHQHDGMEAYVKVDSCPEEPQLRMKNNEEAEDYDDDLTDSEMDVVRFDDDNSPSFIQIRSVAKKHPKTWVHYIAAEEEDWDYAPLVLAPDDRSYKSQYLNNGPQRIGRKYKKVRFMAYTDETFKTREAIQHESGILGPLLYGEVGDTLLIIFKNQASRPYNIYPHGITDVRPLYSRRLPKGVKHLKDFPILPGEIFKYKWTVTVEDGPTKSDPRCLTRYYSSFVNMERDLASGLIGPLLICYKESVDQRGNQIMSDKRNVILFSVFDENRSWYLTENIQRFLPNPAGVQLEDPEFQASNIMHSINGYVFDSLQLSVCLHEVAYWYILSIGAQTDFLSVFFSGYTFKHKMVYEDTLTLFPFSGETVFMSMENPGLWILGCHNSDFRNRGMTALLKVSSCDKNTGDYYEDSYEDISAYLLSKNNAIEPRSFSQNSRHPSTRQKQFNATTIPENDIEKTDPWFAHRTPMPKIQNVSSSDLLMLLRQSPTPHGLSLSDLQEAKYETFSDDPSPGAIDSNNSLSEMTHFRPQLHHSGDMVFTPESGLQLRLNEKLGTTAATELKKLDFKVSSTSNNLISTIPSDNLAAGTDNTSSLGPPSMPVHYDSQLDTTLFGKKSSPLTESGGPLSLSEENNDSKLLESGLMNSQESSWGKNVSSTESGRLFKGKRAHGPALLTKDNALFKVSISLLKTNKTSNNSATNRKTHIDGPSLLIENSPSVWQNILESDTEFKKVTPLIHDRMLMDKNATALRLNHMSNKTTSSKNMEMVQQKKEGPIPPDAQNPDMSFFKMLFLPESARWIQRTHGKNSLNSGQGPSPKQLVSLGPEKSVEGQNFLSEKNKVVVGKGEFTKDVGLKEMVFPSSRNLFLTNLDNLHENNTHNQEKKIQEEIEKKETLIQENVVLPQIHTVTGTKNFMKNLFLLSTRQNVEGSYDGAYAPVLQDFRSLNDSTNRTKKHTAHFSKKGEEENLEGLGNQTKQIVEKYACTTRISPNTSQQNFVTQRSKRALKQFRLPLEETELEKRIIVDDTSTQWSKNMKHLTPSTLTQIDYNEKEKGAITQSPLSDCLTRSHSIPQANRSPLPIAKVSSFPSIRPIYLTRVLFQDNSSHLPAASYRKKDSGVQESSHFLQGAKKNNLSLAILTLEMTGDQREVGSLGTSATNSVTYKKVENTVLPKPDLPKTSGKVELLPKVHIYQKDLFPTETSNGSPGHLDLVEGSLLQGTEGAIKWNEANRPGKVPFLRVATESSAKTPSKLLDPLAWDNHYGTQIPKEEWKSQEKSPEKTAFKKKDTILSLNACESNHAIAAINEGQNKPEIEVTWAKQGRTERLCSQNPPVLKRHQREITRTTLQSDQEEIDYDDTISVEMKKEDFDIYDEDENQSPRSFQKKTRHYFIAAVERLWDYGMSSSPHVLRNRAQSGSVPQFKKVVFQEFTDGSFTQPLYRGELNEHLGLLGPYIRAEVEDNIMVTFRNQASRPYSFYSSLISYEEDQRQGAEPRKNFVKPNETKTYFWKVQHHMAPTKDEFDCKAWAYFSDVDLEKDVHSGLIGPLLVCHTNTLNPAHGRQVTVQEFALFFTIFDETKSWYFTENMERNCRAPCNIQMEDPTFKENYRFHAINGYIMDTLPGLVMAQDQRIRWYLLSMGSNENIHSIHFSGHVFTVRKKEEYKMALYNLYPGVFETVEMLPSKAGIWRVECLIGEHLHAGMSTLFLVYSNKCQTPLGMASGHIRDFQITASGQYGQWAPKLARLHYSGSINAWSTKEPFSWIKVDLLAPMIIHGIKTQGARQKFSSLYISQFIIMYSLDGKKWQTYRGNSTGTLMVFFGNVDSSGIKHNIFNPPIIARYIRLHPTHYSIRSTLRMELMGCDLNSCSMPLGMESKAISDAQITASSYFTNMFATWSPSKARLHLQGRSNAWRPQVNNPKEWLQVDFQKTMKVTGVTTQGVKSLLTSMYVKEFLISSSQDGHQWTLFFQNGKVKVFQGNQDSFTPVVNSLDPPLLTRYLRIHPQSWVHQIALRMEVLGCEAQDLY

SEQ ID NO: 22891 - protein, 216 aa, Homo sapiens
MRIQDPGKVFFGNVDSSGIKHNIFNPPIIARYIRLHPTHYSIRSTLRMELMGCDLNSCSMPLGMESKAISDAQITASSYFTNMFATWSPSKARLHLQGRSNAWRPQVNNPKEWLQVDFQKTMKVTGVTTQGVKSLLTSMYVKEFLISSSQDGHQWTLFFQNGKVKVFQGNQDSFTPVVNSLDPPLLTRYLRIHPQSWVHQIALRMEVLGCEAQDLY

SEQ ID NO: 22892 - protein, 142 aa, Homo sapiens
MSLTKTERTIIVSMWAKISTQADTIGTETLERLFLSHPQTKTYFPHFDLHPGSAQLRAHGSKVVAAVGDAVKSIDDIGGALSKLSELHAYILRVDPVNFKLLSHCLLVTLAARFPADFTAEAHAAWDKFLSVVSSVLTEKYR

SEQ ID NO: 22893 - protein, 369 aa, Homo sapiens
MDPRKVNELRAFVKMCKQDPSVLHTEEMRFLREWVESMGGKVPPATQKAKSEENTKEEKPDSKKVEEDLKADEPSSEESDLEIDKEGVIEPDTDAPQEMGDENAEITEEMMDQANDKKVAAIEALNDGELQKAIDLFTDAIKLNPRLAILYAKRASVFVKLQKPNAAIRDCDRAIEINPDSAQPYKWRGKAHRLLGHWEEAAHDLALACKLDYDEDASAMLKEVQPRAQKIAEHRRKYERKREEREIKERIERVKKAREEHERAQREEEARRQSGAQYGSFPGGFPGGMPGNFPGGMPGMGGGMPGMAGMPGLNEILSDPEVLAAMQDPEVMVAFQDVAQNPANMSKYQSNPKVMNLISKLSAKFGGQA

SEQ ID NO: 22894 - protein, 370 aa, Homo sapiens
MPTETLQTGSMVKPVSPAGTFTSAVPLRILNKGPDYFRRQAEPNPKRLSAVERLEADKAKYVKSQEVINAKQEPVKPAVLAKPPVCPAAKRALGSPTLKVFGNHAKTESGVQRENLKLEILKNIINSSEGSSSGSGHKHSSRNWPPHRSEATDLHRHSFAESLKVYPTQGRRSPQEGGSHVGRRLLEQSAESFLHVSHSSSDIRKVTSVKPLKAIPCSSSAPPLPPKPKIAAIASMKSPEADPVEPACGVSRRPSLQRSKSDLSDRYFRVDADVERFFNYCGLDPEELENLGMENFARANSDIISLNFRSASMISSDCEQSQDSNSDLRNDDSANDRVPYGISAIERNARIIKWLYSIKQARESQKVSHV

SEQ ID NO: 22895 - protein, 1335 aa, Homo sapiens
MLSPTFVLWEVGYPLYIYGSIFIVIVIIWQVKRSHHELSSEPKRSCCRCHQKVRQRARDAASTARRRSREEAEKPQKLLSIIKSQGWLPLERSVRRILCADPCCQICNSVALEIQQLLVGENNQISLTLSGPLQGSSCLEMLSTSSMSLDQSLEFHSWHTRELSLSSVTPTLSQLTDQKSLTQSAAQSTYADGIQDYWADHLQLGQEFQVPDVLRGPNTIASSRIEKPRAPLNQEEMTQSNPSLVQGNQGQHHLNSQVSLLSLNPETLNRMHPMALHMVLPAHLPFLSPEVLRLLEVHVKKWMHFQRWGLPRRVEESLRQLMPNPPLYYQPGNDQPVSFNLKNTPQVSLHRFETISLQTWCSCVAGQPIQTFWVSEWSTMNPEQRHHCQQTPNPMALALPSPALKALSGPHPQSGGQDNDSGSDLQQKYSQLFCGLPSLHSESLVATFMGSQGLPKIENVPKPPLKDPFLFNELSFPQLLPKTSPQSAPPSSPLSPNWMSPSDHQRAQINVPFLTLAEYEALEWHLLQRQLQLQWGWPAALQRSQHTQCLMQHEPCGKAQSPETTTASQTGKSISVLTRELLFFPEHARKLLEFHIQKQLIRHRWGLPQKIQQSIQLLLTSTDQQTVSSSSTALANVSIPQPVALEANGACDVLSPIAAPVSIPRPHLLTQVKAILQSHIDSKCGQIHQGKIPACVHRSWDCRISGVLAVAPFPCIPESQFLELQTASDPDLHHKVMPWMPTALDQQQQALPGTVTEHPKLLRVLSVEAIEKLETTLRHKHLAFLSGLPALYYVALPRALAPAVTSQSVITEMEPSPVEIPAEPLIQMVSFEEQCISLGPCPQGNNESCTDVAKEFQPAVPVKGTMETLPLESQTHPTSPHSLQTHILTKLNFHLRKKVLEIQWGIPIRARKSREQTVAAPENISTQKSLESLNHQGETLLQELPIPPDTLPAPNPEGVHLKEQLANDLKAVQQNQKQSNSKAVPQGSAHSVSKISQPSGDMTEAHMPCVQVEANVNKPSLEEPCGPEPQSPSKSKDPAHVPMLAGNREDPEETKAARDHREGDAGFGRSSTREERRPAEDQRPAGMLPNKTPRGSWRWSRSFHLADPCQHSPQHHPQLKLPQLPPRVPGEKESEKDLQDSQTKLTVILEPATIPENAQTVLPQASQGQPFLSQPTQAKPLQGQTLQGQVLHGLVMPVHAQKKPSLTESSFRNKIKCFLQHINPKTKGKGHEDSMFSAAAKVAKTRKENVAKSLAPAKSPVGRSKTEKPTGCSKAQSRPAQKLVGPAFLDGPQSLDDKLRLHSRQPGSASALGYPRHCPRHCPREACANKPGHPT

SEQ ID NO: 22896 - protein, 272 aa, Homo sapiens
MQWNVPRTVSRLARRTCLEPHNAGLFGHCQNVKGPLLLYNAESKVVLVQGPQKQWLHLSAAQCVAKERRPLDAHPPQPGVLRHKQGKQHVSFRRVFSSSATAQGTPEKKEEPDPLQDKSISLYQRFKKTFRQYGKVLIPVHLITSGVWFGTFYYAALKGVNVVPFLELIGLPDSVVSILKNSQSGNALTAYALFKIATPARYTVTLGGTSVTVKYLRSHGYMSTPPPVKEYLQDRMEETKELITEKMEETKDRLTEKLQETKEKVSFKKKVE

SEQ ID NO: 22897 - protein, 977 aa, Homo sapiens
MPARRLLLLLTLLLPGLGIFGSTSTVTLPETLLFVSTLDGSLHAVSKRTGSIKWTLKEDPVLQVPTHVEEPAFLPDPNDGSLYTLGSKNNEGLTKLPFTIPELVQASPCRSSDGILYMGKKQDIWYVIDLLTGEKQQTLSSAFADSLCPSTSLLYLGRTEYTITMYDTKTRELRWNATYFDYAASLPEDDVDYKMSHFVSNGDGLVVTVDSESGDVLWIQNYASPVVAFYVWQREGLRKVMHINVAVETLRYLTFMSGEVGRITKWKYPFPKETEAKSKLTPTLYVGKYSTSLYASPSMVHEGVAVVPRGSTLPLLEGPQTDGVTIGDKGECVITPSTDVKFDPGLKSKNKLNYLRNYWLLIGHHETPLSASTKMLERFPNNLPKHRENVIPADSEKKSFEEVINLVDQTSENAPTTVSRDVEEKPAHAPARPEAPVDSMLKDMATIILSTFLLIGWVAFIITYPLSMHQQQQLQHQQFQKELEKIQLLQQQQQQLPFHPPGDTAQDGELLDTSGPYSESSGTSSPSTSPRASNHSLCSGSSASKAGSSPSLEQDDGDEETSVVIVGKISFCPKDVLGHGAEGTIVYRGMFDNRDVAVKRILPECFSFADREVQLLRESDEHPNVIRYFCTEKDRQFQYIAIELCAATLQEYVEQKDFAHLGLEPITLLQQTTSGLAHLHSLNIVHRDLKPHNILISMPNAHGKIKAMISDFGLCKKLAVGRHSFSRRSGVPGTEGWIAPEMLSEDCKENPTYTVDIFSAGCVFYYVISEGSHPFGKSLQRQANILLGACSLDCLHPEKHEDVIARELIEKMIAMDPQKRPSAKHVLKHPFFWSLEKQLQFFQDVSDRIEKESLDGPIVKQLERGGRAVVKMDWRENITVPLQTDLRKFRTYKGGSVRDLLRAMRNKKHHYRELPAEVRETLGSLPDDFVCYFTSRFPHLLAHTYRAMELCSHERLFQPYYFHEPPEPQPPVTPDAL

SEQ ID NO: 22898 - protein, 70 aa, Homo sapiens
MPARRLLLLLTLLLPGLGVSDRGAWGGGQLATAGSGPGQRRGAGAGVRAGSATAAARCPVSPAVGGSGRA

SEQ ID NO: 22899 - protein, 248 aa, Homo sapiens
MGKRDNRVAYMNPIAMARWRGPTQSVGPTIQDYLNRPRPTWEEVKKQLENKKTGSKALAEFEEKMNENWKKELEKSREKLLSGNESSSKKRERKKKRKKKSCRSSSSSSSSDSSSSSSDSEDEEKKQGKRRKKKKNRSYKSSQSSTHESESESKESVKKKKKSKDETEKEKDVRSLSKKRKKSYPDDKPLSSESSSESDYEEDVQAKKKRRCEEREQAKEKVKKKKKKQHKKHSKKKKKKSGSSHKSR

SEQ ID NO: 22900 - protein, 471 aa, Homo sapiens
MSPEMGELTQTRLQKIWIPHSSGSSRLQRRRGSSIPQFTNSPTMVIMVGLPARGKTYISTKLTRYLNWIGTPTKVFNLGQYRREAVSYKNYEFFLPDNMEALQIRKQCALAALKDVHNYLSHEEGHVAVFDATNTTRERRSLILQFAKEHGYKVFFIESICNDPGIIAENIRQVKLGSPDYIDCDREKVLEDFLKRIECYEVNYQPLDEELDSHLSYIKIFDVGTRYMVNRVQDHIQSRTVYYLMNIHVTPRSIYLCRHGESELNIRGRIGGDSGLSVRGKQYAYALANFIQSQGISSLKVWTSHMKRTIQTAEALGVPYEQWKALNEIDAGVCEEMTYEEIQEHYPEEFALRDQDKYRYRYPKGESYEDLVQRLEPVIMELERQENVLVICHQAVMRCLLAYFLDKSSDELPYLKCPLHTVLKLTPVAYGCKVESIYLNVEAVNTHREKPENVDITREPEEALDTVPAHY

SEQ ID NO: 22901 - protein, 406 aa, Homo sapiens
MEEKTSRIKVFNLGQYRREAVSYKNYEFFLPDNMEALQIRKQCALAALKDVHNYLSHEEGHVAVFDATNTTRERRSLILQFAKEHGYKVFFIESICNDPGIIAENIRQVKLGSPDYIDCDREKVLEDFLKRIECYEVNYQPLDEELDSHLSYIKIFDVGTRYMVNRVQDHIQSRTVYYLMNIHVTPRSIYLCRHGESELNIRGRIGGDSGLSVRGKQYAYALANFIQSQGISSLKVWTSHMKRTIQTAEALGVPYEQWKALNEIDAGVCEEMTYEEIQEHYPEEFALRDQDKYRYRYPKGESYEDLVQRLEPVIMELERQENVLVICHQAVMRCLLAYFLDKSSDELPYLKCPLHTVLKLTPVAYGCKVESIYLNVEAVNTHREKPENVDITREPEEALDTVPAHY

SEQ ID NO: 22902 - protein, 79 aa, Homo sapiens
MIFTPFLPPADLSVFQNVKGLQNDPEEWVAVSDATEDPSGGTGLPREPALLRGSWRSRFQRALACFTKCFRGGYRALGI

SEQ ID NO: 22903 - protein, 445 aa, Homo sapiens
MYPNPLIYCTCWDPWNLGPRKLIKTPQLPRKNSTGSSKLTPLVPAPKNHNYLQPTKPVVSPKMKIHSARQEETNKSFYEVINVSPGYQLVRNREQISVTLGDEMFDRKKRWESEIPDKGRFSRTNIISDLEEQISELTAIIEQMNRDHQSAQKLLSSEMDLRCAEMKQNFENKNRELKEAHEAELSELENNYKAALKAEKLAAQEKLEEMGKEYKYLKNMFRTYQDSIYDEMEEKWSKQKAKWKKDEKFERENILLQQKKKMTKKFEMESGEEDKKINESCSAVFENFIQEKEELLKQHQSDTLQLEELRKTKEVPWRRDQINRHWHDVLQQLLLMQVMQEELHAQALILESLNTNLYYTQLELQKEKAIVGNLEKMLQTKFAETEEKYKHTIQILTEENIHLKQKIISKNEEICEGCSGRLASITVSKDDSDTVQDGSKKGQES

SEQ ID NO: 22904 - protein, 422 aa, Homo sapiens
MYPNPLIYCTCWDPWNLGPRKLIKTPQLPRKNSTGSSKLTPLVPAPKNHNYLQPTKPVVSPKMKIHSARQEETNKSFYEVINVSPGYQLVRNREQISVTLGDEMFDRKKRWESEIPDKGRFSRTNIISDLEEQISELTAIIEQMNRDHQSAQKLLSSEMDLRCAEMKQNFENKNRELKEAHEAELSELENNYKAALKAEKLAAQEKLEEMGKEYKYLKNMFRTYQDSIYDEMEEKWSKQKAKWKKDEKFERENILLQQKKKMTKKFEMESGEEDKKINESCSAVFENFIQEKEELLKQHQSDTLQLEELRKTKEVMQEELHAQALILESLNTNLYYTQLELQKEKAIVGNLEKMLQTKFAETEEKYKHTIQILTEENIHLKQKIISKNEEICEGCSGRLASITVSKDDSDTVQDGSKKGQES

SEQ ID NO: 22905 - protein, 232 aa, Homo sapiens
MATPGRPWAQARSAYRASEVLRRVTGRRRDPGPQSNGPGREDARAPGRLARLLRQLRAEAASRSEVPRLLKLVERAGAGAAGAGERTGAHSRGSVCSVCGEPRGRATYPAGVLEVSERRLQEGLAAVREELGAEIEALRAELRAELDALRALLPPPPPSPPARREPRAVPRAAPRGPTLLRTLGTVSALVAASRPADDAPDGPAECGAHRAPARKNHKKMPVPPGAPQGGGD

SEQ ID NO: 22906 - protein, 463 aa, Homo sapiens
MTARRDPKPGAKRLVRAQTLQKQRRAPVGPRAPPPDEEDPRLKCKNCRALGHTVRSTRCPMKCWKAALVPPTLGKKEGKENLKPWKPQVEANPGPLNKDKGEKEERPRQQDPQRKALLHIFSGKPPEKLLPNRKGSTESSVFLRVASRPMPVHTTSKRPCVDPELADRSATEMSGRGSVLASLSPLRKASLRSSSSLGPKERQTGAAADIPQPAVRHQGPEPLLVVKPTHSSREGGCREVPQAASKTHGLLQAVRPQAQDKRPAVTQPGPPAATHSLGLGSNLSFRPGAKRPAQAPIQGCLNFPKKPRLGPFQIPESAIQGGELGALENLQPPPAATELGPSTSPQMGRRTPAQVPGVDRQPPHSRPCLPTAQACTMSHHPAASHDGAQPLRVLFRRLENRRWSSSLLAAPSFHSPEKLGVFLAQSPHVSEKSEGPCVRVPPNVLYEDLQVSSSSEDSDSDLQ

SEQ ID NO: 22907 - protein, 266 aa, Homo sapiens
MTARRDPKPGAKRLVRAQTLQKQRRAPVGPRAPPPDEEDPRLKCKNCRALGHTVRSTRCPMKCWKAALVPPTLGKKEGKENLKPWKPQVEANPGPLNKDKGEKEERPRQQDPQRKALLHIFSGKPPEKLLPNRKGSTESSVFLRVASRPMPVHTTSKRPCVDPELADRSATEMSGRGSVLASLSPLRKASLRSSSSLGPKERQTGAAADIPQPAVRHQGPEPLLVVKPTHSSREGGCREVPQAASKTHGLLQAVRPQAQDKRPAVT

SEQ ID NO: 22908 - protein, 158 aa, Homo sapiens
MKFGCLSFRQPYAGFVLNGIKTVETRWRPLLSSQRNCTIAVHIAHRDWEGDACRELLVERLGMTPAQIQALLRKGEKFGRGVIAGLVDIGETLQCPEDLTPDEVVELENQAALTNLKQKYLTVISNPRWLLEPIPRKGGKDVFQVDIPEHLIPLGHEV

SEQ ID NO: 22909 - protein, 924 aa, Homo sapiens
MSRSRQPPLVTGISPNEGIPWTKVTIRGENLGTGPTDLIGLTICGHNCLLTAEWMSASKIVCRVGQAKNDKGDIIVTTKSGGRGTSTVSFKLLKPEKIGILDQSAVWVDEMNYYDMRTDRNKGIPPLSLRPANPLGIEIEKSKFSQKDLEMLFHGMSADFTSENFSAAWYLIENHSNTSFEQLKMAVTNLKRQANKKSEGSLAYVKGGLSTFFEAQDALSAIHQKLEADGTEKVEGSMTQKLENVLNRASNTADTLFQEVLGRKDKADSTRNALNVLQRFKFLFNLPLNIERNIQKGDYDVVINDYEKAKSLFGKTEVQVFKKYYAEVETRIEALRELLLDKLLETPSTLHDQKRYIRYLSDLHASGDPAWQCIGAQHKWILQLMHSCKEGYVKDLKGNPGLHSPMLDLDNDTRPSVLGHLSQTASLKRGSSFQSGRDDTWRYKTPHRVAFVEKLTKLVLSQLPNFWKLWISYVNGSLFSETAEKSGQIERSKNVRQRQNDFKKMIQEVMHSLVKLTRGALLPLSIRDGEAKQYGGWEVKCELSGQWLAHAIQTVRLTHESLTALEIPNDLLQTIQDLILDLRVRCVMATLQHTAEEIKRLAEKEDWIVDNEGLTSLPCQFEQCIVCSLQSLKGVLECKPGEASVFQQPKTQEEVCQLSINIMQVFIYCLEQLSTKPDADIDTTHLSVDVSSPDLFGSIHEDFSLTSEQRLLIVLSNCCYLERHTFLNIAEHFEKHNFQGIEKITQVSMASLKELDQRLFENYIELKADPIVGSLEPGIYAGYFDWKDCLPPTGVRNYLKEALVNIIAVHAEVFTISKELVPRVLSKVIEAVSEELSRLMQCVSSFSKNGALQARLEICALRDTVAVYLTPESKSSFKQALEALPQLSSGADKKLLEELLNKFKSSMHLQLTCFQAASSTMMKT

SEQ ID NO: 22910 - protein, 344 aa, Homo sapiens
MLSSFPHRKTWRKSKKTVKVTRSYPTFPSLNAWEEFRGLLPVDGEPNPGAGLGVEEGLLCRVVHSPEFNLFLDSVVFESNFIQVKRGRNWRDVYKASNTMALGVTSSVPCLPLPNILLMASVKWHQGQNQTWNRPSIAPNIFLKRILPLRFVELQVCDHYQRILQLRTVTEKIYYLKLHPDHPETVFHFWIRLVQILQKGLSITTKDPRILVTHCLVPKNCSSPSGDSKLVQKKLQASQPSESLIQLMTKGESEALSQIFADLHQQNQLSFRSSRKVETNKNSSGKDSSREDSIPCTCDLRWRASFTYGEWERENPSGLQPLSLLSTLAASTGPQLAPPIGNSI

SEQ ID NO: 22911 - protein, 342 aa, Homo sapiens
MLSSFPHRKTWRKSKKTVKVTRSYPTFPSLNAWEEFRGLLPVDGEPNPGAGLGVEEGLLCRVVHSPEFNLFLDSVVFESNFIQVKRGRNWRDVYKASNTMALGVTSSVPCLPLPNILLMASVKWHQGQNQTWNRPSIAPNIFLKRILPLRFVELQVCDHYQRILQLRTVTEKIYYLKLHPDHPETVFHFWIRLVQILQKGLSITTKDPRILVTHCLVPKNCSSPSGDSKLVQKKLQASQPSESLIQLMTKGESEALSQIFADLHQQNQLRSSRKVETNKNSSGKDSSREDSIPCTCDLRWRASFTYGEWERENPSGLQPLSLLSTLAASTGPQLAPPIGNSI

SEQ ID NO: 22912 - protein, 243 aa, Homo sapiens
MELDGQKGQELERRLQSFQHHGPGGDLLGTLPAPPQHPTHGQCQMAPGAEPDMEQTIHSPQHLPEELRTVTEKIYYLKLHPDHPETVFHFWIRLVQILQKGLSITTKDPRILVTHCLVPKNCSSPSGDSKLVQKKLQASQPSESLIQLMTKGESEALSQIFADLHQQNQLRSSRKVETNKNSSGKDSSREDSIPCTCDLRWRASFTYGEWERENPSGLQPLSLLSTLAASTGPQLAPPIGNSI

SEQ ID NO: 22913 - protein, 464 aa, Homo sapiens
MMARRDPKSWAKRLVRAQTLQKQRRAPVGPRAPPPDEEDPRLKCKNCGAFGHTARSTRCPMKCWKAALVPATLGKKEGKENLKPWKPRVEANPGPLNKDKGEKEERPRQQDPQRKALLHMFSGKPPEKPLPNGKGSTESSDHLRVASGPMPVHTTSKRPRVDPVLADRSAAEMSGRGSVLASLSPLRKASLSSSSSLGPKERQTGAAADMPQPAVRHQGREPLLVVKPTHSSPEGGCREVPQAASKTHGLLQAARPQAQDKRPAVTSQPCPPAATHSLGLGSNLSFGPGAKRPAQAPIQACLKFPKKPRLGPFQIPESAIQGGELGAPGNLQPPPAATELGPSTSPQMGRRTPAQVPSVDWQPPHSTPCLPTAQACTMSHHSAASHDGAQPLRVLFRRLENGRWSSSLLAAPSFHSPEKPGAFLAQSPHVSEKSEAPCVRVPPSVLYEDLQVSSSSEDSDSDLE

SEQ ID NO: 22914 - protein, 383 aa, Homo sapiens
MEALGKLKQFDAYPKTLEDFRVKTCGGATVTIVSGLLMLLLFLSELQYYLTTEVHPELYVDKSRGDKLKINIDVLFPHMPCAYLSIDAMDVAGEQQLDVEHNLFKQRLDKDGIPVSSEAERHELGKVEVTVFDPDSLDPDRCESCYGAEAEDIKCCNTCEDVREAYRRRGWAFKNPDTIEQCRREGFSQKMQEQKNEGCQVYGFLEVNKVAGNFHFAPGKSFQQSHVHVHDLQSFGLDNINMTHYIQHLSFGEDYPGIVNPLDHTNVTAPQASMMFQYFVKVVPTVYMKVDGEVLRTNQFSVTRHEKVANGLLGDQGLPGVFVLYELSPMMVKLTEKHRSFTHFLTGVCAIIGGMFTVAGLIDSLIYHSARAIQKKIDLGKTT

SEQ ID NO: 22915 - protein, 230 aa, Homo sapiens
MEALGKLKQFDAYPKTLEDFRVKTCGGATVTIVSGLLMLLLFLSELQYYLTTEVHPELYVDKSRGDKLKINIDVLFPHMPCAYLSIDAMDVAGEQQLDVEHNLFKQRLDKDGIPVSSEAERHELGKVEVTVFDPDSLDPDRCESCYGAEAEDIKCCNTCEDVREAYRRRGWAFKNPDTIEQCRREGFSQKMQEQKNEGCQVYGFLEVNKVAGNFHFAPGKSFQQSHVHGE

SEQ ID NO: 22916 - protein, 388 aa, Homo sapiens
MEALGKLKQFDAYPKTLEDFRVKTCGGATVTIVSGLLMLLLFLSELQYYLTTEVHPELYVDKSRGDKLKINIDVLFPHMPCAYLSIDAMDVAGEQQLDVEHNLFKQRLDKDGIPVSSEAERHELGKVEVTVFDPDSLDPDRCESCYGAEAEDIKCCNTCEDVREAYRRRGWAFKNPDTIEQCRREGFSQKMQEQKNEGCQVYGFLEVNKVAGNFHFAPGKSFQQSHVHVHAVEIHDLQSFGLDNINMTHYIQHLSFGEDYPGIVNPLDHTNVTAPQASMMFQYFVKVVPTVYMKVDGEVLRTNQFSVTRHEKVANGLLGDQGLPGVFVLYELSPMMVKLTEKHRSFTHFLTGVCAIIGGMFTVAGLIDSLIYHSARAIQKKIDLGKTT

SEQ ID NO: 22917 - protein, 459 aa, Homo sapiens
MARHSVHHQAQRPPRAKNPQEQQRRPMGQTTLPAEQEESRVKCKNCGAFGHSARSKTCPIKRWSGALPLQALGSHKEKENLKPAKAQLPFTTPGPFTTNDREKERSPSPQQQQSEAPTQTFPRTPQEKMQEAWKEPAEDCLFLRHPTMPLPVHTTKKRSVLGPVSTGPPPVNKPEMRLLCPSGHNDSPQLSTCGPTKGHGRDVTASLLPVLKSSHQTPTLSARLPANRPDMSSHGALQPAMQALALGPGLKSQAEIKHPDADAKPRPQQVRKQCGQDSRTQAPDKEPAPVPTQTFQNPAKKARFSSFQTPALRTQLPDVGAVQTLQPPRTATGLGSKEAPKATAETAATKTATLQPRVNLQPAPSSPFLGPAQGCPVLQPGPPIHVPGRPGSVTFMRGDKGQKSPRFRMPPTSRPPENSASAQSPRFSRQPEGQGPQVSTSVLYEDLLVTSSSEDSDSD

SEQ ID NO: 22918 - protein, 464 aa, Homo sapiens
MMARRDPKSWAKRLVRAQTLQKQRRARVGPRAPPPDEEDPRLKCKNCGAFGHTARSTRCPMKCWKAALVPATLGKKEGKENLKPWKPRAEANPGPLNKDKGEKEERPRQQDPQRKALLHMFSGKPPEKPLPNGKGSTESSDYLRVASGPMPVHTTSKRPRLDPVLADRSATEMSGRGSVLASLSPLRKTSLSSSSSLGPKERQTGAAADMPQPAVRHQGPEPLLEVKPTHSRPEGGCQEVPQAASKTHGLLQASRPQAQDKRPAVTPQPCPPAATHSLGLGSNLSFGPGAKKPAQAPIQACLNFPKKPRLGPFQIPESAIQGGELGAPENLQPPPAATELGPSTSPQMGRRTPAQVPSVDRQPPHSRPCLPTAQACTMSHHSAAGHDGAQPLRVLFRRLENGRWSSSLLAAPSFHSPEKPGAFLAQSPHVSEKSEAPCVRVPPSVLYEDLQVSSSSEDSDSDLE

SEQ ID NO: 22919 - protein, 368 aa, Homo sapiens
MAIKSIASRLRGSRRFLSGFVAGAVVGAAGAGLAALQFFRSQGAEGALTGKQPDGSAEKAVLEQFGFPLTGTEARCYTNHALSYDQAKRVPRWVLEHISKSKIMGDADRKHCKFKPDPNIPPTFSAFNEDYVGSGWSRGHMAPAGNNKFSSKAMAETFYLSNIVPQDFDNNSGYWNRIEMYCRELTERFEDVWVVSGPLTLPQTRGDGKKIVSYQVIGEDNVAVPSHLYKVILARRSSVSTEPLALGAFVVPNEAIGFQPQLTEFQVSLQDLEKLSGLVFFPHLDRTSDIRNICSVDTCKLLDFQEFTLYLSTRKIEGARSVLRLEKIMENLKNAEIEPDDYFMSRYEKKLEELKAKEQSGTQIRKPS

SEQ ID NO: 22920 - protein, 149 aa, Homo sapiens
MAPAGNNKFSSKAMAETFYLSNIVPQDFDNNSGYWNRIEMYCRELTERFEDVWVVSGPLTLPQTRGDGKKIVSYQVIGEDNVAVPSHLYKDHAGCCVESPLGTRTSEEATARIQERDDGGSDQRSGLVELGIYFEGRANRISGRIGCRV

SEQ ID NO: 22921 - protein, 228 aa, Homo sapiens
MAPAGNNKFSSKAMAETFYLSNIVPQDFDNNSGYWNRIEMYCRELTERFEDVWVVSGPLTLPQTRGDGKKIVSYQVIGEDNVAVPSHLYKVILARRSSVSTEPLALGAFVVPNEAIGFQPQLTEFQVSLQDLEKLSGLVFFPHLDRTSDIRNICSVDTCKLLDFQEFTLYLSTRKIEGARSVLRLEKIMENLKNAEIEPDDYFMSRYEKKLEELKAKEQSGTQIRKPS

SEQ ID NO: 22922 - protein, 318 aa, Homo sapiens
MAIKSIASRLRGSRRFLSGFVAGAVVGAAGAGLAALQFFRSQGAEGALTGKQPDGDADRKHCKFKPDPNIPPTFSAFNEDYVGSGWSRGHMAPAGNNKFSSKAMAETFYLSNIVPQDFDNNSGYWNRIEMYCRELTERFEDVWVVSGPLTLPQTRGDGKKIVSYQVIGEDNVAVPSHLYKVILARRSSVSTEPLALGAFVVPNEAIGFQPQLTEFQVSLQDLEKLSGLVFFPHLDRTSDIRNICSVDTCKLLDFQEFTLYLSTRKIEGARSVLRLEKIMENLKNAEIEPDDYFMSRYEKKLEELKAKEQSGTQIRKPS

SEQ ID NO: 22923 - protein, 156 aa, Homo sapiens
METVNEPETGEVSKDAVIVKQEKNNEYCLQDIDDKLSESAEDDGEDDTNDEDDDEDSNPKKNTQAPLELMAEFLRAEMAREYQLAKKLCQMILIYEPENPEAKEFFTLIEEMLLMEKTQNHEQDGENSDEDSSGESKGESDEELSDESSDEGEDGS

SEQ ID NO: 22924 - protein, 864 aa, Homo sapiens
MAAPLIPLSQQIPTGNSLYESYYKQVDPAYTGRVGASEAALFLKKSGLSDIILGKIWDLADPEGKGFLDKQGFYVALRLVACAQSGHEVTLSNLNLSMPPPKFHDTSSPLMVTPPSAEAHWAVRVEEKAKFDGIFESLLPINGLLSGDKVKPVLMNSKLPLDVLGRVWDLSDIDKDGHLDRDEFAVAMHLVYRALEKEPVPSALPPSLIPPSKRKKTVFPGAVPVLPASPPPKDSLRSTPSHGSVSSLNSTGSLSPKHSLKQTQPTVNWVVPVADKMRFDEIFLKTDLDLDGYVSGQEVKEIFMHSGLTQNLLAHIWALADTRQTGKLSKDQFALAMYFIQQKVSKGIDPPQVLSPDMVPPSERGTPGPDSSGSLGSGEFTGVKELDDISQEIAQLQREKYSLEQDIREKEEAIRQKTSEVQELQNDLDRETSSLQELEAQKQDAQDRLDEMDQQKAKLRDMLSDVRQKCQDETQMISSLKTQIQSQESDLKSQEDDLNRAKSELNRLQQEETQLEQSIQAGRVQLETIIKSLKSTQDEINQARSKLSQLHESRQEAHRSLEQYDQVLDGAHGASLTDLANLSEGVSLAERGSFGAMDDPFKNKALLFSNNTQELHPDPFQTEDPFKSDPFKGADPFKGDPFQNDPFAEQQTTSTDPFGGDPFKESDPFRGSATDDFFKKQTKNDPFTSDPFTKNPSLPSKLDPFESSDPFSSSSVSSKGSDPFGTLDPFGSGSFNSAEGFADFSQMSKPPPSGPFTSSLGGAGFSDDPFKSKQDTPALPPKKPAPPRPKPPSGKSTPVSQLGSADFPEAPDPFQPLGADSGDPFQSKKGFGDPFSGKDPFVPSSAAKPSKASASGFADFTSVS

SEQ ID NO: 22925 - protein, 910 aa, Homo sapiens
MAAPLIPLSQQIPTGNSLYESYYKQVDPAYTGRVGASEAALFLKKSGLSDIILGKIWDLADPEGKGFLDKQGFYVALRLVACAQSGHEVTLSNLNLSMPPPKFHDTSSPLMVTPPSAEAHWAVRVEEKAKFDGIFESLLPINGLLSGDKVKPVLMNSKLPLDVLGRVWDLSDIDKDGHLDRDEFAVAMHLVYRALEKEPVPSALPPSLIPPSKRKKTVFPGAVPVLPASPPPKDSLRSTPSHGSVSSLNSTGSLSPKHSLKQTQPTVNWVVPVADKMRFDEIFLKTDLDLDGYVSGQEVKEIFMHSGLTQNLLAHIWALADTRQTGKLSKDQFALAMYFIQQKVSKGIDPPQVLSPDMVPPSERGTPGPDSSGSLGSGEFTGVKELDDISQEIAQLQREKYSLEQDIREKEEAIRQKTSEVQELQNDLDRETSSLQELEAQKQDAQDRLDEMDQQKAKLRDMLSDVRQKCQDETQMISSLKTQIQSQESDLKSQEDDLNRAKSELNRLQQEETQLEQSIQAGRVQLETIIKSLKSTQDEINQARSKLSQLHESRQEAHRSLEQYDQVLDGAHGASLTDLANLSEGVSLAERGSFGAMDDPFKNKALLFSNNTQELHPDPFQTEDPFKSDPFKGADPFKGDPFQNDPFAEQQTTSTDPFGGDPFKESDPFRGSATDDFFKKQTKNDPFTSDPFTKNPSLPSKLDPFESSDPFSSSSVSSKGSDPFGTLDPFGSGSFNSAEGFADFSQMSKPPPSGPFTSSLGGAGFSDDPFKSKQDTPALPPKKPAPPRPKPPSGKSTPVSQLGSADFPEAPDPFQPLGADSGDPFQSKKGFGDPFSGKDPFVPSSAAKPSKASASGFADFTSFGNEEQQLAWAKRESEKAEQERLARLRRQEQEDLELAIALSKADMPAA

SEQ ID NO: 22926 - protein, 754 aa, Homo sapiens
MAAPLIPLSQQIPTGNSLYESYYKQVDPAYTGRVGASEAALFLKKSGLSDIILGKIWDLADPEGKGFLDKQGFYVALRLVACAQSGHEVTLSNLNLSMPPPKFHDTSSPLMVTPPSAEAHWAVRVEEKAKFDGIFESLLPINGLLSGDKVKPVLMNSKLPLDVLGRVWDLSDIDKDGHLDRDEFAVAMHLVYRALEKEPVPSALPPSLIPPSKRKKTVFPGAVPVLPASPPPKDSLRSTPSHGSVSSLNSTGSLSPKHSLKQTQPTVNWVVPVADKMRFDEIFLKTDLDLDGYVSGQEVKEIFMHSGLTQNLLAHIWALADTRQTGKLSKDQFALAMYFIQQKVSKGIDPPQVLSPDMVPPSERGTPGPDSSGSLGSGEFTGVKELDDISQEIAQLQREKYSLEQDIREKEEAIRQKTSEVQELQNDLDRETSSLQELEAQKQDAQDRLDEMDQQKAKLRDMLSDVRQKCQDETQMISSLKTQIQSQESDLKSQEDDLNRAKSELNRLQQEETQLEQSIQAGRVQLETIIKSLKSTQDEINQARSKLSQLHESRQEAHRSLEQYDQVLDGAHGASLTDLANLSEGVSLAERGSFGAMDDPFKNKALLFSNNTQELHPDPFQTEDPFKSDPFKGADPFKGDPFQNDPFAEQQTTSTDPFGGDPFKESDPFRGSATDDFFKKQTKNDPFTSDPFTKNPSLPSKLDPFESSDPFSSSSVSSKGSDPFGTLDPFGSGSFNSAEGFADFSQMSKVKVHL

SEQ ID NO: 22927 - protein, 601 aa, Homo sapiens
MAAPLIPLSQQIPTGNSLYESYYKQVDPAYTGRVGASEAALFLKKSGLSDIILGKIWDLADPEGKGFLDKQGFYVALRLVACAQSGHEVTLSNLNLSMPPPKFHDTSSPLMVTPPSAEAHWAVRVEEKAKFDGIFESLLPINGLLSGDKVKPVLMNSKLPLDVLGRVWDLSDIDKDGHLDRDEFAVAMHLVYRALEKEPVPSALPPSLIPPSKRKKTVFPGAVPVLPASPPPKDSLRSTPSHGSVSSLNSTGSLSPKHSLKQTQPTVNWVVPVADKMRFDEIFLKTDLDLDGYVSGQEVKEIFMHSGLTQNLLAHIWALADTRQTGKLSKDQFALAMYFIQQKVSKGIDPPQVLSPDMVPPSERGTPGPDSSGSLGSGEFTGVKELDDISQEIAQLQREKYSLEQDIREKEEAIRQKTSEVQELQNDLDRETSSLQELEAQKQDAQDRLDEMDQQKAKLRDMLSDVRQKCQDETQMISSLKTQIQSQESDLKSQEDDLNRAKSELNRLQQEETQLEQSIQAGRVQLETIIKSLKSTQDEINQARSKLSQLHESRQEAHRSLEQYDQVLDGAHGASLTDLANLSEGVSLAERGSFGAMVKVE

SEQ ID NO: 22928 - protein, 278 aa, Homo sapiens
MWPFPSRSLFPPPTQAWLQTVSSDPEAQGWGAWNETKEILGPEGGEGKEEKEEEEDAEEDQDGDAGFLLSLLEQENLAECPLPDQELEAIKMKVCAMEQAEGTPRPPGVQQQAEEEEGTAAGQLLSPETVGCPLSGTPEEKVEADHRSVYVGNVDYGGSAEELEAHFSRCGEVHRVTILCDKFSGHPKGYAYIEFATKGSVQAAVELDQSLFRGRVIKVLPKRTNFPGISSTDRGGLRGHPGSRGAPFPHSGLQGRPRLRPQGQNRARGKFSPWFSPY

SEQ ID NO: 22929 - protein, 255 aa, Homo sapiens
MWPFPSRSLFPPPTQAWLQTVSSDPEAQGWGAWNETKEILGPEGGEGKEEKEEEEDAEEDQDGDAGFLLSLLEQENLAECPLPDQELEAIKMKVCAMEQAEGTPRPPGVQQQAEEEEGTAAGQLLSPETVGCPLSGTPEEKVEADHRSVYVGNVDYGGSAEELEAHFSRCGEVHRVTILCDKFSGHPKGCCRKEPTSLGSAPQTAGAFEDTQAPGGHPSPTAASRAGPGSDHKGRTGPVENSHHGFHRIKGKTRF

SEQ ID NO: 22930 - protein, 289 aa, Homo sapiens
MWPFPSRSLFPPPTQAWLQTVSSDPEAQGWGAWNETKEILGPEGGEGKEEKEEEEDAEEDQDGDAGFLLSLLEQENLAECPLPDQELEAIKMKVCAMEQAEGTPRPPGVQQQAEEEEGTAAGQLLSPETVGCPLSGTPEEKVEADHRSVYVGNVDYGGSAEELEAHFSRCGEVHRVTILCDKFSGHPKGYAYIEFATKGSVQAAVELDQSLFRGRVIKVLPKRTNFPGISSTDRGGLRGHPGSRGAPFPHSGLQGRPRLRPQGQNRTPAALTPLWARPLPWVVVSHVIK

SEQ ID NO: 22931 - protein, 267 aa, Homo sapiens
MWPFPSRSLFPPPTQAWLQTVSSDPEAQGWGAWNETKEILGPEGGEGKEEKEEEEDAEEDQDGDAGFLLSLLEQENLAECPLPDQELEAIKMKVCAMEQAEGTPRPPGVQQQAEEEEGTAAGQLLSPETVGCPLSGTPEEKVEADHRSVYVGNLCLHRVCHQGLRAGRRGAGPEPLPGPGHQGAAEKNQLPWDQLHRPRGPSRTPRLQGGTLPPQRPPGQAPAQTTRAEPGPWKILTMVFTVLKGRPDFERGAGAWIRSKPLVLHPG

SEQ ID NO: 22932 - protein, 440 aa, Homo sapiens
MAVKLGTLLLALALGLAQPASARRKLLVFLLDGFRSDYISDEALESLPGFKEIVSRGVKVDYLTPDFPSLSYPNYYTLMTGRHCEVHQMIGNYMWDPTTNKSFDIGVNKDSLMPLWWNGSEPLWVTLTKAKRKVYMYYWPGCEVEILGVRPTYCLEYKNVPTDINFANAVSDALDSFKSGRADLAAIYHERIDVEGHHYGPASPQRKDALKAVDTVLKYMTKWIQERGLQDRLNVIIFSDHGMTDIFWMDKVIELNKYISLNDLQQVKDRGPVVSLWPAPGKHSEIYNKLSTVEHMTVYEKEAIPSRFYYKKGKFVSPLTLVADEGWFITENREMLPFWMNSTGRREGWQRGWHGYDNELMDMRGIFLAFGPDFKSNFRAAPIRSVDVYNVMCNVVGITPLPNNGSWSRVMCMLKGRASTAPPVWPSHCALALILLFLLA

SEQ ID NO: 22933 - protein, 663 aa, Homo sapiens
MAHLRSPSGFGDPGKKDQKESEEELEEEEEEEEVEEEEEEVEEEEEEVEEEEEEVVEEELVGEEQELEAPETFSEEYLWKVTDIGDYDDDFPDVRPRLASIVSPSLTSTFVPSQSATSTETPSASPPSSTSSHKSFPKIFQTFRKDMSEMSIDRNIHRNLSPGIPVSVQTEESWLQDLSDKVQSRKKASKEKAEPECLASKLREKWVINPEESKLNILYELEFKEDFITLFEPSLRTLPSIGPPSILAYKEESSNLGINFKDEEEETSPKCEFCGSDLRAFFSNVDVSSEPKGHASCCIAFQNLIDYIYEEQIKTKPPKAELIAIDPHAAHGSEVDRLKAKEKALQRKQEQRMARHFAIISREQTHFSEDDSKRLKTISYQLSVDIPEKQIIDDIVFDFQLRNSNMSIICCDSRIACGKVVRNELLEKHYKHGSKFLTSFPDGTTQIFYPSGNLAIIRVPNKVNGFTCIVQEDMPTNPAILAVLDSSGRSSCYHPNGNVWVYINILGGQYSDQAGNRIRAWNWSNSITSSPFVSFKPVFLALNRYIGVRILEQDKISITFLAMGQQARISVGTKVKLPNPEEIPILRYVSGDDLLLLASLIKIRRLFHKLEGCVNFPSSQVWEKLKQPSYLSSLSLKLIALCHSSGIKQDIMKTIRNIINEEI

SEQ ID NO: 22934 - protein, 621 aa, Homo sapiens
MAHLRSPSGFGDPGKKDQKESEQELEAPETFSEEYLWKVTDIGDYDDDFPDVRPRLASIVSPSLTSTFVPSQSATSTETPSASPPSSTSSHKSFPKIFQTFRKDMSEMSIDRNIHRNLSPGIPVSVQTEESWLQDLSDKVQSRKKASKEKAEPECLASKLREKWVINPEESKLNILYELEFKEDFITLFEPSLRTLPSIGPPSILAYKEESSNLGINFKDEEEETSPKCEFCGSDLRAFFSNVDVSSEPKGHASCCIAFQNLIDYIYEEQIKTKPPKAELIAIDPHAAHGSEVDRLKAKEKALQRKQEQRMARHFAIISREQTHFSEDDSKRLKTISYQLSVDIPEKQIIDDIVFDFQLRNSNMSIICCDSRIACGKVVRNELLEKHYKHGSKFLTSFPDGTTQIFYPSGNLAIIRVPNKVNGFTCIVQEDMPTNPAILAVLDSSGRSSCYHPNGNVWVYINILGGQYSDQAGNRIRAWNWSNSITSSPFVSFKPVFLALNRYIGVRILEQDKISITFLAMGQQARISVGTKVKLPNPEEIPILRYVSGDDLLLLASLIKIRRLFHKLEGCVNFPSSQVWEKLKQPSYLSSLSLKLIALCHSSGIKQDIMKTIRNIINEEI

SEQ ID NO: 22935 - protein, 517 aa, Homo sapiens
MSEMSIDRNIHRNLSPGIPVSVQTEESWLQDLSDKVQSRKKASKEKAEPECLASKLREKWVINPEESKLNILYELEFKEDFITLFEPSLRTLPSIGPPSILAYKEESSNLGINFKDEEEETSPKCEFCGSDLRAFFSNVDVSSEPKGHASCCIAFQNLIDYIYEEQIKTKPPKAELIAIDPHAAHGSEVDRLKAKEKALQRKQEQRMARHFAIISREQTHFSEDDSKRLKTISYQLSVDIPEKQIIDDIVFDFQLRNSNMSIICCDSRIACGKVVRNELLEKHYKHGSKFLTSFPDGTTQIFYPSGNLAIIRVPNKVNGFTCIVQEDMPTNPAILAVLDSSGRSSCYHPNGNVWVYINILGGQYSDQAGNRIRAWNWSNSITSSPFVSFKPVFLALNRYIGVRILEQDKISITFLAMGQQARISVGTKVKLPNPEEIPILRYVSGDDLLLLASLIKIRRLFHKLEGCVNFPSSQVWEKLKQPSYLSSLSLKLIALCHSSGIKQDIMKTIRNIINEEI

SEQ ID NO: 22936 - protein, 811 aa, Homo sapiens
MERGKMAEAESLETAAEHERILREIESTDTACIGPTLRSVYDGEEHGRFMEKLETRIRNHDREIEKMCNFHYQGFVDSITELLKVRGEAQKLKNQVTDTNRKLQHEGKELVIAMEELKQCRLQQRNISATVDKLMLCLPVLEMYSKLRDQMKTKRHYPALKTLEHLEHTYLPQVSHYRFCKVMVDNIPKLREEIKDVSMSDLKDFLESIRKHSDKIGETAMKQAQQQRNLDNIVLQQPRIGSKRKSKKDAYIIFDTEIESTSPKSEQDSGILDVEDEEDDEEVPGAQDLVDFSPVYRCLHIYSVLGARETFENYYRKQRRKQARLVLQPPSNMHETLDGYRKYFNQIVGFFVVEDHILHTTQGLVNRAYIDELWEMALSKTIAALRTHSSYCSDPNLVLDLKNLIVLFADTLQVYGFPVNQLFDMLLEIRDQYSETLLKKWAGIFRNILDSDNYSPIPVTSEEMYKKVVGQFPFQDIELEKQPFPKKFPFSEFVPKVYNQIKEFIYACLKFSEDLHLSSTEVDDMIRKSTNLLLTRTLSNSLQNVIKRKNIGLTELVQIIINTTHLEKSCKYLEEFITNITNVLPETVHTTKLYGTTTFKDARHAAEEEIYTNLNQKIDQFLQLADYDWMTGDLGNKASDYLVDLIAFLRSTFAVFTHLPGKVAQTACMSACKHLATSLMQLLLEAEVRQLTLGALQQFNLDVRECEQFARSGPVPGFQEDTLQLAFIDLRQLLDLFIQWDWSTYLADYGQPNCKYLRVNPVTALTLLEKMKDTSRKNNMFAQFRKNERDKQKLIDTVAKQLRGLISSHHS

SEQ ID NO: 22937 - protein, 672 aa, Homo sapiens
MERGKMAEAESLETAAEHERILREIESTDTACIGPTLRSVYDGEEHGRFMEKLETRIRNHDREIEKMCNFHYQGFVDSITELLKVRGEAQKLKNQVTDTNRKLQHEGKELVIAMEELKQCRLQQRNISATVDKLMLCLPVLEMYSKLRDQMKTKRHYPALKTLEHLEHTYLPQVSHYRFCKVMVDNIPKLREEIKDVSMSDLKDFLESIRKHSDKIGETAMKQAQQQRNLDNIVLQQPRIGSKRKSKKDAYIIFDTEIESTSPKSEQDSGILDVEDEEDDEEVPGAQDLVDFSPVYRCLHIYSVLGARETFENYYRKQRRKQARLVLQPPSNMHETLDGYRKYFNQIVGFFVVEDHILHTTQGLVNRAYIDELWEMALSKTIAALRTHSSYCSDPNLVLDLKNLIVLFADTLQVYGFPVNQLFDMLLEIRDQYSETLLKKWAGIFRNILDSDNYSPIPVTSEEMYKKVVGQFPFQDIELEKQPFPKKFPFSEFVPKVYNQIKEFIYACLKFSEDLHLSSTEVDDMIRKSTNLLLTRTLSNSLQNVIKRKNIGLTELVQIIINTTHLEKSCKYLEEFITNITNVLPETVHTTKLYGTTTFKDARHAAEEEIYTNLNQKIDQFLQLADYDWMTGDLGNKASDYLVDLIAFLRSTFAVFTHLPVSGSCSYFVLYI

SEQ ID NO: 22938 - protein, 666 aa, Homo sapiens
MGQTKSKIKSKYASYLSFIKILLKRGGVKVSTKNLIKLFQIIEQFCPWFPEQGTLDLKDWKRIGKELKQAGRKGNIIPLTVWNDWAIIKAALEPFQTEEDSISVSDAPGSCIIDCNENTRKKSQKETEGLHCEYAAEPVMAQSTQNVDYNQLQEVIYPETLKLEGKGPELVGPSESKPRGTSPLPAGQVPVTLQPQTQVKENKTQPPVAYQYWPPAELQYRPPPESQYGYPGMPPAPQGRAPYPQPPTRRLNPTAPPSRQGSELHEIIDKSRKEGDTEAWQFPVMLEPMPPGEGAQEGEPPTVEARYKSFSIKMLKDMKEGVKQYGPNSPYMRTLLDSIAHGHRLIPYDWEILAKSSLLPSQFLQFKTWWIDGVQEQVQRNRAANPPVNIDADQLLGIGQNWSTISQQALMQNEAIEQVRAICLRAWEKIQDPGSTCPSFNTVRQSSKEPYPDFVARLQDVAQKSIADEKARKVIVELMAYENANPECQSAIKPLKGKVPAGSDVISEYVKACDGIGGAMHKAMLMAQAITGVVLGGQVRTFGGKCYNCGQIGHLKKNCPVLNKQNITIQATTTGREPPDLCPRCKKGKHWASQCRSKFDKNGQPLSGNEQRGQPQAPQQTGAFPIQPFVPQGFQGQQPPLSQVFQGISQLPQYNNCPPPQAAVQQ

SEQ ID NO: 22939 - protein, 445 aa, Homo sapiens
MAAPEERDLTQEQTEKLLQFQDLTGIESMDQCRHTLEQHNWNIEAAVQDRLNEQEGVPSVFNPPPSRPLQVNTADHRIYSYVVSRPQPRGLLGWGYYLIMLPFRFTYYTILDIFRFALRFIRPDPRSRVTDPVGDIVSFMHSFEEKYGRAHPVFYQGTYSQALNDAKRELRFLLVYLHGDDHQDSDEFCRNTLCAPEVISLINTRMLFWACSTNKPEGYRVSQALRENTYPFLAMIMLKDRRMTVVGRLEGLIQPDDLINQLTFIMDANQTYLVSERLEREERNQTQVLRQQQDEAYLASLRADQEKERKKREERERKRRKEEEVQQQKLAEERRRQNLQEEKERKLECLPPEPSPDDPESVKIIFKLPNDSRVERRFHFSQSLTVIHDFLFSLKESPEKFQIEANFPRRVLPCIPSEEWPNPPTLQEAGLSHTEVLFVQDLTDE

SEQ ID NO: 22940 - protein, 1328 aa, Homo sapiens
MDQKILSLAAEKTADKLQEFLQTLREGDLTNLLQNQAVKGKVAGALLRAIFKGSPCSEEAGTLRRRKIYTCCIQLVESGDLQKEIASEIIGLLMLEAHHFPGPLLVELANEFISAVREGSLVNGKSLELLPIILTALATKKENLAYGKGVLSGEECKKQLINTLCSGRWDQQYVIQLTSMFKDVPLTAEEVEFVVEKALSMFSKMNLQEIPPLVYQLLVLSSKGSRKSVLEGIIAFFSALDKQHNEEQSGDELLDVVTVPSGELRHVEGTIILHIVFAIKLDYELGRELVKHLKVGQQGDSNNNLSPFSIALLLSVTRIQRFQDQVLDLLKTSVVKSFKDLQLLQGSKFLQNLVPHRSYVSTMILEVVKNSVHSWDHVTQGLVELGFILMDSYGPKKVLDGKTIETSPSLSRMPNQHACKLGANILLETFKIHEMIRQEILEQVLNRVVTRASSPISHFLDLLSNIVMYAPLVLQSCSSKVTEAFDYLSFLPLQTVQRLLKAVQPLLKVSMSMRDCLILVLRKAMFANQLDARKSAVAGFLLLLKNFKVLGSLSSSQCSQSLSVSQVHVDVHSHYNSVANETFCLEIMDSLRRCLSQQADVRLMLYEGFYDVLRRNSQLANSVMQTLLSQLKQFYEPKPDLLPPLKLEACILTQGDKISLQEPLDYLLCCIQHCLAWYKNTVIPLQQGEEEEEEEEAFYEDLDDILESITNRMIKSELEDFELDKSADFSQSTSIGIKNNICAFLVMGVCEVLIEYNFSISSFSKNRFEDILSLFMCYKKLSDILNEKAGKAKTKMANKTSDSLLSMKFVSSLLTALFRDSIQSHQESLSVLRSSNEFMRYAVNVALQKVQQLKETGHVSGPDGQNPEKIFQNLCDITRVLLWRYTSIPTSVEESGKKEKGKSISLLCLEGLQKIFSAVQQFYQPKIQQFLRALDVTDKEGEEREDADVSVTQRTAFQIRQFQRSLLNLLSSQEEDFNSKEALLLVTVLTSLSKLLEPSSPQFVQMLSWTSKICKENSREDALFCKSLMNLLFSLHVSYKSPVILLRDLSQDIHGHLGDIDQDVEVEKTNHFAIVNLRTAAPTVCLLVLSQAEKVLEEVDWLITKLKGQVSQETLSEEASSQATLPNQPVEKAIIMQLGTLLTFFHELVQTALPSGSCVDTLLKDLCKMYTTLTALVRYYLQVCQSSGGIPKNMEKLVKLSGSHLTPLCYSFISYVQNKSKSLNYTGEKKEKPAAVATAMARVLRETKPIPNLIFAIEQYEKFLIHLSKKSKVNLMQHMKLSTSRDFKIKGNILDMVLREDGEDENEEGTASEHGGQNKEPAKKKRKK

SEQ ID NO: 22941 - protein, 1267 aa, Homo sapiens
MDQKILSLAAEKTADKLQEFLQTLREGDLTNLLQNQAVKGKVAGALLRAIFKGSPCSEEAGTLRRRKIYTCCIQLVESGDLQKEIASEIIGLLMLEAHHFPGPLLVELANEFISAVREGSLVNGKSLELLPIILTALATKKENLAYGKGVLSGEECKKQLINTLCSGRWDQQYVIQLTSMFKDVPLTAEEVEFVVEKALSMFSKMNLQEIPPLVYQLLVLSSKGSRKSVLEGIIAFFSALDKQHNEEQSGDELLDVVTVPSGELRHVEGTIILHIVFAIKLDYELGRELVKHLKVGQQGDSNNNLSPFSIALLLSVTRIQRFQDQVLDLLKTSVVKSFKDLQLLQGSKFLQNLVPHRSYVSTMILEVVKNSVHSWDHVTQGLVELGFILMDSYGPKKVLDGKTIETSPSLSRMPNQHACKLGANILLETFKIHEMIRQEILEQVLNRVVTRASSPISHFLDLLSNIVMYAPLVLQSCSSKVTEAFDYLSFLPLQTVQRLLKAVQPLLKVSMSMRDCLILVLRKAMFANQLDARKSAVAGFLLLLKNFKVLGSLSSSQCSQSLSVSQVHVDVHSHYNSVANETFCLEIMDSLRRCLSQQADVRLMLYEGFYDVLRRNSQLANSVMQTLLSQLKQFYEPKPDLLPPLKLEACILTQGDKISLQEPLDYLLCCIQHCLAWYKNTVIPLQQGEEEEEEEEAFYEDLDDILESITNRMIKSELEDFELDKSADFSQSTSIGIKNNICAFLVMGVCEVLIEYNFSISSFSKNRFEDILSLFMCYKKLSDILNEKAGKAKTKMANKTSDSLLSMKFVSSLLTALFRVLLWRYTSIPTSVEESGKKEKGKSISLLCLEGLQKIFSAVQQFYQPKIQQFLRALDVTDKEGEEREDADVSVTQRTAFQIRQFQRSLLNLLSSQEEDFNSKEALLLVTVLTSLSKLLEPSSPQFVQMLSWTSKICKENSREDALFCKSLMNLLFSLHVSYKSPVILLRDLSQDIHGHLGDIDQDVEVEKTNHFAIVNLRTAAPTVCLLVLSQAEKVLEEVDWLITKLKGQVSQETLSEASSQATLPNQPVEKAIIMQLGTLLTFFHELVQTALPSGSCVDTLLKDLCKMYTTLTALVRYYLQVCQSSGGIPKNMEKLVKLSGSHLTPLCYSFISYVQNKSKSLNYTGEKKEKPAAVATAMARVLRETKPIPNLIFAIEQYEKFLIHLSKKSKVNLMQHMKLSTSRDFKIKGNILDMVLREDGEDENEEGTASEHGGQNKEPAKKKRKK

SEQ ID NO: 22942 - protein, 1268 aa, Homo sapiens
MDQKILSLAAEKTADKLQEFLQTLREGDLTNLLQNQAVKGKVAGALLRAIFKGSPCSEEAGTLRRRKIYTCCIQLVESGDLQKEIASEIIGLLMLEAHHFPGPLLVELANEFISAVREGSLVNGKSLELLPIILTALATKKENLAYGKGVLSGEECKKQLINTLCSGRWDQQYVIQLTSMFKDVPLTAEEVEFVVEKALSMFSKMNLQEIPPLVYQLLVLSSKGSRKSVLEGIIAFFSALDKQHNEEQSGDELLDVVTVPSGELRHVEGTIILHIVFAIKLDYELGRELVKHLKVGQQGDSNNNLSPFSIALLLSVTRIQRFQDQVLDLLKTSVVKSFKDLQLLQGSKFLQNLVPHRSYVSTMILEVVKNSVHSWDHVTQGLVELGFILMDSYGPKKVLDGKTIETSPSLSRMPNQHACKLGANILLETFKIHEMIRQEILEQVLNRVVTRASSPISHFLDLLSNIVMYAPLVLQSCSSKVTEAFDYLSFLPLQTVQRLLKAVQPLLKVSMSMRDCLILVLRKAMFANQLDARKSAVAGFLLLLKNFKVLGSLSSSQCSQSLSVSQVHVDVHSHYNSVANETFCLEIMDSLRRCLSQQADVRLMLYEGFYDVLRRNSQLANSVMQTLLSQLKQFYEPKPDLLPPLKLEACILTQGDKISLQEPLDYLLCCIQHCLAWYKNTVIPLQQGEEEEEEEEAFYEDLDDILESITNRMIKSELEDFELDKSADFSQSTSIGIKNNICAFLVMGVCEVLIEYNFSISSFSKNRFEDILSLFMCYKKLSDILNEKAGKAKTKMANKTSDSLLSMKFVSSLLTALFRVLLWRYTSIPTSVEESGKKEKGKSISLLCLEGLQKIFSAVQQFYQPKIQQFLRALDVTDKEGEEREDADVSVTQRTAFQIRQFQRSLLNLLSSQEEDFNSKEALLLVTVLTSLSKLLEPSSPQFVQMLSWTSKICKENSREDALFCKSLMNLLFSLHVSYKSPVILLRDLSQDIHGHLGDIDQDVEVEKTNHFAIVNLRTAAPTVCLLVLSQAEKVLEEVDWLITKLKGQVSQETLSEEASSQATLPNQPVEKAIIMQLGTLLTFFHELVQTALPSGSCVDTLLKDLCKMYTTLTALVRYYLQVCQSSGGIPKNMEKLVKLSGSHLTPLCYSFISYVQNKSKSLNYTGEKKEKPAAVATAMARVLRETKPIPNLIFAIEQYEKFLIHLSKKSKVNLMQHMKLSTSRDFKIKGNILDMVLREDGEDENEEGTASEHGGQNKEPAKKKRKK

SEQ ID NO: 22943 - protein, 252 aa, Homo sapiens
MDQKILSLAAEKTADKLQEFLQTLREGDLTNLLQNQAVKGKVAGALLRAIFKGSPCSEEAGTLRRRKIYTCCIQLVESGDLQKEIASEIIGLLMLEAHHFPGPLLVELANEFISAVREGSLVNGKSLELLPIILTALATKKENLAYGKGVLSGEECKKQLINTLCSGRWDQQYVIQLTSMFKDVPLTAEEVEFVVEKALSMFSKMNLQEIPPLVYQLLVLSSKGSRKSVLEGIIAFFSALDKQHNEEQSGDE

SEQ ID NO: 22944 - protein, 530 aa, Homo sapiens
MRRLWGAARKPSGAGWEKEWAEAPQEAPGAWSGRLGPGRSGRKGRAVPGWASWPAHLALAARPARHLGGAGQGPRPLHSGTAPFHSRASGERQRRLEPQLQHESRCRSSTPADAWRAEAALPVRAMGAPWGSPTAAAGGRRGWRRGRGLPWTVCVLAAAGLTCTALITYACWGQLPPLPWASPTPSRPVGVLLWWEPFGGRDSAPRPPPDCRLRFNISGCRLLTDRASYGEAQAVLFHHRDLVKGPPDWPPPWGIQAHTAEEVDLRVLDYEEAAAAAEALATSSPRPPGQRWVWMNFESPSHSPGLRSLASNLFNWTLSYRADSDVFVPYGYLYPRSHPGDPPSGLAPPLSRKQGLVAWVVSHWDERQARVRYYHQLSQHVTVDVFGRGGPGQPVPEIGLLHTVARYKFYLAFENSQHLDYITEKLWRNALLAGAVPVVLGPDRANYERFVPRGAFIHVDDFPSASSLASYLLFLDRNPAVYRRYFHWRRSYAVHITSFWDEPWCRVCQAVQRAGDRPKSIRNLASWFER

SEQ ID NO: 22945 - protein, 431 aa, Homo sapiens
MPPILQRLQQATKMMSRRKILLLVLGCSTVSLLIHQGAQLSWYPKLFPLSCPPLRNSPPRPKHMTVAFLKTHKTAGTTVQNILFRFAERHNLTVALPHPSCEHQFCYPRNFSAHFVHPATRPPHVLASHLRFDRAELERLMPPSTVYVTILREPAAMFESLFSYYNQYCPAFRRVPNASLEAFLRAPEAYYRAGEHFAMFAHNTLAYDLGGDNERSPRDDAAYLAGLIRQVEEVFSLVMIAEYFDESLVLLRRLLAWDLDDVLYAKLNARAASSRLAAIPAALARAARTWNALDAGLYDHFNATFWRHVARAGRACVEREARELREARQRLLRRCFGDEPLLRPAAQIRTKQLQPWQPSRKVDIMGYDLPGGGAGPATEACLKLAMPEVQYSNYLLRKQKRRGGARARPEPVLDNPPPRPIRVLPRGPQGP

SEQ ID NO: 22946 - protein, 666 aa, Homo sapiens
MGQTKSKIKSKYASYLSFIKILLKRGGVKVSTKNLIKLFQIIEQFCPWFPEQGTLDLKDWKRIGKELKQAGRKGNIIPLTVWNDWAIIKAALEPFQTEKDSVSVSDALGSCIIDCNENTRKKSQKETEGLHCEYVAEPVMAQSTQNVDYNQLQEVIYPETLKLEGKGPELVGPSESKPRGTSHLPAGQVPVTLQPQKQVKENKTQPPVAYQYWPPAELQYRPPPESQYGYPGMPPAPQGRAPYPQPPTRRLNPTAPPSRQGSELHEIIDKSRKEGDTEAWQFPVTLEPMPPGEGAQEGEPPTVEARYKSFSIKMLKDMKEGVKQYGPNSPYMRTLLDSIAHGHRLIPYDWEILAKSSLSPSQFLQFKTWWIDGVQEQVRRNRAANPPVNIDADQLLGIGQNWSTISQQALMQNEAIEQVRAICLRAWEKIQDPGSTCPSFNTVRQGSKEPYPDFVARLQDVAQKSIADEKARKVIVELMAYENANPECQSAIKPLKGKVPAGSDVISEYVKACDGIGGAMHKAMLMAQAITGVVLGGQVRTFGGKCYNCGQIGHLKKNCPVLNKQNITIQATTTGREPPDLCPRCKKGKHWASQCRSKFDKNGQPLSGNEQRGQPQAPQQTGAFPIQPFVPQGFQEQQPPLSQVFQGISQLPQYNNCPPPQAAVQQ

SEQ ID NO: 22947 - protein, 240 aa, Homo sapiens
MYLRRAVSKTLALPLRAPPNPAPLGKDASLRRMSSNRFPGSSGSNMIYYLVVGVTVSAGGYYAYKTVTSDQAKHTEHKTNLKEKTKAEIHPFQGEKENVAETEKASSEAPEELIVEAEVVDAEESPSATVVVIKEASACPGHVEAAPETTAVSAETGPEVTDAAARETTEVNPETTPEVTNAALDEAVTIDNDKDTTKNETSDEYAELEEENSPAESESSAGDDLQEEASVGSEAASAQG

SEQ ID NO: 22948 - protein, 794 aa, Homo sapiens
MELRPWLLWVVAATGTLVLLAADAQGQKVFTNTWAVRIPGGPAVANSVARKHGFLNLGQIFGDYYHFWHRGVTKRSLSPHRPRHSRLQREPQVQWLEQQVAKRRTKRDVYQEPTDPKFPQQWYLSGVTQRDLNVKAAWAQGYTGHGIVVSILDDGIEKNHPDLAGNYDPGASFDVNDQDPDPQPRYTQMNDNRHGTRCAGEVAAVANNGVCGVGVAYNARIGGVRMLDGEVTDAVEARSLGLNPNHIHIYSASWGPEDDGKTVDGPARLAEEAFFRGVSQGRGGLGSIFVWASGNGGREHDSCNCDGYTNSIYTLSISSATQFGNVPWYSEACSSTLATTYSSGNQNEKQIVTTDLRQKCTESHTGTSASAPLAAGIIALTLEANKNLTWRDMQHLVVQTSKPAHLNANDWATNGVGRKVSHSYGYGLLDAGAMVALAQNWTTVAPQRKCIIDILTEPKDIGKRLEVRKTVTACLGEPNHITRLEHAQARLTLSYNRRGDLAIHLVSPMGTRSTLLAARPHDYSADGFNDWAFMTTHSWDEDPSGEWVLEIENTSEANNYGTLTKFTLVLYGTAPEGLPVPPESSGCKTLTSSQACVVCEEGFSLHQKSCVQHCPPGFAPQVLDTHYSTENDVETIRASVCAPCHASCATCQGPALTDCLSCPSHASLDPVEQTCSRQSQSSRESPPQQQPPRLPPEVEAGQRLRAGLLPSHLPEVVAGLSCAFIVLVFVTVFLVLQLRSGFSFRGVKVYTMDRGLISYKGLPPEAWQEECPSDSEEDEGRGERTAFIKDQSAL

SEQ ID NO: 22949 - protein, 155 aa, Homo sapiens
MATRNPPPQDYESDDDSYEVLDLTEYARRHQWWNRVFGHSSGPMVEKYSVATQIVMGGVTGWCAGFLFQKVGKLAATAVGGGFLLLQIASHSGYVQIDWKRVEKDVNKAKRQIKKRANKAAPEINNLIEEATEFIKQNIVISSGFVGGFLLGLAS

SEQ ID NO: 22950 - protein, 1013 aa, Homo sapiens
MVVDFCRRFVARSLCIILMKHFCSSSVSEDLGCRRGDFSRKHYGSVELLISSDADGAIQRAGRFRVENGSSDENATALPGTWRRTDVHLENPEYHTRWYFKYFLGQVHQNYIGNDAEKSPFFLSVTLSDQNNQRVPQYRAILWRKTGTQKICLPYSPTKTLSVKSILSAMNLDKFEKGPREIFHPEIQKDLLVLEEQEGSVNFKFGVLFAKDGQLTDDEMFSNEIGSEPFQKFLNLLGDTITLKGWTGYRGGLDTKNDTTGIHSVYTVYQGHEIMFHVSTMLPYSKENKQQVERKRHIGNDIVTIVFQEGEESSPAFKPSMIRSHFTHIFALVRYNQQNDNYRLKIFSEESVPLFGPPLPTPPVFTDHQEFRDFLLVKLINGEKATLETPTFAQKRRRTLDMLIRSLHQDLMPDLHKNMLNRRSFSDVLPESPKSARKKEEARQAEFVRIGQALKLKSIVRGDAPSSLAASGICKKEPWEPQCFCSNFPHEAVCADPWGQALLVSTDAGVLLVDDDLPSVPVFDRTLPVKQMHVLETLDLLVLRADKGKDARLFVFRLSALQKGLEGKQAGKSRSDCRENKLEKTKGCHLYAINTHHSRELRIVVAIRNKLLLITRKHNKPSGVTSTSLLSPLSESPVEEFQYIREICLSDSPMVMTLVDGPAEESDNLICVAYRHQFDVVNESTGEAFRLHHVEANRVNFVAAIDVYEDGEAGLLLCYNYSCIYKKVCPFNGGSFLVQPSASDFQFCWNQAPYAIVCAFPYLLAFTTDSMEIRLVVNGNLVHTAVVPQLQLVASRSDIYFTATAAVNEVSSGGSSKGASARNSPQTPPGRDTPVFPSSLGEGEIQSKNLYKIPLRNLVGRSIERPLKSPLVSKVITPPTPISVGLAAIPVTHSLSLSRMEIKEIASRTRRELLGLSDEGGPKSEGAPKAKSKPRKRLEESQGGPKPGAVRSSSSDRIPSGSLESASTSEANPEGHSASSDQDPVADREGSPVSGSSPFQLTAFSDEDIIDLK

SEQ ID NO: 22951 - protein, 820 aa, Homo sapiens
MVVDFCRRFVARSLCIILMKHFCSSSVSEDLGCRRGDFSRKHYGSVELLISSDADGAIQRAGRFRVENGSSDENATALPGTWRRTDVHLENPEYHTRWYFKYFLGQVHQNYIGNDAEKSPFFLSVTLSDQNNQRVPQYRAILWRKTGTQKICLPYSPTKTLSVKSILSAMNLDKFEKGPREIFHPEIQKDLLVLEEQEGSVNFKFGVLFAKDGQLTDDEMFSNEIGSEPFQKFLNLLGDTITLKGWTGYRGGLDTKNDTTGIHSVYTVYQGHEIMFHVSTMLPYSKENKQQVERKRHIGNDIVTIVFQEGEESSPAFKPSMIRSHFTHIFALVRYNQQNDNYRLKIFSEESVPLFGPPLPTPPVFTDHQEFRDFLLVKLINGEKATLETPTFAQKRRRTLDMLIRSLHQDLMPDLHKNMLNRRSFSDVLPESPKSARKKEEARQAEFVRIGQALKLKSIVRGDAPSSLAASGICKKEPWEPQCFCSNFPHEAVCADPWGQALLVSTDAGVLLVDDDLPSVPVFDRTLPVKQMHVLETLDLLVLRADKGKDARLFVFRLSALQKGLEGKQAGKSRSDCRENKLEKTKGCHLYAINTHHSRELRIVVAIRNKLLLITRKHNKPSGVTSTSLLSPLSESPVEEFQYIREICLSDSPMVMTLVDGPAEESDNLICVAYRHQFDVVNESTGEAFRLHHVEANRVNFVAAIDVYEDGEAGLLLCYNYSCIYKKVCPFNGGSFLVQPSASDFQFCWNQAPYAIVCAFPYLLAFTTDSMEIRLVVNGNLVHTAVVPQLQLVASRVKFNQKICTRFHLETSWAEASNDL

SEQ ID NO: 22952 - protein, 423 aa, Homo sapiens
MVVDFCRRFVARSLCIILMKHFCSSSVSEDLGCRRGDFSRKHYGSVELLISSDADGAIQRAGRFRVENGSSDENATALPGTWRRTDVHLENPEYHTRWYFKYFLGQVHQNYIGNDAEKSPFFLSVTLSDQNNQRVPQYRAILWRKTGTQKICLPYSPTKTLSVKSILSAKDGQLTDDEMFSNEIGSEPFQKFLNLLGDTITLKGWTGYRGGLDTKNDTTGIHSVYTVYQGHEIMFHVSTMLPYSKENKQQVERKRHIGNDIVTIVFQEGEESSPAFKPSMIRSHFTHIFALVRYNQQNDNYRLKIFSEESVPLFGPPLPTPPVFTDHQEFRDFLLVKLINGEKATLETPTFAQKRRRTLDMLIRSLHQDLMPDLHKNMLNRRSFSDVLPESPKSARKKEEARQAEFVRIGQVGFLLKPFLRDM

SEQ ID NO: 22953 - protein, 243 aa, Homo sapiens
MEIRLVVNGNLVHTAVVPQLQLVASRSDIYFTATAAVNEVSSGGSSKGASARNSPQTPPGRDTPVFPSSLGEGEIQSKNLYKIPLRNLVGRSIERPLKSPLVSKVITPPTPISVGLAAIPVTHSLSLSRMEIKEIASRTRRELLGLSDEGGPKSEGAPKAKSKPRKRLEESQGGPKPGAVRSSSSDRIPSGSLESASTSEANPEGHSASSDQDPVADREGSPVSGSSPFQLTAFSDEDIIDLK

SEQ ID NO: 22954 - protein, 991 aa, Homo sapiens
MKSSVSEDLGCRRGDFSRKHYGSVELLISSDADGAIQRAGRFRVENGSSDENATALPGTWRRTDVHLENPEYHTRWYFKYFLGQVHQNYIGNDAEKSPFFLSVTLSDQNNQRVPQYRAILWRKTGTQKICLPYSPTKTLSVKSILSAMNLDKFEKGPREIFHPEIQKDLLVLEEQEGSVNFKFGVLFAKDGQLTDDEMFSNEIGSEPFQKFLNLLGDTITLKGWTGYRGGLDTKNDTTGIHSVYTVYQGHEIMFHVSTMLPYSKENKQQVERKRHIGNDIVTIVFQEGEESSPAFKPSMIRSHFTHIFALVRYNQQNDNYRLKIFSEESVPLFGPPLPTPPVFTDHQEFRDFLLVKLINGEKATLETPTFAQKRRRTLDMLIRSLHQDLMPDLHKNMLNRRSFSDVLPESPKSARKKEEARQAEFVRIGQALKLKSIVRGDAPSSLAASGICKKEPWEPQCFCSNFPHEAVCADPWGQALLVSTDAGVLLVDDDLPSVPVFDRTLPVKQMHVLETLDLLVLRADKGKDARLFVFRLSALQKGLEGKQAGKSRSDCRENKLEKTKGCHLYAINTHHSRELRIVVAIRNKLLLITRKHNKPSGVTSTSLLSPLSESPVEEFQYIREICLSDSPMVMTLVDGPAEESDNLICVAYRHQFDVVNESTGEAFRLHHVEANRVNFVAAIDVYEDGEAGLLLCYNYSCIYKKVCPFNGGSFLVQPSASDFQFCWNQAPYAIVCAFPYLLAFTTDSMEIRLVVNGNLVHTAVVPQLQLVASRSDIYFTATAAVNEVSSGGSSKGASARNSPQTPPGRDTPVFPSSLGEGEIQSKNLYKIPLRNLVGRSIERPLKSPLVSKVITPPTPISVGLAAIPVTHSLSLSRMEIKEIASRTRRELLGLSDEGGPKSEGAPKAKSKPRKRLEESQGGPKPGAVRSSSSDRIPSGSLESASTSEANPEGHSASSDQDPVADREGSPVSGSSPFQLTAFSDEDIIDLK

SEQ ID NO: 22955 - protein, 313 aa, Homo sapiens
MCTALSPKVRSGPGLSDMHQYSQWLASRHEANLLPMKEDLALWLTNLLGKEITAETFMEKLDNGALLCQLAETMQEKFKESMDANKPTKNLPLKKIPCKTSAPSGSFFARDNTANFLSWCRDLGVDETCLFESEGLVLHKQPREVCLCLLELGRIAARYGVEPPGLIKLEKEIEQEETLSAPSPSPSPSSKSSGKKSTGNLLDDAVKRISEDPPCKCPNKFCVERLSQGRYRVGEKILFIRMLHNKHVMVRVGGGWETFAGYLLKHDPCRMLQISRVDGKTSPIQSKSPTLKDMNPDNYLVVSASYKAKKEIK

SEQ ID NO: 22956 - protein, 141 aa, Homo sapiens
MCTALSPKVRSGPGLSDMHQYSQWLASRHEANLLPMKEDLALWLTNLLGKEITAETFMEKLDNGALLCQLAETMQEKFKESMDANKPTKNLPLKKIPCKTSAPSGSFFARDNTANFLSWCRDLGVDETCLFESEGLGFGGQ

SEQ ID NO: 22957 - protein, 874 aa, Homo sapiens
MEKLAAGLAGLRWSMGAFPLDLIVSRCRLPTLACLGPGEYAEGVSERDILLIHSCRQWTTVTAHTLEEGHYVIGPKIDIPLQYPGKFKLLEQARDVREPVRYFSSVEEVASVFPDRIFVMEAITFSVKVVSGEFSEDSEVYNFTLHAGDELTLMGQAEILCAKTTKERSRFTTLLRKLGRAGALAGVGGGGPASAGAAGGTGGGGARPVKGKMPCLICMNHRTNESLSLPFQCQGRFSTRSPLELQMQEGEHTVRAIIERVRLPVNVLVPSRPPRNPYDLHPVREGHCYKLVSIISKTVVLGLALRREGPAPLHFLLLTDTPRFALPQGLLAGDPRVERLVRDSASYCRERFDPDEYSTAVREAPAELAEDCASPRRARLCLPAPRAPGLARAPGPLAPAPAGEGDQEYVSPDWAAAPEPAAPPAEIPYEELWAHQGPEGLVRPPPGLDLISFGAAGPPRREPEAPPPPVPPKSEAVKEECRLLNAPPVPPRGGNGSGRLSSSPPVPPRFPKLQPVHSPSSSLSYYSSGLQDGAGSRSGSGSPSPDTYSLYCYPCTWGDCKVGESSSRPAPGPLPSTTQPSQASRALTEPLSGRAASLLGADTPVKTYHSCPPLFKPSHPQKRFAPFGALNPFSGPAYPSGPSAALSSGPRTTSGPVATSGPAYSPGPASPGQAYSAAPPSSCAPSSSSSSEWQEPVLEPFDPFELGQGSSPEPELLRSQEPRAVGTPGPGPRLSPLGPSKAFEPEGLVLHQVPTPLSPAALQGPEAGGALFLTQGRLEGPPASPRDGATGFGVRDASSWQPPADLSALSLEEVSRSLRFIGLSEDVVSFFARERIDGSIFVQLSEDILADDFHLTKLQVKKIMQFIKGWRPKI

SEQ ID NO: 22958 - protein, 741 aa, Homo sapiens
MEKLAAGLAGLRWSMGAFPLDLIVSRCRLPTLACLGPGEYAEGVSERDILLIHSCRQWTTVTAHTLEEGHYVIGPKIDIPLQYPGKFKLLEQARDVREPVRYFSSVEEVASVFPDRIFVMEAITFSVKVVSGEFSEDSEVYNFTLHAGDELTLMGQAEILCAKTTKERSRFTTLLRKLGRAGALAGVGGGGPASAGAAGGTGGGGARPVKGKMPCLICMNHRTNESLSLPFQCQGRFSTRSPLELQMQEGEHTVRAIIERVRLPVNVLVPSRPPRNPYDLHPVREGHCYKLVSIISKTVVLGLALRREGPAPLHFLLLTDTPRFALPQGLLAGDPRVERLVRDSASYCRERFDPDEYSTAVREAPAELAEDCASPRRARLCLPAPRAPGLARAPGPLAPAPAGEGDQEYVSPDWAAAPEPAAPPAEIPYEELWAHQGPEGLVRPPPGLDLISFGAAGPPRREPEAPPPPVPPKSEAVKEECRLLNAPPVPPRGGNGSGRLSSSPPVPPRFPKLQPVHSPSSSLSYYSSGLQDGAGSRSGSGSPSPDTYSLYCYPCTWGDCKEPVLEPFDPFELGQGSSPEPELLRSQEPRAVGTPGPGPRLSPLGPSKAFEPEGLVLHQVPTPLSPAALQGPEAGGALFLTQGRLEGPPASPRDGATGFGVRDASSWQPPADLSALSLEEVSRSLRFIGLSEDVVSFFARERIDGSIFVQLSEDILADDFHLTKLQVKKIMQFIKGWRPKI

SEQ ID NO: 22959 - protein, 664 aa, Homo sapiens
MHRMPDPGKFKLLEQARDVREPVRYFSSVEEVASVFPDRIFVMEAITFSVKVVSGEFSEDSEVYNFTLHAGDELTLMGQAEILCAKTTKERSRFTTLLRKLGRAGALAGVGGGGPASAGAAGGTGGGGARPVKGKMPCLICMNHRTNESLSLPFQCQGRFSTRSPLELQMQEGEHTVRAIIERVRLPVNVLVPSRPPRNPYDLHPVREGHCYKLVSIISKTVVLGLALRREGPAPLHFLLLTDTPRFALPQGLLAGDPRVERLVRDSASYCRERFDPDEYSTAVREAPAELAEDCASPRRARLCLPAPRAPGLARAPGPLAPAPAGEGDQEYVSPDWAAAPEPAAPPAEIPYEELWAHQGPEGLVRPPPGLDLISFGAAGPPRREPEAPPPPVPPKSEAVKEECRLLNAPPVPPRGGNGSGRLSSSPPVPPRFPKLQPVHSPSSSLSYYSSGLQDGAGSRSGSGSPSPDTYSLYCYPCTWGDCKEPVLEPFDPFELGQGSSPEPELLRSQEPRAVGTPGPGPRLSPLGPSKAFEPEGLVLHQVPTPLSPAALQGPEAGGALFLTQGRLEGPPASPRDGATGFGVRDASSWQPPADLSALSLEEVSRSLRFIGLSEDVVSFFARERIDGSIFVQLSEDILADDFHLTKLQVKKIMQFIKGWRPKI

SEQ ID NO: 22960 - protein, 368 aa, Homo sapiens
MADAQNISLDSPGSVGAVAVPVVFALIFLLGTVGNGLVLAVLLQPGPSAWQEPGSTTDLFILNLAVADLCFILCCVPFQATIYTLDAWLFGALVCKAVHLLIYLTMYASSFTLAAVSVDRYLAVRHPLRSRALRTPRNARAAVGLVWLLAALFSAPYLSYYGTVRYGALELCVPAWEDARRRALDVATFAAGYLLPVAVVSLAYGRTLRFLWAAVGPAGAAAAEARRRATGRAGRAMLAVAALYALCWGPHHALILCFWYGRFAFSPATYACRLASHCLAYANSCLNPLVYALASRHFRARFRRLWPCGRRRRHRARRALRRVRPASSGPPGCPGDARPSGRLLAGGGQGPEPREGPVHGGEAARGPE

SEQ ID NO: 22961 - protein, 125 aa, Homo sapiens
MKLSSAAGQESPGHPHPSPPAWTLKKPSESVAQRAMCSARACPVACPVGCPAACPVGCPIACPVSCPVACPVGCPVGSMATAPQGLSPQEWEADRETGSSSHAGTTQCSIHSPSSSSRHLSRTQT

SEQ ID NO: 22962 - protein, 706 aa, Homo sapiens
MEMFTFLLTCIFLPLLRGHSLFTCEPITVPRCMKMAYNMTFFPNLMGHYDQSIAAVEMEHFLPLANLECSPNIETFLCKAFVPTCIEQIHVVPPCRKLCEKVYSDCKKLIDTFGIRWPEELECDRLQYCDETVPVTFDPHTEFLGPQKKTEQVQRDIGFWCPRHLKTSGGQGYKFLGIDQCAPPCPNMYFKSDELEFAKSFIGTVSIFCLCATLFTFLTFLIDVRRFRYPERPIIYYSVCYSIVSLMYFIGFLLGDSTACNKADEKLELGDTVVLGSQNKACTVLFMLLYFFTMAGTVWWVILTITWFLAAGRKWSCEAIEQKAVWFHAVAWGTPGFLTVMLLAMNKVEGDNISGVCFVGLYDLDASRYFVLLPLCLCVFVGLSLLLAGIISLNHVRQVIQHDGRNQEKLKKFMIRIGVFSGLYLVPLVTLLGCYVYEQVNRITWEITWVSDHCRQYHIPCPYQAKAKARPELALFMIKYLMTLIVGISAVFWVGSKKTCTEWAGFFKRNRKRDPISESRRVLQESCEFFLKHNSKVKHKKKHYKPSSHKLKVISKSMGTSTGATANHGTSAVAITSHDYLGQETLTEIQTSPETSMREVKADGASTPRLREQDCGEPASPAASISRLSGEQVDGKGQAGSVSESARSEGRISPKSDITDTGLAQSNNLQVPSSSEPSSLKGSTSLLVHPVSGVRKEQGGGCHSDT

SEQ ID NO: 22963 - protein, 674 aa, Homo sapiens
MKMAYNMTFFPNLMGHYDQSIAAVEMEHFLPLANLECSPNIETFLCKAFVPTCIEQIHVVPPCRKLCEKVYSDCKKLIDTFGIRWPEELECDRLQYCDETVPVTFDPHTEFLGPQKKTEQVQRDIGFWCPRHLKTSGGQGYKFLGIDQCAPPCPNMYFKSDELEFAKSFIGTVSIFCLCATLFTFLTFLIDVRRFRYPERPIIYYSVCYSIVSLMYFIGFLLGDSTACNKADEKLELGDTVVLGSQNKACTVLFMLLYFFTMAGTVWWVILTITWFLAAGRKWSCEAIEQKAVWFHAVAWGTPGFLTVMLLAMNKVEGDNISGVCFVGLYDLDASRYFVLLPLCLCVFVGLSLLLAGIISLNHVRQVIQHDGRNQEKLKKFMIRIGVFSGLYLVPLVTLLGCYVYEQVNRITWEITWVSDHCRQYHIPCPYQAKAKARPELALFMIKYLMTLIVGISAVFWVGSKKTCTEWAGFFKRNRKRDPISESRRVLQESCEFFLKHNSKVKHKKKHYKPSSHKLKVISKSMGTSTGATANHGTSAVAITSHDYLGQETLTEIQTSPETSMREVKADGASTPRLREQDCGEPASPAASISRLSGEQVDGKGQAGSVSESARSEGRISPKSDITDTGLAQSNNLQVPSSSEPSSLKGSTSLLVHPVSGVRKEQGGGCHSDT

SEQ ID NO: 22964 - protein, 681 aa, Homo sapiens
MADPVAGIAGSAAKSVRPFRSSEAYVEAMKEDLAEWLNALYGLGLPGGGDGFLTGLATGTTLCQHANAVTEAARALAAARPARGVAFQAHSVVPGSFMARDNVATFIGWCRVELGVPEVLMFETEDLVLRKNEKSVVLCLLEVARRGARLGLLAPRLVQFEQEIERELRAAPPAPNAPAAGEDTTETAPAPGTPARGPRMTPSDLRNLDELVREILGRCTCPDQFPMIKVSEGKYRVGDSSLLIFVRVLRSHVMVRVGGGWDTLEHYLDKHDPCRCSSTAHRPPQPRVCTFSPQRVSPTTSPRPASPVPGSERRGSRPEMTPVSLRSTKEGPETPPRPRDQLPPHPRSRRYSGDSDSSASSAQSGPLGTRSDDTGTGPRRERPSRRLTTGTPASPRRPPALRSQSRDRLDRGRPRGAPGGRGAQLSVPSPARRARSQSREEQAVLLVRRDRDGQHSWVPRGRGSGGSGRSTPQTPRARSPAAPRLSRVSSPSPELGTTPASIFRTPLQLDPQQEQQLFRRLEEEFLANARALEAVASVTPTGPVPDPARAPDPPAPDSAYCSSSSSSSSLSVLGGKCGQPGDSGRTANGLPGPRSQALSSSSDEGSPCPGMGGPLDAPGSPLACTEPSRTWARGRMDTQPDRKPSRIPTPRGPRRPSGPAELGTWHALHSVTPRAEPDSWM

SEQ ID NO: 22965 - protein, 337 aa, Homo sapiens
MADPVAGIAGSAAKSVRPFRSSEAYVEAMKEDLAEWLNALYGLGLPGGGDGFLTGLATGTTLCQHANAVTEAARALAAARPARGVAFQAHSVVPGSFMARDNVATFIGWCRVELGVPEVLMFETEDLVLRKNEKSVVLCLLEVARRGARLGLLAPRLVQFEQEIERELRAAPPAPNAPAAGEDTTETAPAPGTPARGPRMTPSDLRNLDELVREILGRCTCPDQFPMIKVSEGKYRVGDSSLLIFVRVLRSHVMVRVGGGWDTLEHYLDKHDPCRCSSTAHRPPQPRVCTFSPQRVSPTTSPRPASPVPGSERRGSRPEMTPVSLRSTKEGPETPPR

SEQ ID NO: 22966 - protein, 329 aa, Homo sapiens
MADPVAGIAGSAAKSVRPFRSSEAYVEAMKEDLAEWLNALYGLGLPGGGDGFLTGLATGTTLCQHANAVTEAARALAAARPARGVAFQAHSVVPGSFMARDNVATFIGWCRVELGVPEVLMFETEDLVLRKNEKSVVLCLLEVARRGARLGLLAPRLVQFEQEIERELRAAPPAPNAPAAGEDTTETAPAPGTPARGPRMTPSDLRNLDELVREILGRCTCPDQFPMIKVSEGKYRVGDSSLLIFVRVLRSHVMVRVGGGWDTLEHYLDKHDPCRCSSTGPGISCPPIPAPAATPGTVTPQPPPPRAAPLVPAVMTQALAPGGSDPAGG

SEQ ID NO: 22967 - protein, 454 aa, Homo sapiens
MADPVAGIAGSAAKSVRPFRSSEAYVEAMKEDLAEWLNALYGLGLPGGGDGFLTGLATGTTLCQHANAVTEAARALAAARPARGVAFQAHSVVPGSFMARDNVATFIGWCRVELGVPEVLMFETEDLVLRKNEKSVVLCLLEVARRGARLGLLAPRLVQFEQEIERELRAAPPAPNAPAAGEDTTETAPAPGTPARGPRMTPSDLRNLDELVREILGRCTCPDQFPMIKVSEGKYRVGDSSLLIFVRVLRSHVMVRVGGGWDTLEHYLDKHDPCRCSSTAHRPPQPRVCTFSPQRVSPTTSPRPASPVPGSERRGSRPEMTPVSLRSTKEGPETPPSSSSSSLSVLGGKCGQPGDSGRTANGLPGPRSQALSSSSDEGSPCPGMGGPLDAPGSPLACTEPSRTWARGRMDTQPDRKPSRIPTPRGPRRPSGPAELGTWHALHSVTPRAEPDSWM

SEQ ID NO: 22968 - protein, 591 aa, Homo sapiens
MAVAPLRGALLLWQLLAAGGAALEIGRFDPERGRGAAPCQAVEIPMCRGIGYNLTRMPNLLGHTSQGEAAAELAEFAPLVQYGCHSHLRFFLCSLYAPMCTDQVSTPIPACRPMCEQARLRCAPIMEQFNFGWPDSLDCARLPTRNDPHALCMEAPENATAGPAEPHKGLGMLPVAPRPARPPGDLGPGAGGSGTCENPEKFQYVEKSRSCAPRCGPGVEVFWSRRDKDFALVWMAVWSALCFFSTAFTVLTFLLEPHRFQYPERPIIFLSMCYNVYSLAFLIRAVAGAQSVACDQEAGALYVIQEGLENTGCTLVFLLLYYFGMASSLWWVVLTLTWFLAAGKKWGHEAIEAHGSYFHMAAWGLPALKTIVILTLRKVAGDELTGLCYVASTDAAALTGFVLVPLSGYLVLGSSFLLTGFVALFHIRKIMKTGGTNTEKLEKLMVKIGVFSILYTVPATCVIVCYVYERLNMDFWRLRATEQPCAAAAGPGGRRDCSLPGGSVPTVAVFMLKIFMSLVVGITSGVWVWSSKTFQTWQSLCYRKIAAGRARAKACRAPGSYGRGTHCHYKAPTVVLHMTKTDPSLENPTHL

SEQ ID NO: 22969 - protein, 586 aa, Homo sapiens
MSAGDAVCTGWLVKSPPERKLQRYAWRKRWFVLRRGRMSGNPDVLEYYRNKHSSKPIRVIDLSECAVWKHVGPSFVRKEFQNNFVFIVKTTSRTFYLVAKTEQEMQVWVHSISQVCNLGHLEDGADSMESLSYTPSSLQPSSASSLLTAHAASSSLPRDDPNTNAVATEETRSESELLFLPDYLVLSNCETGRLHHTSLPTRCDSWSNSDRSLEQASFDDVFVDCLQPLPSSHLVHPSCHGSGAQEVPSSRPQAALIWSREINGPPRDHLSSSPLLESSLSSTIQVDKNQGSLPCGAKELDIMSNTPPPRPPKPSHLSERRQEEWSTHSGSKKPECTLVPRRISLSGLDNMRTWKADVEGQSLRHRDKRLSLNLPCRFSPMYPTASASIEDSYVPMSPQAGASGLGPHCSPDDYIPMNSGSISSPLPELPANLEPPPVNRDLKPQRKSRPPPLDLRNLSIIREHASLTRTRTVPCSRTSFLSPERNGINSARFFANPVSREDEESYIEMEEHRTASSLSSGALTWTKKFSLDYLALDFNSASPAPMQQKLLLSEEQRVDYVQVDEQKTQALQSTKQEWTDERQSKV

SEQ ID NO: 22970 - protein, 587 aa, Homo sapiens
MSAGDAVCTGWLVKSPPERKLQRYAWRKRWFVLRRGRMSGNPDVLEYYRNKHSSKPIRVIDLSECAVWKHVGPSFVRKEFQNNFVFIVKTTSRTFYLVAKTEQEMQVWVHSISQVCNLGHLEDGAADSMESLSYTPSSLQPSSASSLLTAHAASSSLPRDDPNTNAVATEETRSESELLFLPDYLVLSNCETGRLHHTSLPTRCDSWSNSDRSLEQASFDDVFVDCLQPLPSSHLVHPSCHGSGAQEVPSSRPQAALIWSREINGPPRDHLSSSPLLESSLSSTIQVDKNQGSLPCGAKELDIMSNTPPPRPPKPSHLSERRQEEWSTHSGSKKPECTLVPRRISLSGLDNMRTWKADVEGQSLRHRDKRLSLNLPCRFSPMYPTASASIEDSYVPMSPQAGASGLGPHCSPDDYIPMNSGSISSPLPELPANLEPPPVNRDLKPQRKSRPPPLDLRNLSIIREHASLTRTRTVPCSRTSFLSPERNGINSARFFANPVSREDEESYIEMEEHRTASSLSSGALTWTKKFSLDYLALDFNSASPAPMQQKLLLSEEQRVDYVQVDEQKTQALQSTKQEWTDERQSKV

SEQ ID NO: 22971 - protein, 548 aa, Homo sapiens
MSAGDAVCTGWLVKSPPERKLQRYAWRKRWFVLRRGRMSGNPDVLEYYRNKHSSKPIRVIDLSECAVWKHVGPSFVRKEFQNNFVFIVKTTSRTFYLVAKTEQEMQVWVHSISQVCNLGHLEDGAADSMESLSYTPSSLQPSSASSLLTAHAASSSLPRDDPNTNAVATEETRSESELLFLPDYLVLSNCETGRLHHTSLPTRCDSWSNSDRSLEQASFDDVFVDCLQPLPSSHLVHPSCHGSGAQEVPSSRPQAALIWSREINGPPRDHLSSSPLLESSLSSTIQVDKNQGSLPCGAKELDIMSNTPPPRPPKPSHLSERRQEEWSTHSGSKKPECTLVPRRISLSGLDNMRTWKADVEGQSLRHRDKRLSLNLPCRFSPMYPTASASIEDSYVPMSPQAGASGLGPHCSPDDYIPMNSGSISSPLPELPANLEPPPVNRDLKPQRKSRPPPLDLRNLSIIREHASLTRTRTVPCSRTSFLSPERNGINSARFFANPVSREDEESYIEMKLLLSEEQRVDYVQVDEQKTQALQSTKQEWTDERQSKV

SEQ ID NO: 22972 - protein, 210 aa, Homo sapiens
MWTLGRRAVAGLLASPSPAQAQTLTRVPRPAELAPLCGRRGLRTDIDATCTPRRASSNQRGLNQIWNVKKQSVYLMNLRKSGTLGHPGSLDETTYERLAEETLDSLAEFFEDLADKPYTFEDYDVSFGSGVLTVKLGGDLGTYVINKQTPNKQIWLSSPSSGPKRYDWTGKNWVYSHDGVSLHELLAAELTKALKTKLDLSSLAYSGKDA

SEQ ID NO: 22973 - protein, 171 aa, Homo sapiens
MWTLGRRAVAGLLASPSPAQAQTLTRVPRPAELAPLCGRRGLRTDIDATCTPRRASSNQRGLNQIWNVKKQSVYLMNLRKSGTLGHPGSLDETTYERLAEETLDSLAEFFEDLADKPYTFEDYDVSFGSGVLTVKLGGDLGTYVINKQTPNKQIWLSSPSRLTWLLWLFHP

SEQ ID NO: 22974 - protein, 196 aa, Homo sapiens
MWTLGRRAVAGLLASPSPAQAQTLTRVPRPAELAPLCGRRGLRTDIDATCTPRRASSNQRGLNQIWNVKKQSVYLMNLRKSGTLGHPGSLDETTYERLAEETLDSLAEFFEDLADKPYTFEDYDVSFGSGVLTVKLGGDLGTYVINKQTPNKQIWLSSPSRYVVDLSVMTGLGKTGCTPTTACPSMSCWPQSSLKP

SEQ ID NO: 22975 - protein, 376 aa, Homo sapiens
MMASYPEPEDAAGALLAPETGRTVKEPEGPPPSPGKGGGGGGGTAPEKPDPAQKPPYSYVALIAMAIRESAEKRLTLSGIYQYIIAKFPFYEKNKKGWQNSIRHNLSLNECFIKVPREGGGERKGNYWTLDPACEDMFEKGNYRRRRRMKRPFRPPPAHFQPGKGLFGAGGAAGGCGVAGAGADGYGYLAPPKYLQSGFLNNSWPLPQPPSPMPYASCQMAAAAAAAAAAAAAAGPGSPGAAAVVKGLAGPAASYGPYTRVQSMALPPGVVNSYNGLGGPPAAPPPPPHPHPHPHAHHLHAAAAPPPAPPHHGAAAPPPGQLSPASPATAAPPAPAPTSAPGLQFACARQPELAMMHCSYWDHDSKTGALHSRLDL

SEQ ID NO: 22976 - protein, 337 aa, Homo sapiens
MDQNEHSHWGPHAKGQCASRSELRIILVGKTGTGKSAAGNSILRKQAFESKLGSQTLTKTCSKSQGSWGNREIVIIDTPDMFSWKDHCEALYKEVQRCYLLSAPGPHVLLLVTQLGRYTSQDQQAAQRVKEIFGEDAMGHTIVLFTHKEDLNGGSLMDYMHDSDNKALSKLVAACGGRICAFNNRAEGSNQDDQVKELMDCIEDLLMEKNGDHYTNGLYSLIQRSKCGPVGSDERVKEFKQSLIKYMETQRSYTALAEANCLKGALIKTQLCVLFCIQLFLRLIILWLCILHSMCNLFCCLLFSMCNLFCSLLFIIPKKLMIFLRTVIRLERKTPRL

SEQ ID NO: 22977 - protein, 67 aa, Homo sapiens
MEEWDVPQMKKEVESLKYQLAFQREMASKTIPELLKWIEDGIPKDPFLNPDLMKNNPWVEKGKCTIL

SEQ ID NO: 22978 - protein, 68 aa, Homo sapiens
MSATNNIAQARKLVEQLRIEAGIERIKVSKAASDLMSYCEQHARNDPLLVGVPASENPFKDKKPCIIL

SEQ ID NO: 22979 - protein, 428 aa, Homo sapiens
MLRTLLRRRLFSYPTKYYFMVLVLSLITFSVLRIHQKPEFVSVRHLELAGENPSSDINCTKVLQGDVNEIQKVKLEILTVKFKKRPRWTPDDYINMTSDCSSFIKRRKYIVEPLSKEEAEFPIAYSIVVHHKIEMLDRLLRAIYMPQNFYCIHVDTKSEDSYLAAVMGIASCFSNVFVASRLESVVYASWSRVQADLNCMKDLYAMSANWKYLINLCGMDFPIKTNLEIVRKLKLLMGENNLETERMPSHKEERWKKRYEVVNGKLTNTGTVKMLPPLETPLFSGSAYFVVSREYVGYVLQNEKIQKLMEWAQDTYSPDEYLWATIQRIPEVPGSLPASHKYDLSDMQAVARFVKWQYFEGDVSKGAPYPPCDGVHVRSVCIFGAGDLNWMLRKHHLFANKFDVDVDLFAIQCLDEHLRHKALETLKH

SEQ ID NO: 22980 - protein, 70 aa, Homo sapiens
MSNNMAKIAEARKTVEQLKLEVNIDRMKVSQAAAELLAFCETHAKDDPLVTPVPAAENPFRDKRLFCVLL

SEQ ID NO: 22981 - protein, 435 aa, Homo sapiens
MAAHLLPICALFLTLLDMAQGFRGPLLPNRPFTTVWNANTQWCLERHGVDVDVSVFDVVANPGQTFRGPDMTIFYSSQLGTYPYYTPTGEPVFGGLPQNASLIAHLARTFQDILAAIPAPDFSGLAVIDWEAWRPRWAFNWDTKDIYRQRSRALVQAQHPDWPAPQVEAVAQDQFQGAARAWMAGTLQLGRALRPRGLWGFYGFPDCYNYDFLSPNYTGQCPSGIRAQNDQLGWLWGQSRALYPSIYMPAVLEGTGKSQMYVQHRVAEAFRVAVAAGDPNLPVLPYVQIFYDTTNHFLPLDELEHSLGESAAQGAAGVVLWVSWENTRTKESCQAIKEYMDTTLGPFILNVTSGALLCSQALCSGHGRCVRRTSHPKALLLLNPASFSIQLTPGGGPLSLRGALSLEDQAQMAVEFKCRCYPGWQAPWCERKSMW

SEQ ID NO: 22982 - protein, 405 aa, Homo sapiens
MAAHLLPICALFLTLLDMAQGFRGPLLPNRPFTTVWNANTQWCLERHGVDVDVSVFDVVANPGQTFRGPDMTIFYSSQLGTYPYYTPTGEPVFGGLPQNASLIAHLARTFQDILAAIPAPDFSGLAVIDWEAWRPRWAFNWDTKDIYRQRSRALVQAQHPDWPAPQVEAVAQDQFQGAARAWMAGTLQLGRALRPRGLWGFYGFPDCYNYDFLSPNYTGQCPSGIRAQNDQLGWLWGQSRALYPSIYMPAVLEGTGKSQMYVQHRVAEAFRVAVAAGDPNLPVLPYVQIFYDTTNHFLPLESCQAIKEYMDTTLGPFILNVTSGALLCSQALCSGHGRCVRRTSHPKALLLLNPASFSIQLTPGGGPLSLRGALSLEDQAQMAVEFKCRCYPGWQAPWCERKSMW

SEQ ID NO: 22983 - protein, 253 aa, Homo sapiens
MAGTLQLGRALRPRGLWGFYGFPDCYNYDFLSPNYTGQCPSGIRAQNDQLGWLWGQSRALYPSIYMPAVLEGTGKSQMYVQHRVAEAFRVAVAAGDPNLPVLPYVQIFYDTTNHFLPLDELEHSLGESAAQGAAGVVLWVSWENTRTKESCQAIKEYMDTTLGPFILNVTSGALLCSQALCSGHGRCVRRTSHPKALLLLNPASFSIQLTPGGGPLSLRGALSLEDQAQMAVEFKCRCYPGWQAPWCERKSMW

SEQ ID NO: 22984 - protein, 209 aa, Homo sapiens
MAAHLLPICALFLTLLDMAQGFRGPLLPNRPFTTVWNANTQWCLERHGVDVDVSVFDVVANPGQTFRGPDMTIFYSSQLGTYPYYTPTGEPVFGGLPQNASLIAHLARTFQDILAAIPAPDFSGLAVIDWEAWRPRWAFNWDTKDIYRQRSRALVQAQHPDWPAPQVEAVAQDQFQGAARAWMAGTLQLGRALRPRGLWGFYGFPDCSG

SEQ ID NO: 22985 - protein, 176 aa, Homo sapiens
MYVQHRVAEAFRVAVAAGDPNLPVLPYVQIFYDTTNHFLPLDELEHSLGESAAQGAAGVVLWVSWENTRTKESCQAIKEYMDTTLGPFILNVTSGALLCSQALCSGHGRCVRRTSHPKALLLLNPASFSIQLTPGGGPLSLRGALSLEDQAQMAVEFKCRCYPGWQAPWCERKSMW

SEQ ID NO: 22986 - protein, 96 aa, Homo sapiens
MDTTLGPFILNVTSGALLCSQALCSGHGRCVRRTSHPKALLLLNPASFSIQLTPGGGPLSLRGALSLEDQAQMAVEFKCRCYPGWQAPWCERKSMW

SEQ ID NO: 22987 - protein, 336 aa, Homo sapiens
MAAHLLPICALFLTLLDMAQGFRGPLLPNRPFTTVWNANTQWCLERHGVDVDVSVFDVVANPGQTFRGPDMTIFYSSQLGTYPYYTPTGEPVFGGLPQNASLIAHLARTFQDILAAIPAPDFSGLAVIDWEAWRPRWAFNWDTKDIYRQRSRALVQAQHPDWPAPQVEAVAQDQFQGAARAWMAGTLQLGRALRPRGLWGFYGFPDCYNYDFLSPNYTGQCPSGIRAQNDQLGWLWGQSRALYPSIYMPAVLEGTGKSQMYVQHRVAEAFRVAVAAGDPNLPVLPYVQIFYDTTNHFLPLDELEHSLGESAAQGAAGVVLWVSWENTRTKVSLGLA

SEQ ID NO: 22988 - protein, 189 aa, Homo sapiens
MARSFSLLMVVLVLSYKSICSLGCDLPQTHSLRNRRALILLAQMGRISPFSCLKDRHEFRFPEEEFDGHQFQKTQAISVLHEMIQQTFNLFSTEDSSAAWEQSLLEKFSTELYQQLNDLEACVIQEVGVEETPLMNEDFILAVRKYFQRITLYLMEKKYSPCAWEVVRAEIMRSFSFSTNLKKGLRRKD

SEQ ID NO: 22989 - protein, 521 aa, Homo sapiens
MGLGRCIWEGWTLESEALRRDMGTWLLACICICTCVCLGVSVTGEGQGPRSRTFTCLTNNILRIDCHWSAPELGQGSSPWLLFTSNQAPGGTHKCILRGSECTVVLPPEAVLVPSDNFTITFHHCMSGREQVSLVDPEYLPRRHVKLDPPSDLQSNISSGHCILTWSISPALEPMTTLLSYELAFKKQEEAWEQAQHRDHIVGVTWLILEAFELDPGFIHEARLRVQMATLEDDVVEEERYTGQWSEWSQPVCFQAPQRQGPLIPPWGWPGNTLVAVSIFLLLTGPTYLLFKLSPRVKRIFYQNVPSPAMFFQPLYSVHNGNFQTWMGAHGAGVLLSQDCAGTPQGALEPCVQEATALLTCGPARPWKSVALEEEQEGPGTRLPGNLSSEDVLPAGCTEWRVQTLAYLPQEDWAPTSLTRPAPPDSEGSRSSSSSSSSNNNNYCALGCYGGWHLSALPGNTQSSGPIPALACGLSCDHQGLETQQGVAWVLAGHCQRPGLHEDLQGMLLPSVLSKARSWTF

SEQ ID NO: 22990 - protein, 500 aa, Homo sapiens
MGTWLLACICICTCVCLGVSVTGEGQGPRSRTFTCLTNNILRIDCHWSAPELGQGSSPWLLFTSNQAPGGTHKCILRGSECTVVLPPEAVLVPSDNFTITFHHCMSGREQVSLVDPEYLPRRHVKLDPPSDLQSNISSGHCILTWSISPALEPMTTLLSYELAFKKQEEAWEQAQHRDHIVGVTWLILEAFELDPGFIHEARLRVQMATLEDDVVEEERYTGQWSEWSQPVCFQAPQRQGPLIPPWGWPGNTLVAVSIFLLLTGPTYLLFKLSPRVKRIFYQNVPSPAMFFQPLYSVHNGNFQTWMGAHGAGVLLSQDCAGTPQGALEPCVQEATALLTCGPARPWKSVALEEEQEGPGTRLPGNLSSEDVLPAGCTEWRVQTLAYLPQEDWAPTSLTRPAPPDSEGSRSSSSSSSSNNNNYCALGCYGGWHLSALPGNTQSSGPIPALACGLSCDHQGLETQQGVAWVLAGHCQRPGLHEDLQGMLLPSVLSKARSWTF

SEQ ID NO: 22991 - protein, 342 aa, Homo sapiens
MPQTCDGTGQMHLGSNCCKNGQTLLQRTCHGVSCCGWWFQAARSILGKGPSAQSLAGWTLESEALRRDMGTWLLACICICTCVCLGVSVTGEGQGPRSRTFTCLTNNILRIDCHWSAPELGQGSSPWLLFTRLLAAHISASCGAVSAPSCCHLRQCSCHLTISPSLSTTACLGGSRSAWWTRSTCPGDTSNISSGHCILTWSISPALEPMTTLLSYELAFKKQEEAWEQAQHRDHIVGVTWLILEAFELDPGFIHEARLRVQMATLEDDVVEEERYTGQWSEWSQPVCFQAPQRQGPLIPPWGWPGNTLVAVSIFLLLTGPTYLLFKLSPRLGWGPTGPVCC

SEQ ID NO: 22992 - protein, 119 aa, Homo sapiens
MKALSPVRGCYEAVCCLSERSLAIARGRGKGPAAEEPLSLLDDMNHCYSRLRELVPGVPRGTQLSQVEILQRVIDYILDLQVVLAEPAPGPPDGPHLPIQTAELTPELVISNDKRSFCH

SEQ ID NO: 22993 - protein, 189 aa, Homo sapiens
MALTFYLLVALVVLSYKSFSSLGCDLPQTHSLGNRRALILLAQMRRISPFSCLKDRHDFEFPQEEFDDKQFQKAQAISVLHEMIQQTFNLFSTKDSSAALDETLLDEFYIELDQQLNDLESCVMQEVGVIESPLMYEDSILAVRKYFQRITLYLTEKKYSSCAWEVVRAEIMRSFSLSINLQKRLKSKE

SEQ ID NO: 22994 - protein, 144 aa, Homo sapiens
MLLAMVLTSALLLCSVAGQGCPTLAGILDINFLINKMQEDPASKCHCSANVTSCLCLGIPSDNCTRPCFSERLSQMTNTTMQTRYPLIFSRVKKSVEVLKNNKCPYFSCEQPCNQTTAGNALTFLKSLLEIFQKEKMRGMRGKI

SEQ ID NO: 22995 - protein, 546 aa, Homo sapiens
MAWPKLPAPWLLLCTWLPAGCLSLLVTVQHTERYVTLFASIILKCDYTTSAQLQDVVVTWRFKSFCKDPIFDYYSASYQAALSLGQDPSNDCNDNQREVRIVAQRRGQNEPVLGVDYRQRKITIQNRADLVINEVMWWDHGVYYCTIEAPGDTSGDPDKEVKLIVLHWLTVIFIILGALLLLLLIGVCWCQCCPQYCCCYIRCPCCPAHCCCPEEALARHRYMKQAQALGPQMMGKPLYWGADRSSQVSSYPMHPLLQRDLSLPSSLPQMPMTQTTNQPPIANGVLEYLEKELRNLNLAQPLPPDLKGRFGHPCSMLSSLGSEVVERRIIHLPPLIRDLSSSRRTSDSLHQQWLTPIPSRPWDLREGRSHHHYPDFHQELQDRGPKSWALERRELDPSWSGRHRSSRLNGSPIHWSDRDSLSDVPSSSEARWRPSHPPFRSRCQERPRRPSPRESTQRHGRRRRHRSYSPPLPSGLSSWSSEEDKERQPQSWRAHRRGSHSPHWPEEKPPSYRSLDITPGKNSRKKGSVERRSEKDSSHSGRSVVI

SEQ ID NO: 22996 - protein, 502 aa, Homo sapiens
MAWPKLPAPWLLLCTWLPAGCLSLLVTVQHTERYVTLFASIILKCDYTTSAQLQDVVVTWRFKSFCKDPIFDYYSASYQAALSLGQDPSNDCNDNQREVRIVAQRRGQNEPVLGVDYRQRKITIQNRADLVINEVMWWDHGVYYCTIEAPGDTSGDPDKEVKLIVLHWLTVIFIILGALLLLLLIGVCWCQCCPQYCCCYIRCPCCPAHCCCPEEDLSLPSSLPQMPMTQTTNQPPIANGVLEYLEKELRNLNLAQPLPPDLKGRFGHPCSMLSSLGSEVVERRIIHLPPLIRDLSSSRRTSDSLHQQWLTPIPSRPWDLREGRSHHHYPDFHQELQDRGPKSWALERRELDPSWSGRHRSSRLNGSPIHWSDRDSLSDVPSSSEARWRPSHPPFRSRCQERPRRPSPRESTQRHGRRRRHRSYSPPLPSGLSSWSSEEDKERQPQSWRAHRRGSHSPHWPEEKPPSYRSLDITPGKNSRKKGSVERRSEKDSSHSGRSVVI

SEQ ID NO: 22997 - protein, 265 aa, Homo sapiens
MAWPKLPAPWLLLCTWLPAGCLSLLVTVQHTERYVTLFASIILKCDYTTSAQLQDVVVTWRFKSFCKDPIFDYYSASYQAALSLGQDPSNDCNDNQREVRIVAQRRGQNEPVLGVDYRQRKITIQNRADLVINEVMWWDHGVYYCTIEAPGDTSGDPDKEVKLIVLHWLTVIFIILGALLLLLLIGVCWCQCCPQYCCCYIRCPCCPAHCCCPEEALARHRYMKQAQALGPQMMGKPLYWGADRSSQVSSYPMHPLLQRASRRCQ

SEQ ID NO: 22998 - protein, 211 aa, Homo sapiens
MAWPKLPAPWLLLCTWLPAGCLSLLVTVQHTERYVTLFASIILKCDYTTSAQLQDVVVTWRFKSFCKDPIFDYYSASYQAALSLGQDPSNDCCCPEEALARHRYMKQAQALGPQMMGKPLYWGADRSSQVSSYPMHPLLQRDLSLPSSLPQMPMTQTTNQPPIANGVLEYLEKELRNLNLAQPLPPDLKGRFGHPCSMLSSLGSENQIEEF

SEQ ID NO: 22999 - protein, 457 aa, Homo sapiens
MAWPKLPAPWLLLCTWLPAGCLSLLVTVQHTERYVTLFASIILKCDYTTSAQLQDVVVTWRFKSFCKDPIFDYYSASYQAALSLGQDPSNDCNDNQREVRIVAQRRGQNEPVLGVDYRQRKITIQNPLARHRYMKQAQALGPQMMGKPLYWGADRSSQVSSYPMHPLLQRDLSLPSSLPQMPMTQTTNQPPIANGVLEYLEKELRNLNLAQPLPPDLKGRFGHPCSMLSSLGSEVVERRIIHLPPLIRDLSSSRRTSDSLHQQWLTPIPSRPWDLREGRSHHHYPDFHQELQDRGPKSWALERRELDPSWSGRHRSSRLNGSPIHWSDRDSLSDVPSSSEARWRPSHPPFRSRCQERPRRPSPRESTQRHGRRRRHRSYSPPLPSGLSSWSSEEDKERQPQSWRAHRRGSHSPHWPEEKPPSYRSLDITPGKNSRKKGSVERRSEKDSSHSGRSVVI

SEQ ID NO: 23000 - protein, 514 aa, Homo sapiens
MAGNIFCPFALFFLPMSRVGHLQHFLLLLALGCLSLLVTVQHTERYVTLFASIILKCDYTTSAQLQDVVVTWRFKSFCKDPIFDYYSASYQAALSLGQDPSNDCNDNQREVRIVAQRRGQNEPVLGVDYRQRKITIQNRADLVINEVMWWDHGVYYCTIEAPGDTSGDPDKEVKLIVLHWLTVIFIILGALLLLLLIGVCWCQCCPQYCCCYIRCPCCPAHCCCPEEDLSLPSSLPQMPMTQTTNQPPIANGVLEYLEKELRNLNLAQPLPPDLKGRFGHPCSMLSSLGSEVVERRIIHLPPLIRDLSSSRRTSDSLHQQWLTPIPSRPWDLREGRSHHHYPDFHQELQDRGPKSWALERRELDPSWSGRHRSSRLNGSPIHWSDRDSLSDVPSSSEARWRPSHPPFRSRCQERPRRPSPRESTQRHGRRRRHRSYSPPLPSGLSSWSSEEDKERQPQSWRAHRRGSHSPHWPEEKPPSYRSLDITPGKNSRKKGSVERRSEKDSSHSGRSVVI

SEQ ID NO: 23001 - protein, 325 aa, Homo sapiens
MLPRVGCPALPLPPPPLLPLLLLLLGASGGGGGARAEVLFRCPPCTPERLAACGPPPVAPPAAVAAVAGGARMPCAELVREPGCGCCSVCARLEGEACGVYTPRCGQGLRCYPHPGSELPLQALVMGEGTCEKRRDAEYGASPEQVADNGDDHSEGGLVENHVDSTMNMLGGGGSAGRKPLKSGMKELAVFREKVTEQHRQMGKGGKHHLGLEEPKKLRPPPARTPCQQELDQVLERISTMRLPDERGPLEHLYSLHIPNCDKHGLYNLKQCKMSLNGQRGECWCVNPNTGKLIQGAPTIRGDPECHLFYNEQQEARGVHTQRMQ

SEQ ID NO: 23002 - protein, 417 aa, Homo sapiens
MTTQLGPALVLGVALCLGCGQPLPQVPERPFSVLWNVPSAHCEARFGVHLPLNALGIIANRGQHFHGQNMTIFYKNQLGLYPYFGPRGTAHNGGIPQALPLDRHLALAAYQIHHSLRPGFAGPAVLDWEEWCPLWAGNWGRRRAYQAASWAWAQQVFPDLDPQEQLYKAYTGFEQAARALMEDTLRVAQALRPHGLWGFYHYPACGNGWHSMASNYTGRCHAATLARNTQLHWLWAASSALFPSIYLPPRLPPAHHQAFVRHRLEEAFRVALVGHRHPLPVLAYVRLTHRRSGRFLSQDDLVQSIGVSAALGAAGVVLWGDLSLSSSEEECWHLHDYLVDTLGPYVINVTRAAMACSHQRCHGHGRCARRDPGQMEAFLHLWPDGSLGDWKSFSCHCYWGWAGPTCQEPRPGPKEAV

SEQ ID NO: 23003 - protein, 387 aa, Homo sapiens
MTTQLGPALVLGVALCLGCGQPLPQVPERPFSVLWNVPSAHCEARFGVHLPLNALGIIANRGQHFHGQNMTIFYKNQLGLYPYFGPRGTAHNGGIPQALPLDRHLALAAYQIHHSLRPGFAGPAVLDWEEWCPLWAGNWGRRRAYQAASWAWAQQVFPDLDPQEQLYKAYTGFEQAARALMEDTLRVAQALRPHGLWGFYHYPACGNGWHSMASNYTGRCHAATLARNTQLHWLWAASSALFPSIYLPPRLPPAHHQAFVRHRLEEAFRVALVGHRHPLPVLAYVRLTHRRSGRFLSQEECWHLHDYLVDTLGPYVINVTRAAMACSHQRCHGHGRCARRDPGQMEAFLHLWPDGSLGDWKSFSCHCYWGWAGPTCQEPRPGPKEAV

SEQ ID NO: 23004 - protein, 168 aa, Homo sapiens
MLPPAHHQAFVRHRLEEAFRVALVGHRHPLPVLAYVRLTHRRSGRFLSQDDLVQSIGVSAALGAAGVVLWGDLSLSSSEEECWHLHDYLVDTLGPYVINVTRAAMACSHQRCHGHGRCARRDPGQMEAFLHLWPDGSLGDWKSFSCHCYWGWAGPTCQEPRPGPKEAV

SEQ ID NO: 23005 - protein, 138 aa, Homo sapiens
MLPPAHHQAFVRHRLEEAFRVALVGHRHPLPVLAYVRLTHRRSGRFLSQEECWHLHDYLVDTLGPYVINVTRAAMACSHQRCHGHGRCARRDPGQMEAFLHLWPDGSLGDWKSFSCHCYWGWAGPTCQEPRPGPKEAV

SEQ ID NO: 23006 - protein, 639 aa, Homo sapiens
MDRVLLRWISLFWLTAMVEGLQVTVPDKKKVAMLFQPTVLRCHFSTSSHQPAVVQWKFKSYCQDRMGESLGMSSTRAQSLSKRNLEWDPYLDCLDSRRTVRVVASKQGSTVTLGDFYRGREITIVHDADLQIGKLMWGDSGLYYCIITTPDDLEGKNEDSVELLVLGRTGLLADLLPSFAVEIMPEWVFVGLVLLGVFLFFVLVGICWCQCCPHSCCCYVRCPCCPDSCCCPQALYEAGKAAKAGYPPSVSGVPGPYSIPSVPLGGAPSSGMLMDKPHPPPLAPSDSTGGSHSVRKGYRIQADKERDSMKVLYYVEKELAQFDPARRMRGRYNNTISELSSLHEEDSNFRQSFHQMRSKQFPVSGDLESNPDYWSGVMGGSSGASRGPSAMEYNKEDRESFRHSQPRSKSEMLSRKNFATGVPAVSMDELAAFADSYGQRPRRADGNSHEARGGSRFERSESRAHSGFYQDDSLEEYYGQRSRSREPLTDADRGWAFSPARRRPAEDAHLPRLVSRTPGTAPKYDHSYLGSARERQARPEGASRGGSLETPSKRSAQLGPRSASYYAWSPPGTYKAGSSQDDQEDASDDALPPYSELELTRGPSYRGRDLPYHSNSEKKRKKEPAKKTNDFPTRMSLVV

SEQ ID NO: 23007 - protein, 452 aa, Homo sapiens
MEVTTRLTWNDENHLRKLLGNVSLSLLYKSSVHGGSIEDMVERCSRQGCTITMAYIDYNMIVAFMLGNYINLHESSTEPNDSLWFSLQKKNDTTEIETLLLNTAPKIIDEQLVCRLSKTDIFIICRDNKIYLDKMITRNLKLRFYGHRQYLECEVFRVEGIKDNLDDIKRIIKAREHRNRLLADIRDYRPYADLVSEIRILLVGPVGSGKSSFFNSVKSIFHGHVTGQAVVGSDITSITERYRIYSVKDGKNGKSLPFMLCDTMGLDGAEGAGLCMDDIPHILKGCMPDRYQFNSRKPITPEHSTFITSPSLKDRIHCVAYVLDINSIDNLYSKMLAKVKQVHKEVLNCGIAYVALLTKVDDCSEVLQDNFLNMSRSMTSQSRVMNVHKMLGIPISNILMVGNYASDLELDPMKDILILSALRQMLRAADDFLEDLPLEETGAIERALQPCI

SEQ ID NO: 23008 - protein, 161 aa, Homo sapiens
MEVTTRLTWNDENHLRKLLGNVSLSLLYKSSVHGGSIEDMVERCSRQGCTITMAYIDYNMIVAFMLGNYINLHESSTEPNDSLWFSLQKKNDTTEIETLLLNTAPKIIDEQLVCRLSKTDIFIICRDNKIYLDKMITRNLKLRFYGHRQYLECEVFRVEGM

SEQ ID NO: 23009 - protein, 481 aa, Homo sapiens
MKVLSEGQLKLCVVQPVHLTSWLLIFFILKSISCLKPARLPIYQRKPFIAAWNAPTDQCLIKYNLRLNLKMFPVIGSPLAKARGQNVTIFYVNRLGYYPWYTSQGVPINGGLPQNISLQVHLEKADQDINYYIPAEDFSGLAVIDWEYWRPQWARNWNSKDVYRQKSRKLISDMGKNVSATDIEYLAKVTFEESAKAFMKETIKLGIKSRPKGLWGYYLYPDCHNYNVYAPNYSGSCPEDEVLRNNELSWLWNSSAALYPSIGVWKSLGDSENILRFSKFRVHESMRISTMTSHDYALPVFVYTRLGYRDEPLFFLSKQDLVSTIGESAALGAAGIVIWGDMNLTASKANCTKVKQFVSSDLGSYIANVTRAAEVCSLHLCRNNGRCIRKMWNAPSYLHLNPASYHIEASEDGEFTVKGKASDTDLAVMADTFSCHCYQGYEGADCREIKTADGCSGVSPSPGSLMTLCLLLLASYRSIQL

SEQ ID NO: 23010 - protein, 291 aa, Homo sapiens
MQRARPTLWAAALTLLVLLRGPPVARAGASSAGLGPVVRCEPCDARALAQCAPPPAVCAELVREPGCGCCLTCALSEGQPCGIYTERCGSGLRCQPSPDEARPLQALLDGRGLCVNASAVSRLRAYLLPAPPAPGNASESEEDRSAGSVESPSVSSTHRVSDPKFHPLHSKIIIIKKGHAKDSQRYKVDYESQSTDTQNFSSESKRETEYGPCRREMEDTLNHLKFLNVLSPRGVHIPNCDKKGFYKKKQCRPSKGRKRGFCWCVDKYGQPLPGYTTKGKEDVHCYSMQSK

SEQ ID NO: 23011 - protein, 297 aa, Homo sapiens
MQRARPTLWAAALTLLVLLRGPPVARAGASSAGLGPVVRCEPCDARALAQCAPPPAVCAELVREPGCGCCLTCALSEGQPCGIYTERCGSGLRCQPSPDEARPLQALLDGRGLCVNASAVSRLRAYLLPAPPAPGEPPAPGNASESEEDRSAGSVESPSVSSTHRVSDPKFHPLHSKIIIIKKGHAKDSQRYKVDYESQSTDTQNFSSESKRETEYGPCRREMEDTLNHLKFLNVLSPRGVHIPNCDKKGFYKKKQCRPSKGRKRGFCWCVDKYGQPLPGYTTKGKEDVHCYSMQSK

SEQ ID NO: 23012 - protein, 272 aa, Homo sapiens
MVLLTAVLLLLAAYAGPAQSLGSFVHCEPCDEKALSMCPPSPLGCELVKEPGCGCCMTCALAEGQSCGVYTERCAQGLRCLPRQDEEKPLHALLHGRGVCLNEKSYREQVKIERDSREHEEPTTSEMAEETYSPKIFRPKHTRISELKAEAVKKDRRKKLTQSKFVGGAENTAHPRIISAPEMRQESEQGPCRRHMEASLQELKASPRMVPRAVYLPNCDRKGFYKRKQCKPSRGRKRGICWCVDKYGMKLPGMEYVDGDFQCHTFDSSNVE

SEQ ID NO: 23013 - protein, 390 aa, Homo sapiens
MRGDRGRGRGGRFGSRGGPGGGFRPFVPHIPFDFYLCEMAFPRVKPAPDETSFSEALLKRNQDLAPNSAEQASILSLVTKINNVIDNLIVAPGTFEVQIEEVRQVGSYKKGTMTTGHNVADLVVILKILPTLEAVAALGNKVVESLRAQDPSEVLTMLTNETGFEISSSDATVKILITTVPPNLRKLDPELHLDIKVLQSALAAIRHARWFEENASQSTVKVLIRLLKDLRIRFPGFEPLTPWILDLLGHYAVMNNPTRQPLALNVAYRRCLQILAAGLFLPGSVGITDPCESGNFRVHTVMTLEQQDMVCYTAQTLVRILSHGGFRKILGQEGDASYLASEISTWDGVIVTPSEKAYEKPPEKKEGEEEEENTEEPPQGEEEESMETQE

SEQ ID NO: 23014 - protein, 407 aa, Homo sapiens
MSGGSADYNREHGGPEGMDPDGVIESNWNEIVDNFDDMNLKESLLRGIYAYGFEKPSAIQQRAIIPCIKGYDVIAQAQSGTGKTATFAISILQQLEIEFKETQALVLAPTRELAQQIQKVILALGDYMGATCHACIGGTNVRNEMQKLQAEAPHIVVGTPGRVFDMLNRRYLSPKWIKMFVLDEADEMLSRGFKDQIYEIFQKLNTSIQVVLLSATMPTDVLEVTKKFMRDPIRILVKKEELTLEGIKQFYINVEREEWKLDTLCDLYETLTITQAVIFLNTRRKVDWLTEKMHARDFTVSALHGDMDQKERDVIMREFRSGSSRVLITTDLLARGIDVQQVSLVINYDLPTNRENYIHRIGRGGRFGRKGVAINFVTEEDKRILRDIETFYNTTVEEMPMNVADLI

SEQ ID NO: 23015 - protein, 408 aa, Homo sapiens
MSGGSADYNSREHGGPEGMDPDGVIESNWNEIVDNFDDMNLKESLLRGIYAYGFEKPSAIQQRAIIPCIKGYDVIAQAQSGTGKTATFAISILQQLEIEFKETQALVLAPTRELAQQIQKVILALGDYMGATCHACIGGTNVRNEMQKLQAEAPHIVVGTPGRVFDMLNRRYLSPKWIKMFVLDEADEMLSRGFKDQIYEIFQKLNTSIQVVLLSATMPTDVLEVTKKFMRDPIRILVKKEELTLEGIKQFYINVEREEWKLDTLCDLYETLTITQAVIFLNTRRKVDWLTEKMHARDFTVSALHGDMDQKERDVIMREFRSGSSRVLITTDLLARGIDVQQVSLVINYDLPTNRENYIHRIGRGGRFGRKGVAINFVTEEDKRILRDIETFYNTTVEEMPMNVADLI

SEQ ID NO: 23016 - protein, 578 aa, Homo sapiens
MRQQDAPKPTPAACRCSGLARRVLTIAFALLILGLMTWAYAAGVPLASDRYGLLAFGLYGAFLSAHLVAQSLFAYLEHRRVAAAARGPLDAATARSVALTISAYQEDPAYLRQCLASARALLYPRARLRVLMVVDGNRAEDLYMVDMFREVFADEDPATYVWDGNYHQPWEPAAAGAVGAGAYREVEAEDPGRLAVEALVRTRRCVCVAQRWGGKREVMYTAFKALGDSVDYVQVCDSDTRLDPMALLELVRVLDEDPRVGAVGGDVRILNPLDSWVSFLSSLRYWVAFNVERACQSYFHCVSCISGPLGLYRNNLLQQFLEAWYNQKFLGTHCTFGDDRHLTNRMLSMGYATKYTSRSRCYSETPSSFLRWLSQQTRWSKSYFREWLYNALWWHRHHAWMTYEAVVSGLFPFFVAATVLRLFYAGRPWALLWVLLCVQGVALAKAAFAAWLRGCLRMVLLSLYAPLYMCGLLPAKFLALVTMNQSGWGTSGRRKLAANYVPLLPLALWALLLLGGLVRSVAHEARADWSGPSRAAEAYHLAAGAGAYVGYWVAMLTLYWVGVRRLCRRRTGGYRVQV

SEQ ID NO: 23017 - protein, 166 aa, Homo sapiens
MKYTSYILAFQLCIVLGSLGCYCQDPYVKEAENLKKYFNAGHSDVADNGTLFLGILKNWKEESDRKIMQSQIVSFYFKLFKNFKDDQSIQKSVETIKEDMNVKFFNSNKKKRDDFEKLTNYSVTDLNVQRKAIHELIQVMAELSPAAKTGKRKRSQMLFRGRRASQ

SEQ ID NO: 23018 - protein, 894 aa, Homo sapiens
MRPMRIFVNDDRHVMAKHSSVYPTQEELEAVQNMVSHTERALKAVSDWIDEQEKGSSEQAESDNMDVPPEDDSKEGAGEQKTEHMTRTLRGVMRVGLVAKGLLLKGDLDLELVLLCKEKPTTALLDKVADNLAIQLAAVTEDKYEILQSVDDAAIVIKNTKEPPLSLTIHLTSPVVREEMEKVLAGETLSVNDPPDVLDRQKCLAALASLRHAKWFQARANGLKSCVIVIRVLRDLCTRVPTWGPLRGWPLELLCEKSIGTANRPMGAGEALRRVLECLASGIVMPDGSGIYDPCEKEATDAIGHLDRQQREDITQSAQHALRLAAFGQLHKVLGMDPLPSKMPKKPKNENPVDYTVQIPPSTTYAITPMKRPMEEDGEEKSPSKKKKKIQKKEEKAEPPQAMNALMRLNQLKPGLQYKLVSQTGPVHAPIFTMSVEVDGNSFEASGPSKKTAKLHVAVKVLQDMGLPTGAEGRDSSKGEDSAEETEAKPAVVAPAPVVEAVSTPSAAFPSDATAEQGPILTKHGKNPVMELNEKRRGLKYELISETGGSHDKRFVMEVEVDGQKFQGAGSNKKVAKAYAALAALEKLFPDTPLALDANKKKRAPVPVRGGPKFAAKPHNPGFGMGGPMHNEVPPPPNLRGRGRGGSIRGRGRGRGFGGANHGGYMNAGAGYGSYGYGGNSATAGYSQFYSNGGHSGNASGGGGGGGGGSSGYGSYYQGDNYNSPVPPKHAGKKQPHGGQQKPSYGSGYQSHQGQQQSYNQSPYSNYGPPQGKQKGYNHGQGSYSYSNSYNSPGGGGGSDYNYESKFNYSGSGGRSGGNSYGSGGASYNPGSHGGYGGGSGGGSSYQGKQGGYSQSNYNSPGSGQNYSGPPSSYQSSQGGYGRNADHSMNYQYR

SEQ ID NO: 23019 - protein, 702 aa, Homo sapiens
MRPMRIFVNDDRHVMAKHSSVYPTQEELEAVQNMVSHTERALKAVSDWIDEQEKGSSEQAESDNMDVPPEDDSKEGAGEQKTEHMTRTLRGVMRVGLVAKGLLLKGDLDLELVLLCKEKPTTALLDKVADNLAIQLAAVTEDKYEILQSVDDAAIVIKNTKEPPLSLTIHLTSPVVREEMEKVLAGETLSVNDPPDVLDRQKCLAALASLRHAKWFQARANGLKSCVIVIRVLRDLCTRVPTWGPLRGWPLELLCEKSIGTANRPMGAGEALRRVLECLASGIVMPDGSGIYDPCEKEATDAIGHLDRQQREDITQSAQHALRLAAFGQLHKVLGMDPLPSKMPKKPKNENPVDYTVQIPPSTTYAITPMKRPMEEDGEEKSPSKKKKKIQKKEEKAEPPQAMNALMRLNQLKPGLQYKLVSQTGPVHAPIFTMSVEVDGNSFEASGPSKKTAKLHVAVKVLQDMGLPTGAEGRDSSKGEDSAEETEAKPAVVAPAPVVEAVSTPSAAFPSDATAEQGPILTKHGKNPVMELNEKRRGLKYELISETGGSHDKRFVMEVEVDGQKFQGAGSNKKVAKAYAALAALEKLFPDTPLALDANKKKRAPVPVRGGPKFAAKPHNPGFGMGGPMHNEVPPPPNLRGRGRGGSIRGRGRGRGFGGANHGGYMNAGAGYGSYGYGGNSATAGYSDFFTDCYGYHDFGSS

SEQ ID NO: 23020 - protein, 764 aa, Homo sapiens
MRPMRIFVNDDRHVMAKHSSVYPTQEELEAVQNMVSHTERALKAVSDWIDEQEKGSSEQAESDNMDVPPEDDSKEGAGEQKTEHMTRTLRGVMRVGLVAKGLLLKGDLDLELVLLCKEKPTTALLDKVADNLAIQLAAVTEDKYEILQSVDDAAIVIKNTKEPPLSLTIHLTSPVVREEMEKVLAGETLSVNDPPDVLDRQKCLAALASLRHAKWFQARANGLKSCVIVIRVLRDLCTRVPTWGPLRGWPLELLCEKSIGTANRPMGAGEALRRVLECLASGIVMPDGSGIYDPCEKEATDAIGHLDRQQREDITQSAQHALRLAAFGQLHKVLGMDPLPSKMPKKPKNENPVDYTVQIPPSTTYAITPMKRPMEEDGEEKSPSKKKKKIQKKEEKAEPPQAMNALMRLNQLKPGLQYKLVSQTGPVHAPIFTMSVEVDGNSFEASGPSKKTAKLHVAVKVLQDMGLPTGAEGRDSSKGEDSAEETEAKPAVVAPAPVVEAVSTPSAAFPSDATAEQGPILTKHGKNPVMELNEKRRGLKYELISETGGSHDKRFVMEVEVDGQKFQGAGSNKKVAKAYAALAALEKLFPDTPLALDANKKKRAPVPVRGGPKFAAKPHNPGFGMGGPMHNEVPPPPNLRGRGRGGSIRGRGRGRGFGGANHGGYMNAGAGYGSYGYGGNSATAGYSQFSRPPPPSRPRCCVVRCSGSPCGPSCDPYLAVFGTPCLQWFVSCHYNFVWVEFLSFCSSVSLCLFTLRVSGNSVCL

SEQ ID NO: 23021 - protein, 698 aa, Homo sapiens
MRPMRIFVNDDRHVMAKHSSVYPTQEELEAVQNMVSHTERALKAVSDWIDEQEKGSSEQAESDNMDVPPEDDSKEGAGEQKTEHMTRTLRGVMRVGLVAKGLLLKGDLDLELVLLCKEKPTTALLDKVADNLAIQLAAVTEDKYEILQSVDDAAIVIKNTKEPPLSLTIHLTSPVVREEMEKVLAGETLSVNDPPDVLDRQKCLAALASLRHAKWFQARANGLKSCVIVIRVLRDLCTRVPTWGPLRGWPLELLCEKSIGTANRPMGAGEALRRVLECLASGIVMPDGSGIYDPCEKEATDAIGHLDRQQREDITQSAQHALRLAAFGQLHKVLGMDPLPSKMPKKPKNENPVDYTVQIPPSTTYAITPMKRPMEEDGEEKSPSKKKKKIQKKEEKAEPPQAMNALMRLNQLKPGLQYKLVSQTGPVHAPIFTMSVEVDGNSFEASGPSKKTAKLHVAVKVLQDMGLPTGAEGRDSSKGEDSAEETEAKPAVVAPAPVVEAVSTPSAAFPSDATAENVKQQGPILTKHGKNPVMELNEKRRGLKYELISETGGSHDKRFVMEVEVDGQKFQGAGSNKKVAKAYAALAALEKLFPDTPLALDANKKKRAPVPVRGGPKFAAKPHNPGFGMGGPMHNEVPPPPNLRGRGRGGSIRGRGRGRGFGGANHGGYMNAGAGYGSYGYGGNSATAGYSKCAFLSV

SEQ ID NO: 23022 - protein, 690 aa, Homo sapiens
MRPMRIFVNDDRHVMAKHSSVYPTQEELEAVQNMVSHTERALKAVSDWIDEQEKGSSEQAESDNMDVPPEDDSKEGAGEQKTEHMTRTLRGVMRVGLVAKGLLLKGDLDLELVLLCKEKPTTALLDKVADNLAIQLAAVTEDKYEILQSVDDAAIVIKNTKEPPLSLTIHLTSPVVREEMEKVLAGETLSVNDPPDVLDRQKCLAALASLRHAKWFQARANGLKSCVIVIRVLRDLCTRVPTWGPLRGWPLELLCEKSIGTANRPMGAGEALRRVLECLASGIVMPDGSGIYDPCEKEATDAIGHLDRQQREDITQSAQHALRLAAFGQLHKVLGMDPLPSKMPKKPKNENPVDYTVQIPPSTTYAITPMKRPMEEDGEEKSPSKKKKKIQKKEEKAEPPQAMNALMRLNQLKPGLQYKLVSQTGPVHAPIFTMSVEVDGNSFEASGPSKKTAKLHVAVKVLQDMGLPTGAEGRDSSKGEDSAEETEAKPAVVAPAPVVEAVSTPSAAFPSDATAEQGPILTKHGKNPVMELNEKRRGLKYELISETGGSHDKRFVMEVEVDGQKFQGAGSNKKVAKAYAALAALEKLFPDTPLALDANKKKRAPVPVRGGPKFAAKPHNPGFGMGGPMHNEVPPPPNLRGRGRGGSIRGRGRGRGFGGANHGGYMNAGAGYGSYGYGGNSATAGYTGFV

SEQ ID NO: 23023 - protein, 706 aa, Homo sapiens
MRPMRIFVNDDRHVMAKHSSVYPTQEELEAVQNMVSHTERALKAVSDWIDEQEKGSSEQAESDNMDVPPEDDSKEGAGEQKTEHMTRTLRGVMRVGLVAKGLLLKGDLDLELVLLCKEKPTTALLDKVADNLAIQLAAVTEDKYEILQSVDDAAIVIKNTKEPPLSLTIHLTSPVVREEMEKVLAGETLSVNDPPDVLDRQKCLAALASLRHAKWFQARANGLKSCVIVIRVLRDLCTRVPTWGPLRGWPLELLCEKSIGTANRPMGAGEALRRVLECLASGIVMPDGSGIYDPCEKEATDAIGHLDRQQREDITQSAQHALRLAAFGQLHKVLGMDPLPSKMPKKPKNENPVDYTVQIPPSTTYAITPMKRPMEEDGEEKSPSKKKKKIQKKEEKAEPPQAMNALMRLNQLKPGLQYKLVSQTGPVHAPIFTMSVEVDGNSFEASGPSKKTAKLHVAVKVLQDMGLPTGAEGRDSSKGEDSAEETEAKPAVVAPAPVVEAVSTPSAAFPSDATAENVKQQGPILTKHGKNPVMELNEKRRGLKYELISETGGSHDKRFVMEVEVDGQKFQGAGSNKKVAKAYAALAALEKLFPDTPLALDANKKKRAPVPVRGGPKFAAKPHNPGFGMGGPMHNEVPPPPNLRGRGRGGSIRGRGRGRGFGGANHGGYMNAGAGYGSYGYGGNSATAGYSDFFTDCYGYHDFGSS

SEQ ID NO: 23024 - protein, 898 aa, Homo sapiens
MRPMRIFVNDDRHVMAKHSSVYPTQEELEAVQNMVSHTERALKAVSDWIDEQEKGSSEQAESDNMDVPPEDDSKEGAGEQKTEHMTRTLRGVMRVGLVAKGLLLKGDLDLELVLLCKEKPTTALLDKVADNLAIQLAAVTEDKYEILQSVDDAAIVIKNTKEPPLSLTIHLTSPVVREEMEKVLAGETLSVNDPPDVLDRQKCLAALASLRHAKWFQARANGLKSCVIVIRVLRDLCTRVPTWGPLRGWPLELLCEKSIGTANRPMGAGEALRRVLECLASGIVMPDGSGIYDPCEKEATDAIGHLDRQQREDITQSAQHALRLAAFGQLHKVLGMDPLPSKMPKKPKNENPVDYTVQIPPSTTYAITPMKRPMEEDGEEKSPSKKKKKIQKKEEKAEPPQAMNALMRLNQLKPGLQYKLVSQTGPVHAPIFTMSVEVDGNSFEASGPSKKTAKLHVAVKVLQDMGLPTGAEGRDSSKGEDSAEETEAKPAVVAPAPVVEAVSTPSAAFPSDATAENVKQQGPILTKHGKNPVMELNEKRRGLKYELISETGGSHDKRFVMEVEVDGQKFQGAGSNKKVAKAYAALAALEKLFPDTPLALDANKKKRAPVPVRGGPKFAAKPHNPGFGMGGPMHNEVPPPPNLRGRGRGGSIRGRGRGRGFGGANHGGYMNAGAGYGSYGYGGNSATAGYSQFYSNGGHSGNASGGGGGGGGGSSGYGSYYQGDNYNSPVPPKHAGKKQPHGGQQKPSYGSGYQSHQGQQQSYNQSPYSNYGPPQGKQKGYNHGQGSYSYSNSYNSPGGGGGSDYNYESKFNYSGSGGRSGGNSYGSGGASYNPGSHGGYGGGSGGGSSYQGKQGGYSQSNYNSPGSGQNYSGPPSSYQSSQGGYGRNADHSMNYQYR

SEQ ID NO: 23025 - protein, 553 aa, Homo sapiens
MPVQLTTALRVVGTSLFALAVLGGILAAYVTGYQFIHTEKHYLSFGLYGAILGLHLLIQSLFAFLEHRRMRRAGQALKLPSPRRGSVALCIAAYQEDPDYLRKCLRSAQRISFPDLKVVMVVDGNRQEDAYMLDIFHEVLGGTEQAGFFVWRSNFHEAGEGETEASLQEGMDRVRDVVRASTFSCIMQKWGGKREVMYTAFKALGDSVDYIQVCDSDTVLDPACTIEMLRVLEEDPQVGGVGGDVQILNKYDSWISFLSSVRYWMAFNVERACQSYFGCVQCISGPLGMYRNSLLQQFLEDWYHQKFLGSKCSFGDDRHLTNRVLSLGYRTKYTARSKCLTETPTKYLRWLNQQTRWSKSYFREWLYNSLWFHKHHLWMTYESVVTGFFPFFLIATVIQLFYRGRIWNILLFLLTVQLVGIIKATYACFLRGNAEMIFMSLYSLLYMSSLLPAKIFAIATINKSGWGTSGRKTIVVNFIGLIPVSIWVAVLLGGLAYTAYCQDLFSETELAFLVSGAILYGCYWVALLMLYLAIIARRCGKKPEQYSLAFAEV

SEQ ID NO: 23026 - protein, 281 aa, Homo sapiens
MPVQLTTALRVVGTSLFALAVLGGILAAYVTGYQFIHTEKHYLSFGLYGAILGLHLLIQSLFAFLEHRRMRRAGQALKLPSPRRGSVALCIAAYQEDPDYLRKCLRSAQRISFPDLKVVMVVDGNRQEDAYMLDIFHEVLGGTEQAGFFVWRSNFHEAGEGETEASLQEGMDRVRDVVRASTFSCIMQKWGGKREVMYTAFKALGDSVDYIQVCDSDTVLDPACTIEMLRVLEEDPQVGGVGGDVQPPGKGMAVEDDQVQAAQVRATEAWSVHQRHVSREQ

SEQ ID NO: 23027 - protein, 727 aa, Homo sapiens
MNQKLLKLENLLRFHTIYRQLHSLCQRRALRQWRHGFSSAYPVWTAQLCAWPWPTDVLTGAALSQYRLLVTKKEEGPWKSQLSSTKSKKVVEVWIGMTIEELARAMEKNTDYVYEALLNTDIDIDSLEADSHLDEVWIKEVITKAGMKLKWSKLKQDKVRKNKDAVRRPQADPALLTPRSPVVTIMGHVDHGKTTLLDKFRKTQVAAVETGGITQHIGAFLVSLPSGEKITFLDTPGHAAFSAMRARGAQVTDIVVLVVAADDGVMKQTVESIQHAKDAQVPIILAVNKCDKAEADPEKVKKELLAYDVVCEDYGGDVQAVPVSALTGDNLMALAEATVALAEMLELKADPNGPVEGTVIESFTDKGRGLVTTAIIQRGTLRKGSVLVAGKCWAKVRLMFDENGKTIDEAYPSMPVGITGWRDLPSAGEEILEVESEPRAREVVDWRKYEQEQEKGQEDLKIIEEKRKEHKEAHQKAREKYGHLLWKKRSILRFLERKEQIPLKPKEKRERDSNVLSVIIKGDVDGSVEAILNIIDTYDASHECELELVHFGVGDVSANDVNLAETFDGVIYGFNVNAGNVIQQSAAKKGVKIKLHKIIYRLVEDLQEELSSRLPCAVEEHPVGEASILATFSVTEGKKKVPVAGCRVQKGQLEKQKKFKLTRNGHVIWKGSLTSLKHHKDDISIVKTGMDCGLSLDEDNMEFQVGDRIVCYEEKQIQAKTSWDPGF

SEQ ID NO: 23028 - protein, 411 aa, Homo sapiens
MATTATMATSGSARKRLLKEEDMTKVEFETSEEVDVTPTFDTMGLREDLLRGIYAYGFEKPSAIQQRAIKQIIKGRDVIAQSQSGTGKTATFSISVLQCLDIQVRETQALILAPTRELAVQIQKGLLALGDYMNVQCHACIGGTNVGEDIRKLDYGQHVVAGTPGRVFDMIRRRSLRTRAIKMLVLDEADEMLNKGFKEQIYDVYRYLPPATQVVLISATLPHEILEMTNKFMTDPIRILVKRDELTLEGIKQFFVAVEREEWKFDTLCDLYDTLTITQAVIFCNTKRKVDWLTEKMREANFTVSSMHGDMPQKERESIMKEFRSGASRVLISTDVWARGLDVPQVSLIINYDLPNNRELYIHRIGRSGRYGRKGVAINFVKNDDIRILRDIEQYYSTQIDEMPMNVADLI

SEQ ID NO: 23029 - protein, 1220 aa, Homo sapiens
MGKKQKNKSEDSTKDDIDLDALAAEIEGAGAAKEQEPQKSKGKKKKEKKKQDFDEDDILKELEELSLEAQGIKADRETVAVKPTENNEEEFTSKDKKKKGQKGKKQSFDDNDSEELEDKDSKSKKTAKPKVEMYSGSDDDDDFNKLPKKAKGKAQKSNKKWDGSEEDEDNSKKIKERSRINSSGESGDESDEFLQSRKGQKKNQKNKPGPNIESGNEDDDASFKIKTVAQKKAEKKERERKKRDEEKAKLRKLKEKEELETGKKDQSKQKESQRKFEEETVKSKVTVDTGVIPASEEKAETPTAAEDDNEGDKKKKDKKKKKGEKEEKEKEKKKGPSKATVKAMQEALAKLKEEEERQKREEEERIKRLEELEAKRKEEERLEQEKRERKKQKEKERKERLKKEGKLLTKSQREARARAEATLKLLQAQGVEVPSKDSLPKKRPIYEDKKRKKIPQQLESKEVSESMELCAAVEVMEQGVPEKEETPPPVEPEEEEDTEDAGLDDWEAMASDEETEKVEGNKVHIEVKENPEEEEEEEEEEEEDEESEEEEEEEGESEGSEGDEEDEKVSDEKDSGKTLDKKPSKEMSSDSEYDSDDDRTKEERAYDKAKRRIEKRRLEHSKNVNTEKLRAPIICVLGHVDTGKTKILDKLRHTHVQDGEAGGITQQIGATNVPLEAINEQTKMIKNFDRENVRIPGMLIIDTPGHESFSNLRNRGSSLCDIAILVVDIMHGLEPQTIESINLLKSKKCPFIVALNKIDRLYDWKKSPDSDVAATLKKQKKNTKDEFEERAKAIIVEFAQQGLNAALFYENKDPRTFVSLVPTSAHTGDGMGSLIYLLVELTQTMLSKRLAHCEELRAQVMEVKALPGMGTTIDVILINGRLKEGDTIIVPGVEGPIVTQIRGLLLPPPMKELRVKNQYEKHKEVEAAQGVKILGKDLEKTLAGLPLLVAYKEDEIPVLKDELIHELKQTLNAIKLEEKGVYVQASTLGSLEALLEFLKTSEVPYAGINIGPVHKKDVMKASVMLEHDPQYAVILAFDVRIERDAQEMADSLGVRIFSAEIIYHLFDAFTKYRQDYKKQKQEEFKHIAVFPCKIKILPQYIFNSRDPIVMGVTVEAGQVKQGTPMCVPSKNFVDIGIVTSIEINHKQVDVAKKGQEVCVKIEPIPGESPKMFGRHFEATDILVSKISRQSIDALKDWFRDEMQKSDWQLIVELKKVFEII

SEQ ID NO: 23030 - protein, 207 aa, Homo sapiens
MSTKPDMIQKCLWLEILMGIFIAGTLSLDCNLLNVHLRRVTWQNLRHLSSMSNSFPVECLRENIAFELPQEFLQYTQPMKRDIKKAFYEMSLQAFNIFSQHTFKYWKERHLKQIQIGLDQQAEYLNQCLEEDKNENEDMKEMKENEMKPSEARVPQLSSLELRRYFHRIDNFLKEKKYSDCAWEIVRVEIRRCLYYFYKFTALFRRK

SEQ ID NO: 23031 - protein, 200 aa, Homo sapiens
MAAAWTVVLVTLVLGLAVAGPVPTSKPTTTGKGCHIGRFKSLSPQELASFKKARDALEESLKLKNWSCSSPVFPGNWDLRLLQVRERPVALEAELALTLKVLEAAAGPALEDVLDQPLHTLHHILSQLQACIQPQPTAGPRPRGRLHHWLHRLQEAPKKESAGCLEASVTFNLFRLLTRDLKYVADGNLCLRTSTHPEST

SEQ ID NO: 23032 - protein, 200 aa, Homo sapiens
MKLDMTGDCTPVLVLMAAVLTVTGAVPVARLHGALPDARGCHIAQFKSLSPQELQAFKRAKDALEESLLLKDCRCHSRLFPRTWDLRQLQVRERPMALEAELALTLKVLEATADTDPALVDVLDQPLHTLHHILSQFRACIQPQPTAGPRTRGRLHHWLYRLQEAPKKESPGCLEASVTFNLFRLLTRDLNCVASGDLCV

SEQ ID NO: 23033 - protein, 392 aa, Homo sapiens
MDLFGDLPEPERSPRPAAGKEAQKGPLLFDDLPPASSTDSGSGGPLLFDDLPPASSGDSGSLATSISQMVKTEGKGAKRKTSEEEKNGSEELVEKKVCKASSVIFGLKGYVAERKGEREEMQDAHVILNDITEECRPPSSLITRVSYFAVFDGHGGIRASKFAAQNLHQNLIRKFPKGDVISVEKTVKRCLLDTFKHTDEEFLKQASSQKPAWKDGSTATCVLAVDNILYIANLGDSRAILCRYNEESQKHAALSLSKEHNPTQYEERMRIQKAGGNVRDGRVLGVLEVSRSIGDGQYKRCGVTSVPDIRRCQLTPNDRFILLACDGLFKVFTPEEAVNFILSCLEDEKIQTREGKSAADARYEAACNRLANKAVQRGSADNVTVMVVRIGH

SEQ ID NO: 23034 - protein, 196 aa, Homo sapiens
MTGDCMPVLVLMAAVLTVTGAVPVARLRGALPDARGCHIAQFKSLSPQELQAFKRAKDALEESLLLKDCKCRSRLFPRTWDLRQLQVRERPVALEAELALTLKVLEATADTDPALGDVLDQPLHTLHHILSQLRACIQPQPTAGPRTRGRLHHWLHRLQEAPKKESPGCLEASVTFNLFRLLTRDLNCVASGDLCV

SEQ ID NO: 23035 - protein, 521 aa, Homo sapiens
MFTSEKGVVEEWLSEFKTLPETSLPNYATNLKDKSSLVSSLYKVIQEPQSELLEPVCHQLFEFYRSGEEQLLQFTLQFLPELIWCYLAVSASRNVHSSGCIEALLLGVYNLEIVDKQGHTKVLSFTIPSLSKPSVYHEPSSIGSMALTESALSQHGLSKVVYSGPHPQREMLTAQNRFEVLTFLLLCYNAALTYMPSVSLQSLCQICSRICVCGYPRQHVRKYKGISSRIPVSSGFMVQMLTGIYFAFYNGEWDLAQKALDDIIYRAQLELYPEPLLVANAIKASLPHGPMKSNKEGTRCIQVEITPTSSRISRNAVTSMSIRGHRWKRHGNTELTGQEELMEISEVDEGFYSRAASSTSQSGLSNSSHNCSNKPSIGKNHRRSGGSKTGGKEKETTGESCKDHFARKQTQRAQSENLELLSLKRLTLTTSQSLPKPSSHGLAKTAATVFSKSFEQVSGVTVPHNPSSAVGCGAGTDANRFSACSLQEEKLIYVSERTELPMKHQSGQQRPPSISITLSTD

SEQ ID NO: 23036 - protein, 180 aa, Homo sapiens
MEISEVDEGFYSRAASSTSQSGLSNSSHNCSNKPSIGKNHRRSGGSKTGGKEKETTGESCKDHFARKQTQRAQSENLELLSLKRLTLTTSQSLPKPSSHGLAKTAATVFSKSFEQVSGVTVPHNPSSAVGCGAGTDANRFSACSLQEEKLIYVSERTELPMKHQSGQQRPPSISITLSTD

SEQ ID NO: 23037 - protein, 419 aa, Homo sapiens
MFTSEKGVVEEWLSEFKTLPETSLPNYATNLKDKSSLVSSLYKVIQEPQSELLEPVCHQLFEFYRSGEEQLLQFTLQFLPELIWCYLAVSASRNVHSSGCIEALLLGVYNLEIVDKQGHTKVLSFTIPSLSKPSVYHEPSSIGSMALTESALSQHGLSKVVYSGPHPQREMLTAQNRFEVLTFLLLCYNAALTYMPSVSLQSLCQICSRICVCGYPRQHVRKYKGISSRIPVSSGFMVQMLTGIYFAFYNGEWDLAQKALDDIIYRAQLELYPEPLLVANAIKASLPHGPMKSNKEGTRCIQVEITPTSSRISRNAVTSMSIRGHRWKRHEQPDNNNDATELGILVIPEISVTNVAGERTGNGEKGRTLGEIDAQHIQGVQETATDPRTESKGLPEIRRQKSVRKMMEDGINSPGRVQF

SEQ ID NO: 23038 - protein, 179 aa, Homo sapiens
MRPSVWAAVAAGLWVLCTVIAAAPRRCLLSHYRSLEPRTLAAAKALRDRYEEEALSWGQRNCSFRPRRDPPRPSSCARLRHVARGIADAQAVLSGLHRSELLPGAGPILELLAAAGRDVAACLELARPGSSRKVPGAQKRRHKPRRADSPRCRKASVVFNLLRLLTWELRLAAHSGPCL

SEQ ID NO: 23039 - protein, 170 aa, Homo sapiens
MRPSVWAAVAAGLWVLCTVIAAAPRRCLLSHYRSLEPRTLAAAKALRDRYEEEALSWGQRNCSFRPRRDPPRPSSCARLRHVARGIADAQAVLSGLHRSELLPGAGPILELLAAAGRDVAACVSDGRAPPPLSPASFSASSGPRRAPALCQSVLLSGKTHPDRSRVLWVS

SEQ ID NO: 23040 - protein, 131 aa, Homo sapiens
MRPSVWAAVAAGLWVLCTVIAAAPRRCLLSHYRSLEPRTLAAAKALRDRYEEEALSWGQRNCSFRPRRDPPRPSLELARPGSSRKVPGAQKRRHKPRRADSPRCRKASVVFNLLRLLTWELRLAAHSGPCL

SEQ ID NO: 23041 - protein, 107 aa, Homo sapiens
MRPSVWAAVAAGLWVLCTVIAAAPRRCLLSHYRSLEPRTLAAAKALRDRYLELARPGSSRKVPGAQKRRHKPRRADSPRCRKASVVFNLLRLLTWELRLAAHSGPCL

SEQ ID NO: 23042 - protein, 452 aa, Homo sapiens
MDDIFTQCREGNAVAVRLWLDNTENDLNQGDDHGFSPLHWACREGRSAVVEMLIMRGARINVMNRGDDTPLHLAASHGHRDIVQKLLQYKADINAVNEHGNVPLHYACFWGQDQVAEDLVANGALVSICNKYGEMPVDKAKAPLRELLRERAEKMGQNLNRIPYKDTFWKGTTRTRPRNGTLNKHSGIDFKQLNFLTKLNENHSGELWKGRWQGNDIVVKVLKVRDWSTRKSRDFNEECPRLRIFSHPNVLPVLGACQSPPAPHPTLITHWMPYGSLYNVLHEGTNFVVDQSQAVKFALDMARGMAFLHTLEPLIPRHALNSRSVMIDEDMTARISMADVKFSFQCPGRMYAPAWVAPEALQKKPEDTNRRSADMWSFAVLLWELVTREVPFADLSNMEIGMKVALEGLRPTIPPGISPHVCKLMKICMNEDPAKRPKFDMIVPILEKMQDK

SEQ ID NO: 23043 - protein, 391 aa, Homo sapiens
MDDIFTQCREGNAVAVRLWLDNTENDLNQGDDHGFSPLHWACREGRSAVVEMLIMRGARINVMNRGDDTPLHLAASHGHRDIVQKLLQYKADINAVNEHGNVPLHYACFWGQDQVAESGQRRWARISTVFHTRTHSGRGPPALGPLWKGRWQGNDIVVKVLKVRDWSTRKSRDFNEECPRLRIFSHPNVLPVLGACQSPPAPHPTLITHWMPYGSLYNVLHEGTNFVVDQSQAVKFALDMARGMAFLHTLEPLIPRHALNSRSVMIDEDMTARISMADVKFSFQCPGRMYAPAWVAPEALQKKPEDTNRRSADMWSFAVLLWELVTREVPFADLSNMEIGMKVALEGLRPTIPPGISPHVCKLMKICMNEDPAKRPKFDMIVPILEKMQDK

SEQ ID NO: 23044 - protein, 318 aa, Homo sapiens
MPVDKAKAPLRELLRERAEKMGQNLNRIPYKDTFWKGTTRTRPRNGTLNKHSGIDFKQLNFLTKLNENHSGELWKGRWQGNDIVVKVLKVRDWSTRKSRDFNEECPRLRIFSHPNVLPVLGACQSPPAPHPTLITHWMPYGSLYNVLHEGTNFVVDQSQAVKFALDMARGMAFLHTLEPLIPRHALNSRSVMIDEDMTARISMADVKFSFQCPGRMYAPAWVAPEALQKKPEDTNRRSADMWSFAVLLWELVTREVPFADLSNMEIGMKVALEGLRPTIPPGISPHVCKLMKICMNEDPAKRPKFDMIVPILEKMQDK

SEQ ID NO: 23045 - protein, 195 aa, Homo sapiens
MALLFPLLAALVMTSYSPVGSLGCDLPQNHGLLSRNTLVLLHQMRRISPFLCLKDRRDFRFPQEMVKGSQLQKAHVMSVLHEMLQQIFSLFHTERSSAAWNMTLLDQLHTGLHQQLQHLETCLLQVVGEGESAGAISSPALTLRRYFQGIRVYLKEKKYSDCAWEVVRMEIMKSLFLSTNMQERLRSKDRDLGSS

SEQ ID NO: 23046 - protein, 451 aa, Homo sapiens
MPKNKKRNTPHRGSSAGGGGSGAAAATAATAGGQHRNVQPFSDEDASIETMSHCSGYSDPSSFAEDGPEVLDEEGTQEDLEYKLKGLIDLTLDKSAKTRQAALEGIKNALASKMLYEFILERRMTLTDSIERCLKKGKSDEQRAAAALASVLCIQLGPGIESEEILKTLGPILKKIICDGSASMQARQTCATCFGVCCFIATDDITELYSTLECLENIFTKSYLKEKDTTVICSTPNTVLHISSLLAWTLLLTICPINEVKKKLEMHFHKLPSLLSCDDVNMRIAAGESLALLFELARGIESDFFYEDMESLTQMLRALATDGNKHRAKVDKRKQRSVFRDVLRAVEERDFPTETIKFGPERMYIDCWVKKHTYDTFKEVLGSGMQYHLQSNEFLRNVFELGPPVMLDAATLKTMKISRFERHLYNSAAFKARTKARSKCRDKRADVGEFF

SEQ ID NO: 23047 - protein, 401 aa, Homo sapiens
MSHCSGYSDPSSFAEDGPEVLDEEGTQEDLEYKLKGLIDLTLDKSAKTRQAALEGIKNALASKMLYEFILERRMTLTDSIERCLKKGKSDEQRAAAALASVLCIQLGPGIESEEILKTLGPILKKIICDGSASMQARQTCATCFGVCCFIATDDITELYSTLECLENIFTKSYLKEKDTTVICSTPNTVLHISSLLAWTLLLTICPINEVKKKLEMHFHKLPSLLSCDDVNMRIAAGESLALLFELARGIESDFFYEDMESLTQMLRALATDGNKHRAKVDKRKQRSVFRDVLRAVEERDFPTETIKFGPERMYIDCWVKKHTYDTFKEVLGSGMQYHLQSNEFLRNVFELGPPVMLDAATLKTMKISRFERHLYNSAAFKARTKARSKCRDKRADVGEFF

SEQ ID NO: 23048 - protein, 506 aa, Homo sapiens
MAWNSPSRRPVWQGGAPREDGGARGVWLPSSGQVSAQRTGRRLVGLEPTPTGSLTPRPPRPVPGMPRARKGNTLRKGGQRRGGGARSSAQADSGSSDDEAASEARSTASECPSLLSTTAEDSLGGDVVDEQGQQEDLEEKLKEYVDCLTDKSAKTRQGALESLRLALASRLLPDFLLERRLTLADALEKCLKKGKGEEQALAAAVLGLLCVQLGPGPKGEELFHSLQPLLVSVLSDSTASPAARLHCASALGLGCYVAAADIQDLVSCLACLESVFSRFYGLGGSSTSPVVPASLHGLLSAALQAWALLLTICPSTQISHILDRQLPRLPQLLSSESVNLRIAAGETIALLFELARDLEEEFVYEDMEALCSVLRTLATDSNKYRAKADRRRQRSTFRAVLHSVEGGECEEEIVRFGFEVLYMDSWARHRIYAAFKEVLGSGMHHHLQNNELLRDIFGLGPVLLLDATALKACKVPRFEKHLYNAAAFKARTKARSRVRDKRADIL

SEQ ID NO: 23049 - protein, 608 aa, Homo sapiens
MGPKKSWRSHFFPLPEVWLLLLLSQALSPSHGPQTQAGVGLVWSVPLPSALRSQSCLGAPLRDASELTTVHLFPTRGWGARRALWVHSSASASSAASRRRLRAQASGISSFSLVDGGAPREDGGARGVWLPSSGQVSAQRTGRRLVGLEPTPTGSLTPRPPRPVPGMPRARKGNTLRKGGQRRGGGARSSAQADSGSSDDEAASEARSTASECPSLLSTTAEDSLGGDVVDEQGQQEDLEEKLKEYVDCLTDKSAKTRQGALESLRLALASRLLPDFLLERRLTLADALEKCLKKGKGEEQALAAAVLGLLCVQLGPGPKGEELFHSLQPLLVSVLSDSTASPAARLHCASALGLGCYVAAADIQDLVSCLACLESVFSRFYGLGGSSTSPVVPASLHGLLSAALQAWALLLTICPSTQISHILDRQLPRLPQLLSSESVNLRIAAGETIALLFELARDLEEEFVYEDMEALCSVLRTLATDSNKYRAKADRRRQRSTFRAVLHSVEGGECEEEIVRFGFEVLYMDSWARHRIYAAFKEVLGSGMHHHLQNNELLRDIFGLGPVLLLDATALKACKVPRFEKHLYNAAAFKARTKARSRVRDKRADIL

SEQ ID NO: 23050 - protein, 278 aa, Homo sapiens
MPRLSLLLPLLLLLLLPLLPPLSPSLGIRDVGGRRPKCGPCRPEGCPAPAPCPAPGISALDECGCCARCLGAEGASCGGRAGGRCGPGLVCASQAAGAAPEGTGLCVCAQRGTVCGSDGRSYPSVCALRLRARHTPRAHPGHLHKARDGPCEFAPVVVVPPRSVHNVTGAQVGLSCEVRAVPTPVITWRKVTKSPEGTQALEELPGDHVNIAVQVRGGPSDHEATAWILINPLRKEDEGVYQCHAANMVGEAESHSTVTVLDLSKYRSFHFPAPDDRM

SEQ ID NO: 23051 - protein, 5121 aa, Homo sapiens
MTSRRLEESMGAVQMGLVNMFKGFQSKVLPPLSPKVVTEEEVNRMLTPSEFLKEMSLTTEQRLAKTRLMCRPQIIELLDMGETTHQKFSGIDLDQALFQPFPSEIIFQNYTPCEVYEVPLILRNNDKIPRLVKVVEESSPYFKVISPKDIGHKVAPGVPSIFRILFTPEENKDYAHTLTCVTEREKFIVPIKARGARAILDFPDKLNFSTCPVKYSTQKILLVRNIGNKNAVFHIKTCRPFSIEPAIGTLNVGESMQLEVEFEPQSVGDHSGRLIVCYDTGEKVFVSLYGAAIDMNIRLDKNSLTIEKTYISLANQRTITIHNRSNIIAHFLWKVFATQQEEDREKYRACDDLIKEEKDETDEFFEECITDPLLREHLSVLSRTFANQRRLVQGDSKLFFNNVFTVEPLEGDVWPNSSAEITVYFNPLEAKLYQQTIYCDILGREIRLPLRIKGEGMGPKIHFNFELLDIGKVFTGSAHCYEAILYNKGSIDALFNMTPPTSALGACFVFSPKEGIIEPSGVQAIQISFSSTILGNFEEEFLVNVNGSPEPVKLTIRGCVIGPTFHFNVPALHFGDVSFGFPHTLICSLNNTSLIPMTYKLRIPGDGLGHKSISYCEQHVDYKRPSWTKEEISSMKPKEFTISPDCGTIRPQGFAAIRVTLCSNTVQKYELALVVDVEGIGEEVLALLITARCVVPALHLVNTEVDFGHCFLKYPYEKTLQLANQDDLPGFYEVQPQVCEEVPTVLFSSPTPSGVISPSSTIHIPLVLETQVTGEHRSTVYISIFGSQDPPLVCHLKSAGEGPVIYVHPNQVDFGNIYVLKDSSRILNLCNQSFIPAFFQAHMAHKKSLWTIEPNEGMVPPETDVQLALTANLNDTLTFKDCVILDIENSSTYRIPVQASGTGSTIVSDKPFAPELNLGAHFSLDTHYYHFKLINKGRRIQQLFWMNDSFRPQAKLSKKGRVKKGHAHVQPQPSGSQEPRDPQSPVFHLHPASMELYPGQAIDVILEGYSATPRIVKEKLVCHAIIGAQKGKSLVMAVNITCEFVAPLIQLSTKQLIYRLEKKPNSILKPDYQPLAIKNISTLPVNLLLSTSGPFFICETDKSLLPATPEPIKLEIDEEKNLLIKFDPSYRNDLNNWVAEEILAIKYVEHPQIDSLDLRGEVHYPNLSFETKELDFGCILNDTELIRYVTITNCSPLVVKFRWFFLVNDEENQIRFVTLPKKPYSAPVSQMESIPATSEAASPPAILVTVESPEMDLNDFVKTVLVDEDARPEEKELRKTKASSVISDEIKISSTEIERIYSSQSQVEDQESLQTCEQNEMLSIGIEEVFDILPLFGVLQPHSSHQISFTFYGHANIIAQAKALCEVEEGPTYEITLKGEASLVNYSFDTKDIHYGLQLFDHVTEREITLTNMGKVGFEFKVLTDHQSSPDNLLPGVPLILPVSGFISSHQEQVLKVYYLPGVPEVFKRSFQIQIAHLDPENITLSGEGIFPQICLDLPRNLTANEKYEMFLNQARKNTDKEYNKCEMLDHFDIITEEVPEDEPAEVSAHLQMEVERLIVQSYVLEHQKTTTPDPMDDPCFSHRSRRKLAKIQLPEYILDFGYIILGEVRTHIIKIINTSHFPVSFHADKRVLHETGFSTELDRVKNLPHCETEIFEVRFDPQGANLPVGSKEVILPIKVVGGPTVHICLQAKVTIPTMTLSRGKVDFATIQCGQCLVETIQLSNHLQVPCEWFVQSQKPVDKLEKHMPKYLRQKLRAELKPKTRIFEIQPISGVLDPGEKSNVQVKFMPKEEKFYSQTLVFQIAQSAQKLTLLARGQGLEPRLEFSPSVLDLGPLLLCAPGDEAEVIVKNPCNFPIEFYSLEFDQQYLIEEKILRKLKGYDSYNTLLLPPRNPGEKLPPELYEYFKEIKKSKEEQMRAKYLENLAQENEEEDITSSDQGTSNSTKRTSLSRGISVTSNLEEWHALLVESKTYLEEEEDEESLEKIIFQTDKLQSIDSHSMEEVGEVENNPVSKAIARHLGIDISAEGRLAKNRKGIAIIIHGTPLSGKSANAVSVAKYYNAACLSIDSIVLEAVANSNNIPGIRARELCIRAAIEQSVKEGEEAAQEAAVGQNVIGQGRLSTDTLGKLASEMTLVAPEIKPGKSVRGSVVITKSKADSHGSGSQKQHHSHQSETPQISSSPLPPGPIHRWLSVSPSVGGETGLMSCVLPDELLVQILAERIQLSDCYRGVVFDGLDTLFAQNAAAALLCLLKAIGSREHIYILNMAQDYAAMKAQEKAKKEQEERKHKGALEKEKERLQNMDEEEYDALTEEEKLTFDRGIQQALRERKKREQERLAKEMQEKKLQQELERQKEEDELKRRVKKGKQGPIKEEPPMKKSQAANKQVPPLTKVDVKMETIERKISVREQTMSEKEELNKKKRNMGDVSMHGLPLVQDQEDSEGDNSKDPDKQLAPKFKTYELTLKDVQNILMYWDRKQGVQLPPAGMEEAPHEPDDQRQVPLGGRRGRKDRERERLEKERTEKERLEREKAERERLEKLRALEERSDWEGEGEEDHEGKKEKDLGVPFLDIQTPDFEGLSWKQALESDKLPKGEQILDILGLGASGPPIPPPALFSIVSYPVKRPPLTMTDDLEHFVFVIPPSEDISLDEKKEMEIESDFLATTNTTKAQEEQTSSSKGGKQKMKEKIDQVFEIQKDKRHMALNRKVLSGEPAGTISQLSDTDLDNFNGQHSQEKFTRLNHFRWIVPANGEVTLQVHFSSDEFGNFDQTFNFEILGTCCQYQLYCRGICTYPYICQDPKVVFPQRKMDMKTNEVIFKKYVMSTETYYFGPLLCGKSRDKYKSSLFPGNMETLTILNTSLMVVEASFYFQNDVKANTYFLEPNTMVLKPNEKQILNVWAYPTSVGVFEDSIVCCINDNPEPAIFQLSCQGIRPELELEPRQLHFDRLLLHRQESRVVLLRNVTLLPVAWRITSLEHLGDDFTVSLMQGTIPPEAEYGLHLYFQPTKPVNIKKAIRLEVLDAENLLGVVQIENIMVFAEAYDIALDITFPKGAEGGLDFGIVRVTEEAKQPLQLKNRGKYEIAFSFSVDSVGISTPNINSMISVQPKKGSLTPTEKPTNVQVFFHAKKEVKIEHQPVLRCQIIEPNISEGGEIIASIPIKFSANAVYSKYNITPSSVINFGALICGTRKSTTFTIENQGVTDFKFALYKLTGESPIHQKKAASHVRHARSRESESFYKTGSSRAAKFSDTIQKEVTTTGQARFAHGMFTVYPGFGSIPSGGQQVINVDCVADAMGKCEEFIAIDISGRDPAVHPAGILYTLLAEACLPAFVTENNALIFEEHQICTSANLHHILQTIESGGLFVEDENKFIFCNVLVGRQAKARFKISNVGKITCDVNIVVRPISNKPFARIVDIFEVEPSKMCIASHSHAFATVSFTPQIMQNYQCIFEATLDGLPSTLAKSRGLVFDIAGEGNLPRVTVVRPVLHNQYGNPLLLFKRLLLGHSEKLPLILKNNGVLPAQLHVDLQDELGVFSLKGRPTTAYIYITEENKPHVKAKKAHTASLVVSPGDTAEFDVVFHSQKVGRMRGIIHLSVINNQYEETSIHMVGEGYEDDITLDNIHGLVAPTSQEDISISEFTEIIEDNDMEDLVAAALVDHIQFGDCHIGHSYNASFTVTNHSQVNLIRFEWPVSATIAFSPQMGHLHPGCAKDIVVTMKSDVPINLKNMRIRCKLSRIMFQLPADQVPDWDDRMHTVKWVDVPRNMPGTFTTKRKVIETDPEPAHSVLEENYQELQLQISANVDFASYHCQARDVRFKETLVYQTRVFEFDVINSGRVQLEFSWVSEDTSKAVSFAKPDHQGSAQKDQLSQGTMHTGSTLDSTMDHWAEGSPQPFSVEPSSGIVPVGKIQKFKVKFSPLDIGDFESNLFCQIPNLPPGEQGPVLVAKGRSTLPICHFDLKDSDYISGHQRNPELRGSSGGALDPNTRVIEFTTVGIGGKNLRTFTILNPTNSTYSFCWISEEIESLQNPAAFTCLTEKGFIHPEKKAEIVFQFTPFHLGITESSWTFLIPEHNITVPFLLVGKTTEPLISLNKSHLNFSSLLIGREARETVQIINKEEQGFDFSFQDNSRYSEGFSNSLLVCPMEGWIPPLSRFPIDIFFTPKQEGDVNFNLICNVEKKVHPVTLNVKAEGYTMNVEIKCKDRTGSITLLTPNQTNIINFYEVELNECVQCEFNFINTGKFTFSFQAQLCGSKTLLQYLEFSPIDSTVDVGQSVHATLSFQPLKKCVLTDLELIIKISHGPTFMCNISGCAVSPAIHFSFTSYNFGTCFIYQAGMPPYKQTLVITNKEETPMSIDCLYTNTTHLEVNSRVDVVKPGNTLEIPITFYPRESINYQELIPFEINGLSQQTVEIKGKGTKMKILVLDPANRIVKLGAVLPGQVVKRTVSIMNNSLAQLTFNQSILFTIPELQEPKVLTLAPFHNITLKPKEVCKLEVIFAPKKRVPPFSEEVFMECMGLLRPLFLLSGCCQALEISLDQEHIPFGPVVYQTQATRRILMMNTGDVGARFKWDIKKFEPHFSISPEEGYITSGMEVSFEVTYHPTEVGKESLCKNILCYIQGGSPLSLTLSGVCVGPPAVKEVVNFTCQVRSKHTQTILLSNRTNQTWNLHPIFEGEHWEGPEFITLEAHQQNKPYEITYRPRTMNLENRKHQGTLFFPLPDGTGWLYALHGTSELPKAVANIYREVPCKTPYTELLPITNWLNKPQRFRVIVEILKPEKPDLSITMKGLDYIDVLSGSKKDYKLNFFSHKEGTYAAKVIFRNEVTNEFLYYNVSFRVIPSGIIKTIEMVTPVRQVASASIKLENPLPYSVTFSTECRMPDIALPSQFVVPANSEGTFSFEFQPLKAGETFGRLTLHNTDLGYYQYELYLKATPALPEKPVHFQTVLGSSQIILVKFINYTRQRTEYYCRTDCTDFHAEKLINAAPGGQGGTEASVEVLFEPSHLGETKGILILSSLAGGEYIIPLFGMALPPKPQGPFSIRAGYSIIIPFKNVFYHMVTFSIIVDNPAFTIRAGESVRPKKINNITVSFEGNPSGSKTPITTKLTVSCPPGEGSETGVKWVYYLKGITL

SEQ ID NO: 23052 - protein, 1098 aa, Homo sapiens
MFDVINSGRVQLEFSWVSEDTSKAVSFAKPDHQGSAQKDQLSQGTMHTGSTLDSTMDHWAEGSPQPFSVEPSSGIVPVGKIQKFKVKFSPLDIGDFESNLFCQIPNLPPGEQGPVLVAKGRSTLPICHFDLKDSDYISGHQRNPELRGSSGGALDPNTRVIEFTTVGIGGKNLRTFTILNPTNSTYSFCWISEEIESLQNPAAFTCLTEKGFIHPEKKAEIVFQFTPFHLGITESSWTFLIPEHNITVPFLLVGKTTEPLISLNKSHLNFSSLLIGREARETVQIINKEEQGFDFSFQDNSRYSEGFSNSLLVCPMEGWIPPLSRFPIDIFFTPKQEGDVNFNLICNVEKKVHPVTLNVKAEGYTMNVEIKCKDRTGSITLLTPNQTNIINFYEVELNECVQCEFNFINTGKFTFSFQAQLCGSKTLLQYLEFSPIDSTVDVGQSVHATLSFQPLKKCVLTDLELIIKISHGPTFMCNISGCAVSPAIHFSFTSYNFGTCFIYQAGMPPYKQTLVITNKEETPMSIDCLYTNTTHLEVNSRVDVVKPGNTLEIPITFYPRESINYQELIPFEINGLSQQTVEIKGKGTKMKILVLDPANRIVKLGAVLPGQVVKRTVSIMNNSLAQLTFNQSILFTIPELQEPKVLTLAPFHNITLKPKEVCKLEVIFAPKKRVPPFSEEVFMECMGLLRPLFLLSGCCQALEISLDQEHIPFGPVVYQTQATRRILMMNTGDVGARFKWDIKKFEPHFSISPEEGYITSGMEVSFEVTYHPTEVGKESLCKNILCYIQGGSPLSLTLSGVCVGPPAVKEVVNFTCQVRSKHTQTILLSNRTNQTWNLHPIFEGEHWEGPEFITLEAHQQNKPYEITYRPRTMNLENRKHQGTLFFPLPDGTGWLYALHGTSELPKAVANIYREVPCKTPYTELLPITNWLNKPQRFRVIVEILKPEKPDLSITMKGLDYIDVLSGSKKDYKLNFFSHKEGTYAAKVIFRNEVTNEFLYYNVSFRVIPSGIIKTIEMVTPVRQVASASIKLENPLPYSVTFSTECRMPDIALPSQFVVPANSERWGLTASSRLECSGMIIAPCSLKLLQSRPPPASAS

SEQ ID NO: 23053 - protein, 1017 aa, Homo sapiens
MTSRRLEESMGAVQMGLVNMFKGFQSKVLPPLSPKVVTEEEVNRMLTPSEFLKEMSLTTEQRLAKTRLMCRPQIIELLDMGETTHQKFSGIDLDQALFQPFPSEIIFQNYTPCEVYEVPLILRNNDKIPRLVKVVEESSPYFKVISPKDIGHKVAPGVPSIFRILFTPEENKDYAHTLTCVTEREKFIVPIKARGARAILDFPDKLNFSTCPVKYSTQKILLVRNIGNKNAVFHIKTCRPFSIEPAIGTLNVGESMQLEVEFEPQSVGDHSGRLIVCYDTGEKVFVSLYGAAIDMNIRLDKNSLTIEKTYISLANQRTITIHNRSNIIAHFLWKVFATQQEEDREKYRACDDLIKEEKDETDEFFEECITDPLLREHLSVLSRTFANQRRLVQGDSKLFFNNVFTVEPLEGDVWPNSSAEITVYFNPLEAKLYQQTIYCDILGREIRLPLRIKGEGMGPKIHFNFELLDIGKVFTGSAHCYEAILYNKGSIDALFNMTPPTSALGACFVFSPKEGIIEPSGVQAIQISFSSTILGNFEEEFLVNVNGSPEPVKLTIRGCVIGPTFHFNVPALHFGDVSFGFPHTLICSLNNTSLIPMTYKLRIPGDGLGHKSISYCEQHVDYKRPSWTKEEISSMKPKEFTISPDCGTIRPQGFAAIRVTLCSNTVQKYELALVVDVEGIGEEVLALLITARCVVPALHLVNTEVDFGHCFLKYPYEKTLQLANQDDLPGFYEVQPQVCEEVPTVLFSSPTPSGVISPSSTIHIPLVLETQVTGEHRSTVYISIFGSQDPPLVCHLKSAGEGPVIYVHPNQVDFGNIYVLKDSSRILNLCNQSFIPAFFQAHMAHKKSLWTIEPNEGMVPPETDVQLALTANLNDTLTFKDCVILDIENSSTYRIPVQASGTGSTIVSDKPFAPELNLGAHFSLDTHYYHFKLINKGRRIQQLFWMNDSFRPQAKLSKKGRVKKGHAHVQPQPSGSQEPRDPQSPVFHLHPASMELYPGQAIDVILEGYSATPRVRG

SEQ ID NO: 23054 - protein, 708 aa, Homo sapiens
MTSRRLEESMGAVQMGLVNMFKGFQSKVLPPLSPKVVTEEEVNRMLTPSEFLKEMSLTTEQRLAKTRLMCRPQIIELLDMGETTHQKFSGIDLDQALFQPFPSEIIFQNYTPCEVYEVPLILRNNDKIPRLVKVVEESSPYFKVISPKDIGHKVAPGVPSIFRILFTPEENKDYAHTLTCVTEREKFIVPIKARGARAILDFPDKLNFSTCPVKYSTQKILLVRNIGNKNAVFHIKTCRPFSIEPAIGTLNVGESMQLEVEFEPQSVGDHSGRLIVCYDTGEKVFVSLYGAAIDMNIRLDKNSLTIEKTYISLANQRTITIHNRSNIIAHFLWKVFATQQEEDREKYRACDDLIKEEKDETDEFFEECITDPLLREHLSVLSRTFANQRRLVQGDSKLFFNNVFTVEPLEGDVWPNSSAEITVYFNPLEAKLYQQTIYCDILGREIRLPLRIKGEGMGPKIHFNFELLDIGKVFTGSAHCYEAILYNKGSIDALFNMTPPTSALGACFVFSPKEGIIEPSGVQAIQISFSSTILGNFEEEFLVNVNGSPEPVKLTIRGCVIGPTFHFNVPALHFGDVSFGFPHTLICSLNNTSLIPMTYKLRIPGDGLGHKSISYCEQHVDYKRPSWTKEEISSMKPKEFTISPDCGTIRPQGFAAIRVTLCSNTVQKYELALVVDVEGIGEEVLALLITARYCSPACSSPESPPSLQ

SEQ ID NO: 23055 - protein, 950 aa, Homo sapiens
MESAGGFKLGMEPLSGGGVCEKKKLLKMTSRRLEESMGAVQMGLVNMFKGFQSKVLPPLSPKVVTEEEVNRMLTPSEFLKEMSLTTEQRLAKTRLMCRPQIIELLDMGETTHQKFSGIDLDQALFQPFPSEIIFQNYTPCEVYEVPLILRNNDKIPRLVKVVEESSPYFKVISPKDIGHKVAPGVPSIFRILFTPEENKDYAHTLTCVTEREKFIVPIKARGARAILDFPDKLNFSTCPVKYSTQKILLVRNIGNKNAVFHIKTCRPFSIEPAIGTLNVGESMQLEVEFEPQSVGDHSGRLIVCYDTGEKVFVSLYGAAIDMNIRLDKNSLTIEKTYISLANQRTITIHNRSNIIAHFLWKVFATQQEEDREKYRACDDLIKEEKDETDEFFEECITDPLLREHLSVLSRTFANQRRLVQGDSKLFFNNVFTVEPLEGDVWPNSSAEITVYFNPLEAKLYQQTIYCDILGREIRLPLRIKGEGMGPKIHFNFELLDIGKVFTGSAHCYEAILYNKGSIDALFNMTPPTSALGACFVFSPKEGIIEPSGVQAIQISFSSTILGNFEEEFLVNVNGSPEPVKLTIRGCVIGPTFHFNVPALHFGDVSFGFPHTLICSLNNTSLIPMTYKLRIPGDGLGHKSISYCEQHVDYKRPSWTKEEISSMKPKEFTISPDCGTIRPQGFAAIRVTLCSNTVQKYELALVVDVEGIGEEVLALLITARCVVPALHLVNTEVDFGHCFLKYPYEKTLQLANQDDLPGFYEVQPQVCEEVPTVLFSSPTPSGVISPSSTIHIPLVLETQVTGEHRSTVYISIFGSQDPPLVCHLKSAGEGPVIYVHPNQVDFGNIYVLKDSSRILNLCNQSFIPAFFQAHMAHKKSLWTIEPNEGMVPPETDVQLALTANLNDTLTFKDCVILDIENSSTYRIPVQASGTGSTIVSDKPFAPELNLGAHFR

SEQ ID NO: 23056 - protein, 940 aa, Homo sapiens
MESAGGFKLGEKKKLLKMTSRRLEESMGAVQMGLVNMFKGFQSKVLPPLSPKVVTEEEVNRMLTPSEFLKEMSLTTEQRLAKTRLMCRPQIIELLDMGETTHQKFSGIDLDQALFQPFPSEIIFQNYTPCEVYEVPLILRNNDKIPRLVKVVEESSPYFKVISPKDIGHKVAPGVPSIFRILFTPEENKDYAHTLTCVTEREKFIVPIKARGARAILDFPDKLNFSTCPVKYSTQKILLVRNIGNKNAVFHIKTCRPFSIEPAIGTLNVGESMQLEVEFEPQSVGDHSGRLIVCYDTGEKVFVSLYGAAIDMNIRLDKNSLTIEKTYISLANQRTITIHNRSNIIAHFLWKVFATQQEEDREKYRACDDLIKEEKDETDEFFEECITDPLLREHLSVLSRTFANQRRLVQGDSKLFFNNVFTVEPLEGDVWPNSSAEITVYFNPLEAKLYQQTIYCDILGREIRLPLRIKGEGMGPKIHFNFELLDIGKVFTGSAHCYEAILYNKGSIDALFNMTPPTSALGACFVFSPKEGIIEPSGVQAIQISFSSTILGNFEEEFLVNVNGSPEPVKLTIRGCVIGPTFHFNVPALHFGDVSFGFPHTLICSLNNTSLIPMTYKLRIPGDGLGHKSISYCEQHVDYKRPSWTKEEISSMKPKEFTISPDCGTIRPQGFAAIRVTLCSNTVQKYELALVVDVEGIGEEVLALLITARCVVPALHLVNTEVDFGHCFLKYPYEKTLQLANQDDLPGFYEVQPQVCEEVPTVLFSSPTPSGVISPSSTIHIPLVLETQVTGEHRSTVYISIFGSQDPPLVCHLKSAGEGPVIYVHPNQVDFGNIYVLKDSSRILNLCNQSFIPAFFQAHMAHKKSLWTIEPNEGMVPPETDVQLALTANLNDTLTFKDCVILDIENSSTYRIPVQASGTGSTIVSDKPFAPELNLGAHFR

SEQ ID NO: 23057 - protein, 474 aa, Homo sapiens
MSEESDGKLIEDSLIQLRCHFTWKLLIEAPEIPDLENRIWEEIQFLDTKYNVGIHNLLAYVKHLKGQNEEALVSLKKAEDLIQKEHANQADIRSLVTWGNFAWVYYHMGRLAEAQTYLDKVENTCKKFANPSRYRMECPEVDCEEGWALAKCGGKNYERAKTCFEKALEGNPENPEFNTGYAITVYRLDKFNTASGRNKAFSLHVLKRAVRLNPDDVYIRVLLALKLQDEGQEAEGEKYIEEALTSISSQAYVFQYAAKFYRRKGSVDKALELLKMALETTPTSAFLHHQMGLCYRAQMIQIKEATNWQPRGQDRETVDRLVQLAICKFEKTIMLKRTFEMAYVDLAETYAEIGHHRKAEEHFQKGLRMKIFEDQLKQEIHYHYGRFQEHHGKSQDKAITHYLKGLKIEKMSHSREKLLNALEKLAKRCIHQNVRVVESVSLLGLIHKLKGEVSDALLCYERALRLAADLNPIF

SEQ ID NO: 23058 - protein, 611 aa, Homo sapiens
MAASAKKKNKKGKTISLTDFLAEDGGTGGGSTYVSKPVSWADETDDLEGDVSTTWHSNDDDVYRAPPIDRSILPTAPRAAREPNIDRSRLPKSPPYTAFLGNLPYDVTEESIKEFFRGLNISAVRLPREPSNPERLKGFGYAEFEDLDSLLSALSLNEESLGNRRIRVDVADQAQDKDRDDRSFGRDRNRDSDKTDTDWRARPATDSFDDYPPRRGDDSFGDKYRDRYDSDRYRDGYRDGYRDGPRRDMDRYGGRDRYDDRGSRDYDRGYDSRIGSGRRAFGSGYRRDDDYRGGGDRYEDRYDRRDDRSWSSRDDYSRDDYRRDDRGPPQRPKLNLKPRSTPKEDDSSASTSQSTRAASIFGGAKPVDTAAREREVEERLQKEQEKLQRQLDEPKLERRPRERHPSWRSEETQERERSRTGSESSQTGTSTTSSRNARRRESEKSLENETLNKEEDCHSPTSKPPKPDQPLKVMPAPPPKENAWVKRSSNPPARSQSSDTEQQSPTSGGGKVAPAQPSEEGPGRKDENKVDGMNAPKGQTGNSSRGPGDGGNRDHWKESDRKDGKKDQDSRSAPEPKKPEENPASKFSSASKYAALSVDGEDENEGEDYAE

SEQ ID NO: 23059 - protein, 572 aa, Homo sapiens
MAASAKKKNKKGKTISLTDFLAEDGGTGGGSTYVSKPVSWADETDDLEGDVSTTWHSNDDDVYRAPPIDRSILPTAPRAAREPNIDRSRLPKSPPYTAFLGNLPYDVTEESIKEFFRGLNSLGNRRIRVDVADQAQDKDRDDRSFGRDRNRDSDKTDTDWRARPATDSFDDYPPRRGDDSFGDKYRDRYDSDRYRDGYRDGYRDGPRRDMDRYGGRDRYDDRGSRDYDRGYDSRIGSGRRAFGSGYRRDDDYRGGGDRYEDRYDRRDDRSWSSRDDYSRDDYRRDDRGPPQRPKLNLKPRSTPKEDDSSASTSQSTRAASIFGGAKPVDTAAREREVEERLQKEQEKLQRQLDEPKLERRPRERHPSWRSEETQERERSRTGSESSQTGTSTTSSRNARRRESEKSLENETLNKEEDCHSPTSKPPKPDQPLKVMPAPPPKENAWVKRSSNPPARSQSSDTEQQSPTSGGGKVAPAQPSEEGPGRKDENKVDGMNAPKGQTGNSSRGPGDGGNRDHWKESDRKDGKKDQDSRSAPEPKKPEENPASKFSSASKYAALSVDGEDENEGEDYAE

SEQ ID NO: 23060 - protein, 132 aa, Homo sapiens
MAKDILGEAGLHFDELNKLRVLDPEVTQQTIELKEECKDFVDKIGQFQKIVGGLIELVDQLAKEAENEKMKAIGARNLLKSIAKQREAQQQQLQALIAEKKMQLERYRVEYEALCKVEAEQNEFIDQFIFQK

SEQ ID NO: 23061 - protein, 158 aa, Homo sapiens
MTHLLLTATVTPSEQNSSREPGWETAMAKDILGEAGLHFDELNKLRVLDPEVTQQTIELKEECKDFVDKIGQFQKIVGGLIELVDQLAKEAENEKMKAIGARNLLKSIAKQREAQQQQLQALIAEKKMQLERYRVEYEALCKVEAEQNEFIDQFIFQK

SEQ ID NO: 23062 - protein, 148 aa, Homo sapiens
MAKDILGEAGLHFDELNKLRVLDPEVTQQTIELKEECKDFVDKIGQFQKIVGGLIELVDQLAKEAENEKMKSLAVSPRLECTGAISAHCKLCLSDSSDSPTSPSRVGGTTGHRCSELAQIYSKAERSSTAATSSPNSRKENAARKVSG

SEQ ID NO: 23063 - protein, 114 aa, Homo sapiens
MAKDILGEAGLHFDELNKLRVLDPEVTQQTIELKEECKDFVDKIGQFQKIVGGLIELVDQLAKEAENEKMKAIGARNLLKSIAKQREAQQQQLQALIAEKKMQLERNELKISLL

SEQ ID NO: 23064 - protein, 556 aa, Homo sapiens
MGFWILAILTILMYSTAAKFSKQSWGLENEALIVRCPRQGKPSYTVDWYYSQTNKSIPTQERNRVFASGQLLKFLPAAVADSGIYTCIVRSPTFNRTGYANVTIYKKQSDCNVPDYLMYSTVSGSEKNSKIYCPTIDLYNWTAPLEWFKNCQALQGSRYRAHKSFLVIDNVMTEDAGDYTCKFIHNENGANYSVTATRSFTVKDEQGFSLFPVIGAPAQNEIKEVEIGKNANLTCSACFGKGTQFLAAVLWQLNGTKITDFGEPRIQQEEGQNQSFSNGLACLDMVLRIADVKEEDLLLQYDCLALNLHGLRRHTVRLSRKNPIDHHSIYCIIAVCSVFLMLINVLVIILKMFWIEATLLWRDIAKPYKTRNDGKLYDAYVVYPRNYKSSTDGASRVEHFVHQILPDVLENKCGYTLCIYGRDMLPGEDVVTAVETNIRKSRRHIFILTPQITHNKEFAYEQEVALHCALIQNDAKVILIEMEALSELDMLQAEALQDSLQHLMKVQGTIKWREDHIANKRSLNSKFWKHVRYQMPVPSKIPRKASSLTPLAAQKQ

SEQ ID NO: 23065 - protein, 328 aa, Homo sapiens
MGFWILAILTILMYSTAAKFSKQSWGLENEALIVRCPRQGKPSYTVDWYYSQTNKSIPTQERNRVFASGQLLKFLPAAVADSGIYTCIVRSPTFNRTGYANVTIYKKQSDCNVPDYLMYSTVSGSEKNSKIYCPTIDLYNWTAPLEWFKNCQALQGSRYRAHKSFLVIDNVMTEDAGDYTCKFIHNENGANYSVTATRSFTVKDEQGFSLFPVIGAPAQNEIKEVEIGKNANLTCSACFGKGTQFLAAVLWQLNGTKITDFGEPRIQQEEGQNQSFSNGLACLDMVLRIADVKEEDLLLQYDCLALNLHGLRRHTVRLSRKNPSKECF

SEQ ID NO: 23066 - protein, 259 aa, Homo sapiens
MGFWILAILTILMYSTAAKFSKQSWGLENEALIVRCPRQGKPSYTVDWYYSQTNKSIPTQERNRVFASGQLLKFLPAAVADSGIYTCIVRSPTFNRTGYANVTIYKKQSDCNVPDYLMYSTVSGSEKNSKIYCPTIDLYNWTAPLEWFKNCQALQGSRYRAHKSFLVIDNVMTEDAGDYTCKFIHNENGANYSVTATRSFTVKVWCQSFCKLKKSLIFSNTHWIQSLMRGFVMVYYGVHKCCRVVFNLCLQYFQHHQWP

SEQ ID NO: 23067 - protein, 211 aa, Homo sapiens
MYSTVSGSEKNSKIYCPTIDLYNWTAPLEWFKNCQALQGSRYRAHKSFLVIDNVMTEDAGDYTCKFIHNENGANYSVTATRSFTVKDEQGFSLFPVIGAPAQNEIKEVEIGKNANLTCSACFGKGTQFLAAVLWQLNGTKITDFGEPRIQQEEGQNQSFSNGLACLDMVLRIADVKEEDLLLQYDCLALNLHGLRRHTVRLSRKNPSKECF

SEQ ID NO: 23068 - protein, 185 aa, Homo sapiens
MLKAKILFVGPCESGKTVLANFLTESSDITEYSPTQGVRILEFENPHVTSNNKGTGCEFELWDCGGDAKFESCWPALMKDAHGVVIVFNADIPSHRKEMEMWYSCFVQQPSLQDTQCMLIAHHKPGSGDDKGSLSLSPPLNKLKLVHSNLEDDPEEIRMEFIKYLKSIINSMSESRDREEMSIMT

SEQ ID NO: 23069 - protein, 155 aa, Homo sapiens
MLKAKILFVGPCESGKTVLANFLTESSDITEYSPTQGVRFESCWPALMKDAHGVVIVFNADIPSHRKEMEMWYSCFVQQPSLQDTQCMLIAHHKPGSGDDKGSLSLSPPLNKLKLVHSNLEDDPEEIRMEFIKYLKSIINSMSESRDREEMSIMT

SEQ ID NO: 23070 - protein, 108 aa, Homo sapiens
MKDAHGVVIVFNADIPSHRKEMEMWYSCFVQQPSLQDTQCMLIAHHKPGSGDDKGSLSLSPPLNKLKLVHSNLEDDPEEIRMEFIKYLKSIINSMSESRDREEMSIMT

SEQ ID NO: 23071 - protein, 1353 aa, Homo sapiens
MSSPMPDCTSKCRSLKHALDVLSVVTKGSENQIKAFLSSHCYNAATIKDVFGRNALHLVSSCGKKGVLDWLIQKGVDLLVKDKESGWTALHRSIFYGHIDCVWSLLKHGVSLYIQDKEGLSALDLVMKDRPTHVVFKNTDPTDVYTWGDNTNFTLGHGSQNSKHHPELVDLFSRSGIYIKQVVLCKFHSVFLSQKGQVYTCGHGPGGRLGHGDEQTCLVPRLVEGLNGHNCSQVAAAKDHTVVLTEDGCVYTFGLNIFHQLGIIPPPSSCNVPRQIQAKYLKGRTIIGVAAGRFHTVLWTREAVYTMGLNGGQLGCLLDPNGEKCVTAPRQVSALHHKDIALSLVAASDGATVCVTTRGDIYLLADYQCKKMASKQLNLKKVLVSGGHMEYKVDPEHLKENGGQKICILAMDGAGRVFCWRSVNSSLKQCRWAYPRQVFISDIALNRNEILFVTQDGEGFRGRWFEEKRKSSEKKEILSNLHNSSSDVSYVSDINSVYERIRLEKLTFAHRAVSVSTDPSGCNFAILQSDPKTSLYEIPAVSSSSFFEEFGKLLREADEMDSIHDVTFQVGNRLFPAHKYILAVHSDFFQKLFLSDGNTSEFTDIYQKDEDSAGCHLFVVEKVHPDMFEYLLQFIYTDTCDFLTHGFKPRIHLNKNPEEYQGTLNSHLNKVNFHEDDNQKSAFEVYKSNQAQTVSERQKSKPKSCKKGKNIREDDPVRMLQTVAKKFDFSNLSSRLDGVRFENEKINVIAKNTGNKLKLSQKKCSFLCDVTMKSVDGKEFPCHKCVLCARLEYFHSMLSSSWIEASSCAALEMPIHSDILKVILDYLYTDEAVVIKESQNVDFICSVLVVADQLLITRLKEICEVALTEKLTLKNAAMLLEFAAMYSAKQLKLSCLQFIGLNMAALLEARSLDVLSDGVLKDLSEFYRKMIPAMDRRVITPYQDGPDISYLEVEDGDIFLKEEINMEQNHSETMFKKAKTKAKKKPRKRSDSSGGYNLSDIIQSPSSTGLLKSGKTNSVESLPELLTSDSEGSYAGVGSPRDLQSPDFTTGFHSDKIEAKVKPYVNGTSPVYSREDLKPWEKSPILKISAPQPIPSNRIDTTSSASWVAGSFSPVSPPVVDLRTIMEIEESRQKCGATPKSHLGKTVSHGVKLSQKQRKMIALTTKENNSGMNSMETVLFTPSKAPKPVNAWASSLHSVSSKSFRDFLLEEKKSVTSHSSGDHVKKVSFKGIENSQAPKIVRCSTHGTPGPEGNHISDLPLLDSPNPWLSSSVTAPSMVAPVTFASIVEEELQQEAALIRSREKPLALIQIEEHAIQDLLVFYEAFGNPEEFVIVERTPQGPLAVPMWNKHGC

SEQ ID NO: 23072 - protein, 1196 aa, Homo sapiens
MSSPMPDCTSKCRSLKHALDVLSVVTKGSENQIKAFLSSHCYNAATIKDVFGRNALHLVSSCGKKGVLDWLIQKGVDLLVKDKESGWTALHRSIFYGHIDCVWSLLKHGVSLYIQDKEGLSALDLVMKDRPTHVVFKNTDPTDVYTWGDNTNFTLGHGSQNSKHHPELVDLFSRSGIYIKQVVLCKFHSVFLSQKGQVYTCGHGPGGRLGHGDEQTCLVPRLVEGLNGHNCSQVAAAKDHTVVLTEDGCVYTFGLNIFHQLGIIPPPSSCNVPRQIQAKYLKGRTIIGVAAGRFHTVLWTREAVYTMGLNGGQLGCLLDPNGEKCVTAPRQVSALHHKDIALSLVAASDGATVCVTTRGDIYLLADYQCKKMASKQLNLKKVLVSGGHMEYKVDPEHLKENGGQKICILAMDGAGRVFCWRSVNSSLKQCRWAYPRQVFISDIALNRNEILFVTQDGEGFRGRWFEEKRKSSEKKEILSNLHNSSSDVSYVSDINSVYERIRLEKLTFAHRAVSVSTDPSGCNFAILQSDPKTSLYEIPAVSSSSFFEEFGKLLREADEMDSIHDVTFQVGNRLFPAHKYILAVHSDFFQKLFLSDGNTSEFTDIYQKDEDSAGCHLFVVEKVHPDMFEYLLQFIYTDTCDFLTHGFKPRIHLNKNPEEYQGTLNSHLNKVNFHEDDNQKSAFEVYKSNQAQTVSERQKSKPKSCKKGKNIREDDPVRMLQTVAKKFDFSNLSSRLDGVRFENEKINVIAKNTGNKLKLSQKKCSFLCDVTMKSVDGKEFPCHKCVLCARLEYFHSMLSSSWIEASSCAALEMPIHSDILKVILDYLYTDEAVVIKESQNVDFICSVLVVADQLLITRLKEICEVALTEKLTLKNAAMLLEFAAMYSAKQLKLSCLQFIGLNMAALLEARSLDVLSDGVLKDLSEFYRKMIPAMDRRVITPYQDGPDISYLEVEDGDIFLKEEINMEQNHSETMFKKAKTKAKKKPRKRSDSSGGYNLSDIIQSPSSTGLLKSGKTNSVESLPELLTSDSEGSYAGVGSPRDLQSPDFTTGFHSDKIEAKVKPYVNGTSPVYSREDLKPWEKSPILKISAPQPIPSNRIDTTSSASWVAGSFSPVSPPVVDLRTIMEIEESRQKCGATPKSHLGWVENITKDHFMLYFCPKNWTDLLHLSYYFSAFDVIVNYTSFSGQFSLHNIIS

SEQ ID NO: 23073 - protein, 240 aa, Homo sapiens
MLIDIISSKMISHGIKLCQKKPLKLIGLISSKTVSHGVKLSQKQRKMIALTTKENNSGMNSMETVLFTPSKAPKPVNAWASSLHSVSSKSFRDFLLEEKKSVTSHSSGDHVKKVSFKGIENSQAPKIVRCSTHGTPGPEGNHISDLPLLDSPNPWLSSSVTAPSMVAPVTFASIVEEELQQEAALIRSREKPLALIQIEEHAIQDLLVFYEAFGNPEEFVIVERTPQGPLAVPMWNKHGC

SEQ ID NO: 23074 - protein, 575 aa, Homo sapiens
MWSLLLCGLSIALPLSVTADGCKDIFMKNEILSASQPFAFNCTFPPITSGEVSVTWYKNSSKIPVSKIIQSRIHQDETWILFLPMEWGDSGVYQCVIKGRDSCHRIHVNLTVFEKHWCDTSIGGLPNLSDEYKQILHLGKDDSLTCHLHFPKSCVLGPIKWYKDCNEIKGERFTVLETRLLVSNVSAEDRGNYACQAILTHSGKQYEVLNGITVSITERAGYGGSVPKIIYPKNHSIEVQLGTTLIVDCNVTDTKDNTNLRCWRVNNTLVDDYYDESKRIREGVETHVSFREHNLYTVNITFLEVKMEDYGLPFMCHAGVSTAYIILQLPAPDFRAYLIGGLIALVAVAVSVVYIYNIFKIDIVLWYRSAFHSTETIVDGKLYDAYVLYPKPHKESQRHAVDALVLNILPEVLERQCGYKLFIFGRDEFPGQAVANVIDENVKLCRRLIVIVVPESLGFGLLKNLSEEQIAVYSALIQDGMKVILIELEKIEDYTVMPESIQYIKQKHGAIRWHGDFTEQSQCMKTKFWKTVRYHMPPRRCRPFPPVQLLQHTPCYRTAGPELGSRRKKCTLTTG

SEQ ID NO: 23075 - protein, 457 aa, Homo sapiens
MTGLVSLSYFPLSTRSCALQSCSPVWGCGPCCSAGCPSPFHCLSQQDCNEIKGERFTVLETRLLVSNVSAEDRGNYACQAILTHSGKQYEVLNGITVSIKRAGYGGSVPKIIYPKNHSIEVQLGTTLIVDCNVTDTKDNTNLRCWRVNNTLVDDYYDESKRIREGVETHVSFREHNLYTVNITFLEVKMEDYGLPFMCHAGVSTAYIILQLPAPDFRAYLIGGLIALVAVAVSVVYIYNIFKIDIVLWYRSAFHSTETIVDGKLYDAYVLYPKPHKESQRHAVDALVLNILPEVLERQCGYKLFIFGRDEFPGQAVANVIDENVKLCRRLIVIVVPESLGFGLLKNLSEEQIAVYSALIQDGMKVILIELEKIEDYTVMPESIQYIKQKHGAIRWHGDFTEQSQCMKTKFWKTVRYHMPPRRCRPFPPVQLLQHTPCYRTAGPELGSRRKKCTLTTG

SEQ ID NO: 23076 - protein, 455 aa, Homo sapiens
MWLEILLTSVLGFAIYWFISRDKEETLPLEDGWWGPGTRSAAREDDSIRPFKVETSDEEIHDLHQRIDKFRFTPPLEDSCFHYGFNSNYLKKVISYWRNEFDWKKQVEILNRYPHFKTKIEGLDIHFIHVKPPQLPAGHTPKPLLMVHGWPGSFYEFYKIIPLLTDPKNHGLSDEHVFEVICPSIPGYGFSEASSKKGFNSVATARIFYKLMLRLGFQEFYIQGGDWGSLICTNMAQLVPSHVKGLHLNMALVLSNFSTLTLLLGQRFGRFLGLTERDVELLYPVKEKVFYSLMRESGYMHIQCTKPDTVGSALNDSPVGLAAYILEKFSTWTNTEFRYLEDGGLERKFSLDDLLTNVMLYWTTGTIISSQRFYKENLGQGWMTQKHERMKVYVPTGFSAFPFELLHTPEKWVRFKYPKLISYSYMVRGGHFAAFEEPELLAQDIRKFLSVLERQ

SEQ ID NO: 23077 - protein, 153 aa, Homo sapiens
MALVFVYGTLKRGQPNHRVLRDGAHGSAAFRARGRTLEPYPLVIAGEHNIPWLLHLPGSGRLVEGEVYAVDERMLRFLDDFESCPALYQRTVLRVQLLEDRAPGAEEPPAPTAVQCFVYSRATFPPEWAQLPHHDSYDSEGPHGLRYNPRENR

SEQ ID NO: 23078 - protein, 500 aa, Homo sapiens
MASRLTLLTLLLLLLAGDRASSNPNATSSSSQDPESLQDRGEGKVATTVISKMLFVEPILEVSSLPTTNSTTNSATKITANTTDEPTTQPTTEPTTQPTIQPTQPTTQLPTDSPTQPTTGSFCPGPVTLCSDLESHSTEAVLGDALVDFSLKLYHAFSAMKKVETNMAFSPFSIASLLTQVLLGAGENTKTNLESILSYPKDFTCVHQALKGFTTKGVTSVSQIFHSPDLAIRDTFVNASRTLYSSSPRVLSNNSDANLELINTWVAKNTNNKISRLLDSLPSDTRLVLLNAIYLSAKWKTTFDPKKTRMEPFHFKNSVIKVPMMNSKKYPVAHFIDQTLKAKVGQLQLSHNLSLVILVPQNLKHRLEDMEQALSPSVFKAIMEKLEMSKFQPTLLTLPRIKVTTSQDMLSIMEKLEFFDFSYDLNLCGLTEDPDLQVSAMQHQTVLELTETGVEAAAASAISVARTLLVFEVQQPFLFVLWDQQHKFPVFMGRVYDPRA

SEQ ID NO: 23079 - protein, 448 aa, Homo sapiens
MLFVEPILEVSSLPTTNSTTNSATKITANTTDEPTTQPTTEPTTQPTIQPTQPTTQLPTDSPTQPTTGSFCPGPVTLCSDLESHSTEAVLGDALVDFSLKLYHAFSAMKKVETNMAFSPFSIASLLTQVLLGAGENTKTNLESILSYPKDFTCVHQALKGFTTKGVTSVSQIFHSPDLAIRDTFVNASRTLYSSSPRVLSNNSDANLELINTWVAKNTNNKISRLLDSLPSDTRLVLLNAIYLSAKWKTTFDPKKTRMEPFHFKNSVIKVPMMNSKKYPVAHFIDQTLKAKVGQLQLSHNLSLVILVPQNLKHRLEDMEQALSPSVFKAIMEKLEMSKFQPTLLTLPRIKVTTSQDMLSIMEKLEFFDFSYDLNLCGLTEDPDLQVSAMQHQTVLELTETGVEAAAASAISVARTLLVFEVQQPFLFVLWDQQHKFPVFMGRVYDPRA

SEQ ID NO: 23080 - protein, 505 aa, Homo sapiens
MASRLTLLTLLLLLLAGFLEPQDRASSNPNATSSSSQDPESLQDRGEGKVATTVISKMLFVEPILEVSSLPTTNSTTNSATKITANTTDEPTTQPTTEPTTQPTIQPTQPTTQLPTDSPTQPTTGSFCPGPVTLCSDLESHSTEAVLGDALVDFSLKLYHAFSAMKKVETNMAFSPFSIASLLTQVLLGAGENTKTNLESILSYPKDFTCVHQALKGFTTKGVTSVSQIFHSPDLAIRDTFVNASRTLYSSSPRVLSNNSDANLELINTWVAKNTNNKISRLLDSLPSDTRLVLLNAIYLSAKWKTTFDPKKTRMEPFHFKNSVIKVPMMNSKKYPVAHFIDQTLKAKVGQLQLSHNLSLVILVPQNLKHRLEDMEQALSPSVFKAIMEKLEMSKFQPTLLTLPRIKVTTSQDMLSIMEKLEFFDFSYDLNLCGLTEDPDLQVSAMQHQTVLELTETGVEAAAASAISVARTLLVFEVQQPFLFVLWDQQHKFPVFMGRVYDPRA

SEQ ID NO: 23081 - protein, 184 aa, Homo sapiens
MKILVAFLVVLTIFGIQSHGYEVFNIISPSNNGGNVQETVTIDNEKNTAIINIHAGSCSSTTIFDYKHGYIASRVLSRRACFILKMDHQNIPPLNNLQWYIYEKQALDNMFSSKYTWVKYNPLESLIKDVDWFLLGSPIEKLCKHIPLYKGEVVENTHNVGAGGCAKAGLLGILGISICADIHV

SEQ ID NO: 23082 - protein, 186 aa, Homo sapiens
MVKLAAKCILAGDPAVGKTALAQIFRSDGAHFQKSYTLTTGMDLVVKTVPVPDTGDSVELFIFDSAGKELFSEMLDKLWESPNVLCLVYDVTNEESFNNCSKWLEKARSQAPGISLPGVLVGNKTDLAGRRAVDSAEARAWALGQGLECFETSVKEMENFEAPFHCLAKQFHQLYREKVEVFRALA

SEQ ID NO: 23083 - protein, 185 aa, Homo sapiens
MVKLAAKCILADPAVGKTALAQIFRSDGAHFQKSYTLTTGMDLVVKTVPVPDTGDSVELFIFDSAGKELFSEMLDKLWESPNVLCLVYDVTNEESFNNCSKWLEKARSQAPGISLPGVLVGNKTDLAGRRAVDSAEARAWALGQGLECFETSVKEMENFEAPFHCLAKQFHQLYREKVEVFRALA

SEQ ID NO: 23084 - protein, 482 aa, Homo sapiens
MDSFGQPRPEDNQSVVRRMQKKYWKTKQVFIKATGKKEDEHLVASDAELDAKLEVFHSVQETCTELLKIIEKYQLRLNVISEEENELGLFLKFQAERDATQAGKMMDATGKALCSSAKQRLALCTPLSRLKQEVATFSQRAVSDTLMTINRMEQARTEYRGALLWMKDVSQELDPDTLKQMEKFRKVQMQVRNSKASFDKLKMDVCQKVDLLGASRCNMLSHSLTTYQRTLLGFWKKTARMMSQIHEACIGFHPYDFVALKQLQDTPSKISEDNKDEQIGGFLTEQLNKLVLSDEEASFESEQANKDHNEKHSQMREFGAPQFSNSENVAKDLPVDSLEGEDFEKEFSFLNNLLSSGSSSTSEFTQECQTAFGSPSASLTSQEPSMGSEPLAHSSRFLPSQLFDLGFHVAGAFNNWVSQEESELCLSHTDNQPVPSQSPKKLTRSPNNGNQDMSAWFNLFADLDPLSNPDAIGHSDDELLNA

SEQ ID NO: 23085 - protein, 187 aa, Homo sapiens
MDSFGQPRPEDNQSVVRRMQKKYWKTKQVFIKATGKKEDEHLVASDAELDAKLEVFHSVQETCTELLKIIEKYQLRLNVISEEENELGLFLKFQAERDATQAGKMMDATGKALCSSAKQRLALCTPLSRLKQEVATFSQRAVSDTLMTINRMEQARTEYRGALLWMKDVSQELDPDTLKQMEKFRKV

SEQ ID NO: 23086 - protein, 224 aa, Homo sapiens
MALPPAAAPPAGAREPPGSRAAAAAAAPEPPLGLQQLSALQPEPGGVPLHSSWTFWLDRSLPGATAAECASNLKKIYTVQTVQIFWSVYNNIPPVTSLPLRCSYHLMRGERRPLWEEESNAKGGVWKMKVPKDSTSTVWKELLLATIGEQFTDCAAADDEVIGVSVSVRDREDVVQVWNVNASLVGEATVLEKIYELLPHITFKAVFYKPHEEHHAFEGGRGKH

SEQ ID NO: 23087 - protein, 118 aa, Homo sapiens
MRGERRPLWEEESNAKGGVWKMKVPKDSTSTVWKELLLATIGEQFTDCAAADDEVIGVSVSVRDREDVVQVWNVNASLVGEATVLEKIYELLPHITFKAVFYKPHEEHHAFEGGRGKH

SEQ ID NO: 23088 - protein, 483 aa, Homo sapiens
MSGHKCSYPWDLQDRYAQDKSVVNKMQQKYWETKQAFIKATGKKEDEHVVASDADLDAKLELFHSIQRTCLDLSKAIVLYQKRICFLSQEENELGKFLRSQGFQDKTRAGKMMQATGKALCFSSQQRLALRNPLCRFHQEVETFRHRAISDTWLTVNRMEQCRTEYRGALLWMKDVSQELDPDLYKQMEKFRKVQTQVRLAKKNFDKLKMDVCQKVDLLGASRCNLLSHMLATYQTTLLHFWEKTSHTMAAIHESFKGYQPYEFTTLKSLQDPMKKLVEKEEKKKINQQESTDAAVQEPSQLISLEEENQRKESSSFKTEDGKSILSALDKGSTHTACSGPIDELLDMKSEEGACLGPVAGTPEPEGADKDDLLLLSEIFNASSLEEGEFSKEWAAVFGDGQVKEPVPTMALGEPDPKAQTGSGFLPSQLLDQNMKDLQASLQEPAKAASDLTAWFSLFADLDPLSNPDAVGKTDKEHELLNA

SEQ ID NO: 23089 - protein, 512 aa, Homo sapiens
MSGHKCSYPWDLQDRYAQDKSVVNKMQQKYWETKQAFIKATGKKEDEHVVASDADLDAKLELFHSIQRTCLDLSKAIVLYQKRICFLSQEENELGKFLRSQGFQDKTRAGKMMQATGKALCFSSQQRLALRNPLCRFHQEVETFRHRAISDTWLTVNRMEQCRTEYRGALLWMKDVSQELDPDLYKQMEKFRKVQTQVRLAKKNFDKLKMDVCQKVDLLGASRCNLLSHMLATYQTTLLHFWEKTSHTMAAIHESFKGYQPYEFTTLKSLQDPMKKLVEKEEKKKINQQESTDAAVQEPSQYLQNICLEMKANSDIKMLQKGKEGQQIGILISLEEENQRKESSSFKTEDGKSILSALDKGSTHTACSGPIDELLDMKSEEGACLGPVAGTPEPEGADKDDLLLLSEIFNASSLEEGEFSKEWAAVFGDGQVKEPVPTMALGEPDPKAQTGSGFLPSQLLDQNMKDLQASLQEPAKAASDLTAWFSLFADLDPLSNPDAVGKTDKEHELLNA

SEQ ID NO: 23090 - protein, 482 aa, Homo sapiens
MSGHKCYPWDLQDRYAQDKSVVNKMQQKYWETKQAFIKATGKKEDEHVVASDADLDAKLELFHSIQRTCLDLSKAIVLYQKRICFLSQEENELGKFLRSQGFQDKTRAGKMMQATGKALCFSSQQRLALRNPLCRFHQEVETFRHRAISDTWLTVNRMEQCRTEYRGALLWMKDVSQELDPDLYKQMEKFRKVQTQVRLAKKNFDKLKMDVCQKVDLLGASRCNLLSHMLATYQTTLLHFWEKTSHTMAAIHESFKGYQPYEFTTLKSLQDPMKKLVEKEEKKKINQQESTDAAVQEPSQLISLEEENQRKESSSFKTEDGKSILSALDKGSTHTACSGPIDELLDMKSEEGACLGPVAGTPEPEGADKDDLLLLSEIFNASSLEEGEFSKEWAAVFGDGQVKEPVPTMALGEPDPKAQTGSGFLPSQLLDQNMKDLQASLQEPAKAASDLTAWFSLFADLDPLSNPDAVGKTDKEHELLNA

SEQ ID NO: 23091 - protein, 217 aa, Homo sapiens [sequence omitted]

SEQ ID NO: 23092 - protein, 248 aa, Homo sapiens
MATVEPETTPTPNPPTTEEEKTESNQEVANPEHYIKHPLQNRWALWFFKNDKSKTWQANLRLISKFDTVEDFWALYNHIQLSSNLMPGCDYSLFKDGIEPMWEDEKNKRGGRWLITLNKQQRRSDLDRFWLETRWDLAMLPRLVSNFWPQVILPLQPPKVLELQLLCLIGESFDDYSDDVCGAVVNVRAKGDKIAIWTTECENREAVTHIGRVYKERLGLPPKIVIGYQSHADTATKSGSTTKNRFVV

SEQ ID NO: 23093 - protein, 237 aa, Homo sapiens
MLDLTSRGQVGTSRRMAEAACSAHFLETTPTPNPPTTEEEKTESNQEVANPEHYIKHPLQNRWALWFFKNDKSKTWQANLRLISKFDTVEDFWALYNHIQLSSNLMPGCDYSLFKDGIEPMWEDEKNKRGGRWLITLNKQQRRSDLDRFWLETLLCLIGESFDDYSDDVCGAVVNVRAKGDKIAIWTTECENREAVTHIGRVYKERLGLPPKIVIGYQSHADTATKSGSTTKNRFVV

SEQ ID NO: 23094 - protein, 437 aa, Homo sapiens
MEKELRSTILFNAYKKEIFTTNNGYKSMQKKLRSNWKIQSLKDEITSEKLNGVKLWITAGPREKFTAAEFEILKKYLDTGGDVFVMLGEGGESRFDTNINFLLEEYGIMVNNDAVVRNVYHKYFHPKEALVSSGVLNREISRAAGKAVPGIIDEESSGNNAQALTFVYPFGATLSVMKPAVAVLSTGSVCFPLNRPILAFYHSKNQGGKLAVLGSCHMFSDQYLDKEENSKIMDVVFQWLTTGDIHLNQIDAEDPEISDYMMLPYTATLSKRNRECLQESDEIPRDFTTLFDLSIFQLDTTSFHSVIEAHEQLNVKHEPLQLIQPQFETPLPTLQPAVFPPSFRELPPPPLELFDLDETFSSEKARLAQITNKCTEEDLEFYVRKCGDILGVTSKLPKDQQDAKHILEHVFFQVVEFKKLNQEHDIDTSETAFQNNF

SEQ ID NO: 23095 - protein, 373 aa, Homo sapiens
MSSGNYQQSEALSKPTFSEEQASALVESVFGLKVSKVRPLPSYDDQNFHVYVSKTKDGPTEYVLKISNTKASKNPDLIEVQNHIIMFLKAAGFPTASVCHTKGDNTASLVSVDSGSEIKSYLVRLLTYLPGRPIAELPVSPQLLYEIGKLAAKLDKTLQRFHHPKLSSLHRENFIWNLKNVPLLEKYLYALGQNRNREIVEHVIHLFKEEVMTKLSHFRECINHGDLNDHNILIESSKSASGNAEYQVSGILDFGDMSYGYYVFEVAITIMYMMIESKSPIQVGGHVLAGFESITPLTAVEKGALFLLVCSRFCQSLVMAAYSCQLYPENKDYLMVTAKTGWKHLQQMFDMGQKAVEEIWFETAKSYESGISM

SEQ ID NO: 23096 - protein, 172 aa, Homo sapiens
MSSGNYQQSEALSKPTFSEEQASALVESVFGLKVSKVRPLPSYDDQNFHVYVSKTKDGPTEYVLKISNTKASKNPDLIEVQNHIIMFLKAAGFPTASVCHTKGDNTASLVSVDSGSEIKSYLVRLLTYLPGRPIAELPVSPQLLYEIGKLAAKLDKTLQEGKPRVTPLLAKN

SEQ ID NO: 23097 - protein, 220 aa, Homo sapiens
MSSGNYQQSEALSKPTFSEEQASALVESVFGLKVSKVRPLPSYDDQNFHVYVSKTKDGPTEYVLKISNTKASKNPDLIEVQNHIIMFLKAAGFPTASVCHTKGDNTASLVSVDSGSEIKSYLVRLLTYLPGRPIAELPVSPQLLYEIGKLAAKLDKTLQRFHHPKLSSLHRENFIWNLKNVPLLEKYLYALGQNRNREIVEHVIHLFKEEVMTKLSHFRE

SEQ ID NO: 23098 - protein, 462 aa, Homo sapiens
MDNGMFSGFIMIKNLLLFCISMNLSSHFGFSQMPTSSVKDETNDNITIFTRILDGLLDGYDNRLRPGLGERITQVRTDIYVTSFGPVSDTEMEYTIDVFFRQSWKDERLRFKGPMQRLPLNNLLASKIWTPDTFFHNGKKSIAHNMTTPNKLLRLEDDGTLLYTMRLTISAECPMQLEDFPMDAHACPLKFGSYAYPNSEVVYVWTNGSTKSVVVAEDGSRLNQYHLMGQTVGTENISTSTGEYTIMTAHFHLKRKIGYFVIQTYLPCIMTVILSQVSFWLNRESVPARTVFGVTTVLTMTTLSISARNSLPKVAYATAMDWFIAVCYAFVFSALIEFATVNYFTKRGWAWDGKKALEAAKIKKKREVILNKSTNAFTTGKMSHPPNIPKEQTPAGTSNTTSVSVKPSEEKTSESKKTYNSISKIDKMSRIVFPVLFGTFNLVYWATYLNREPVIKGAASPK

SEQ ID NO: 23099 - protein, 299 aa, Homo sapiens
MEELLPDGQIWANMDPEERMLAAATAFTHICAGQGEGDVRREAQSIQYDPYSKASVAPGKRPALPVQLQYPHVESNVPSETVSEASQRLRKPVMKRKVLRRKPDGEVLVTDESIISESESGTENDQDLWDLRQRLMNVQFQEDKESSFDVSQKFNLPHEYQGISQDQLICSLQREGMGSPAYEQDLIVASRPKSFILPKLDQLSRNRGKTDRVARYFEYKRDWDSIRLPGEDHRKELRWGVREQMLCRAEPQSKPQHIYVPNNYLVPTEKKRSALRWGVRCDLANGVIPRKLPFPLSPS

SEQ ID NO: 23100 - protein, 532 aa, Homo sapiens
MAPSSPRPALPALLVLLGALFPGPGNAQTSVSPSKVILPRGGSVLVTCSTSCDQPKLLGIETPLPKKELLLPGNNRKVYELSNVQEDSQPMCYSNCPDGQSTAKTFLTVYWTPERVELAPLPSWQPVGKNLTLRCQVEGGAPRANLTVVLLRGEKELKREPAVGEPAEVTTTVLVRRDHHGANFSCRTELDLRPQGLELFENTSAPYQLQTFVLPATPPQLVSPRVLEVDTQGTVVCSLDGLFPVSEAQVHLALGDQRLNPTVTYGNDSFSAKASVSVTAEDEGTQRLTCAVILGNQSQETLQTVTIYSFPAPNVILTKPEVSEGTEVTVKCEAHPRAKVTLNGVPAQPLGPRAQLLLKATPEDNGRSFSCSATLEVAGQLIHKNQTRELRVLYGPRLDERDCPGNWTWPENSQQTPMCQAWGNPLPELKCLKDGTFPLPIGESVTVTRDLEGTYLCRARSTQGEVTRKVTVNVLSPRYEIVIITVVAAAVIMGTAGLSTYLYNRQRKIKKYRLQQAQKGTPMKPNTQATPP

SEQ ID NO: 23101 - protein, 404 aa, Homo sapiens
MECALDAQSLISISLRKIHSSRTQRGGIKLHKNLLVSYVLRNARQLYLSERYAELYRRQQQQQQQQPPHHQHQHLAYAAPGMPASAADFGPLQLGGGGDAEAREPAARHQLHQLHQLHQLHLQQQLHQHQHPAPRGCAAAAAAGAPAGGAGALSELPGCAALQPPHGAPHRGQPLEPLQPGPAPLPLPLPPPAPAALCPRDPRAPAACSAPPGAAPPAAAASPPASPAPASSPGFYRGAYPTPSDFGLHCSSQTTVLDLDTHVVTTVENGYLHQDCCASAHCPCCGQGAPGPGLASAAGCKRKYYPGQEEEEDDEEDAGGLGAEPPGGAPFAPCKRARFEDFCPDSSPDASNISNLISIFGSGFSGLVSRQPDSSEQPPPLNGQLCAKQALASLGAWTRAIVAF

SEQ ID NO: 23102 - protein, 237 aa, Homo sapiens
MECALDAQSLISISLRKIHSSRTQRGGIKLHKNLLVSYVLRNARQLYLSERYAELYRRQQQQQQQQPPHHQHQHLAYAAPGMPASAADFGPLQLGGGGDAEAREPAARHQLHQLHQLHQLHLQQQLHQHQHPAPRGCAAAAAAGAPAGGAGALSELPGCAALQPPHGAPHRGQPLEPLQPGPAPLPLPLPPPAPAALCPRDPRAPAACSAPRSPPASAPASRTSARTRPRTRPTSQT

SEQ ID NO: 23103 - protein, 632 aa, Homo sapiens
MGIRGMLRAAVILLLIRTWLAEGNYPSPIPKFHFEFSSAVPEVVLNLFNCKNCANEAVVQKILDRVLSRYDVRLRPNFGGAPVPVRISIYVTSIEQISEMNMDYTITMFFHQTWKDSRLAYYETTLNLTLDYRMHEKLWVPDCYFLNSKDAFVHDVTVENRVFQLHPDGTVRYGIRLTTTAACSLDLHKFPMDKQACNLVVESYGYTVEDIILFWDDNGNAIHMTEELHIPQFTFLGRTITSKEVYFYTGSYIRLILKFQVQREVNSYLVQVYWPTVLTTITSWISFWMNYDSSAARVTIGLTSMLILTTIDSHLRDKLPNISCIKAIDIYILVCLFFVFLSLLEYVYINYLFYSRGPRRQPRRHRRPRRVIARYRYQQVVVGNVQDGLINVEDGVSSLPITPAQAPLASPESLGSLTSTSEQAQLATSESLSPLTSLSGQAPLATGESLSDLPSTSEQARHSYGVRFNGFQADDSIFPTEIRNRVEAHGHGVTHDHEDSNESLSSDERHGHGPSGKPMLHHGEKGVQEAGWDLDDNNDKSDCLAIKEQFKCDTNSTWGLNDDELMAHGQEKDSSSESEDSCPPSPGCSFTEGFSFDLFNPDYVPKVDKWSRFLFPLAFGLFNIVYWVYHMY

SEQ ID NO: 23104 - protein, 698 aa, Homo sapiens
MPSEGRCWETLKALRSSDKGRLCYYRDWLLRREDVLEECMSLPKLSSYSGWVVEHVLPHMQENQPLSETSPSSTSASALDQPSFVPKSPDASSAFSPASPATPNGTKGKDESQHTESMVLQSSRGIKVEGCVRMYELVHRMKGTEGLRLWQEEQERKVQALSEMASEQLKRFDEWKELKQHKEFQDLREVMEKSSREALGHQEKLKAEHRHRAKILNLKLREAEQQRVKQAEQERLRKEEGQIRLRALYALQEEMLQLSQQLDASEQHKALLKVDLAAFQTRGNQLCSLISGIIRASSESSYPTAESQAEAERALREMRDLLMNLGQEITRACEDKRRQDEEEAQVKLQEAQMQQGPEAHKEPPAPSQGPGGKQNEDLQVKVQDITMQWYQQLQDASMQCVLTFEGLTNSKDSQAKKIKMDLQKAATIPVSQISTIAGSKLKEIFDKIHSLLSGKPVQSGGRSVSVTLNPQGLDFVQYKLAEKFVKQGEEEVASHHEAAFPIAVVASGIWELHPRVGDLILAHLHKKCPYSVPFYPTFKEGMALEDYQRMLGYQVKDSKVEQQDNFLKRMSGMIRLYAAIIQLRWPYGNRQEIHPHGLNHGWRWLAQILNMEPLSDVTATLLFDFLEVCGNALMKQYQVQFWKMLILIKEDYFPRIEAITSSGQMGSFIRLKQFLEKCLQHKDIPVPKGFLTSSFWRS

SEQ ID NO: 23105 - protein, 659 aa, Homo sapiens
MPSEGRCWETLKALRSSDKGRLCYYRDWLLRREDVLEECMSLPKLSSYSGWVVEHVLPHMQENQPLSETSPSSTSASALDQPSFVPKSPDASSAFSPASPATPNGTKGKDESQHTESMVLQSSRGIKVEGCVRMYELVHRMKGTEGLRLWQEEQERKVQALSEMASEQLKRFDEWKELKQHKEFQDLREVMEKSSREALGHQEKLKAEHRHRAKILNLKLREAEQQRVKQAEQERLRKEEGQIRLRALYALQEEMLQLSQQLDASEQHKALLKVDLAAFQTRGNQLCSLISGIIRASSESSYPTAESQAEAERALREMRDLLMNLGQEITRACEDKRRQDEEEAQVKLQEAQMQQGPEAHKEPPAPSQGPGGKQNEDLQVKVQDITMQWYQQLQDASMQCVLTFEGLTNSKDSQAKKIKMDLQKAATIPVSQISTIAGSKLKEIFDKIHSLLSGKPVQSGGRSVSVTLNPQGLDFVQYKLAEKFVKQGEEEVASHHEAAFPIAVVASGIWELHPRVGDLILAHLHKKCPYSVPFYPTFKEGMALEDYQRMLGYQVKDSKVEQQDNFLKRMSGMIRLYAAIIQLRWPYGNRQEIHPHGLNHGWRWLAQILNMEPLSDVTATLLFDFLEVCGNALMKQYQVQFWKMLILIKEDYFPRYQAC

SEQ ID NO: 23106 - protein, 553 aa, Homo sapiens
MAASKKAVLGPLVGAVDQGTSSTRFLVFNSRTAELLSHHQVEIKQEFPREGWVEQDPKEILHSVYECIEKTCEKLGQLNIGISNIKAIGVSNQRETTVVWDKITGEPLYNAVVWLDLRTQSTVESLSKRIPGNNNFVKSKTGLPLSTYFSAVKLRWLLDNVRKVQKAVEEKRALFGTIDSWLIWSLTGGVNGGVHCTDVTNASRTMLFNIHSLEWDKQLCEFFGIPMEILPHVRSSSEIYGLMKAGALEGVPISGCLGDQSAALVGQMCFQIGQAKNTYGTGCFLLCNTGHKCVFSDHGLLTTVAYKLGRDKPVYYALEGSVAIAGAVIRWLRDNLGIIKTSEEIEKLAKEVGTSYGCYFVPAFSGLYAPYWEPSARGIICGLTQFTNKCHIAFAALEAVCFQTREILDAMNRDCGIPLSHLQVDGGMTSNKILMQLQADILYIPVVKPLMPETTALGAAMAAGAAEGVDVWSLEPEDLSAVTMERFEPQINAEESEIRYSTWKKAVMKSMGWVTTQSPEGGDPSVFCSLPLGFFIVSSMAMLIGARYISGIP

SEQ ID NO: 23107 - protein, 107 aa, Homo sapiens
MARAALSAAPSNPRLLRVALLLLLLVAAGRRAAGASVATELRCQCLQTLQGIHPKNIQSVNVKSPGPHCAQTEVIATLKNGRKACLNPASPIVKKIIEKMLNSDKSN

SEQ ID NO: 23108 - protein, 222 aa, Homo sapiens
MAEKPKLHYSNARGSMESIRWLLAAAGVELEEKFLESAEDLDKLRNDGSLLFQQVPMVEIDGMKLVQTRAILNYIASKYNLYGKDMKERALIDMYTEGIVDLTEMILLLLICQPEERDAKTALVKEKIKNRYFPAFEKVLKSHRQDYLVGNKLSWADIHLVELFYYVEELDSSLISSFPLLKALKTRISNLPTVKKFLQPGSQRKPPMDEKSLEEARKIFRF

SEQ ID NO: 23109 - protein, 419 aa, Homo sapiens
MAGFGAMEKFLVEYKSAVEKKLAEYKCNTNTAIELKLVRFPEDLENDIRTFFPEYTHQLFGDDETAFGYKGLKILLYYIAGSLSTMFRVEYASKVDENFDCVEADDVEGKIRQIIPPGFCTNTNDFLSLLEKEVDFKPFGTLLHTYSVLSPTGGENFTFQIYKADMTCRGFREYHERLQTFLMWFIETASFIDVDDERWHYFLVFEKYNKDGATLFATVGYMTVYNYYVYPDKTRPRVSQMLILTPFQGQGHGAQLLETVHRYYTEFPTVLDITAEDPSKSYVKLRDFVLVKLCQDLPCFSREKLMQGFNEDMAIEAQQKFKINKQHARRVYEILRLLVTDMSDAEQYRSYRLDIKRRLISPYKKKQRDLAKMRKCLRPEELTNQMNQIEISMQHEQLEESFQELVEDYRRVIERLAQE

SEQ ID NO: 23110 - protein, 334 aa, Homo sapiens
MFRVEYASKVDENFDCVEADDVEGKIRQIIPPGFCTNTNDFLSLLEKEVDFKPFGTLLHTYSVLSPTGGENFTFQIYKADMTCRGFREYHERLQTFLMWFIETASFIDVDDERWHYFLVFEKYNKDGATLFATVGYMTVYNYYVYPDKTRPRVSQMLILTPFQGQGHGAQLLETVHRYYTEFPTVLDITAEDPSKSYVKLRDFVLVKLCQDLPCFSREKLMQGFNEDMAIEAQQKFKINKQHARRVYEILRLLVTDMSDAEQYRSYRLDIKRRLISPYKKKQRDLAKMRKCLRPEELTNQMNQIEISMQHEQLEESFQELVEDYRRVIERLAQE

SEQ ID NO: 23111 - protein, 379 aa, Homo sapiens
MTSVAKVYYSQTTQTESRPLMGPGIRRRRVLTKDGRSNVRMEHIADKRFLYLKDLWTTFIDMQWRYKLLLFSATFAGTWFLFGVVWYLVAVAHGDLLELDPPANHTPCVVQVHTLTGAFLFSLESQTTIGYGFRYISEECPLAIVLLIAQLVLTTILEIFITGTFLAKIARPKKRAETIRFSQHAVVASHNGKPCLMIRVANMRKSLLIGCQVTGKLLQTHQTKEGENIRLNQVNVTFQVDTASDSPFLILPLTFYHVVDETSPLKDLPLRSGEGDFELVLILSGTVESTSATCQVRTSYLPEEILWGYEFTPAISLSASGKYIADFSLFDQVVKVASPSGLRDSTVRYGDPEKLKLEESLREQAEKEGSALSVRISNV

SEQ ID NO: 23112 - protein, 168 aa, Homo sapiens
MFWKLSLSLFLVAVLVKVAEARKNRPAGAIPSPYKDGSSNNSERWQHQIKEVLASSQEALVVTERKYLKSDWCKTQPLRQTVSEEGCRSRTILNRFCYGQCNSFYIPRHVKKEEESFQSCAFCKPQRVTSVLVELECPGLDPPFRLKKIQKVKQCRCMSVNLSDSDKQ

SEQ ID NO: 23113 - protein, 344 aa, Homo sapiens
MEAARPFAREWRAQSLPLAVGGVLKLRLCELWLLLLGSSLNARFLPDEEDVDFINEYVNLHNELRGDVIPRGSNLRFMTWDVALSRTARAWGKKCLFTHNIYLQDVQMVHPKFYGIGENMWVGPENEFTASIAIRSWHAEKKMYNFENGSCSGDCSNYIQLVWDHSYKVGCAVTPCSKIGHIIHAAIFICNYAPGGTLTRRPYEPGIFCTRCGRRDKCTDFLCSNADRDQATYYRFWYPKWEMPRPVVCDPLCTFILLLRILCFILCVITVLIVQSQFPNILLEQQMIFTPEESEAGNEEEEKEEEKKEKEEMEMEIMEMEEEKEEREEEEEETQKEKMEEEEK

SEQ ID NO: 23114 - protein, 253 aa, Homo sapiens
MEAARPFAREWRAQSLPLAVGGVLKLRLCELWLLLLGSSLNARFLPDEEDVDFINEYVNLHNELRGDVIPRGSNLRFMTWDVALSRTARAWGKKCLFTHNIYLQDVQMVHPKFYGIGENMWVGPENEFTASIAIRSWHAEKKMYNFENGSCSGDCSNYIQLVWDHSYKVGCAVTPCSKIGHIIHAAIFICNYAPGGTLTRRPYEPGIFCTRCGRRDKCTDFLCSKIKKINMKKMHNGLDKKNKRLNTSFLWSC

SEQ ID NO: 23115 - protein, 106 aa, Homo sapiens
MEAARPFAREWRAQSLPLAVGGVLKLRLCELWLLLLGSSLNARFLPDEEDVDFINEYVNLHNELRGDVIPRGSNLRFMLWYCCDSDGSRFIIGFPNLSPRTPSAPL

SEQ ID NO: 23116 - protein, 168 aa, Homo sapiens
MEAARPFAREWRAQSLPLAVGGVLKLRLCELWLLLLGSSLNARFLPDEEDVDFINEYVNLHNELRGDVIPRGSNLRFMTWDVALSRTARAWGKKCLFTHNIYLQDVQMVHPKFYGIGENMWVGPENEFTASIAIRSWHAEKKMYNFENGSCSGDCSNYIQRNTDEKTL

SEQ ID NO: 23117 - protein, 237 aa, Homo sapiens
MVHPKFYGIGENMWVGPENEFTASIAIRSWHAEKKMYNFENGSCSGDCSNYIQLVWDHSYKVGCAVTPCSKIGHIIHAAIFICNYAPGGTLTRRPYEPGIFCTRCGRRDKCTDFLCSNADRDQATYYRFWYPKWEMPRPVVCDPLCTFILLLRILCFILCVITVLIVQSQFPNILLEQQMIFTPEESEAGNEEEEKEEEKKEKEEMEMEIMEMEEEKEEREEEEEETQKEKMEEEEK

SEQ ID NO: 23118 - protein, 279 aa, Homo sapiens
MLITMILHRARTKTWDVALSRTARAWGKKCLFTHNIYLQDVQMVHPKFYGIGENMWVGPENEFTASIAIRSWHAEKKMYNFENGSCSGDCSNYIQLVWDHSYKVGCAVTPCSKIGHIIHAAIFICNYAPGGTLTRRPYEPGIFCTRCGRRDKCTDFLCSNADRDQATYYRFWYPKWEMPRPVVCDPLCTFILLLRILCFILCVITVLIVQSQFPNILLEQQMIFTPEESEAGNEEEEKEEEKKEKEEMEMEIMEMEEEKEEREEEEEETQKEKMEEEEK

SEQ ID NO: 23119 - protein, 395 aa, Homo sapiens
MTLRRLRKLQQKEEAAATPDPAARTPDSEVAPAAPVPTPGPPAAAATPGPPADELYAALEDYHPAELYRALAVSGGTLPRRKGSGFRWKNLSQSPEQQRKVLTLEKEDNQTFGFEIQTYGLHHREEQRVEMVTFVCRVHESSPAQLAGLTPGDTIASVNGLNVEGIRHREIVDIIKASGNVLRLETLYGTSIRKAELEARLQYLKQTLYEKWGEYRSLMVQEQRLVHGLVVKDPSIYDTLESVRSCLYGAGLLPGSLPFGPLLAVPGRPRGGARRARGDADDAVYHTCFFGDSEPPALPPPPPPARAFGPGPAETPAVGPGPGPRAALSRSASVRCAGPGGGGGGGAPGALWTEAREQALCGPGLRKTKYRSFRRRLLKFIPGLNRSLEEEESQL

SEQ ID NO: 23120 - protein, 252 aa, Homo sapiens
MTLLPSKGGDTIASVNGLNVEGIRHREIVDIIKASGNVLRLETLYGTSIRKAELEARLQYLKQTLYEKWGEYRSLMVQEQRLVHGLVVKDPSIYDTLESVRSCLYGAGLLPGSLPFGPLLAVPGRPRGGARRARGDADDAVYHTCFFGDSEPPALPPPPPPARAFGPGPAETPAVGPGPGPRAALSRSASVRCAGPGGGGGGGAPGALWTEAREQALCGPGLRKTKYRSFRRRLLKFIPGLNRSLEEEESQL

SEQ ID NO: 23121 - protein, 148 aa, Homo sapiens
MRGRELPLVLLALVLCLAPRGRAVPLPAGGGTVLTKMYPRGNHWAVGHLMGKKSTGESSSVSERGSLKQQLREYIRWEEAARNLLGLIEAKENRNHQPPQPKALGNQQPSWDSEDSSNFKDVGSKGKVGRLSAPGSQREGRNPQLNQQ

SEQ ID NO: 23122 - protein, 138 aa, Homo sapiens
MRGRELPLVLLALVLCLAPRGRAVPLPAGGGTVLTKMYPRGNHWAVGHLMGKKSTGESSSVSERGSLKQQLREYIRWEEAARNLLGLIEAKENRNHQPPQPKALGNQQPSWDSEDSSNFKDLVDSLLQVLNVKEGTPS

SEQ ID NO: 23123 - protein, 141 aa, Homo sapiens
MRGRELPLVLLALVLCLAPRGRAVPLPAGGGTVLTKMYPRGNHWAVGHLMGKKSTGESSSVSERGSLKQQLREYIRWEEAARNLLGLIEAKENRNHQPPQPKALGNQQPSWDSEDSSNFKDVGSKGKGSQREGRNPQLNQQ

SEQ ID NO: 23124 - protein, 911 aa, Homo sapiens
MAEKAPPGLNRKTSRSTLSLPPEPVDIIRSKTCSRRVKINVGGLNHEVLWRTLDRLPRTRLGKLRDCNTHESLLEVCDDYNLNENEYFFDRHPGAFTSILNFYRTGKLHMMEEMCALSFGQELDYWGIDEIYLESCCQARYHQKKEQMNEELRREAETMREREGEEFDNTCCPDKRKKLWDLLEKPNSSVAAKILAIVSILFIVLSTIALSLNTLPELQETDEFGQLNDNRQLAHVEAVCIAWFTMEYLLRFLSSPNKWKFFKGPLNVIDLLAILPYYVTIFLTESNKSVLQFQNVRRVVQIFRIMRILRILKLARHSTGLQSLGFTLRRSYNELGLLILFLAMGIMIFSSLVFFAEKDEDATKFTSIPASFWWATITMTTVGYGDIYPKTLLGKIVGGLCCIAGVLVIALPIPIIVNNFSEFYKEQKRQEKAIKRREALERAKRNGSIVSMNLKDAFARSMELIDVAVEKAGESANTKDSADDNHLSPSRWKWARKALSETSSNKSFENKYQEVSQKDSHEQLNNTSSSSPQHLSAQKLEMLYNEITKTQPHSHPNPDCQEKPERPSAYEEEIEMEEVVCPQEQLAVAQTEVIVDMKSTSSIDSFTSCATDFTETERSPLPPPSASHLQMKFPTDLPGTEEHQRARGPPFLTLSREKGPAARDGTLEYAPVDITVNLDASGSQCGLHSPLQSDNATDSPKSSLKGSNPLKSRSLKVNFKENRGSAPQTPPSTARPLPVTTADFSLTTPQHISTILLEETPSQGDRPLLGTEVSAPCQGPSKGLSPRFPKQKLFPFSSRERRSFTEIDTGDDEDFLELPGAREEKQVDSSPNCFADKPSDGRDPLREEGSVGSSSPQDTGHNCRQDIYHAVSEVKKDSSQEGCKMENHLFAPEIHSNPGDTGYCPTRETSM

SEQ ID NO: 23125 - protein, 793 aa, Homo sapiens
MASKTKASEALKVVARCRPLSRKEEAAGHEQILTMDVKLGQVTLRNPRAAPGELPKTFTFDAVYDASSKQADLYDETVRPLIDSVLQGFNGTVFAYGQTGTGKTYTMQGTWVEPELRGVIPNAFEHIFTHISRSQNQQYLVRASYLEIYQEEIRDLLSKEPGKRLELKENPETGVYIKDLSSFVTKNVKEIEHVMNLGNQTRAVGSTHMNEVSSRSHAIFIITVECSERGSDGQDHIRVGKLNLVDLAGSERQNKAGPNTAGGAATPSSGGGGGGGGSGGGAGGERPKEASKINLSLSALGNVIAALAGNRSTHIPYRDSKLTRLLQDSLGGNAKTIMVATLGPASHSYDESLSTLRFANRAKNIKNKPQVNEDPKDTLLREFQEEIARLKAQLEKRGMLGKRPRRKSSRRKKAVSAPPGYPEGPVIEAWVAEEEDDNNNNHRPPQPILESALEKNMENYLQEQKERLEEEKAAIQDDRSLVSEEKQKLLEEKEKMLEDLRREQQATELLAAKYKAMESKLLIGGRNIMDHTNEQQKMLELKRQEIAEQKRREREMQQEMMLRDEETMELRGTYTSLQQEVEVKTKKLKKLYAKLQAVKAEIQDQHDEYIRVRQDLEEAQNEQTRELKLKYLIIENFIPPEEKNKIMNRLFLDCEEEQWKFQPLVPAGVSSSQMKKRPTSAVGYKRPISQYARVAMAMGSHPRYRAENIMFLELDVSPPAVFEMEFSHDQEQDPRALHMERLMRLDSFLERPSTSKVRKSRSWCQSPQRPPPSTTHASLASASLRPATVADHE

SEQ ID NO: 23126 - protein, 1096 aa, Homo sapiens
MGSEDHGAQNPSCKIMTFRPTMEEFKDFNKYVAYIESQGAHRAGLAKIIPPKEWKPRQTYDDIDDVVIPAPIQQVVTGQSGLFTQYNIQKKAMTVGEYRRLANSEKYCTPRHQDFDDLERKYWKNLTFVSPIYGADISGSLYDDDVAQWNIGSLRTILDMVERECGTIIEGVNTPYLYFGMWKTTFAWHTEDMDLYSINYLHFGEPKSWYAIPPEHGKRLERLAIGFFPGSSQGCDAFLRHKMTLISPIILKKYGIPFSRITQEAGEFMITFPYGYHAGFNHGFNCAESTNFATLRWIDYGKVATQCTCRKDMVKISMDVFVRILQPERYELWKQGKDLTVLDHTRPTALTSPELSSWSASRASLKAKLLRRSHRKRSQPKKPKPEDPKFPGEGTAGAALLEEAGGSVKEEAGPEVDPEEEEEEPQPLPHGREAEGAEEDGRGKLRPTKAKSERKKKSFGLLPPQLPPPPAHFPSEEALWLPSPLEPPVLGPGPAAMEESPLPAPLNVVPPEVPSEELEAKPRPIIPMLYVVPRPGKAAFNQEHVSCQQAFEHFAQKGPTWKEPVSPMELTGPEDGAASSGAGRMETKARAGEGQAPSTFSKLKMEIKKSRRHPLGRPPTRSPLSVVKQEASSDEEASPFSGEEDVSDPDALRPLLSLQWKNRAASFQAERKFNAAAARTEPYCAICTLFYPYCQALQTEKEAPIASLGKGCPATLPSKSRQKTRPLIPEMCFTSGGENTEPLPANSYIGDDGTSPLIACGKCCLQVHASCYGIRPELVNEGWTCSRCAAHAWTAECCLCNLRGGALQMTTDRRWIHVICAIAVPEARFLNVIERHPVDISAIPEQRWKLKCVYCRKRMKKVSGACIQCSYEHCSTSFHVTCAHAAGVLMEPDDWPYVVSITCLKHKSGGHAVQLLRAVSLGQVVITKNRNGLYYRCRVIGAASQTCYEVNFDDGSYSDNLYPESITSRDCVQLGPPSEGELVELRWTDGNLYKAKFISSVTSHIYQVEFEDGSQLTVKRGDIFTLEEELPKRVRSRLSLSTGAPQEPAFSGEEAKAAKRPRVGTPLATEDSGRSQDYVAFVESLLQVQGRPGAPF

SEQ ID NO: 23127 - protein, 448 aa, Homo sapiens
MGSEDHGAQNPSCKIMTFRPTMEEFKDFNKYVAYIESQGAHRAGLAKIIPPKEWKPRQTYDDIDDVVIPAPIQQVVTGQSGLFTQYNIQKKAMTVGEYRRLANSEKYCTPRHQDFDDLERKYWKNLTFVSPIYGADISGSLYDDDVAQWNIGSLRTILDMVERECGTIIEGVNTPYLYFGMWKTTFAWHTEDMDLYSINYLHFGEPKSWYAIPPEHGKRLERLAIGFFPGSSQGCDAFLRHKMTLISPIILKKYGIPFSRITQEAGEFMITFPYGYHAGFNHGFNCAESTNFATLRWIDYGKVATQCTCRKDMVKISMDVFVRILQPERYELWKQGKDLTVLDHTRPTALTSPELSSWSASRASLKAKLLRRTPPCVSPHRPSQPGIWCPPGGEAKASAASWLLTTRGHGDTEAGPGLGGDPLHAQSEGQASCVSTSRLRMATQDPCR

SEQ ID NO: 23128 - protein, 511 aa, Homo sapiens
MGQGDESERIVINVGGTRHQTYRSTLRTLPGTRLAWLAEPDAHSHFDYDPRADEFFFDRHPGVFAHILNYYRTGKLHCPADVCGPLYEEELAFWGIDETDVEPCCWMTYRQHRDAEEALDSFGGAPLDNSADDADADGPGDSGDGEDELEMTKRLALSDSPDGRPGGFWRRWQPRIWALFEDPYSSRYARYVAFASLFFILVSITTFCLETHERFNPIVNKTEIENVRNGTQVRYYREAETEAFLTYIEGVCVVWFTFEFLMRVIFCPNKVEFIKNSLNIIDFVAILPFYLEVGLSGLSSKAAKDVLGFLRVVRFVRILRIFKLTRHFVGLRVLGHTLRASTNEFLLLIIFLALGVLIFATMIYYAERIGAQPNDPSASEHTHFKNIPIGFWWAVVTMTTLGYGDMYPQTWSGMLVGALCALAGVLTIAMPVPVIVNNFGMYYSLAMAKQKLPKKKKKHIPRPPQLGSPNYCKSVVNSPHHSTQSDTCPLAQEEILEINRAGRKPLRGMSI

SEQ ID NO: 23129 - protein, 585 aa, Homo sapiens
MGQGDESERIVINVGGTRHQTYRSTLRTLPGTRLAWLAEPDAHSHFDYDPRADEFFFDRHPGVFAHILNYYRTGKLHCPADVCGPLYEEELAFWGIDETDVEPCCWMTYRQHRDAEEALDSFGGAPLDNSADDADADGPGDSGDGEDELEMTKRLALSDSPDGRPGGFWRRWQPRIWALFEDPYSSRYARYVAFASLFFILVSITTFCLETHERFNPIVNKTEIENVRNGTQVRYYREAETEAFLTYIEGVCVVWFTFEFLMRVIFCPNKVEFIKNSLNIIDFVAILPFYLEVGLSGLSSKAAKDVLGFLRVVRFVRILRIFKLTRHFVGLRVLGHTLRASTNEFLLLIIFLALGVLIFATMIYYAERIGAQPNDPSASEHTHFKNIPIGFWWAVVTMTTLGYGDMYPQTWSGMLVGALCALAGVLTIAMPVPVIVNNFGMYYSLAMAKQKLPKKKKKHIPRPPQLGSPNYCKSVVNSPHHSTQSDTCPLAQEEILEINRADSKLNGEVAKAALANEDCPHIDQALTPDEGLPFTRSGTRERYGPCFLLSTGEYACPPGGGMRKDLCKESPVIAKYMPTEAVRVT

SEQ ID NO: 23130 - protein, 351 aa, Homo sapiens
MGNAATAKKGSEVESVKEFLAKAKEDFLKKWENPTQNNAGLEDFERKKTLGTGSFGRVMLVKHKATEQYYAMKILDKQKVVKLKQIEHTLNEKRILQAVNFPFLVRLEYAFKDNSNLYMVMEYVPGGEMFSHLRRIGRFSEPHARFYAAQIVLTFEYLHSLDLIYRDLKPENLLIDHQGYIQVTDFGFAKRVKGRTWTLCGTPEYLAPEIILSKGYNKAVDWWALGVLIYEMAAGYPPFFADQPIQIYEKIVSGKVRFPSHFSSDLKDLLRNLLQVDLTKRFGNLKNGVSDIKTHKWFATTDWIAIYQRKVEAPFIPKFRGSGDTSNFDDYEEEDIRVSITEKCAKEFGEF

SEQ ID NO: 23131 - protein, 398 aa, Homo sapiens
MAAYREPPCNQYTGTTTALQKLEGFASRLFHRHSKGTAHDQKTALENDSLHFSEHTALWDRSMKEFLAKAKEDFLKKWENPTQNNAGLEDFERKKTLGTGSFGRVMLVKHKATEQYYAMKILDKQKVVKLKQIEHTLNEKRILQAVNFPFLVRLEYAFKDNSNLYMVMEYVPGGEMFSHLRRIGRFSEPHARFYAAQIVLTFEYLHSLDLIYRDLKPENLLIDHQGYIQVTDFGFAKRVKGRTWTLCGTPEYLAPEIILSKGYNKAVDWWALGVLIYEMAAGYPPFFADQPIQIYEKIVSGKVRFPSHFSSDLKDLLRNLLQVDLTKRFGNLKNGVSDIKTHKWFATTDWIAIYQRKVEAPFIPKFRGSGDTSNFDDYEEEDIRVSITEKCAKEFGEF

SEQ ID NO: 23132 - protein, 339 aa, Homo sapiens
MGLLKEFLAKAKEDFLKKWENPTQNNAGLEDFERKKTLGTGSFGRVMLVKHKATEQYYAMKILDKQKVVKLKQIEHTLNEKRILQAVNFPFLVRLEYAFKDNSNLYMVMEYVPGGEMFSHLRRIGRFSEPHARFYAAQIVLTFEYLHSLDLIYRDLKPENLLIDHQGYIQVTDFGFAKRVKGRTWTLCGTPEYLAPEIILSKGYNKAVDWWALGVLIYEMAAGYPPFFADQPIQIYEKIVSGKVRFPSHFSSDLKDLLRNLLQVDLTKRFGNLKNGVSDIKTHKWFATTDWIAIYQRKVEAPFIPKFRGSGDTSNFDDYEEEDIRVSITEKCAKEFGEF

SEQ ID NO: 23133 - protein, 338 aa, Homo sapiens
MSVKEFLAKAKEDFLKKWENPTQNNAGLEDFERKKTLGTGSFGRVMLVKHKATEQYYAMKILDKQKVVKLKQIEHTLNEKRILQAVNFPFLVRLEYAFKDNSNLYMVMEYVPGGEMFSHLRRIGRFSEPHARFYAAQIVLTFEYLHSLDLIYRDLKPENLLIDHQGYIQVTDFGFAKRVKGRTWTLCGTPEYLAPEIILSKGYNKAVDWWALGVLIYEMAAGYPPFFADQPIQIYEKIVSGKVRFPSHFSSDLKDLLRNLLQVDLTKRFGNLKNGVSDIKTHKWFATTDWIAIYQRKVEAPFIPKFRGSGDTSNFDDYEEEDIRVSITEKCAKEFGEF

SEQ ID NO: 23134 - protein, 354 aa, Homo sapiens
MSARKSSDASACSSSEISVKEFLAKAKEDFLKKWENPTQNNAGLEDFERKKTLGTGSFGRVMLVKHKATEQYYAMKILDKQKVVKLKQIEHTLNEKRILQAVNFPFLVRLEYAFKDNSNLYMVMEYVPGGEMFSHLRRIGRFSEPHARFYAAQIVLTFEYLHSLDLIYRDLKPENLLIDHQGYIQVTDFGFAKRVKGRTWTLCGTPEYLAPEIILSKGYNKAVDWWALGVLIYEMAAGYPPFFADQPIQIYEKIVSGKVRFPSHFSSDLKDLLRNLLQVDLTKRFGNLKNGVSDIKTHKWFATTDWIAIYQRKVEAPFIPKFRGSGDTSNFDDYEEEDIRVSITEKCAKEFGEF

SEQ ID NO: 23135 - protein, 357 aa, Homo sapiens
MSARKSSDASACSSSEISDSFVKEFLAKAKEDFLKKWENPTQNNAGLEDFERKKTLGTGSFGRVMLVKHKATEQYYAMKILDKQKVVKLKQIEHTLNEKRILQAVNFPFLVRLEYAFKDNSNLYMVMEYVPGGEMFSHLRRIGRFSEPHARFYAAQIVLTFEYLHSLDLIYRDLKPENLLIDHQGYIQVTDFGFAKRVKGRTWTLCGTPEYLAPEIILSKGYNKAVDWWALGVLIYEMAAGYPPFFADQPIQIYEKIVSGKVRFPSHFSSDLKDLLRNLLQVDLTKRFGNLKNGVSDIKTHKWFATTDWIAIYQRKVEAPFIPKFRGSGDTSNFDDYEEEDIRVSITEKCAKEFGEF

SEQ ID NO: 23136 - protein, 355 aa, Homo sapiens
MGLSRKSSDASACSSSEISVKEFLAKAKEDFLKKWENPTQNNAGLEDFERKKTLGTGSFGRVMLVKHKATEQYYAMKILDKQKVVKLKQIEHTLNEKRILQAVNFPFLVRLEYAFKDNSNLYMVMEYVPGGEMFSHLRRIGRFSEPHARFYAAQIVLTFEYLHSLDLIYRDLKPENLLIDHQGYIQVTDFGFAKRVKGRTWTLCGTPEYLAPEIILSKGYNKAVDWWALGVLIYEMAAGYPPFFADQPIQIYEKIVSGKVRFPSHFSSDLKDLLRNLLQVDLTKRFGNLKNGVSDIKTHKWFATTDWIAIYQRKVEAPFIPKFRGSGDTSNFDDYEEEDIRVSITEKCAKEFGEF

SEQ ID NO: 23137 - protein, 257 aa, Homo sapiens
MGNAATAKKGSEVESVKEFLAKAKEDFLKKWENPTQNNAGLEDFERKKTLGTGSFGRVMLVKHKATEQYYAMKILDKQKVVKLKQIEHTLNEKRILQAVNFPFLVRLEYAFKDNSNLYMVMEYVPGGEMFSHLRRIGRFSEPHARFYAAQIVLTFEYLHSLDLIYRDLKPENLLIDHQGYIQVTDFGFAKRVKGRTWTLCGTPEYLAPEIILSKGYNKAVDWWALGVLIYEMAAGYPPFFADQPIQIYEKIVSGKNF

SEQ ID NO: 23138 - protein, 358 aa, Homo sapiens
MGLSRKSSDASACSSSEISDSFVKEFLAKAKEDFLKKWENPTQNNAGLEDFERKKTLGTGSFGRVMLVKHKATEQYYAMKILDKQKVVKLKQIEHTLNEKRILQAVNFPFLVRLEYAFKDNSNLYMVMEYVPGGEMFSHLRRIGRFSEPHARFYAAQIVLTFEYLHSLDLIYRDLKPENLLIDHQGYIQVTDFGFAKRVKGRTWTLCGTPEYLAPEIILSKGYNKAVDWWALGVLIYEMAAGYPPFFADQPIQIYEKIVSGKVRFPSHFSSDLKDLLRNLLQVDLTKRFGNLKNGVSDIKTHKWFATTDWIAIYQRKVEAPFIPKFRGSGDTSNFDDYEEEDIRVSITEKCAKEFGEF

SEQ ID NO: 23139 - protein, 321 aa, Homo sapiens
MSARKSSDASACSSSEISVKEFLAKAKEDFLKKWENPTQNNAGLEDFERKKTLGTGSFGRVMLVKHKATEQYYAMKILDKQKDNSNLYMVMEYVPGGEMFSHLRRIGRFSEPHARFYAAQIVLTFEYLHSLDLIYRDLKPENLLIDHQGYIQVTDFGFAKRVKGRTWTLCGTPEYLAPEIILSKGYNKAVDWWALGVLIYEMAAGYPPFFADQPIQIYEKIVSGKVRFPSHFSSDLKDLLRNLLQVDLTKRFGNLKNGVSDIKTHKWFATTDWIAIYQRKVEAPFIPKFRGSGDTSNFDDYEEEDIRVSITEKCAKEFGEF

SEQ ID NO: 23140 - protein, 1056 aa, Homo sapiens
MEVAEVESPLNPSCKIMTFRPSMEEFREFNKYLAYMESKGAHRAGLAKVIPPKEWKPRQCYDDIDNLLIPAPIQQMVTGQSGLFTQYNIQKKAMTVKEFRQLANSGKYCTPRYLDYEDLERKYWKNLTFVAPIYGADINGSIYDEGVDEWNIARLNTVLDVVEEECGISIEGVNTPYLYFGMWKTTFAWHTEDMDLYSINYLHFGEPKSWYAIPPEHGKRLERLAQGFFPSSSQGCDAFLRHKMTLISPSVLKKYGIPFDKITQEAGEFMITFPYGYHAGFNHGFNCAESTNFATVRWIDYGKVAKLCTCRKDMVKISMDIFVRKFQPDRYQLWKQGKDIYTIDHTKPTPASTPEVKAWLQRRRKVRKASRSFQCARSTSKRPKADEEEEVSDEVDGAEVPNPDSVTDDLKVSEKSEAAVKLRNTEASSEEESSASRMQVEQNLSDHIKLSGNSCLSTSVTEDIKTEDDKAYAYRSVPSISSEADDSIPLSSGYEKPEKSDPSELSWPKSPESCSSVAESNGVLTEGEESDVESHGNGLEPGEIPAVPSGERNSFKVPSIAEGENKTSKSWRHPLSRPPARSPMTLVKQQAPSDEELPEVLSIEEEVEETESWAKPLIHLWQTKSPNFAAEQEYNATVARMKPHCAICTLLMPYHKPDSSNEENDARWETKLDEVVTSEGKTKPLIPEMCFIYSEENIEYSPPNAFLEEDGTSLLISCAKCCVRVHASCYGIPSHEICDGWLCARCKRNAWTAECCLCNLRGGALKQTKNNKWAHVMCAVAVPEVRFTNVPERTQIDVGRIPLQRLKLKCIFCRHRVKRVSGACIQCSYGRCPASFHVTCAHAAGVLMEPDDWPYVVNITCFRHKVNPNVKSKACEKVISVGQTVITKHRNTRYYSCRVMAVTSQTFYEVMFDDGSFSRDTFPEDIVSRDCLKLGPPAEGEVVQVKWPDGKLYGAKYFGSNIAHMYQVEFEDGSQIAMKREDIYTLDEELPKRVKARFSTASDMRFEDTFYGADIIQGERKRQRVLSSRFKNEYVADPVYRTFLKSSFQKKCQKRQ

SEQ ID NO: 23141 - protein, 1047 aa, Homo sapiens
MEVAEVESPLNPSCKIMTFRPSMEEFREFNKYLAYMESKGAHRAGLAKVIPPKEWKPRQCYDDIDNLLIPAPIQQMVTGQSGLFTQYNIQKKAMTVKEFRQLANSGKYCTPRYLDYEDLERKYWKNLTFVAPIYGADINGSIYDEGVDEWNIARLNTVLDVVEEECGISIEGVNTPYLYFGMWKTTFAWHTEDMDLYSINYLHFGEPKSWYAIPPEHGKRLERLAQGFFPSSSQGCDAFLRHKMTLISPSVLKKYGIPFDKITQEAGEFMITFPYGYHAGFNHGFNCAESTNFATVRWIDYGKVAKLCTCRKDMVKISMDIFVRKFQPDRYQLWKQGKDIYTIDHTKPTPASTPEVKAWLQRRRKVRKASRSFQCARSTSKRPKADEEEEVSDEVDGAEVPNPDSVTDDLKVSEKSEAAVKLRNTEASSEEESSASRMQVEQNLSDHIKLSGNSCLSTSVTEDIKTEDDKAYAYRSVPSISSEADDSIPLSSGYEKPEKSDPSELSWPKSPESCSSVAESNGVLTEGEESDVESHGNGLEPGEIPAVPSGERNSFKVPSIAEGENKTSKSWRHPLSRPPARSPMTLVKQQAPSDEELPEVLSIEEEVEETESWAKPLIHLWQTKSPNFAAEQEYNATVARMKPHCAICTLLMPYHKPDSSNEENDARWETKLDEVVTSEGKTKPLIPEMCFIYSEENIEYSPPNAFLEEDGTSLLISCAKCCVRVHASCYGIPSHEICDGWLCARCKRNAWTAECCLCNLRGGALKQTKNNKWAHVMCAVAVPEVRFTNVPERTQIDVGRIPLQRLKLKCIFCRHRVKRVSGACIQCSYGRCPASFHVTCAHAAGVLMEPDDWPYVVNITCFRHKVNPNVKSKACEKVISVGQTVITKHRNTRYYSCRVMAVTSQTFYEVMFDDGSFSRDTFPEDIVSRDCLKLGPPAEGEVVQVKWPDGKLYGAKYFGSNIAHMYQVEFEDGSQIAMKREDIYTLDEELPKRVKARFVSAGRCHLGTCQVNSLSSPHVSQAQQETYLGFWINSKKSQCNIFLSGTY

SEQ ID NO: 23142 - protein, 813 aa, Homo sapiens
MEVAEVESPLNPSCKIMTFRPSMEEFREFNKYLAYMESKGAHRAGLAKVIPPKEWKPRQCYDDIDNLLIPAPIQQMVTGQSGLFTQYNIQKKAMTVKEFRQLANSGKYCTPRYLDYEDLERKYWKNLTFVAPIYGADINGSIYDEGVDEWNIARLNTVLDVVEEECGISIEGVNTPYLYFGMWKTTFAWHTEDMDLYSINYLHFGEPKSWYAIPPEHGKRLERLAQGFFPSSSQGCDAFLRHKMTLISPSVLKKYGIPFDKITQEAGEFMITFPYGYHAGFNHGFNCAESTNFATVRWIDYGKVAKLCTCRKDMVKISMDIFVRKFQPDRYQLWKQGKDIYTIDHTKPTPASTPEVKAWLQRRRKVRKASRSFQCARSTSKRPKADEEEEVSDEVDGAEVPNPDSVTDDLKVSEKSEAAVKLRNTEASSEEESSASRMQVEQNLSDHIKLSGNSCLSTSVTEDIKTEDDKAYAYRSVPSISSEADDSIPLSSGYEKPEKSDPSELSWPKSPESCSSVAESNGVLTEGEESDVESHGNGLEPGEIPAVPSGERNSFKVPSIAEGENKTSKSWRHPLSRPPARSPMTLVKQQAPSDEELPEVLSIEEEVEETESWAKPLIHLWQTKSPNFAAEQEYNATVARMKPHCAICTLLMPYHKPDSSNEENDARWETKLDEVVTSEGKTKPLIPEMCFIYSEENIEYSPPNAFLEEDGTSLLISCAKCCVRVHASCYGIPSHEICDGWLCARCKRNAWTAECCLCNLRGGALKQTKNNKWAHVMCAVAVPEVRFTNVPERTQIDVGRIPLQRLKLGRLGI

SEQ ID NO: 23143 - protein, 835 aa, Homo sapiens
MKHYGLPWKRTEEAAADTALTIMEVAEVESPLNPSCKIMTFRPSMEEFREFNKYLAYMESKGAHRAGLAKVIPPKEWKPRQCYDDIDNLLIPAPIQQMVTGQSGLFTQYNIQKKAMTVKEFRQLANSGKYCTPRYLDYEDLERKYWKNLTFVAPIYGADINGSIYDEGVDEWNIARLNTVLDVVEEECGISIEGVNTPYLYFGMWKTTFAWHTEDMDLYSINYLHFGEPKSWYAIPPEHGKRLERLAQGFFPSSSQGCDAFLRHKMTLISPSVLKKYGIPFDKITQEAGEFMITFPYGYHAGFNHGFNCAESTNFATVRWIDYGKVAKLCTCRKDMVKISMDIFVRKFQPDRYQLWKQGKDIYTIDHTKPTPASTPEVKAWLQRRRKVRKASRSFQCARSTSKRPKADEEEEVSDEVDGAEVPNPDSVTDDLKVSEKSEAAVKLRNTEASSEEESSASRMQVEQNLSDHIKLSGNSCLSTSVTEDIKTEDDKAYAYRSVPSISSEADDSIPLSSGYEKPEKSDPSELSWPKSPESCSSVAESNGVLTEGEESDVESHGNGLEPGEIPAVPSGERNSFKVPSIAEGENKTSKSWRHPLSRPPARSPMTLVKQQAPSDEELPEVLSIEEEVEETESWAKPLIHLWQTKSPNFAAEQEYNATVARMKPHCAICTLLMPYHKPDSSNEENDARWETKLDEVVTSEGKTKPLIPEMCFIYSEENIEYSPPNAFLEEDGTSLLISCAKCCVRVHASCYGIPSHEICDGWLCARCKRNAWTAECCLCNLRGGALKQTKNNKWAHVMCAVAVPEVRFTNVPERTQIDVGRIPLQRLKLGRLGI

SEQ ID NO: 23144 - protein, 398 aa, Homo sapiens
MPRPGHPRPASGPPRLGPWERPTELCLETYDKPPQPPPSRRTRRPDPKDPGHHGPESITFISGSAEPALESPTCCLLWRPWVWEWCRAAFCFRRCRDCLQRCGACVRGCSPCLSTEDSTEGTAEANWAKEHNGVPPSPDRAPPSRRDGQRLKSTMGSSFSYPDVKLKGIPVYPYPRATSPAPDADSCCKEPLADPPPMRHSLPSTFASSPRGSEEYYSFHESDLDLPEMGSGSMSSREIDVLIFKKLTELFSVHQIDELAKCTSDTVFLEKTSKISDLISSITQDYHLDEQDAEGRLVRGIIRISTRKSRARPQTSEGRSTRAAAPTAAAPDSGHETMVGSGLSQDELTVQISQETTADAIARKLRPYGAPGYPASHDSSFQGTDTDSSGAPLLQVYC

SEQ ID NO: 23145 - protein, 1232 aa, Homo sapiens
MKEEVKGIPVRVALRCRPLVPKEISEGCQMCLSFVPGEPQVVVGTDKSFTYDFVFDPSTEQEEVFNTAVAPLIKGVFKGYNATVLAYGQTGSGKTYSMGGAYTAEQENEPTVGVIPRVIQLLFKEIDKKSDFEFTLKVSYLEIYNEEILDLLCPSREKAQINIREDPKEGIKIVGLTEKTVLVALDTVSCLEQGNNSRTVASTAMNSQSSRSHAIFTISLEQRKKSDKNSSFRSKLHLVDLAGSERQKKTKAEGDRLKEGININRGLLCLGNVISALGDDKKGGFVPYRDSKLTRLLQDSLGGNSHTLMIACVSPADSNLEETLNTLRYADRARKIKNKPIVNIDPQTAELNHLKQQVQQLQVLLLQAHGGTLPGSITVEPSENLQSLMEKNQSLVEENEKLSRGLSEAAGQTAQMLERIILTEQANEKMNAKLEELRQHAACKLDLQKLVETLEDQELKENVEIICNLQQLITQLSDETVACMAAAIDTAVEQEAQVETSPETSRSSDAFTTQHALRQAQMSKELVELNKALALKEALARKMTQNDSQLQPIQYQYQDNIKELELEVINLQKEKEELVLELQTAKKDANQAKLSERRRKRLQELEGQIADLKKKLNEQSKLLKLKESTERTVSKLNQEIRMMKNQRVQLMRQMKEDAEKFRQWKQKKDKEVIQLKERDRKRQYELLKLERNFQKQSNVLRRKTEEAAAANKRLKDALQKQREVADKRKETQSRGMEGTAARVKNWLGNEIEVMVSTEEAKRHLNDLLEDRKILAQDVAQLKEKKESGENPPPKLRRRTFSLTEVRGQVSESEDSITKQIESLETEMEFRSAQIADLQQKLLDAESEDRPKQRWENIATILEAKCALKYLIGELVSSKIQVSKLESSLKQSKTSCADMQKMLFEERNHFAEIETELQAELVRMEQQHQEKVLYLLSQLQQSQMAEKQLEESVSEKEQQLLSTLKCQDEELEKMREVCEQNQQLLRENEIIKQKLTLLQVASRQKHLPKDTLLSPDSSFEYVPPKPKPSRVKEKFLEQSMDIEDLKYCSEHSVNEHEDGDGDDDEGDDEEWKPTKLVKVSRKNIQGCSCKGWCGNKQCGCRKQKSDCGVDCCCDPTKCRNRQQGKDSLGTVERTQDSEGSFKLEDPTEVTPGLSFFNPVCATPNSKILKEMCDVEQVLSKKTPPAPSPFDLPELKHVATEYQENKAPGKKKKRALASNTSFFSGCSPIEEEAH

SEQ ID NO: 23146 - protein, 1127 aa, Homo sapiens
MKEEVKGIPVRVALRCRPLVPKEISEGCQMCLSFVPGEPQVVVGTDKSFTYDFVFDPSTEQEEVFNTAVAPLIKGVFKGYNATVLAYGQTGSGKTYSMGGAYTAEQENEPTVGVIPRVIQLLFKEIDKKSDFEFTLKVSYLEIYNEEILDLLCPSREKAQINIREDPKEGIKIVGLTEKTVLVALDTVSCLEQGNNSRTVASTAMNSQSSRSHAIFTISLEQRKKSDKNSSFRSKLHLVDLAGSERQKKTKAEGDRLKEGININRGLLCLGNVISALGDDKKGGFVPYRDSKLTRLLQDSLGGNSHTLMIACVSPADSNLEETLNTLRYADRARKIKNKPIVNIDPQTAELNHLKQQVQQLQVLLLQAHGGTLPGSITVEPSENLQSLMEKNQSLVEENEKLSRGLSEAAGQTAQMLERIILTEQANEKMNAKLEELRQHAACKLDLQKLVETLEDQELKENVEIICNLQQLITQLSDETVACMAAAIDTAVEQEAQVETSPETSRSSDAFTTQHALRQAQMSKELVELNKALALKEALARKMTQNDSQLQPIQYQYQDNIKELELEVINLQKEKEELVLELQTAKKDANQAKLSERRRKRLQELEGQIADLKKKLNEQSKLLKLKESTERTVSKLNQEIRMMKNQRVQLMRQMKEDAEKFRQWKQKKDKEVIQLKERDRKRQYELLKLERNFQKQSNVLRRKTEEAAAANKRLKDALQKQREVADKRKETQSRGMEGTAARVKNWLGNEIEVMVSTEEAKRHLNDLLEDRKILAQDVAQLKEKKESGENPPPKLRRRTFSLTEVRGQVSESEDSITKQIESLETEMEFRSAQIADLQQKLLDAESEDRPKQRWENIATILEAKCALKYLIGELVSSKIQVSKLESSLKQSKTSCADMQKMLFEERNHFAEIETELQAELVRMEQQHQEKVLYLLSQLQQSQMAEKQLEESVSEKEQQLLSTLKCQDEELEKMREVCEQNQQLLRENEIIKQKLTLLQVASRQKHLPKDTLLSPDSSFEYVPPKPKPSRVKEKFLEQSMDIEDLKYCSEHSVNEHEDGDGDDDEGDDEEWKPTKLVKVSRKNIQGVLLLTPVISALWEAEARGLLEARSSRPAWATWRDPVSTKPKN

SEQ ID NO: 23147 - protein, 415 aa, Homo sapiens [sequence omitted]

SEQ ID NO: 23148 - protein, 409 aa, Homo sapiens
MELRVGNRYRLGRKIGSGSFGDIYLGTDIAAGEEVAIKLECVKTKHPQLHIESKIYKMMQGGVGIPTIRWCGAEGDYNVMVMELLGPSLEDLFNFCSRKFSLKTVLLLADQMISRIEYIHSKNFIHRDVKPDNFLMGLGKKGNLVYIIDFGLAKKYRDARTHQHIPYRENKNLTGTARYASINTHLGIEQSRRDDLESLGYVLMYFNLGSLPWQGLKAATKRQKYERISEKKMSTPIEVLCKGYPSEFATYLNFCRSLRFDDKPDYSYLRQLFRNLFHRQGFSYDYVFDWNMLKFGASRAADDAERERRDREERLRHSRNPATRGLPSTASGRLRGTQEVAPPTPLTPTSHTANTSPRPVSGMERERKVSMRLHRGAPVNISSSDLTGRQDTSRMSTSQNSIPFEHHGK

SEQ ID NO: 23149 - protein, 1234 aa, Homo sapiens
MKEEVKGIPVRVALRCRPLVPKEISEGCQMCLSFVPGETQVVVGTDKSFTYDFVFDPCTEQEEVFNKAVAPLIKGIFKGYNATVLAYGQTGSGKTYSMGGAYTAEQENEPTVGIIPRVIQLLFKEIDKKSDFEFTLKVSYLEIYNEEILDLLCPSREKAQINIREDPKEGIKIVGLTEKTVLVALDTVSCLEQGNNSRTVASTAMNSQSSRSHAIFTISIEQRKKSDKNCSFRSKLHLVDLAGSERQKKTKAEGDRLKEGININRGLLCLGNVISALGDDKKGSFVPYRDSKLTRLLQDSLGGNSHTLMIACVSPADSNLEETLSTLRYADRARKIKNKPIVNIDPHTAELNHLKQQVQQLQVLLLQAHGGTLPGSINAEPSENLQSLMEKNQSLVEENEKLSRCLSKAAGQTAQMLERIILTEQVNEKLNAKLEELRQHVACKLDLQKLVETLEDQELKENVEIICNLQQLITQLSDETVACTAAAIDTAVEEEAQVETSPETSRSSDAFTTQHALHQAQMSKEVVELNNALALKEALVRKMTQNDNQLQPIQFQYQDNIKNLELEVINLQKEKEELVRELQTAKKNVNQAKLSEHRHKLLQELEGQIADLKKKLNEQSKLLKLKESTERTVSKLNQEIWMMKNQRVQLMRQMKEDAEKFRQWKQKKDKEVIQLKERDRKRQYELLKLERNFQKQSSVLRRKTEEAAAANKRLKDALQKQREVTDKRKETQSHGKEGIAARVRNWLGNEIEVMVSTEEAKRHLNDLLEDRKILAQDVVQLKEKKESRENPPPKLRKCTFSLSEVHGQVLESEDCITKQIESLETEMELRSAQIADLQQKLLDAESEDRPKQCWENIATILEAKCALKYLIGELVSSKIHVTKLENSLRQSKASCADMQKMLFEEQNHFSEIETELQAELVRMEQQHQEKVLYLVSQLQESQMAEKQLEKSASEKEQQLVSTLQCQDEELEKMREVCEQNQQLLQENEIIKQKLILLQVASRQKHLPNDTLLSPDSSFEYIPPKPKPSRVKEKFLEQSMDIEDLKYCSEHSVNEHEDGDGDGDSDEGDDEEWKPTKLVKVSRKNIQGCSCKGWCGNKQCGCRKQKSDCGVDCSCDPTKCRNRQQGKDSLGTVEQTQDSEGSFKLEDPTEVTPGLSFFNPVCATPNSKILKEMCDMEQVLSKKTAPAPSPFDLPESKHGATEYQQNKPPGKKKKRALASNTSFFSGCSPIEEEAH

SEQ ID NO: 23150 - protein, 523 aa, Homo sapiens
METMKSKANCAQNPNCNIMIFHPTKEEFNDFDKYIAYMESQGAHRAGLAKIIPPKEWKARETYDNISEILIATPLQQVASGRAGVFTQYHKKKKAMTVGEYRHLANSKKYQTPPHQNFEDLERKYWKNRIYNSPIYGADISGSLFDENTKQWNLGHLGTIQDLLEKECGVVIEGVNTPYLYFGMWKTTFAWHTEDMDLYSINYLHLGEPKTWYVVPPEHGQRLERLARELFPGSSRGCGAFLRHKVALISPTVLKENGIPFNRITQEAGEFMVTFPYGYHAGFNHGFNCAEAINFATPRWIDYGKMASQCSCGEARVTFSMDAFVRILQPERYDLWKRGQDRAVVDHMEPRVPASQELSTQKEVQLPRRAALGLRQLPSHWARHSPWPMAARSGTRCHTLVCSSLPRRSAVSGTATQPRAAAVHSSKKPSSTPSSTPGPSAQIIHPSNGRRGRGRPPQKLRAQELTLQTPAKRPLLAGTTCTASGPEPEPLPEDGALMDKPVPLSPGLQHPVKASGCSWAPVP

SEQ ID NO: 23151 - protein, 638 aa, Homo sapiens
MGKIENNERVILNVGGTRHETYRSTLKTLPGTRLALLASSEPPGDCLTTAGDKLQPSPPPLSPPPRAPPLSPGPGGCFEGGAGNCSSRGGRASDHPGGGREFFFDRHPGVFAYVLNYYRTGKLHCPADVCGPLFEEELAFWGIDETDVEPCCWMTYRQHRDAEEALDIFETPDLIGGDPGDDEDLAAKRLGIEDAAGLGGPDGKSGRWRRLQPRMWALFEDPYSSRAARFIAFASLFFILVSITTFCLETHEAFNIVKNKTEPVINGTSVVLQYEIETDPALTYVEGVCVVWFTFEFLVRIVFSPNKLEFIKNLLNIIDFVAILPFYLEVGLSGLSSKAAKDVLGFLRVVRFVRILRIFKLTRHFVGLRVLGHTLRASTNEFLLLIIFLALGVLIFATMIYYAERVGAQPNDPSASEHTQFKNIPIGFWWAVVTMTTLGYGDMYPQTWSGMLVGALCALAGVLTIAMPVPVIVNNFGMYYSLAMAKQKLPRKRKKHIPPAPQASSPTFCKTELNMACNSTQSDTCLGKDNRLLEHNRSVLSGDDSTGSEPPLSPPERLPIRRSSTRDKNRRGETCFLLTTGDYTCASDGGIRKGYEKSRSLNNIAGLAGNALRLSPVTSPYNSPCPLRRSRSPIPSIL

SEQ ID NO: 23152 - protein, 629 aa, Homo sapiens
MGKIENNERVILNVGGTRHETYRSTLKTLPGTRLALLASSEPPGDCLTTAGDKLQPSPPPLSPPPRAPPLSPGPGGCFEGGAGNCSSRGGRASDHPGGGREFFFDRHPGVFAYVLNYYRTGKLHCPADVCGPLFEEELAFWGIDETDVEPCCWMTYRQHRDAEEALDIFETPDLIGGDPGDDEDLAAKRLGIEDAAGLGGPDGKSGRWRRLQPRMWALFEDPYSSRAARFIAFASLFFILVSITTFCLETHEAFNIVKNKTEPVINGTSVVLQYEIETDPALTYVEGVCVVWFTFEFLVRIVFSPNKLEFIKNLLNIIDFVAILPFYLEVGLSGLSSKAAKDVLGFLRVVRFVRILRIFKLTRHFVGLRVLGHTLRASTNEFLLLIIFLALGVLIFATMIYYAERVGAQPNDPSASEHTQFKNIPIGFWWAVVTMTTLGYGDMYPQTWSGMLVGALCALAGVLTIAMPVPVIVNNFGMYYSLAMAKQKLPRKRKKHIPPAPQASSPTFCKTELNMACNSTQSDTCLGKDNRLLEHNRSVLSGDDSTGSEPPLSPPERLPIRRSSTRDKNRRGETCFLLTTGDYTCASDGGIRKVLYRIYHGLLTAEKGTVEFSHTKDYTGNRLLLLNVP

SEQ ID NO: 23153 - protein, 613 aa, Homo sapiens
MGKIENNERVILNVGGTRHETYRSTLKTLPGTRLALLASSEPPGDCLTTAGDKLQPSPPPLSPPPRAPPLSPGPGGCFEGGAGNCSSRGGRASDHPGGGREFFFDRHPGVFAYVLNYYRTGKLHCPADVCGPLFEEELAFWGIDETDVEPCCWMTYRQHRDAEEALDIFETPDLIGGDPGDDEDLAAKRLGIEDAAGLGGPDGKSGRWRRLQPRMWALFEDPYSSRAARFIAFASLFFILVSITTFCLETHEAFNIVKNKTEPVINGTSVVLQYEIETDPALTYVEGVCVVWFTFEFLVRIVFSPNKLEFIKNLLNIIDFVAILPFYLEVGLSGLSSKAAKDVLGFLRVVRFVRILRIFKLTRHFVGLRVLGHTLRASTNEFLLLIIFLALGVLIFATMIYYAERVGAQPNDPSASEHTQFKNIPIGFWWAVVTMTTLGYGDMYPQTWSGMLVGALCALAGVLTIAMPVPVIVNNFGMYYSLAMAKQKLPRKRKKHIPPAPQASSPTFCKTELNMACNSTQSDTCLGKDNRLLEHNRSVLSGDDSTGSEPPLSPPERLPIRRSSTRDKNRRGETCFLLTTGDYTCASDGGIRKDNCKEVVITGYTQAEARSLT

SEQ ID NO: 23154 - protein, 558 aa, Homo sapiens
MGKIENNERVILNVGGTRHETYRSTLKTLPGTRLALLASSEPPGDCLTTAGDKLQPSPPPLSPPPRAPPLSPGPGGCFEGGAGNCSSRGGRASDHPGGGREFFFDRHPGVFAYVLNYYRTGKLHCPADVCGPLFEEELAFWGIDETDVEPCCWMTYRQHRDAEEALDIFETPDLIGGDPGDDEDLAAKRLGIEDAAGLGGPDGKSGRWRRLQPRMWALFEDPYSSRAARFIAFASLFFILVSITTFCLETHEAFNIVKNKTEPVINGTSVVLQYEIETDPALTYVEGVCVVWFTFEFLVRIVFSPNKLEFIKNLLNIIDFVAILPFYLEVGLSGLSSKAAKDVLGFLRVVRFVRILRIFKLTRHFVGLRVLGHTLRASTNEFLLLIIFLALGVLIFATMIYYAERVGAQPNDPSASEHTQFKNIPIGFWWAVVTMTTLGYGDMYPQTWSGMLVGALCALAGVLTIAMPVPVIVNNFGMYYSLAMAKQKLPRKRKKHIPPAPQASSPTFCKTELNMACNSTQSDTCLGKDNRLLEHNRSDNCKEVVITGYTQAEARSLT

SEQ ID NO: 23155 - protein, 583 aa, Homo sapiens
MGKIENNERVILNVGGTRHETYRSTLKTLPGTRLALLASSEPPGDCLTTAGDKLQPSPPPLSPPPRAPPLSPGPGGCFEGGAGNCSSRGGRASDHPGGGREFFFDRHPGVFAYVLNYYRTGKLHCPADVCGPLFEEELAFWGIDETDVEPCCWMTYRQHRDAEEALDIFETPDLIGGDPGDDEDLAAKRLGIEDAAGLGGPDGKSGRWRRLQPRMWALFEDPYSSRAARFIAFASLFFILVSITTFCLETHEAFNIVKNKTEPVINGTSVVLQYEIETDPALTYVEGVCVVWFTFEFLVRIVFSPNKLEFIKNLLNIIDFVAILPFYLEVGLSGLSSKAAKDVLGFLRVVRFVRILRIFKLTRHFVGLRVLGHTLRASTNEFLLLIIFLALGVLIFATMIYYAERVGAQPNDPSASEHTQFKNIPIGFWWAVVTMTTLGYGDMYPQTWSGMLVGALCALAGVLTIAMPVPVIVNNFGMYYSLAMAKQKLPRKRKKHIPPAPQASSPTFCKTELNMACNSTQSDTCLGKDNRLLEHNRSGYEKSRSLNNIAGLAGNALRLSPVTSPYNSPCPLRRSRSPIPSIL

SEQ ID NO: 23156 - protein, 618 aa, Homo sapiens
MGKIENNERVILNVGGTRHETYRSTLKTLPGTRLALLASSEPPGDCLTTAGDKLQPSPPPLSPPPRAPPLSPGPGGCFEGGAGNCSSRGGRASDHPGGGREFFFDRHPGVFAYVLNYYRTGKLHCPADVCGPLFEEELAFWGIDETDVEPCCWMTYRQHRDAEEALDIFETPDLIGGDPGDDEDLAAKRLGIEDAAGLGGPDGKSGRWRRLQPRMWALFEDPYSSRAARFIAFASLFFILVSITTFCLETHEAFNIVKNKTEPVINGTSVVLQYEIETDPALTYVEGVCVVWFTFEFLVRIVFSPNKLEFIKNLLNIIDFVAILPFYLEVGLSGLSSKAAKDVLGFLRVVRFVRILRIFKLTRHFVGLRVLGHTLRASTNEFLLLIIFLALGVLIFATMIYYAERVGAQPNDPSASEHTQFKNIPIGFWWAVVTMTTLGYGDMYPQTWSGMLVGALCALAGVLTIAMPVPVIVNNFGMYYSLAMAKQKLPRKRKKHIPPAPQASSPTFCKTELNMACNSTQSDTCLGKDNRLLEHNRSVLSGDDSTGSEPPLSPPERLPIRRSSTRDKNRRGETCFLLTTGDYTCASDGGIRKGIRNGHSILHHLDNGTKCHYLRIIF

SEQ ID NO: 23157 - protein, 351 aa, Homo sapiens
MGNAPAKKDTEQEESVNEFLAKARGDFLYRWGNPAQNTASSDQFERLRTLGMGSFGRVMLVRHQETGGHYAMKILNKQKVVKMKQVEHILNEKRILQAIDFPFLVKLQFSFKDNSYLYLVMEYVPGGEMFSRLQRVGRFSEPHACFYAAQVVLAVQYLHSLDLIHRDLKPENLLIDQQGYLQVTDFGFAKRVKGRTWTLCGTPEYLAPEIILSKGYNKAVDWWALGVLIYEMAVGFPPFYADQPIQIYEKIVSGRVRFPSKLSSDLKHLLRSLLQVDLTKRFGNLRNGVGDIKNHKWFATTSWIAIYEKKVEAPFIPKYTGPGDASNFDDYEEEELRISINEKCAKEFSEF

SEQ ID NO: 23158 - protein, 506 aa, Homo sapiens
MKSVHSSPQNTSHTIMTFYPTMEEFADFNTYVAYMESQGAHQAGLAKVIPPKEWKARQMYDDIEDILIATPLQQVTSGQGGVFTQYHKKKKAMRVGQYRRLANSKKYQTPPHQNFADLEQRYWKSHPGNPPIYGADISGSLFEESTKQWNLGHLGTILDLLEQECGVVIEGVNTPYLYFGMWKTTFAWHTEDMDLYSINYLHFGEPKTWYVVPPEHGQHLERLARELFPDISRGCEAFLRHKVALISPTVLKENGIPFNCMTQEAGEFMVTFPYGYHAGFNHGFNCAEAINFATPRWIDYGKMASQCSCGESTVTFSMDPFVRIVQPESYELWKHRQDLAIVEHTEPRVAESQELSNWRDDIVLRRAALGLRLLPNLTAQCPTQPVSSGHCYNPKGCGTDAVPGSAFQSSAYHTQTQSLTLGMSARVLLPSTGSWGSGRGRGRGQGQGRGCSRGRGHGCCTRELGTEEPTVQPASKRRLLMGTRSRAQGHRPQLPLANDLMTNLSL

SEQ ID NO: 23159 - protein, 1032 aa, Homo sapiens
MAETNNECSIKVLCRFRPLNQAEILRGDKFIPIFQGDDSVVIGGKPYVFDRVFPPNTTQEQVYHACAMQIVKDVLAGYNGTIFAYGQTSSGKTHTMEGKLHDPQLMGIIPRIARDIFNHIYSMDENLEFHIKVSYFEIYLDKIRDLLDVTKTNLSVHEDKNRVPFVKGCTERFVSSPEEILDVIDEGKSNRHVAVTNMNEHSSRSHSIFLINIKQENMETEQKLSGKLYLVDLAGSEKVSKTGAEGAVLDEAKNINKSLSALGNVISALAEGTKSYVPYRDSKMTRILQDSLGGNCRTTMFICCSPSSYNDAETKSTLMFGQRAKTIKNTASVNLELTAEQWKKKYEKEKEKTKAQKETIAKLEAELSRWRNGENVPETERLAGEEAALGAELCEETPVNDNSSIVVRIAPEERQKYEEEIRRLYKQLDDKDDEINQQSQLIEKLKQQMLDQEELLVSTRGDNEKVQRELSHLQSENDAAKDEVKEVLQALEELAVNYDQKSQEVEEKSQQNQLLVDELSQKVATMLSLESELQRLQEVSGHQRKRIAEVLNGLMKDLSEFSVIVGNGEIKLPVEISGAIEEEFTVARLYISKIKSEVKSVVKRCRQLENLQVECHRKMEVTGRELSSCQLLISQHEAKIRSLTEYMQSVELKKRHLEESYDSLSDELAKLQAQETVHEVALKDKEPDTQDADEVKKALELQMESHREAHHRQLARLRDEINEKQKTIDELKDLNQKLQLELEKLQADYEKLKSEEHEKSTKLQELTFLYERHEQSKQDLKGLEETVARELQTLHNLRKLFVQDVTTRVKKSAEMEPEDSGGIHSQKQKISFLENNLEQLTKVHKQLVRDNADLRCELPKLEKRLRATAERVKALEGALKEAKEGAMKDKRRYQQEVDRIKEAVRYKSSGKRGHSAQIAKPVRPGHYPASSPTNPYGTRSPECISYTNSLFQNYQNLYLQATPSSTSDMYFANSCTSSGATSSGGPLASYQKANMDNGNATDINDNRSDLPCGYEAEDQAKLFPLHQETAAS

SEQ ID NO: 23160 - protein, 757 aa, Homo sapiens
MLSSVCVSSFRGRQGASKQQPAPPPQPPESPPPPPLPPQQQQPAQPGPAASPAGPPAPRGPGDRRAEPCPGLPAAAMGRHGGGGGDSGKIVINVGGVRHETYRSTLRTLPGTRLAGLTEPEAAARFDYDPGADEFFFDRHPGVFAYVLNYYRTGKLHCPADVCGPLFEEELGFWGIDETDVEACCWMTYRQHRDAEEALDSFEAPDPAGAANAANAAGAHDGGLDDEAGAGGGGLDGAGGELKRLCFQDAGGGAGGPPGGAGGAGGTWWRRWQPRVWALFEDPYSSRAARYVAFASLFFILISITTFCLETHEGFIHISNKTVTQASPIPGAPPENITNVEVETEPFLTYVEGVCVVWFTFEFLMRITFCPDKVEFLKSSLNIIDCVAILPFYLEVGLSGLSSKAAKDVLGFLRVVRFVRILRIFKLTRHFVGLRVLGHTLRASTNEFLLLIIFLALGVLIFATMIYYAERIGADPDDILGSNHTYFKNIPIGFWWAVVTMTTLGYGDMYPKTWSGMLVGALCALAGVLTIAMPVPVIVNNFGMYYSLAMAKQKLPKKKNKHIPRPPQPGSPNYCKPDPPPPPPPHPHHGSGGISPPPPITPPSMGVTVAGAYPAGPHTHPGLLRGGAGGLGIMGLPPLPAPGEPCPLAQEEVIEINRADPRPNGDPAAAALAHEDCPAIDQPAMSPEDKSPITPGSRGRYSRDRACFLLTDYAPSPDGSIRKATGAPPLPPQDWRKPGPPSFLPDLNANAAAWISP

SEQ ID NO: 23161 - protein, 1690 aa, Homo sapiens
MAGVGPGGYAAEFVPPPECPVFEPSWEEFTDPLSFIGRIRPLAEKTGICKIRPPKDWQPPFACEVKSFRFTPRVQRLNELEAMTRVRLDFLDQLAKFWELQGSTLKIPVVERKILDLYALSKIVASKGGFEMVTKEKKWSKVGSRLGYLPGKGTGSLLKSHYERILYPYELFQSGVSLMGVQMPNLDLKEKVEPEVLSTDTQTSPEPGTRMNILPKRTRRVKTQSESGDVSRNTELKKLQIFGAGPKVVGLAMGTKDKEDEVTRRRKVTNRSDAFNMQMRQRKGTLSVNFVDLYVCMFCGRGNNEDKLLLCDGCDDSYHTFCLIPPLPDVPKGDWRCPKCVAEECSKPREAFGFEQAVREYTLQSFGEMADNFKSDYFNMPVHMVPTELVEKEFWRLVSSIEEDVIVEYGADISSKDFGSGFPVKDGRRKILPEEEEYALSGWNLNNMPVLEQSVLAHINVDISGMKVPWLYVGMCFSSFCWHIEDHWSYSINYLHWGEPKTWYGVPSHAAEQLEEVMRELAPELFESQPDLLHQLVTIMNPNVLMEHGVPVYRTNQCAGEFVVTFPRAYHSGFNQGYNFAEAVNFCTADWLPIGRQCVNHYRRLRRHCVFSHEELIFKMAADPECLDVGLAAMVCKELTLMTEEETRLRESVVQMGVLMSEEEVFELVPDDERQCSACRTTCFLSALTCSCNPERLVCLYHPTDLCPCPMQKKCLRYRYPLEDLPSLLYGVKVRAQSYDTWVSRVTEALSANFNHKKDLIELRVMLEDAEDRKYPENDLFRKLRDAVKEAETCASVAQLLLSKKQKHRQSPDSGRTRTKLTVEELKAFVQQLFSLPCVISQARQVKNLLDDVEEFHERAQEAMMDETPDSSKLQMLIDMGSSLYVELPELPRLKQELQQARWLDEVRLTLSDPQQVTLDVMKKLIDSGVGLAPHHAVEKAMAELQELLTVSERWEEKAKVCLQARPRHSVASLESIVNEAKNIPAFLPNVLSLKEALQKAREWTAKVEAIQSGSNYAYLEQLESLSAKGRPIPVRLEALPQVESQVAAARAWRERTGRTFLKKNSSHTLLQVLSPRTDIGVYGSGKNRRKKVKELIEKEKEKDLDLEPLSDLEEGLEETRDTAMVVAVFKEREQKEIEAMHSLRAANLAKMTMVDRIEEVKFCICRKTASGFMLQCELCKDWFHNSCVPLPKSSSQKKGSSWQAKEVKFLCPLCMRSRRPRLETILSLLVSLQKLPVRLPEGEALQCLTERAMSWQDRARQALATDELSSALAKLSVLSQRMVEQAAREKTEKIISAELQKAAANPDLQGHLPSFQQSAFNRVVSSVSSSPRQTMDYDDEETDSDEDIRETYGYDMKDTASVKSSSSLEPNLFCDEEIPIKSEEVVTHMWTAPSFCAEHAYSSASKSCSQGSSTPRKQPRKSPLVPRSLEPPVLELSPGAKAQLEELMMVGDLLEVSLDETQHIWRILQATHPPSEDRFLHIMEDDSMEEKPLKVKGKDSSEKKRKRKLEKVEQLFGEGKQKSKELKKMDKPRKKKLKLGADKSKELNKLAKKLAKEEERKKKKEKAAAAKVELVKESTEKKREKKVLDIPSKYDWSGAEESDDENAVCAAQNCQRPCKDKVDWVQCDGGCDEWFHQVCVGVSPEMAENEDYICINCAKKQGPVSPGPAPPPSFIMSYKLPMEDLKETS

SEQ ID NO: 23162 - protein, 1636 aa, Homo sapiens
MAGVGPGGYAAEFVPPPECPVFEPSWEEFTDPLSFIGRIRPLAEKTGICKIRPPKDWQPPFACEVKSFRFTPRVQRLNELEAMTRVRLDFLDQLAKFWELQGSTLKIPVVERKILDLYALSKIVASKGGFEMVTKEKKWSKVGSRLGYLPGKGTGSLLKSHYERILYPYELFQSGVSLMGVQMPNLDLKEKVEPEVLSTDTQTSPEPGTRMNILPKRTRRVKTQSESGDVSRNTELKKLQIFGAGPKVVGLAMGTKDKEDEVTRRRKVTNRSDAFNMQMRQRKGTLSVNFVDLYVCMFCGRGNNEDKLLLCDGCDDSYHTFCLIPPLPDVPKGDWRCPKCVAEECSKPREAFGFEQAVREYTLQSFGEMADNFKSDYFNMPVHMVPTELVEKEFWRLVSSIEEDVIVEYGADISSKDFGSGFPVKDGRRKILPEEEEYALSGWNLNNMPVLEQSVLAHINVDISGMKVPWLYVGMCFSSFCWHIEDHWSYSINYLHWGEPKTWYGVPSHAAEQLEEVMRELAPELFESQPDLLHQLVTIMNPNVLMEHGVPVYRTNQCAGEFVVTFPRAYHSGFNQGYNFAEAVNFCTADWLPIGRQCVNHYRRLRRHCVFSHEELIFKMAADPECLDVGLAAMVCKELTLMTEEETRLRESVVQMGVLMSEEEVFELVPDDERQCSACRTTCFLSALTCSCNPERLVCLYHPTDLCPCPMQKKCLRYRYPLEDLPSLLYGVKVRAQSYDTWVSRVTEALSANFNHKKDLIELRVMLEDAEDRKYPENDLFRKLRDAVKEAETCASVAQLLLSKKQKHRQSPDSGRTRTKLTVEELKAFVQQLFSLPCVISQARQVKNLLDDVEEFHERAQEAMMDETPDSSKLQMLIDMGSSLYVELPELPRLKQELQQARWLDEVRLTLSDPQQVTLDVMKKLIDSGVGLAPHHAVEKAMAELQELLTVSERWEEKAKVCLQARPRHSVASLESIVNEAKNIPAFLPNVLSLKEALQKAREWTAKVEAIQSGSNYAYLEQLESLSAKGRPIPVRLEALPQVESQVAAARAWRERTGRTFLKKNSSHTLLQVLSPRTDIGVYGSGKNRRKKVKELIEKEKEKDLDLEPLSDLEEGLEETRDTAMVVAVFKEREQKEIEAMHSLRAANLAKMTMVDRIEEVKFCICRKTASGFMLQCELCKDWFHNSCVPLPKSSSQKKGSSWQAKEVKFLCPLCMRSRRPRLETILSLLVSLQKLPVRLPEGEALQCLTERAMSWQDRARQALATDELSSALAKLSVLSQRMVEQAAREKTEKIISAELQKAAANPDLQGHLPSFQQSAFNRVVSSVSSSPRQTMDYDDEETDSDEDIRETYGYDMKDTASVKSSSSLEPNLFCDEEIPIKSEEVVTHMWTAPSFCAEHAYSSASKSCSQGSSTPRKQPRKSPLVPRSLEPPVLELSPGAKAQLEELMMVGDLLEVSLDETQHIWRILQATHPPSEDRFLHIMEDDSMEEKPLKVKGKDSSEKKRKRKLEKVEQLFGEGKQKSKELKKMDKPRKKKLKLGADKSKELNKLAKKLAKEEERKKKKEKAAAAKVELVKESTEKKREKKVLDIPSKYDWSGAEESDDENAVCAAQNCQRPCKDKGVVFVTEEERDKKY

SEQ ID NO: 23163 - protein, 416 aa, Homo sapiens
MELRVGNKYRLGRKIGSGSFGDIYLGANIASGEEVAIKLECVKTKHPQLHIESKFYKMMQGGVGIPSIKWCGAEGDYNVMVMELLGPSLEDLFNFCSRKFSLKTVLLLADQMISRIEYIHSKNFIHRDVKPDNFLMGLGKKGNLVYIIDFGLAKKYRDARTHQHIPYRENKNLTGTARYASINTHLGIEQSRRDDLESLGYVLMYFNLGSLPWQGLKAATKRQKYERISEKKMSTPIEVLCKGYPSEFSTYLNFCRSLRFDDKPDYSYLRQLFRNLFHRQGFSYDYVFDWNMLKFGAARNPEDVDRERREHEREERMGQLRGSATRALPPGPPTGATANRLRSAAEPVASTPASRIQPAGNTSPRAISRVDRERKVSMRLHRGAPANVSSSDLTGRQEVSRIPASQTSVPFDHLGK

SEQ ID NO: 23164 - protein, 411 aa, Homo sapiens
MRRRRAGGRTMVERASKFVLVVAGSVCFMLILYQYAGPGLSLGAPGGRAPPDDLDLFPTPDPHYEKKYYFPVRELERSLRFDMKGDDVIVFLHIQKTGGTTFGRHLVQNVRLEVPCDCRPGQKKCTCYRPNRRETWLFSRFSTGWSCGLHADWTELTNCVPGVLDRRDSAALRTPRKFYYITLLRDPVSRYLSEWRHVQRGATWKTSLHMCDGRTPTPEELPPCYEGTDWSGCTLQEFMDCPYNLANNRQVRMLADLSLVGCYNLSFIPEGKRAQLLLESAKKNLRGMAFFGLTEFQRKTQYLFERTFNLKFIRPFMQYNSTRAGGVEVDEDTIRRIEELNDLDMQLYDYAKDLFQQRYQYKRQLERREQRLRSREERLLHRAKEALPREDADEPGRVPTEDYMSHIIEKW

SEQ ID NO: 23165 - protein, 249 aa, Homo sapiens
MFSWCLWPVVGESRKFYYITLLRDPVSRYLSEWRHVQRGATWKTSLHMCDGRTPTPEELPPCYEGTDWSGCTLQEFMDCPYNLANNRQVRMLADLSLVGCYNLSFIPEGKRAQLLLESAKKNLRGMAFFGLTEFQRKTQYLFERTFNLKFIRPFMQYNSTRAGGVEVDEDTIRRIEELNDLDMQLYDYAKDLFQQRYQYKRQLERREQRLRSREERLLHRAKEALPREDADEPGRVPTEDYMSHIIEKW

SEQ ID NO: 23166 - protein, 605 aa, Homo sapiens
MALPACAVREFEPPRQPERGAPVRTTCPRRHSRVEAELAASRPGSVAASVRAGPPRGVSHGFHTRPLLDKPRKASSSLAGAACAPLFALLSRGRRRRMHVLRRRWDLGSLCRALLTRGLAALGHSLKHVLGAIFSKIFGPMASVGNMDEKSNKLLLALVMLFLFAVIVLQYVCPGTECQLLRLQAFSSPVPDPYRSEDESSARFVPRYNFTRGDLLRKVDFDIKGDDLIVFLHIQKTGGTTFGRHLVRNIQLEQPCECRVGQKKCTCHRPGKRETWLFSRFSTGWSCGLHADWTELTSCVPSVVDGKRDARLRPSRNFHYITILRDPVSRYLSEWRHVQRGATWKASLHVCDGRPPTSEELPSCYTGDDWSGCPLKEFMDCPYNLANNRQVRMLSDLTLVGCYNLSVMPEKQRNKVLLESAKSNLKHMAFFGLTEFQRKTQYLFEKTFNMNFISPFTQYNTTRASSVEINEEIQKRIEGLNFLDMELYSYAKDLFLQRYQFMRQKEHQEARRKRQEQRKFLKGRLLQTHFQSQGQGQSQNPNQNQSQNPNPNANQNLTQNLMQNLTQSLSQKENRESPKQNSGKEQNDNTSNGTNDYIGSVEKWR

SEQ ID NO: 23167 - protein, 459 aa, Homo sapiens
MDEKSNKLLLALVMLFLFAVIVLQYVCPGTECQLLRLQAFSSPVPDPYRSEDESSARFVPRYNFTRGDLLRKVDFDIKGDDLIVFLHIQKTGGTTFGRHLVRNIQLEQPCECRVGQKKCTCHRPGKRETWLFSRFSTGWSCGLHADWTELTSCVPSVVDGKRDARLRPSRNFHYITILRDPVSRYLSEWRHVQRGATWKASLHVCDGRPPTSEELPSCYTGDDWSGCPLKEFMDCPYNLANNRQVRMLSDLTLVGCYNLSVMPEKQRNKVLLESAKSNLKHMAFFGLTEFQRKTQYLFEKTFNMNFISPFTQYNTTRASSVEINEEIQKRIEGLNFLDMELYSYAKDLFLQRYQFMRQKEHQEARRKRQEQRKFLKGRLLQTHFQSQGQGQSQNPNQNQSQNPNPNANQNLTQNLMQNLTQSLSQKENRESPKQNSGKEQNDNTSNGTNDYIGSVEKWR

SEQ ID NO: 23168 - protein, 499 aa, Homo sapiens
MDEKSNKLLLALVMLFLFAVIVLQYVCPGTECQLLRLQAFSSPVPDPYRSEDESSARFVPRYNFTRGDLLRKVDFDIKGDDLIVFLHIQKTGGTTFGRHLVRNIQLEQPCECRVGQKKCTCHRPGKRETWLFSRFSTGWSCGLHADWTELTSCVPSVVDGKRDARLRPSRWRIFQILDAASKDKRGSPNTNAGANSPSSTKTRNTSKSGKNFHYITILRDPVSRYLSEWRHVQRGATWKASLHVCDGRPPTSEELPSCYTGDDWSGCPLKEFMDCPYNLANNRQVRMLSDLTLVGCYNLSVMPEKQRNKVLLESAKSNLKHMAFFGLTEFQRKTQYLFEKTFNMNFISPFTQYNTTRASSVEINEEIQKRIEGLNFLDMELYSYAKDLFLQRYQFMRQKEHQEARRKRQEQRKFLKGRLLQTHFQSQGQGQSQNPNQNQSQNPNPNANQNLTQNLMQNLTQSLSQKENRESPKQNSGKEQNDNTSNGTNDYIGSVEKWR

SEQ ID NO: 23169 - protein, 645 aa, Homo sapiens
MALPACAVREFEPPRQPERGAPVRTTCPRRHSRVEAELAASRPGSVAASVRAGPPRGVSHGFHTRPLLDKPRKASSSLAGAACAPLFALLSRGRRRRMHVLRRRWDLGSLCRALLTRGLAALGHSLKHVLGAIFSKIFGPMASVGNMDEKSNKLLLALVMLFLFAVIVLQYVCPGTECQLLRLQAFSSPVPDPYRSEDESSARFVPRYNFTRGDLLRKVDFDIKGDDLIVFLHIQKTGGTTFGRHLVRNIQLEQPCECRVGQKKCTCHRPGKRETWLFSRFSTGWSCGLHADWTELTSCVPSVVDGKRDARLRPSRWRIFQILDAASKDKRGSPNTNAGANSPSSTKTRNTSKSGKNFHYITILRDPVSRYLSEWRHVQRGATWKASLHVCDGRPPTSEELPSCYTGDDWSGCPLKEFMDCPYNLANNRQVRMLSDLTLVGCYNLSVMPEKQRNKVLLESAKSNLKHMAFFGLTEFQRKTQYLFEKTFNMNFISPFTQYNTTRASSVEINEEIQKRIEGLNFLDMELYSYAKDLFLQRYQFMRQKEHQEARRKRQEQRKFLKGRLLQTHFQSQGQGQSQNPNQNQSQNPNPNANQNLTQNLMQNLTQSLSQKENRESPKQNSGKEQNDNTSNGTNDYIGSVEKWR

SEQ ID NO: 23170 - protein, 471 aa, Homo sapiens
MDERFNKWLLTPVLTLLFVVIMYQYVSPSCTSSCTNFGEQPRAGEAGPPAVPGPARRAQAPPEEWERRPQLPPPPRGPPEGPRGAAAPEEEDEEPGDPREGEEEEEEDEPDPEAPENGSLPRFVPRFNFSLKDLTRFVDFNIKGRDVIVFLHIQKTGGTTFGRHLVKNIRLEQPCSCKAGQKKCTCHRPGKKETWLFSRFSTGWSCGLHADWTELTNCVPAIMEKKDCPRNHSHTRNFYYITMLRDPVSRYLSEWKHVQRGATWKTSLHMCDGRSPTPDELPTCYPGDDWSGVSLREFMDCTYNLANNRQVRMLADLSLVGCYNLTFMNESERNTILLQSAKNNLKNMAFFGLTEFQRKTQFLFERTFNLKFISPFTQFNITRASNVEINEGARQRIEDLNFLDMQLYEYAKDLFQQRYHHTKQLEHQRDRQKRREERRLQREHRDHQWPKEDGAAEGTVTEDYNSQVVRW

SEQ ID NO: 23171 - protein, 957 aa, Homo sapiens
MADPAECSIKVMCRFRPLNEAEILRGDKFIPKFKGDETVVIGQGKPYVFDRVLPPNTTQEQVYNACAKQIVKDVLEGYNGTIFAYGQTSSGKTHTMEGKLHDPQLMGIIPRIAHDIFDHIYSMDENLEFHIKVSYFEIYLDKIRDLLDVSKTNLAVHEDKNRVPYVKGCTERFVSSPEEVMDVIDEGKANRHVAVTNMNEHSSRSHSIFLINIKQENVETEKKLSGKLYLVDLAGSEKVSKTGAEGAVLDEAKNINKSLSALGNVISALAEGTKTHVPYRDSKMTRILQDSLGGNCRTTIVICCSPSVFNEAETKSTLMFGQRAKTIKNTVSVNLELTAEEWKKKYEKEKEKNKTLKNVIQHLEMELNRWRNGEAVPEDEQISAKDQKNLEPCDNTPIIDNIAPVVAGISTEEKEKYDEEISSLYRQLDDKDDEINQQSQLAEKLKQQMLDQDELLASTRRDYEKIQEELTRLQIENEAAKDEVKEVLQALEELAVNYDQKSQEVEDKTRANEQLTDELAQKTTTLTTTQRELSQLQELSNHQKKRATEILNLLLKDLGEIGGIIGTNDVKTLADVNGVIEEEFTMARLYISKMKSEVKSLVNRSKQLESAQMDSNRKMNASERELAACQLLISQHEAKIKSLTDYMQNMEQKRRQLEESQDSLSEELAKLRAQEKMHEVSFQDKEKEHLTRLQDAEEMKKALEQQMESHREAHQKQLSRLRDEIEEKQKIIDEIRDLNQKLQLEQEKLSSDYNKLKIEDQEREMKLEKLLLLNDKREQAREDLKGLEETVSRELQTLHNLRKLFVQDLTTRVKKSVELDNDDGGGSAAQKQKISFLENNLEQLTKVHKQLVRDNADLRCELPKLEKRLRATAERVKALESALKEAKENAMRDRKRYQQEVDRIKEAVRAKNMARRAHSAQIAKPIRPGHYPASSPTAVHAIRGGGGSSSNSTHYQK

SEQ ID NO: 23172 - protein, 725 aa, Homo sapiens
MATYIHVSKTGAEGAVLDEAKNINKSLSALGNVISALAEGTKTHVPYRDSKMTRILQDSLGGNCRTTIVICCSPSVFNEAETKSTLMFGQRAKTIKNTVSVNLELTAEEWKKKYEKEKEKNKTLKNVIQHLEMELNRWRNGEAVPEDEQISAKDQKNLEPCDNTPIIDNIAPVVAGISTEEKEKYDEEISSLYRQLDDKDDEINQQSQLAEKLKQQMLDQDELLASTRRDYEKIQEELTRLQIENEAAKDEVKEVLQALEELAVNYDQKSQEVEDKTRANEQLTDELAQKTTTLTTTQRELSQLQELSNHQKKRATEILNLLLKDLGEIGGIIGTNDVKTLADVNGVIEEEFTMARLYISKMKSEVKSLVNRSKQLESAQMDSNRKMNASERELAACQLLISQHEAKIKSLTDYMQNMEQKRRQLEESQDSLSEELAKLRAQEKMHEVSFQDKEKEHLTRLQDAEEMKKALEQQMESHREAHQKQLSRLRDEIEEKQKIIDEIRDLNQKLQLEQEKLSSDYNKLKIEDQEREMKLEKLLLLNDKREQAREDLKGLEETVSRELQTLHNLRKLFVQDLTTRVKKSVELDNDDGGGSAAQKQKISFLENNLEQLTKVHKQLVRDNADLRCELPKLEKRLRATAERVKALESALKEAKENAMRDRKRYQQEVDRIKEAVRAKNMARRAHSAQIAKPIRPGHYPASSPTAVHAIRGGGGSSSNSTHYQK

SEQ ID NO: 23173 - protein, 396 aa, Homo sapiens
MLSEVLLVSAPGKVILHGEHAVVHGKVALAVSLNLRTFLRLQPHSNGKVDLSLPNIGIKRAWDVARLQSLDTSFLEQGDVTTPTSEQVEKLKEVAGLPDDCAVTERLAVLAFLYLYLSICRKQRALPSLDIVVWSELPPGAGLGSSAAYSVCLAAALLTVCEEIPNPLKDGDCVNRWTKEDLELINKWAFQGERMIHGNPSGVDNAVSTWGGALRYHQGKISSLKRSPALQILLTNTKVPRNTRALVAGVRNRLLKFPEIVAPLLTSIDAISLECERVLGEMGEAPAPEQYLVLEELIDMNQHHLNALGVGHASLDQLCQVTRARGLHSKLTGAGGGGCGITLLKPGLEQPEVEATKQALTSCGFDCLETSIGAPGVSIHSATSLDSRVQQALDGL

SEQ ID NO: 23174 - protein, 640 aa, Homo sapiens
MESVVRRCPFLSRVPQAFLQKAGKSLLFYAQNCPKMMEVGAKPAPRALSTAAVHYQQIKETPPASEKDKTAKAKVQQTPDGSQQSPDGTQLPSGHPLPATSQGTASKCPFLAAQMNQRGSSVFCKASLELQEDVQEMNAVRKEVAETSAGPSVVSVKTDGGDPSGLLKNFQDIMQKQRPERVSHLLQDNLPKSVSTFQYDRFFEKKIDEKKNDHTYRVFKTVNRRAHIFPMADDYSDSLITKKQVSVWCSNDYLGMSRHPRVCGAVMDTLKQHGAGAGGTRNISGTSKFHVDLERELADLHGKDAALLFSSCFVANDSTLFTLAKMMPGCEIYSDSGNHASMIQGIRNSRVPKYIFRHNDVSHLRELLQRSDPSVPKIVAFETVHSMDGAVCPLEELCDVAHEFGAITFVDEVHAVGLYGARGGGIGDRDGVMPKMDIISGTLGKAFGCVGGYIASTSSLIDTVRSYAAGFIFTTSLPPMLLAGALESVRILKSAEGRVLRRQHQRNVKLMRQMLMDAGLPVVHCPSHIIPVRVADAAKNTEVCDELMSRHNIYVQAINYPTVPRGEELLRIAPTPHHTPQMMNYFLENLLVTWKQVGLELKPHSSAECNFCRRPLHFEVMSEREKSYFSGLSKLVSAQA

SEQ ID NO: 23175 - protein, 118 aa, Homo sapiens
MESVVRRCPFLSRVPQAFLQKAGKSLLFYAQNCPKMMEVGAKPAPRALSTAAVHYQQIKETPPASEKDKTAKAKVQQTPDGSQQSPDGTQLPSGFRLDTPCLPQARALQANALSWQHR

SEQ ID NO: 23176 - protein, 782 aa, Homo sapiens
MARARAGALLALWVLGAAAHPQCLDFRPPFRPTQPLRLCAQYSDFGCCDEGRDAELTRRFWALASRVDAAEWAACAGYARDLLCQECSPYAAHLYDAEDPFTPLRTVPGLCQDYCLDMWHKCRGLFRHLSTDQELWALEGNLARFCRYLSLDDTDYCFPYLLVNKNLNSNLGHVVADAKGCLQLCLEEVANGLRNPVAMVHARDGTHRFFVAEQVGLVWAYLPDRSRLGKPFLNISRVVLTSPWEGDERGFLGIAFHPSFQHNRRLYVYYSVGIRSSEWIRISEFRVSEDDENAVDHSSERIILEVKEPASNHNGGQLLFGDDGYLYIFTGDGGMAGDPFGTFGNAQNKSALLGKVLRIDVDRKERGLPYGIPPDNPFVGDPAAQPEVYALGVRNMWRCSFDRGDPSSGTGRGRLFCGDVGQNKFEEVDVVERGGNYGWRAREGFECYDRSLCANTSLNDLLPIFAYPHTVGKSVTGGYVYRGCEYPNLNGLYIFGDFMSGRLMSLQENPGTGQWQYSEICMGHGQTCEFPGLINNYYPYIISFGEDEAGELYFMSTGEPSATAPRGVVYKIIDASRRAPPGKCQIQPAQVKIRSRLIPFVPKEKFIPKTRSTPRPTARAPTRAPRRGRPTAAPPAPTPRPARPTQQPGSRRGGGRRRGRLNSASRAFRDGEVRLVRPAGLSSGSGRVEVFVGGRWGTVCDDSWNISGAAVVCRQLGFAYAVRAVKRAEFGQGGSLPILLDDVRCAGWERNLLECQHNGVGTHNCEHDEDAGVVCSHQNPDL

SEQ ID NO: 23177 - protein, 608 aa, Homo sapiens
MARARAGALLALWVLGAAAHPQCLDFRPPFRPTQPLRLCAQYSDFGCCDEGRDAELTRRFWALASRVDAAEWAACAGYARDLLCQECSPYAAHLYDAEDPFTPLRTVPGLCQDYCLDMWHKCRGLFRHLSTDQELWALEGNLARFCRYLSLDDTDYCFPYLLVNKNLNSNLGHVVADAKGCLQLCLEEVANGLRNPVAMVHARDGTHRFFVAEQVGLVWAYLPDRSRLGKPFLNISRVVLTSPWEGDERGFLGIAFHPSFQHNRRLYVYYSVGIRSSEWIRISEFRVSEDDENAVDHSSERIILEVKEPASNHNGGQLLFGDDGYLYIFTGDGGMAGDPFGTFGNAQNKSALLGKVLRIDVDRKERGLPYGIPPDNPFVGDPAAQPEVYALGVRNMWRCSFDRGDPSSGTGRGRLFCGDVGQNKFEEVDVVERGGNYGWRAREGFECYDRSLCANTSLNDLLPIFAYPHTVGKSVTGGYVYRGCEYPNLNGLYIFGDFMSGRLMSLQENPGTGQWQYSEICMGHGQTCEFPGLINNYYPYIISFGEDEAGELYFMSTGEPSATAPRGVVYKIIDASSCKARSAMPGYVPAPSVCSSLTSQPFILQWWK

SEQ ID NO: 23178 - protein, 1435 aa, Homo sapiens
MLKSNDCLFSLENLFFEKPDEVENHPDNEKSLDWFLPPAPLISEIPDTQELEEELESHKLLGQEKRPKMLTSNLKITNEDTNYISLTQKFQFAFPSDKYEQDDLNLEGVGNNDLSHIAGKLTYASQKYKNHIGTEIAPEKSVPDDTKLVNFAEDKGESTSVFRKRLFKISDNIHGSAYSNDNELDSHIGSVKIVQTEMNKGKSRNYSNSKQKFQYSANVFTANNAFSASEIGEGMFKAPSFSVAFQPHDIQEVTENGLGSLKAVTEIPAKFRSIFKEFPYFNYIQSKAFDDLLYTDRNFVICAPTGSGKTVVFELAITRLLMEVPLPWLNIKIVYMAPIKALCSQRFDDWKEKFGPIGLNCKELTGDTVMDDLFEIQHAHIIMTTPEKWDSMTRKWRDNSLVQLVRLFLIDEVHIVKDENRGPTLEVVVSRMKTVQSVSQTLKNTSTAIPMRFVAVSATIPNAEDIAEWLSDGERPAVCLKMDESHRPVKLQKVVLGFPCSSNQTEFKFDLTLNYKIASVIQMYSDQKPTLVFCATRKGVQQAASVLVKDAKFIMTVEQKQRLQKYAYSVRDSKLRDILKDGAAYHHAGMELSDRKVVEGAFTVGDLPVLFTTSTLAMGVNLPAHLVVIKSTMHYAGGLFEEYSETDILQMIGRAGRPQFDTTATAVIMTRLSTRDKYIQMLACRDTVESSLHRHLIEHLNAEIVLHTITDVNIAVEWIRSTLLYIRALKNPSHYGFASGLNKDGIEAKLQELCLKNLNDLSSLDLIKMDEGVNFKPTEAGRLMAWYYITFETVKKFYTISGKETLSDLVTLIAGCKEFLDIQLRINEKKTLNTLNKDPNRITIRFPMEGRIKTREMKVNCLIQAQLGCIPIQDFALTQDTAKIFRHGSRITRWLSDFVAAQEKKFAVLLNSLILAKCFRCKLWENSLHVSKQLEKIGITLSNAIVNAGLTSFKKIEETDARELELILNRHPPFGTQIKETVMYLPKYELKVEQITRYSDTTAEILVTVILRNFEQLQTKRTASDSHYVTLIIGDADNQVVYLHKITDSVLLKAGSWAKKIAVKRALKSEDLSINLISSEFVGLDIQQKLTVFYLEPKRFGNQITMQRKSETQISHSKHSDISTIAGPNKGTTASKKPGNRECNHLCKSKHTCGHDCCKIGVAQKSEIKESTISSYLSDLRNRNAVSSVPPVKRLKIQMNKSQSVDLKEFGFTPKPSLPSISRSEYLNISELPIMEQWDQPEIYGKVRQEPSEYQDKEVLNVNFELGNEVWDDFDDENLEVTSFSTDTEKTKISGFGNTLSSSTRGSKLPLQESKSKFQREMSNSFVSSHEMSDISLSNSAMPKFSASSMTKLPQQAGNAVIVHFQERKPQNLSPEIEKQCFTFSEKNPNSSNYKKVDFFIRNSECKKEVDFSMYHPDDEADEMKSLLGIFDGIF

SEQ ID NO: 23179 - protein, 551 aa, Homo sapiens
MDEGVNFKPTEAGRLMAWYYITFETVKKFYTISGKETLSDLVTLIAGCKEFLDIQLRINEKKTLNTLNKDPNRITIRFPMEGRIKTREMKVNCLIQAQLGCIPIQDFALTQDTAKIFRHGSRITRWLSDFVAAQEKKFAVLLNSLILAKCFRCKLWENSLHVSKQLEKIGITLSNAIVNAGLTSFKKIEETDARELELILNRHPPFGTQIKETVMYLPKYELKVEQITRYSDTTAEILVTVILRNFEQLQTKRTASDSHYVTLIIGDADNQVVYLHKITDSVLLKAGSWAKKIAVKRALKSEDLSINLISSEFVGLDIQQKLTVFYLEPKRFGNQITMQRKSETQISHSKHSDISTIAGPNKGTTASKKPGNRECNHLCKSKHTCGHDCCKIGVAQKSEIKESTISSYLSDLRNRNAVSSVPPVKRLKIQMNKSQSVDLKEFGFTPKPSLPSISRSEYLNISELPIMEQWDQPEIYGKVRQEPSEYQDKEVLNVNFELGNEVWDDFDDENLEVTSFSTDTEKTKISVLFHHMRCRIFLYQILLCPSSVHPP

SEQ ID NO: 23180 - protein, 179 aa, Homo sapiens
MLNVSGLFVLLCGLLVSSSAQEVLAGVSSQLLNDLTQGLLRADFLPSLQTTGLQKPLSSAFDGVSGLLDIFGPPLTNEINTVSIQVKNPQLLHVSIESTPQRKEATVQVPFTSELIVQLLTMKPFTANMQSDIKVQIRLEKNVGGRYELAFGNCRLLPEAIWIQTGVQLAPAQNLLWQT

SEQ ID NO: 23181 - protein, 242 aa, Homo sapiens
MSDKLKERKRTPVSHKVIEKRRRDRINRCLNELGKTVPMALAKQSSGKLEKAEILEMTVQYLRALHSADFPRGREKAELLAEFANYFHYGYHECMKNLVHYLTTVERMETKDTKYARILAFLQSKARLGAEPAFPPLGSLPEPDFSYQLHPAGPEFAGHSPGEAAVFPQGSGAGPFPWPPGAARSPALPYLPSAPVPLASPAQQHSPFLTPVQGLDRHYLNLIGHAHPNALNLHTPQHPPVL

SEQ ID NO: 23182 - protein, 241 aa, Homo sapiens
MSDKLKERKRTPVSHKVIEKRRRDRINRCLNELGKTVPMALAKQSSGKLEKAEILEMTVQYLRALHSADFPRGREKELLAEFANYFHYGYHECMKNLVHYLTTVERMETKDTKYARILAFLQSKARLGAEPAFPPLGSLPEPDFSYQLHPAGPEFAGHSPGEAAVFPQGSGAGPFPWPPGAARSPALPYLPSAPVPLASPAQQHSPFLTPVQGLDRHYLNLIGHAHPNALNLHTPQHPPVL

SEQ ID NO: 23183 - protein, 1050 aa, Homo sapiens
MLCWGYWSLGQPGISTNLQGIVAEPQVCGFISDRSVKEVACGGNHSVFLLEDGEVYTCGLNTKGQLGHEREGNKPEQIGALADQHIIHVACGESHSLALSDRGQLFSWGAGSDGQLGLMTTEDSVAVPRLIQKLNQQTILQVSCGNWHCLALAADGQFFTWGKNSHGQLGLGKEFPSQASPQRVRSLEGIPLAQVAAGGAHSFALSLSGAVFGWGMNNAGQLGLSDEKDRESPCHVKLLRTQKVVYISCGEEHTAVLTKSGGVFTFGAGSCGQLGHDSMNDEVNPRRVLELMGSEVTQIACGRQHTLAFVPSSGLIYAFGCGARGQLGTGHTCNVKCPSPVKGYWAAHSGQLSARADRFKYHIVKQIFSGGDQTFVLCSKYENYSPAVDFRTMNQAHYTSLINDETIAVWRQKLSEHNNANTINGVVQILSSAACWNGSFLEKKIDEHFKTSPKIPGIDLNSTRVLFEKLMNSQHSMILEQILNSFESCLIPQLSSSPPDVEAMRIYLILPEFPLLQDSKYYITLTIPLAMAILRLDTNPSKVLDNWWSQVCPKYFMKLVNLYKGAVLYLLRGRKTFLIPVLFNNYITAALKLLEKLYKVNLKVKHVEYDTFYIPEISNLVDIQEDYLMWFLHQAGMKARPSIIQDTVTLCSYPFIFDAQAKTKMLQTDAELQMQVAVNGANLQNVFMLLTLEPLLARSPFLVLHVRRNNLVGDALRELSIHSDIDLKKPLKVIFDGEEAVDAGGVTKEFFLLLLKELLNPIYGMFTYYQDSNLLWFSDTCFVEHNWFHLIGITCGLAIYNSTVVDLHFPLALYKKLLNVKPGLEDLKELSPTEGRSLQELLDYPGEDVEETFCLNFTICRESYGVIEQKKLIPGGDNVTVCKDNRQEFVDAYVNYVFQISVHEWYTAFSSGFLKVCGGKVLELFQPSELRAMMVGNSNYNWEELEETAIYKGDYSATHPTVKLFWETFHEFPLEKKKKFLLFLTGSDRIPIYGMASLQIVIQSTASGEEYLPVAHTCYNLLDLPKYSSKEILSARLTQALDNYEGFSLA

SEQ ID NO: 23184 - protein, 368 aa, Homo sapiens
MLCWGYWSLGQPGISTNLQGIVAEPQVCGFISDRSVKEVACGGNHSVFLLEDGEVYTCGLNTKGQLGHEREGNKPEQIGALADQHIIHVACGESHSLALSDRGQLFSWGAGSDGQLGLMTTEDSVAVPRLIQKLNQQTILQVSCGNWHCLALAADGQFFTWGKNSHGQLGLGKEFPSQASPQRVRSLEGIPLAQVAAGGAHSFALSLSGAVFGWGMNNAGQLGLSDEKDRESPCHVKLLRTQKVVYISCGEEHTAVLTKSGGVFTFGAGSCGQLGHDSMNDEVNPRRVLELMGSEVTQIACGRQHTLAFVPSSGLIYAFGCGARGQLGTGHTCNVKCPSPVKGYWAAHSGQLSARAGKNDCLWNLKVF

SEQ ID NO: 23185 - protein, 251 aa, Homo sapiens
MSAYGMPMYKSGDLVFAKLKGYAHWPARIEHMTQPNRYQVFFFGTHETAFLSPKRLFPYKECKEKFGKPNKRRGFSAGLWEIENNPTVQASDCPLASEKGSGDGPWPEPEAAEGDEDKPTHAGGGGDELGKPDDDKPTEEEKGPLKRSAGDPPEDAPKRPKEAAPDQEEEAEAERAAEAERAAAAAAATAVDEESPFLVAVENGSAPSEPGLVCEPPQPEEEELREEEVADEEASQEWHAEAPGGGDRDSL

SEQ ID NO: 23186 - protein, 120 aa, Homo sapiens
MRLPAQLLGLLMLWIPGSSADIVMTQTPLSLSVTPGQPASISCKSSQSLLHSDGKTYLYWYLQKPGQSPQLLIYEVSSRFSGVPDRFSGSGSGTDFTLKISRVEAEDVGVYYCMQGIHLP

SEQ ID NO: 23187 - protein, 121 aa, Homo sapiens
MRLPAQLLGLLMLWVPGSSEDIVMTQTPLSLPVTPGEPASISCRSSQSLLDSDDGNTYLDWYLQKPGQSPQLLIYTLSYRASGVPDRFSGSGSGTDFTLKISRVEAEDVGVYYCMQRIEFP

SEQ ID NO: 23188 - protein, 486 aa, Homo sapiens
MSGSTPFQMRLVHLDLKGAPPKVSYLSEIFPLFRALGANGLLIEYEDMFPYEGPLRLLRAKYAYSPSEIKEILHLAGLNELEVIPLVQTFGHMEFVLKHTAFAHLREVGSFPCTLNPHEAESLALVGAMIDQVLELHPGAQRLHIGCDEVYYLGEGEASRRWLQQEQNSTGKLCLSHMRAVASGVKARRPSVTPLVWDDMLRDLPEDQLAASGVPQLVEPVLWDYTADLDVHGKVLLMQKYRRCGFPQLWAASAFKGATGPSQAVPPVEHHLRNHVQWLQVAGSGPTDSLQGIILTGWQRYDHYSVLCELLPAGVPSLAACLQLLLRGGFDEDVKAKVENLLGISSLEKTDPVREGAGSFPGSNILALVTQVSLHLRSSVDALLEGNRYVTGWFSPYHRQRKLIHPVMVQHIQPAALSLLAQWSTLVQELEAALQLAFYPDAVEEWLEENVHPSLQRLQALLQDLSEVSAPPLPPTSPGRDVAQDP

SEQ ID NO: 23189 - protein, 585 aa, Homo sapiens
MSGSTPFQMRLVHLDLKGAPPKVSYLSEIFPLFRALGANGLLIEYEDMFPYEGPLRLLRAKYAYSPSEIKEILHLAGLNELEVIPLVQTFGHMEFVLKHTAFAHLREVGSFPCTLNPHEAESLALVGAMIDQVLELHPGAQRLHIGCDEVYYLGEGEASRRWLQQEQNSTGKLCLSHMRAVASGVKARRPSVTPLVWDDMLRDLPEDQLAASGVPQLVEPVLWDYTADLDVHGKVLLMQKYRRCGFPQLWAASAFKGATGPSQAVPPVEHHLRNHVQWLQVAGSGPTDSLQGIILTGWQRYDHYSVLCELLPAGVPSLAACLQLLLRGGFDEDVKAKVENLLGISSLEKTDPVRQAPCSPPCPLLPLPFPRPWRQLFSAGLSAGRGPAPSLAATSLPLSHKSASICAALWMRCWRATGMSLAGSAPTTASGSSSTRSWFSTSSPQRSASWHSGAPSCRSWRLPCSWLSTRMPWRSGWRKTCTPACSGCKLCCRTSARCLPPRCHPPALAGTLLRTPEGRAHARGLLLEAGGALHCQMAWAIRAHVGVVPSGPAVSCPHSVPEGPGQPLGERLENTEGSSTGRPAL

SEQ ID NO: 23190 - protein, 361 aa, Homo sapiens [sequence omitted]

SEQ ID NO: 23191 - protein, 344 aa, Homo sapiens
MRVIRVGTRKSQLARIQTDSVVATLKASYPGLQFEIIAMSTTGDKILDTALSKIGEKSLFTKELEHALEKNEVDLVVHSLKDLPTVLPPGFTIGAICKRENPHDAVVFHPKFVGKTLETLPEKSVVGTSSLRRAAQLQRKFPHLEFRSIRGNLNTRLRKLDEQQEFSAIILATAGLQRMGWHNRVGQILHPEECMYAVGQGALGVEVRAKDQDILDLVGVLHDPETLLRCIAERAFLRHLEGGCSVPVAVHTAMKDGQLYLTGGVWSLDGSDSIQETMQATIHVPAQHEDGPEDDPQLVGITARNIPRGPQLAAQNLGISLANLLLSKGAKNILDVARQLNDAH

SEQ ID NO: 23192 - protein, 321 aa, Homo sapiens
MSGNGNAAATAEENSPKMRVIRVGTRKSQLARIQTDSVVATLKASYPGLQFEIIAMSTTGDKILDTALSKIGEKSLFTKELEHALEKNEVDLVVHSLKDLPTVLPPGFTIGAICKRENPHDAVVFHPKFVGKTLETLPEKSVVGTSSLRRAAQLQRKFPHLEFRSIRGNLNTRLRKLDEQQEFSAIILATAGLQRMGWHNRVGQILHPEECMYAVGQEGGCSVPVAVHTAMKDGQLYLTGGVWSLDGSDSIQETMQATIHVPAQHEDGPEDDPQLVGITARNIPRGPQLAAQNLGISLANLLLSKGAKNILDVARQLNDAH

SEQ ID NO: 23193 - protein, 304 aa, Homo sapiens
MRVIRVGTRKSQLARIQTDSVVATLKASYPGLQFEIIAMSTTGDKILDTALSKIGEKSLFTKELEHALEKNEVDLVVHSLKDLPTVLPPGFTIGAICKRENPHDAVVFHPKFVGKTLETLPEKSVVGTSSLRRAAQLQRKFPHLEFRSIRGNLNTRLRKLDEQQEFSAIILATAGLQRMGWHNRVGQILHPEECMYAVGQEGGCSVPVAVHTAMKDGQLYLTGGVWSLDGSDSIQETMQATIHVPAQHEDGPEDDPQLVGITARNIPRGPQLAAQNLGISLANLLLSKGAKNILDVARQLNDAH

SEQ ID NO: 23194 - protein, 296 aa, Homo sapiens
MHRRRSRSCREDQKPVMDDQRDLISNNEQLPMLGRRPGAPESKCSRGALYTGFSILVTLLLAGQATTAYFLYQQQGRLDKLTVTSQNLQLENLRMKLPKPPKPVSKMRMATPLLMQALPMGALPQGPMQNATKYGNMTEDHVMHLLQNADPLKVYPPLKGSFPENLRHLKNTMETIDWKVFESWMHHWLLFEMSRHSLEQKPTDAPPKVLTKCQEEVSHIPAVHPGSFRPKCDENGNYLPLQCYGSIGYCWCVFPNGTEVPNTRSRGHHNCSESLELEDPSSGLGVTKQDLGPVPM

SEQ ID NO: 23195 - protein, 232 aa, Homo sapiens
MHRRRSRSCREDQKPVMDDQRDLISNNEQLPMLGRRPGAPESKCSRGALYTGFSILVTLLLAGQATTAYFLYQQQGRLDKLTVTSQNLQLENLRMKLPKPPKPVSKMRMATPLLMQALPMGALPQGPMQNATKYGNMTEDHVMHLLQNADPLKVYPPLKGSFPENLRHLKNTMETIDWKVFESWMHHWLLFEMSRHSLEQKPTDAPPKESLELEDPSSGLGVTKQDLGPVPM

SEQ ID NO: 23196 - protein, 160 aa, Homo sapiens
MHRRRSRSCREDQKPVMDDQRDLISNNEQLPMLGRRPGAPESKCSRGALYTGFSILVTLLLAGQATTAYFLYQQQGRLDKLTVTSQNLQLENLRMKLPKPPKPVSKMRMATPLLMQALPMGALPQGPMQNATKYGNMTEDHVMHLLQSHWNWRTRLLGWV

SEQ ID NO: 23197 - protein, 280 aa, Homo sapiens
MDDQRDLISNNEQLPMLGRRPGAPESKCSRGALYTGFSILVTLLLAGQATTAYFLYQQQGRLDKLTVTSQNLQLENLRMKLPKPPKPVSKMRMATPLLMQALPMGALPQGPMQNATKYGNMTEDHVMHLLQNADPLKVYPPLKGSFPENLRHLKNTMETIDWKVFESWMHHWLLFEMSRHSLEQKPTDAPPKVLTKCQEEVSHIPAVHPGSFRPKCDENGNYLPLQCYGSIGYCWCVFPNGTEVPNTRSRGHHNCSESLELEDPSSGLGVTKQDLGPVPM

SEQ ID NO: 23198 - protein, 216 aa, Homo sapiens
MDDQRDLISNNEQLPMLGRRPGAPESKCSRGALYTGFSILVTLLLAGQATTAYFLYQQQGRLDKLTVTSQNLQLENLRMKLPKPPKPVSKMRMATPLLMQALPMGALPQGPMQNATKYGNMTEDHVMHLLQNADPLKVYPPLKGSFPENLRHLKNTMETIDWKVFESWMHHWLLFEMSRHSLEQKPTDAPPKESLELEDPSSGLGVTKQDLGPVPM

SEQ ID NO: 23199 - protein, 428 aa, Homo sapiens
MAKTVAYFYDPDVGNFHYGAGHPMKPHRLALTHSLVLHYGLYKKMIVFKPYQASQHDMCRFHSEDYIDFLQRVSPTNMQGFTKSLNAFNVGDDCPVFPGLFEFCSRYTGASLQGATQLNNKICDIAINWAGGLHHAKKFEASGFCYVNDIVIGILELLKYHPRVLYIDIDIHHGDGVQEAFYLTDRVMTVSFHKYGNYFFPGTGDMYEVGAESGRYYCLNVPLRDGIDDQSYKHLFQPVINQVVDFYQPTCIVLQCGADSLGCDRLGCFNLSIRGHGECVEYVKSFNIPLLVLGGGGYTVRNVARCWTYETSLLVEEAISEELPYSEYFEYFAPDFTLHPDVSTRIENQNSRQYLDQIRQTIFENLKMLNHAPSVQIHDVPADLLTYDRTDEADAEERGPEENYSRPEAPNEFYDGDHDNDKESDVEI

SEQ ID NO: 23200 - protein, 429 aa, Homo sapiens
MIVFKPYQASQHDMCRFHYGAGHPMKPHRLALTHSLVLHYGLYKKMIVFKPYQASQHDMCRFHSEDYIDFLQRVSPTNMQGFTKSLNAFNVGDDCPVFPGLFEFCSRYTGASLQGATQLNNKICDIAINWAGGLHHAKKFEASGFCYVNDIVIGILELLKYHPRVLYIDIDIHHGDGVQEAFYLTDRVMTVSFHKYGNYFFPGTGDMYEVGAESGRYYCLNVPLRDGIDDQSYKHLFQPVINQVVDFYQPTCIVLQCGADSLGCDRLGCFNLSIRGHGECVEYVKSFNIPLLVLGGGGYTVRNVARCWTYETSLLVEEAISEELPYSEYFEYFAPDFTLHPDVSTRIENQNSRQYLDQIRQTIFENLKMLNHAPSVQIHDVPADLLTYDRTDEADAEERGPEENYSRPEAPNEFYDGDHDNDKESDVEI

SEQ ID NO: 23201 - protein, 197 aa, Homo sapiens
MFGCLVAGRLVQTAAQQVAEDKFVFDLPDYESINHVVVFMLGTIPFPEGMGGSVYFSYPDSNGMPVWQLLGFVTNGKPSAIFKISGLKSGEGSQHPFGAMNIVRTPSVAQIGISVELLDSMAQQTPVGNAAVSSVDSFTQFTQKMLDNFYNFASSFAVSQAQMTPSPSEMFIPANVVLKWYENFQRRLAQNPLFWKT

SEQ ID NO: 23202 - protein, 93 aa, Homo sapiens
MIHLGHILFLLLLPVAAAQTTPGERSSLPAFYPGTSGSCSGCGSLSLPLLAGLVAADAVASLLIVGAVFLCARPRRSPAQEDGKVYINMPGRG

SEQ ID NO: 23203 - protein, 92 aa, Homo sapiens
MIHLGHILFLLLLPVAAAQTTPGERSSLPAFYPGTSGSCSGCGSLSLPLLAGLVAADAVASLLIVGAVFLCARPRRSPAQDGKVYINMPGRG

SEQ ID NO: 23204 - protein, 93 aa, Homo sapiens [sequence omitted]

SEQ ID NO: 23205 - protein, 107 aa, Homo sapiens
MEQKLVEEILQAITMSTDTGVSLPSYEEDQGSKLIRKAKEAPFVPVGIAGFAAIVAYGLYKLKSRGNTKMSIHLIHMRVAAQGFVVGAMTVGMGYSMYREFWAKPKP

SEQ ID NO: 23206 - protein, 295 aa, Homo sapiens
MEKMSRPLPLNPTFIPPPYGVLRSLLENPLKLPLHHEDAFSKDKDKEKKLDDESNSPTVPQSAFLGPTLWDKTLPYDGDTFQLEYMDLEEFLSENGIPPSPSQHDHSPHPPGLQPASSAAPSVMDLSSRASAPLHPGIPSPNCMQSPIRPGQLLPANRNTPSPIDPDTIQVPVGYEPDPADLALSSIPGQEMFDPRKRKFSEEELKPQPMIKKARKVFIPDDLKDDKYWARRRKNNMAAKRSRDARRLKENQIAIRASFLEKENSALRQEVADLRKELGKCKNILAKYEARHGPL

SEQ ID NO: 23207 - protein, 210 aa, Homo sapiens
MDLEEFLSENGIPPSPSQHDHSPHPPGLQPASSAAPSVMDLSSRASAPLHPGIPSPNCMQSPIRPGQLLPANRNTPSPIDPDTIQVPVGYEPDPADLALSSIPGQEMFDPRKRKFSEEELKPQPMIKKARKVFIPDDLKDDKYWARRRKNNMAAKRSRDARRLKENQIAIRASFLEKENSALRQEVADLRKELGKCKNILAKYEARHGPL

SEQ ID NO: 23208 - protein, 24 aa, Homo sapiens
MAPRGFSCLLLLTSEIDLPVKRRA

SEQ ID NO: 23209 - protein, 193 aa, Homo sapiens
MGKQNSKLRPEMLQDLRENTEFSELELQEWYKGFLKDCPTGILNVDEFKKIYANFFPYGDASKFAEHVFRTFDTNSDGTIDFREFIIALSVTSRGRLEQKLMWAFSMYDLDGNGYISREEMLEIVQAIYKMVSSVMKMPEDESTPEKRTEKIFRQMDTNNDGKLSLEEFIRGAKSDPSIVRLLQCDPSSASQF

SEQ ID NO: 23210 - protein, 356 aa, Homo sapiens
MGLLRIMMPPKLQLLAVVAFAVAMLFLENQIQKLEESRSKLERAIARHEVREIEQRHTMDGPRQDATLDEEEDMVIIYNRVPKTASTSFTNIAYDLCAKNKYHVLHINTTKNNPVMSLQDQVRFVKNITSWKEMKPGFYHGHVSYLDFAKFGVKKKPIYINVIRDPIERLVSYYYFLRFGDDYRPGLRRRKQGDKKTFDECVAEGGSDCAPEKLWLQIPFFCGHSSECWNVGSRWAMDQAKYNLINEYFLVGVTEELEDFIMLLEAALPRFFRGATELYRTGKKSHLRKTTEKKLPTKQTIAKLQQSDIWKMENEFYEFALEQFQFIRAHAVREKDGDLYILAQNFFYEKIYPKSN

SEQ ID NO: 23211 - protein, 303 aa, Homo sapiens
MLFIKFIHLEVFSMPERAIARHEVREIEQRHTMDGPRQDATLDEEEDMVIIYNRVPKTASTSFTNIAYDLCAKNKYHVLHINTTKNNPVMSLQDQVRFVKNITSWKEMKPGFYHGHVSYLDFAKFGVKKKPIYINVIRDPIERLVSYYYFLRFGDDYRPGLRRRKQGDKKTFDECVAEGGSDCAPEKLWLQIPFFCGHSSECWNVGSRWAMDQAKYNLINEYFLVGVTEELEDFIMLLEAALPRFFRGATELYRTAPDTATPSHRHGPICGSKSISSLLVKVSPVCKDSHCLGKCSRNGLSAV

SEQ ID NO: 23212 - protein, 229 aa, Homo sapiens
MGLLRIMMPPKLQLLAVVAFAVAMLFLENQIQKLEESRSKLERAIARHEVREIEQRHTMDGPRQDATLDEEEDMVIIYNRVPKTASTSFTNIAYDLCAKNKYHVLHINTTKNNPVMSLQDQVRFVKNITSWKEMKPGFYHGHVSYLDFAKFGVKKKPIYINVIRDPIERLVSYYYFLRFGDDYRPGLRRRKQGDKKTFDECVAEGGSDCAPEKLWLQIPFFCGHSSECW

SEQ ID NO: 23213 - protein, 367 aa, Homo sapiens
MAYRVLGRAGPPQPRRARRLLFAFTLSLSCTYLCYSFLCCCDDLGRSRLLGAPRCLRGPSAGGQKLLQKSRPCDPSGPTPSEPSAPSAPAAAVPAPRLSGSNHSGSPKLGTKRLPQALIVGVKKGGTRAVLEFIRVHPDVRALGTEPHFFDRNYGRGLDWYRSLMPRTLESQITLEKTPSYFVTQEAPRRIFNMSRDTKLIVVVRNPVTRAISDYTQTLSKKPDIPTFEGLSFRNRTLGLVDVSWNAIRIGMYVLHLESWLQYFPLAQIHFVSGERLITDPAGEMGRVQDFLGIKRFITDKHFYFNKTKGFPCLKKTESSLLPRCLGKSKGRTHVQIDPEVIDQLREFYRPYNIKFYETVGQDFRWE

SEQ ID NO: 23214 - protein, 655 aa, Homo sapiens
MVTTLGPKMAAEWGGGVGYSGSGPGRSRWRWSGSVWVRSVLLLLGGLRASATSTPVSLGSSPPCRHHVPSDTEVINKVHLKANHVVKRDVDEHLRIKTVYDKSVEELLPEKKNLVKNKLFPQAISYLEKTFQVRRPAGTILLSRQCATNQYLRKENDPHRYCTGECAAHTKCGPVIVPEEHLQQCRVYRGGKWPHGAVGVPDQEGISDADFVLYVGALATERCSHENIISYAAYCQQEANMDRPIAGYANLCPNMISTQPQEFVGMLSTVKHEVIHALGFSAGLFAFYHDKDGNPLTSRFADGLPPFNYSLGLYQWSDKVVRKVERLWDVRDNKIVRHTVYLLVTPRVVEEARKHFDCPVLEGMELENQGGVGTELNHWEKRLLENEAMTGSHTQNRVLSRITLALMEDTGRQMLSPYCDTLRSNPLQLTCRQDQRAVAVCNLQKFPKPLPQEYQYFDELSGIPAEDLPYYGGSVEIADYCPFSQEFSWHLSGEYQRSSDCRILENQPEIFKNYGAEKYGPHSVCLIQKSAFVMEKCERKLSYPDWGSGCYQVSCSPQGLKVWVQDTSYLCSRAGQVLPVSIQMNGWIHDGNLLCPSCWDFCELCPPETDPPATNLTRALPLDLCSCSSSLVVTLWLLLGNLFPLLAGFLLCIWH

SEQ ID NO: 23215 - protein, 640 aa, Homo sapiens
MGRRSGLLGLRPGPEPVALERVINKVHLKANHVVKRDVDEHLRIKTVYDKSVEELLPEKKNLVKNKLFPQAISYLEKTFQVRRPAGTILLSRQCATNQYLRKENDPHRYCTGECAAHTKCGPVIVPEEHLQQCRVYRGGKWPHGAVGVPDQEGISDADFVLYVGALATERCSHENIISYAAYCQQEANMDRPIAGYANLCPNMISTQPQEFVGMLSTVKHEVIHALGFSAGLFAFYHDKDGNPLTSRFADGLPPFNYSLGLYQWSDKVVRKVERLWDVRDNKIVRHTVYLLVTPRVVEEARKHFDCPVLEGMELENQGGVGTELNHWEKRLLENEAMTGSHTQNRVLSRITLALMEDTGWYKANYSMAEKLDWGRGMGCDFVRKSCKFWIDQQRQKRQMLSPYCDTLRSNPLQLTCRQDQRAVAVCNLQKFPKPLPQEYQYFDELSGIPAEDLPYYGGSVEIADYCPFSQEFSWHLSGEYQRSSDCRILENQPEIFKNYGAEKYGPHSVCLIQKSAFVMEKCERKLSYPDWGSGCYQVSCSPQGLKVWVQDTSYLCSRAGQVLPVSIQMNGWIHDGNLLCPSCWDFCELCPPETDPPATNLTRALPLDLCSCSSSLVVTLWLLLGNLFPLLAGFLLCIWH

SEQ ID NO: 23216 - protein, 692 aa, Homo sapiens
MVTTLGPKMAAEWGGGVGYSGSGPGRSRWRWSGSVWVRSVLLLLGGLRASATSTPVSLGSSPPCRHHVPSDTEVINKVHLKANHVVKRDVDEHLRIKTVYDKSVEELLPEKKNLVKNKLFPQAISYLEKTFQVRRPAGTILLSRQCATNQYLRKENDPHRYCTGECAAHTKCGPVIVPEEHLQQCRVYRGGKWPHGAVGVPDQEGISDADFVLYVGALATERCSHENIISYAAYCQQEANMDRPIAGYANLCPNMISTQPQEFVGMLSTVKHEVIHALGFSAGLFAFYHDKDGNPLTSRFADGLPPFNYSLGLYQWSDKVVRKVERLWDVRDNKIVRHTVYLLVTPRVVEEARKHFDCPVLEGMELENQGGVGTELNHWEKRLLENEAMTGSHTQNRVLSRITLALMEDTGWYKANYSMAEKLDWGRGMGCDFVRKSCKFWIDQQRQKRQMLSPYCDTLRSNPLQLTCRQDQRAVAVCNLQKFPKPLPQEYQYFDELSGIPAEDLPYYGGSVEIADYCPFSQEFSWHLSGEYQRSSDCRILENQPEIFKNYGAEKYGPHSVCLIQKSAFVMEKCERKLSYPDWGSGCYQVSCSPQGLKVWVQDTSYLCSRAGQVLPVSIQMNGWIHDGNLLCPSCWDFCELCPPETDPPATNLTRALPLDLCSCSSSLVVTLWLLLGNLFPLLAGFLLCIWH

SEQ ID NO: 23217 - protein, 150 aa, Homo sapiens
MAKIILRHLIEIPVRYQEEFEARGLEDCRLDHALYALPGPTIVDLRKTRAAQSPPVDSAAETPPREGKSHFQILLDVVQFLPEDIIIQTFEGWLLIKAQHGTRMDEHGFISRSFTRQYKLPDGVEIKDLSAVLCHDGILVVEVKDPVGTK

SEQ ID NO: 23218 - protein, 284 aa, Homo sapiens
MEPGNYATLDGAKDIEGLLGAGGGRNLVAHSPLTSHPAAPTLMPAVNYAPLDLPGSAEPPKQCHPCPGVPQGTSPAPVPYGYFGGGYYSCRVSRSSLKPCAQAATLAAYPAETPTAGEEYPSRPTEFAFYPGYPGTYQPMASYLDVSVVQTLGAPGEPRHDSLLPVDSYQSWALAGGWNSQMCCQGEQNPPGPFWKAAFADSSGQHPPDACAFRRGRKKRIPYSKGQLRELEREYAANKFITKDKRRKISAATSLSERQITIWFQNRRVKEKKVLAKVKNSATP

SEQ ID NO: 23219 - protein, 270 aa, Homo sapiens
MKPKMKYSTNKISTAKWKNTASKALCFKLGKSQQKAKEVCPMYFMKLRSGLMIKKEACYFRRETTKRPSLKTGRKHKRHLVLAACQQQSTVECFAFGISGVQKYTRALHDSSITGISPITEYLASLSTYNDQSITFALEDESYEIYVEDLKKDEKKDKVLLSYYESQHPSNESGDGVDGKMLMVTLSPTKDFWLHANNKEHSVELHKCEKPLPDQAFFVLHNMHSNCVSFECKTDPGVFIGVKDNHLALIKVDSSENLCTENILFKLSET

SEQ ID NO: 23220 - protein, 228 aa, Homo sapiens
MKPKMKYSTNKISTAKWKNTASKALCFKLGKSQQKAKEVCPMYFMKLRSGLMIKKEACYFRRETTKRPSLKTGRKHKRHLVLAACQQQSTVECFAFGISGVQKYTRALHDSSITDKVLLSYYESQHPSNESGDGVDGKMLMVTLSPTKDFWLHANNKEHSVELHKCEKPLPDQAFFVLHNMHSNCVSFECKTDPGVFIGVKDNHLALIKVDSSENLCTENILFKLSET

SEQ ID NO: 23221 - protein, 228 aa, Homo sapiens
MKPKMKYSTNKISTAKWKNTASKALCFKLGKSQQKAKEVCPMYFMKLRSGLMIKKEACYFRRETTKRPSLKTGISPITEYLASLSTYNDQSITFALEDESYEIYVEDLKKDEKKDKVLLSYYESQHPSNESGDGVDGKMLMVTLSPTKDFWLHANNKEHSVELHKCEKPLPDQAFFVLHNMHSNCVSFECKTDPGVFIGVKDNHLALIKVDSSENLCTENILFKLSET

SEQ ID NO: 23222 - protein, 144 aa, Homo sapiens
MKPKMKYSTNKISTAKWKNTASKALCFKLGNKVLLSYYESQHPSNESGDGVDGKMLMVTLSPTKDFWLHANNKEHSVELHKCEKPLPDQAFFVLHNMHSNCVSFECKTDPGVFIGVKDNHLALIKVDSSENLCTENILFKLSET

SEQ ID NO: 23223 - protein, 153 aa, Homo sapiens [sequence omitted]

SEQ ID NO: 23224 - protein, 137 aa, Homo sapiens
MGLTSQLLPPLFFLLACAGNFVHGHKCDITLQEIIKTLNSLTEQKNTTEKETFCRAATVLRQFYSHHEKDTRCLGATAQQFHRHKQLIRFLKRLDRNLWGLAGLNSCPVKEANQSTLENFLERLKTIMREKYSKCSS

SEQ ID NO: 23225 - protein, 155 aa, Homo sapiens
MVLSGALCFRMKDSALKVLYLHNNQLLAGGLHAGKVIKGEEISVVPNRWLDASLSPVILGVQGGSQCLSCGVGQEPTLTLEPVNIMELYLGAKESKSFTFYRRDMGLTSSFESAAYPGWFLCTVPEADQPVRLTQLPENGGWNAPITDFYFQQCD

SEQ ID NO: 23226 - protein, 412 aa, Homo sapiens
MAGKAAAPGTAVLLVTANVGSLFDDPENLQKNWLREFYQVVHTHKPHFMALHCQEFGGKNYEASMSHVDKFVKELLSSDAMKEYNRARVYLDENYKSQEHFTALGSFYFLHESLKNIYQFDFKAKKYRKVAGKEIYSDTLESTPMLEKEKFPQDYFPECKWSRKGFIRTRWCIADCAFDLVNIHLFHDASNLVAWETSPSVYSGIRHKALGYVLDRIIDQRFEKVSYFVFGDFNFRLDSKSVVETLCTKATMQTVRAADTNEVVKLIFRESDNDRKVMLQLEKKLFDYFNQEVFRDNNGTALLEFDKELSVFKDRLYELDISFPPSYPYSEDARQGEQYMNTRCPAWCDRILMSPSAKELVLRSESEEKVVTYDHIGPNVCMGDHKPVFLAFRIMPGAGKPHAHVHKCCVVQ

SEQ ID NO: 23227 - protein, 131 aa, Homo sapiens
MDPRLPAWALVLLGPALVFALGPAPTPEMREKLCGHHFVRALVRVCGGPRWSTEARRPATGGDRELLQWLERRHLLHGLVADSNLTLGPGLQPLPQTSHHHRHHRAAATNPARYCCLSGCTQQDLLTLCPY

SEQ ID NO: 23228 - protein, 157 aa, Homo sapiens
MDPRLPAWALVLLGPALVFALGPAPTPEMREKLCGHHFVRALVRVCGGPRWSTEARRPATGGDQRESHSVSQAGLKLLSSSNPPTLTFQSVGISDVSCYSGWRDDICSMGWWPTVISRWDLACSPCPRPLTITATTVQLPPTLHATAASVAVPNKTC

SEQ ID NO: 23229 - protein, 467 aa, Homo sapiens
MEYMSTGSDNKEEIDLLIKHLNVSDVIDIMENLYASEEPAVYEPSLMTMCQDSNQNDERSKSLLLSGQEVPWLSSVRYGTVEDLLAFANHISNTAKHFYGQRPQESGILLNMVITPQNGRYQIDSDVLLIPWKLTYRNIGSDFIPRGAFGKVYLAQDIKTKKRMACKLIPVDQFKPSDVEIQACFRHENIAELYGAVLWGETVHLFMEAGEGGSVLEKLESCGPMREFEIIWVTKHVLKGLDFLHSKKVIHHDIKPSNIVFMSTKAVLVDFGLSVQMTEDVYFPKDLRGTEIYMSPEVILCRGHSTKADIYSLGATLIHMQTGTPPWVKRYPRSAYPSYLYIIHKQAPPLEDIADDCSPGMRELIEASLERNPNHRPRAADLLKHEALNPPREDQPRCQSLDSALLERKRLLSRKELELPENIADSSCTGSTEESEMLKRQRSLYIDLGALAGYFNLVRGPPTLEYG

SEQ ID NO: 23230 - protein, 438 aa, Homo sapiens
MENLYASEEPAVYEPSLMTMCQDSNQNDERSKSLLLSGQEVPWLSSVRYGTVEDLLAFANHISNTAKHFYGQRPQESGILLNMVITPQNGRYQIDSDVLLIPWKLTYRNIGSDFIPRGAFGKVYLAQDIKTKKRMACKLIPVDQFKPSDVEIQACFRHENIAELYGAVLWGETVHLFMEAGEGGSVLEKLESCGPMREFEIIWVTKHVLKGLDFLHSKKVIHHDIKPSNIVFMSTKAVLVDFGLSVQMTEDVYFPKDLRGTEIYMSPEVILCRGHSTKADIYSLGATLIHMQTGTPPWVKRYPRSAYPSYLYIIHKQAPPLEDIADDCSPGMRELIEASLERNPNHRPRAADLLKHEALNPPREDQPRCQSLDSALLERKRLLSRKELELPENIADSSCTGSTEESEMLKRQRSLYIDLGALAGYFNLVRGPPTLEYG

SEQ ID NO: 23231 - protein, 225 aa, Homo sapiens
MAEGETESPGPKKCGPYISSVTSQSVNLMIRGVVLFFIGVFLALVLNLLQIQRNVTLFPPDVIASIFSSAWWVPPCCGTASAVIGLLYPCIDRHLGEPHKFKREWSSVMRCVAVFVGINHASAKVDFDNNIQLSLTLAALSIGLWWTFDRSRSGFGLGVGIAFLATVVTQLLVYNGVYQYTSPDFLYVRSWLPCIFFAGGITMGNIGRQLAMYECKVIAEKSHQE

SEQ ID NO: 23232 - protein, 123 aa, Homo sapiens
MAWTPLLLLLLSHCTGSLSQPVLTQPTSLSASPGASARFTCTLRSGINVGTYRIYWYQQKPGSLPRYLLRYKSDSDKQQGSGVPSRFSGSKDASTNAGLLLISGLQSEDEADYYCAIWYSSTS

SEQ ID NO: 23233 - protein, 154 aa, Homo sapiens
MGSKCCKGGPDEDAVERQRRQKLLLAQLHHRKRVKAAGQIQAWWRGVLVRRTLLVAALRAWMIQCWWRTLVQRRIRQRRQALLRVYVIQEQATVKLQSCIRMWQCRQCYRQMCNALCLFQVPESSLAFQTDGFLQVQYAIPSKQPEFHIEILSI

SEQ ID NO: 23234 - protein, 287 aa, Homo sapiens
MAAPRQIPSHIVRLKPSCSTDSSFTRTPVPTVSLASRELPVSSWQVTEPSSKNLWEQICKEYEAEQPPFPEGYKVKQEPVITVAPVEEMLFHGFSAEHYFPVSHFTMISRTPCPQDKSETINPKTCSPKEYLETFIFPVLLPGMASLLHQAKKEKCFERKRTKFIACDFLTEWLYNQNPKRAGEPFTEFFSIPFVEERLKQHPRPPIPLSLLLTEEEAALYIQSFWRACVVRCDPEIQELRQWQKKLREAKHIHQQVKIFWAKQEQKVKCKMEDDAVPAAKMKIPSS

SEQ ID NO: 23235 - protein, 189 aa, Homo sapiens
MAAPRQIPSHIVRLKPSCSTDSSFTRTPVPTVSLASRELPVSSWQVTEPSSKNLWEQICKEYEAEQPPFPEGYKVKQEPVITVAPVEEMLFHGFSAEHYFPVSHFTMISRTPCPQDKSETINPKTCSPKEYLETFIFPVLLPGMASLLHQAKKEKCFEPTAANPTLAPADRRGSSPLHSILLESLCGSL

SEQ ID NO: 23236 - protein, 212 aa, Homo sapiens
MAAPRQIPSHIVRLKPSCSTDSSFTRTPVPTVSLASRELPVSSWQVTEPSSKNLWEQICKEYEAEQPPFPEGYKVKQEPVITVAPVEEMLFHGFSAEHYFPVSHFTMISRTPCPQDKSETINPKTCSPKEYLETFIFPVLLPGMASLLHQAKKEKCFEVSCLAGFLYFEILNHSLLSDDSSLSWYHQVVLQMTPSGGKACVWGHLPSSSHTI

SEQ ID NO: 23237 - protein, 536 aa, Homo sapiens
METMASPGKDNYRMKSYKNNALNPEEMRRRREEEGIQLRKQKREQQLFKRRNVELINEEAAMFDSLLMDSYVSSTTGESVITREMVEMLFSDDSDLQLATTQKFRKLLSKEPSPPIDEVINTPRVVDRFVEFLKRNENCTLQFEAAWALTNIASGTSQQTKIVIEAGAVPIFIELLNSDFEDVQEQAVWALGNIAGDSSVCRDYVLNCSILNPLLTLLTKSTRLTMTRNAVWALSNLCRGKNPPPEFAKVSPCLPVLSRLLFSSDSDLLADACWALSYLSDGPNEKIQAVIDSGVCRRLVELLMHNDYKVASPALRAVGNIVTGDDIQTQVILNCSALPCLLHLLSSPKESIRKEACWTISNITAGNRAQIQAVIDANIFPVLIEILQKAEFRTRKEAAWAITNATSGGTPEQIRYLVSLGCIKPLCDLLTVMDSKIVQVALNGLENILRLGEQEGKRSGSGVNPYCGLIEEAYGLDKIEFLQSHENQEIYQKAFDLIEHYFGVEDDDSSLAPQVDETQQQFIFQQPEAPMEGFQL

SEQ ID NO: 23238 - protein, 536 aa, Homo sapiens
MASPGKDNYRMKSYKNKALNPQEMRRRREEEGIQLRKQKREEQLFKRRNVYLPRNDESMLESPIQDPDISSTVPIPEEEVVTTDMVQMIFSNNADQQLTATQKFRKLLSKEPNPPIDQVIQKPGVVQRFVKFLERNENCTLQFEAAWALTNIASGTFLHTKVVIETGAVPIFIKLLNSEHEDVQEQAVWALGNIAGDNAECRDFVLNCEILPPLLELLTNSNRLTTTRNAVWALSNLCRGKNPPPNFSKVSPCLNVLSRLLFSSDPDVLADVCWALSYLSDGPNDKIQAVIDSGVCRRLVELLMHNDYKVVSPALRAVGNIVTGDDIQTQVILNCSALPCLLHLLSSPKESIRKEACWTVSNITAGNRAQIQAVIDANIFPVLIEILQKAEFRTRKEAAWAITNATSGGTPEQIRYLVALGCIKPLCDLLTVMDSKIVQVALNGLENILRLGEQESKQNGIGINPYCALIEEAYGLDKIEFLQSHENQEIYQKAFDLIEHYFGVEEDDPSIVPQVDENQQQFIFQQQEAPMDGFQL

SEQ ID NO: 23239 - protein, 148 aa, Homo sapiens
MGPEEKTIMTERSAAVFIQAWWRGMLVRRTLLHAALRAWIIQCWWRQVLEKLLAKRRRMVLEFYVQQEWAAVRLQSWVRMWCVRQRYCRLLNAVRIIQVYWRWHSCHSRVFIEGHYELKENQLNIQLEISLGLQACKVQQCIPLPLKE

SEQ ID NO: 23240 - protein, 117 aa, Homo sapiens
MAWTPLFLFLLTCCPGSNSQTVVTQEPSLTVSPGGTVTLTCASSTGAVTSGYYPNWFQQKPGQAPRALIYSTSNKHSWTPARFSGSLLGGKAALTLSGVQPEDEAEYYCLLYYGGAQ

SEQ ID NO: 23241 - protein, 598 aa, Homo sapiens
MKPTGTDPRILSIAAEVAKSPEQNVPVILLKLKEIINITPLGSSELKKIKQDIYCYDLIQYCLLVLSQDYSRIQGGWTTISQLTQILSHCCVGLEPGEDAEEFYNELLPSAAENFLVLGRQLQTCFINAAKAEEKDELLHFFQIVTDSLFWLLGGHVELIQNVLQSDHFLHLLQADNVQIGSAVMMMLQNILQINSGDLLRIGRKALYSILDEVIFKLFSTPSPVIRSTATKLLLLMAESHQEILILLRQSTCYKGLRRLLSKQETGTEFSQELRQLVGLLSPMVYQEVEEQKLHQAACLIQAYWKGFQTRKRLKKLPSAVIALQRSFRSKRSKMLLEINRQKEEEDLKLQLQLQRQRAMRLSRELQLSMLEIVHPGQVEKHYREMEEKSALIIQKHWRGYRERKNFHQQRQSLIEYKAAVTLQRAALKFLAKCRKKKKLFAPWRGLQELTDARRVELKKRVDDYVRRHLGSPMSDVVSRELHAQAQERLQHYFMGRALEERAQQHREALIAQISTNVEQLMKAPSLKEAEGKEPELFLSRSRPVAAKAKQAHLTTLKHIQAPWWKKLGEESGDEIDVPKDELSIELENLFIGGTKPP

SEQ ID NO: 23242 - protein, 465 aa, Homo sapiens
MKPTGTDPRILSIAAEVAKSPEQNVPVILLKLKEIINITPLGSSELKKIKQDIYCYDLIQYCLLVLSQDYSRIQGGWTTISQLTQILSHCCVGLEPGEDAEEFYNELLPSAAENFLVLGRQLQTCFINAAKAEEKDELLHFFQIVTDSLFWLLGGHVELIQNVLQSDHFLHLLQADNVQIGSAVMMMLQNILQINRSKRSKMLLEINRQKEEEDLKLQLQLQRQRAMRLSRELQLSMLEIVHPGQVEKHYREMEEKSALIIQKHWRGYRERKNFHQQRQSLIEYKAAVTLQRAALKFLAKCRKKKKLFAPWRGLQELTDARRVELKKRVDDYVRRHLGSPMSDVVSRELHAQAQERLQHYFMGRALEERAQQHREALIAQISTNVEQLMKAPSLKEAEGKEPELFLSRSRPVAAKAKQAHLTTLKHIQAPWWKKLGEESGDEIDVPKDELSIELENLFIGGTKPP

SEQ ID NO: 23243 - protein, 303 aa, Homo sapiens
MKPTGTDPRILSIAAEVAKSPEQNVPVILLKLKEIINITPLGSSELKKIKQDIYCYDLIQYCLLVLSQDYSRIQGGWTTISQLTQILSHCCVGLEPGEDAEEFYNELLPSAAENFLVLGRQLQTCFINAAKAEEKDELLHFFQIVTDSLFWLLGGHVELIQNVLQSDHFLHLLQADNVQIGSAVMMMLQNILQINSGDLLRIGRKALYSILDEVIFKLFSTPSPVIRSTATKLLLLMAESHQEILILLRQSTCYKGLRRLLSKQETGTEFSQELRQLVGLLSPMVYQEVEEQIQTIKDVAGDK

SEQ ID NO: 23244 - protein, 516 aa, Homo sapiens
MPTLDAPEERRRKFKYRGKDVSLRRQQRMAVSLELRKAKKDEQTLKRRNITSFCPDTPSEKTAKGVAVSLTLGEIIKGVNSSDPVLCFQATQTARKMLSQEKNPPLKLVIEAGLIPRMVEFLKSSLYPCLQFEAAWALTNIASGTSEQTRAVVEGGAIQPLIELLSSSNVAVCEQAVWALGNIAGDGPEFRDNVITSNAIPHLLALISPTLPITFLRNITWTLSNLCRNKNPYPCDTAVKQILPALLHLLQHQDSEVLSDACWALSYLTDGSNKRIGQVVNTGVLPRLVVLMTSSELNVLTPSLRTVGNIVTGTDEQTQMAIDAGMLNVLPQLLQHNKPSIQKEAAWALSNVAAGPCHHIQQLLAYDVLPPLVALLKNGEFKVQKEAVWMVANFATGATMDQLIQLVHSGVLEPLVNLLTAPDVKIVLIILDVISCILQAAEKRSEKENLCLLIEELGGIDRIEALQLHENRQIGQSALNIIEKHFGEEEDESQTLLSQVIDQDYEFIDYECLAKK

SEQ ID NO: 23245 - protein, 173 aa, Homo sapiens
MSLLGPKVLLFLAAFIITSDWIPLGVNSQRGDDVTQATPETFTEDPNLVNDPATDETVLAVLADIAPSTDDLASLSEKNTTAECWDEKFTCTRLYSVHRPVKQCIHQLCFTSLRRMYIVNKEICSRLVCKEHEAMKDELCRQMAGLPPRRLRRSNYFRLPPCENVDLQRPNGL

SEQ ID NO: 23246 - protein, 163 aa, Homo sapiens
MSLLGPKVLLFLAAFIITSDWIPLGVNSQRGDDVTQATPETFTEDPNLVNDPATDETVLAVLADIAPSTDDLECWDEKFTCTRLYSVHRPVKQCIHQLCFTSLRRMYIVNKEICSRLVCKEHEAMKDELCRQMAGLPPRRLRRSNYFRLPPCENVDLQRPNGL

SEQ ID NO: 23247 - protein, 97 aa, Homo sapiens
MKGICSDAILVLATSMWMAFAIDFPLPMASERGQLDKTIVECLKNVNKCWFLSYIKPSEPICGSDQVTYSSDCHLCSKILFEGLNITKLYDGQCENS

SEQ ID NO: 23248 - protein, 842 aa, Homo sapiens
MKRGRLPSSSEDSDDNGSLSTTWSQNSRSQHRRSSCSRHEDRKPSEVFRTDLITAMKLHDSYQLNPDEYYVLADPWRQEWEKGVQVPVSPGTIPQPVARVVSEEKSLMFIRPKKYIVSSGSEPPELGYVDIRTLADSVCRYDLNDMDAAWLELTNEEFKEMGMPELDEYTMERVLEEFEQRCYDNMNHAIETEEGLGIEYDEDVVCDVCQSPDGEDGNEMVFCDKCNICVHQACYGILKVPEGSWLCRTCALGVQPKCLLCPKKGGAMKPTRSGTKWVHVSCALWIPEVSIGSPEKMEPITKVSHIPSSRWALVCSLCNEKFGASIQCSVKNCRTAFHVTCAFDRGLEMKTILAENDEVKFKSYCPKHSSHRKPEESLGKGAAQENGAPECSPRNPLEPFASLEQNREEAHRVSVRKQKLQQLEDEFYTFVNLLDVARALRLPEEVVDFLYQYWKLKRKVNFNKPLITPKKDEEDNLAKREQDVLFRRLQLFTHLRQDLERVRNLTYMVTRREKIKRSVCKVQEQIFNLYTKLLEQERVSGVPSSCSSSSLENMLLFNSPSVGPDAPKIEDLKWHSAFFRKQMGTSLVHSLKKPHKRDPLQNSPGSEGKTLLKQPDLCGRREGMVVPESFLGLEKTFAEARLISAQQKNGVVMPDHGKRRDNRFHCDLIKGDLKDKSFKQSHKPLRSTDVSQRHLDNTRAATSPGVGQSAPGTRKEIVPKCNGSLIKVNYNQTAVKVPTTPASPVKNWGGFRIPKKGERQQQGEAHDGACHQHSDYPYLGLGRVPAKERAKSKLKSDNENDGYVPDVEMSDSESEASEKKCIHTSSTISRRTDIIRRSILAS

SEQ ID NO: 23249 - protein, 830 aa, Homo sapiens
MKRGRLPSSSEDSDDNGSLSTTWSQNSRSQHRRSSCSRHEDRKPSEVFRTDLITAMKLHDSYQLNPDEYYVLADPWRQEWEKGVQVPVSPGTIPQPVARPKKYIVSSGSEPPELGYVDIRTLADSVCRYDLNDMDAAWLELTNEEFKEMGMPELDEYTMERVLEEFEQRCYDNMNHAIETEEGLGIEYDEDVVCDVCQSPDGEDGNEMVFCDKCNICVHQACYGILKVPEGSWLCRTCALGVQPKCLLCPKKGGAMKPTRSGTKWVHVSCALWIPEVSIGSPEKMEPITKVSHIPSSRWALVCSLCNEKFGASIQCSVKNCRTAFHVTCAFDRGLEMKTILAENDEVKFKSYCPKHSSHRKPEESLGKGAAQENGAPECSPRNPLEPFASLEQNREEAHRVSVRKQKLQQLEDEFYTFVNLLDVARALRLPEEVVDFLYQYWKLKRKVNFNKPLITPKKDEEDNLAKREQDVLFRRLQLFTHLRQDLERVRNLTYMVTRREKIKRSVCKVQEQIFNLYTKLLEQERVSGVPSSCSSSSLENMLLFNSPSVGPDAPKIEDLKWHSAFFRKQMGTSLVHSLKKPHKRDPLQNSPGSEGKTLLKQPDLCGRREGMVVPESFLGLEKTFAEARLISAQQKNGVVMPDHGKRRDNRFHCDLIKGDLKDKSFKQSHKPLRSTDVSQRHLDNTRAATSPGVGQSAPGTRKEIVPKCNGSLIKVNYNQTAVKVPTTPASPVKNWGGFRIPKKGERQQQGEAHDGACHQHSDYPYLGLGRVPAKERAKSKLKSDNENDGYVPDVEMSDSESEASEKKCIHTSSTISRRTDIIRRSILAS

SEQ ID NO: 23250 - protein, 509 aa, Homo sapiens
MKRGRLPSSSEDSDDNGSLSTTWSQNSRSQHRRSSCSRHEDRKPSEVFRTDLITAMKLHDSYQLNPDEYYVLADPWRQEWEKGVQVPVSPGTIPQPVARVVSEEKSLMFIRPKKYIVSSGSEPPELGYVDIRTLADSVCRYDLNDMDAAWLELTNEEFKEMGMPELDEYTMERVLEEFEQRCYDNMNHAIETEEGLGIEYDEDVVCDVCQSPDGEDGNEMVFCDKCNICVHQACYGILKVPEGSWLCRTCALGVQPKCLLCPKKGGAMKPTRSGTKWVHVSCALWIPEVSIGSPEKMEPITKVSHIPSSRWALVCSLCNEKFGASIQCSVKNCRTAFHVTCAFDRGLEMKTILAENDEVKFKSYCPKHSSHRKPEESLGKGAAQENGAPECSPRNPLEPFASLEQNREEAHRVSVRKQKLQQLEDEFYTFVNLLDVARALRLPEEVVDFLYQYWKLKRKVNFNKPLITPKKDEEDNLAKREQDVLFRRLQLFTHLRQDLERVMIDTDTL

SEQ ID NO: 23251 - protein, 359 aa, Homo sapiens
MVDIIFHYPFLGAMGDHSKKKPGTAMCVGCGSQIHDQFILRVSPDLEWHAACLKCAECSQYLDETCTCFVRDGKTYCKRDYVRLFGIKCAKCQVGFSSSDLVMRARDSVYHIECFRCSVCSRQLLPGDEFSLREHELLCRADHGLLLERAAAGSPRSPGPLPGARGLHLPDAGSGRQPALRPHVHKQTEKTTRVRTVLNEKQLHTLRTCYAANPRPDALMKEQLVEMTGLSPRVIRVWFQNKRCKDKKKSILMKQLQQQQHSDKTSLQGLTGTPLVAGSPIRHENAVQGSAVEVQTYQPPWKALSEFALQSDLDQPAFQQLVSFSESGSLGNSSGSDVTSLSSQLPDTPNSMVPSPVET

SEQ ID NO: 23252 - protein, 86 aa, Homo sapiens
MRATAIVLLLALTLATMFSIECAKQTKQMVDCSHYKKLPPGQQRFCHHMYDPICGSDGKTYKNDCFFCSKVKKTDGTLKFVHFGKC

SEQ ID NO: 23253 - protein, 85 aa, Homo sapiens
MKITGGLLLLCTVVYFCSSSEAASLSPKKVDCSIYKKYPVVAIPCPITYLPVCGSDYITYGNECHLCTESLKSNGRVQFLHDGSC

SEQ ID NO: 23254 - protein, 427 aa, Homo sapiens
MGTPKPRILPWLVSQLDLGQLEGVAWVNKSRTRFRIPWKHGLRQDAQQEDFGIFQAWAEATGAYVPGRDKPDLPTWKRNFRSALNRKEGLRLAEDRSKDPHDPHKIYEFVNSGVGDFSQPDTSPDTNGGGSTSDTQEDILDELLGNMVLAPLPDPGPPSLAVAPEPCPQPLRSPSLDNPTPFPNLGPSENPLKRLLVPGEEWEFEVTAFYRGRQVFQQTISCPEGLRLVGSEVGDRTLPGWPVTLPDPGMSLTDRGVMSYVRHVLSCLGGGLALWRAGQWLWAQRLGHCHTYWAVSEELLPNSGHGPDGEVPKDKEGGVFDLGPFIVDLITFTEGSGRSPRYALWFCVGESWPQDQPWTKRLVMVKVVPTCLRALVEMARVGGASSLENTVDLHISNSHPLSLTSDQYKAYLQDLVEGMDFQGPGES

SEQ ID NO: 23255 - protein, 300 aa, Homo sapiens
MGTPKPRILPWLVSQLDLGQLEGVAWVNKSRTRFRIPWKHGLRQDAQQEDFGIFQAWAEATGAYVPGRDKPDLPTWKRNFRSALNRKEGLRLAEDRSKDPHDPHKIYEFVNSGVGDFSQPDTSPDTNGGGSTSDTQEDILDELLGNMVLAPLPDPGPPSLAVAPEPCPQPLRSPSLDNPTPFPNLGPSENPLKRLLVPGEDLITFTEGSGRSPRYALWFCVGESWPQDQPWTKRLVMVKVVPTCLRALVEMARVGGASSLENTVDLHISNSHPLSLTSDQYKAYLQDLVEGMDFQGPGES

SEQ ID NO: 23256 - protein, 154 aa, Homo sapiens
MVLAPLPDPGPPSLAVAPEPCPQPLRSPSLDNPTPFPNLGPSENPLKRLLVPGEDLITFTEGSGRSPRYALWFCVGESWPQDQPWTKRLVMVKVVPTCLRALVEMARVGGASSLENTVDLHISNSHPLSLTSDQYKAYLQDLVEGMDFQGPGES

SEQ ID NO: 23257 - protein, 452 aa, Homo sapiens
MGTPKPRILPWLVSQLDLGQLEGVAWVNKSRTRFRIPWKHGLRQDAQQEDFGIFQAWAEATGAYVPGRDKPDLPTWKRNFRSALNRKEGLRLAEDRSKDPHDPHKIYEFVNSGVGDFSQPDTSPDTNGGGSTSDTQEDILDELLGNMVLAPLPDPGPPSLAVAPEPCPQPLRSPSLDNPTPFPNLGPSENPLKRLLVPGEEWEFEVTAFYRGRQVFQQTISCPEGLRLVGSEVGDRTLPGWPVTLPDPGMSLTDRGVMSYVRHVLSCLGGGLALWRAGQWLWAQRLGHCHTYWAVSEELLPNSGHGPDGEVPKDKEGGVFDLGPFIVGSWAPRSDYLHGRKRTLTTLCPLVLCGGVMAPGPAVDQEARDGQGCAHVPQGLGRNGPGRGCLLPGEYCGPAHFQQPPTLPHLRPVQGLPAGLGGGHGFPGPWGELSPRSSWCASNPPVPHHLNQ

SEQ ID NO: 23258 - protein, 104 aa, Homo sapiens
MGTPKPRILPWLVSQLDLGQLEGVAWVNKSRTRFRIPWKHGLRQDAQQEDFGIFQELGTFPSQTPLRTPMVEAVLLIPRKTFWMSYWVTWCWPHSQIRDPQAWL

SEQ ID NO: 23259 - protein, 414 aa, Homo sapiens
MQTFLKGKRVGYWLSEKKIKKLNFQAFAELCRKRGMEVVQLNLSRPIEEQGPLDVIIHKLTDVILEADQNDSQSLELVHRFQEYIDAHPETIVLDPLPAIRTLLDRSKSYELIRKIEAYMEDDRICSPPFMELTSLCGDDTMRLLEKNGLTFPFICKTRVAHGTNSHEMAIVFNQEGLNAIQPPCVVQNFINHNAVLYKVFVVGESYTVVQRPSLKNFSAGTSDRESIFFNSHNVSKPESSSVLTELDKIEGVFERPSDEVIRELSRALRQALGVSLFGIDIIINNQTGQHAVIDINAFPGYEGVSEFFTDLLNHIATVLQGQSTAMAATGDVALLRHSKLLAEPAGGLVGERTCSASPGCCGSMMGQDAPWKAEADAGGTAKLPHQRLGCNAGVSPSFQQHCVASLATKASSQ

SEQ ID NO: 23260 - protein, 314 aa, Homo sapiens
MQTFLKGKRVGYWLSEKKIKKLNFQAFAELCRKRGMEVVQLNLSRPIEEQGPLDVIIHKLTDVILEADQNDSQSLELVHRFQEYIDAHPETIVLDPLPAIRTLLDRSKSYELIRKIEAYMEDDRICSPPFMELTSLCGDDTMRLLEKNGLTFPFICKTRVAHGTNSHEMAIVFNQEGLNAIQPPCVVQNFINHNAVLYKVFVVGESYTVVQRPSLKNFSAGTSDRESIFFNSHNVSKPESSSVLTELDKIEGVFERPSDEVIRELSRALRQALGVSLFGIDIIINNQTGQHAVIDINAFPGDCQVCFIEGWKTD

SEQ ID NO: 23261 - protein, 644 aa, Homo sapiens
MPSKAENLRPSEPAPQPPEGRTLQGQLPGAPPAQRAGSPPDAPGSESPALACSTPATPSGEDPPARAAPIAPRPPARPRLERALSLDDKGWRRRRFRGSQEDLEARNGTSPSRGSVQSEGPGAPAHSCSPPCLSTSLQEIPKSRGVLSSERGSPSSGGNPLSGVASSSPNLPHRDAAVAGSSPRLPSLLPPRPPPALSLDIASDSLRTANKVDSDLADYKLRAQPLLVRAHSSLGPGRPRSPLACDDCSLRSAKSSFSLLAPIRSKDVRSRSYLEGSLLASGALLGADELARYFPDRNVALFVATWNMQGQKELPPSLDEFLLPAEADYAQDLYVIGVQEGCSDRREWETRLQETLGPHYVLLSSAAHGVLYMSLFIRRDLIWFCSEVECSTVTTRIVSQIKTKGALGISFTFFGTSFLFITSHFTSGDGKVAERLLDYTRTVQALVLPRNVPDTNPYRSSAADVTTRFDEVFWFGDFNFRLSGGRTVVDALLCQGLVVDVPALLQHDQLIREMRKGSIFKGFQEPDIHFLPSYKFDIGKDTYDSTSKQRTPSYTDRVLYRSRHKGDICPVSYSSCPGIKTSDHRPVYGLFRVKVRPGRDNIPLAAGKFDRELYLLGIKRRISKEIQRQQALQSQNSSTICSVS

SEQ ID NO: 23262 - protein, 610 aa, Homo sapiens
MPSKAENLRPSEPAPQPPEGRTLQGQLPGAPPAQRAGSPPDAPGSESPALACSTPATPSGEDPPARAAPIAPRPPARPRLERALSLDDKGWRRRRFRGSQEDLEARNGTSPSRGSVQSEGPGAPAHSCSPPCLSTSLQEIPKSRGVLSSERGSPSSGGNPLSGVASSSPNLPHRDAAVAGSSPRLPSLLPPRPPPALSLDIASDSLRTANKVDSDLADYKLRAQPLLVRAHSSLGPGRPRSPLACDDCSLRSAKSSFSLLAPIRSKDVRSRSYLEGSLLASGALLGADELARYFPDRNVALFVATWNMQGQKELPPSLDEFLLPAEADYAQDLYVIGVQEGCSDRDLIWFCSEVECSTVTTRIVSQIKTKGALGISFTFFGTSFLFITSHFTSGDGKVAERLLDYTRTVQALVLPRNVPDTNPYRSSAADVTTRFDEVFWFGDFNFRLSGGRTVVDALLCQGLVVDVPALLQHDQLIREMRKGSIFKGFQEPDIHFLPSYKFDIGKDTYDSTSKQRTPSYTDRVLYRSRHKGDICPVSYSSCPGIKTSDHRPVYGLFRVKVRPGRDNIPLAAGKFDRELYLLGIKRRISKEIQRQQALQSQNSSTICSVS

SEQ ID NO: 23263 - protein, 76 aa, Homo sapiens
MTDVETTYADFIASGRTGRRNAIHDILVSSASGNSNELALKLAGLDINKTEGEEDAQRSSTEQSGEAQGEAAKSES

SEQ ID NO: 23264 - protein, 393 aa, Homo sapiens
MASGRARCTRKLRNWVVEQVESGQFPGVCWDDTAKTMFRIPWKHAGKQDFREDQDAAFFKAWAIFKGKYKEGDTGGPAVWKTRLRCALNKSSEFKEVPERGRMDVAEPYKVYQLLPPGIVSGQPGTQKVPSKRQHSSVSSERKEEEDAMQNCTLSPSVLQDSLNNEEEGASGGAVHSDIGSSSSSSSPEPQEVTDTTEAPFQGDQRSLEFLLPPEPDYSLLLTFIYNGRVVGEAQVQSLDCRLVAEPSGSESSMEQVLFPKPGPLEPTQRLLSQLERGILVASNPRGLFVQRLCPIPISWNAPQAPPGPGPHLLPSNECVELFRTAYFCRDLVRYFQGLGPPPKFQVTLNFWEESHGSSHTPQNLITVKMEQAFARYLLEQTPEQQAAILSLV

SEQ ID NO: 23265 - protein, 202 aa, Homo sapiens
MSASTSSHRPIKGILKNKSSSGSSVATSGQQSGGTIQDVKRKKSQKWDESSILAAHRATYRDYDLMKANEPGTSYMSVQDNGEDSVRDVEGEDSVRGVEGKEATDASDHSCEVDEQESSEAYMRKILLHKQEKKRQFEMRRRLHYNEELNIKLARQLMWKELQSEDNENEETPQGTNEEKTAAEESEEAPLTGGLQTQSCDP

SEQ ID NO: 23266 - protein, 1188 aa, Homo sapiens
MDLPRGLVVAWALSLWPGFTDTFNMDTRKPRVIPGSRTAFFGYTVQQHDISGNKWLVVGAPLETNGYQKTGDVYKCPVIHGNCTKLNLGRVTLSNVSERKDNMRLGLSLATNPKDNSFLACSPLWSHECGSSYYTTGMCSRVNSNFRFSKTVAPALQRCQTYMDIVIVLDGSNSIYPWVEVQHFLINILKKFYIGPGQIQVGVVQYGEDVVHEFHLNDYRSVKDVVEAASHIEQRGGTETRTAFGIEFARSEAFQKGGRKGAKKVMIVITDGESHDSPDLEKVIQQSERDNVTRYAVAVLGYYNRRGINPETFLNEIKYIASDPDDKHFFNVTDEAALKDIVDALGDRIFSLEGTNKNETSFGLEMSQTGFSSHVVEDGVLLGAVGAYDWNGAVLKETSAGKVIPLRESYLKEFPEELKNHGAYLGYTVTSVVSSRQGRVYVAGAPRFNHTGKVILFTMHNNRSLTIHQAMRGQQIGSYFGSEITSVDIDGDGVTDVLLVGAPMYFNEGRERGKVYVYELRQNLFVYNGTLKDSHSYQNARFGSSIASVRDLNQDSYNDVVVGAPLEDNHAGAIYIFHGFRGSILKTPKQRITASELATGLQYFGCSIHGQLDLNEDGLIDLAVGALGNAVILWSRPVVQINASLHFEPSKINIFHRDCKRSGRDATCLAAFLCFTPIFLAPHFQTTTVGIRYNATMDERRYTPRAHLDEGGDRFTNRAVLLSSGQELCERINFHVLDTADYVKPVTFSVEYSLEDPDHGPMLDDGWPTTLRVSVPFWNGCNEDEHCVPDLVLDARSDLPTAMEYCQRVLRKPAQDCSAYTLSFDTTVFIIESTRQRVAVEATLENRGENAYSTVLNISQSANLQFASLIQKEDSDGSIECVNEERRLQKQVCNVSYPFFRAKAKVAFRLDFEFSKSIFLHHLEIELAAGSDSNERDSTKEDNVAPLRFHLKYEADVLFTRSSSLSHYEVKPNSSLERYDGIGPPFSCIFRIQNLGLFPIHGMMMKITIPIATRSGNRLLKLRDFLTDEANTSCNIWGNSTEYRPTPVEEDLRRAPQLNHSNSDVVSINCNIRLVPNQEINFHLLGNLWLRSLKALKYKSMKIMVNAALQRQFHSPFIFREEDPSRQIVFEISKQEDWQVPIWIIVGSTLGGLLLLALLVLALWKLGFFRSARRRREPGLDPTPKVLE

SEQ ID NO: 23267 - protein, 1189 aa, Homo sapiens
MDLPRGLVVAWALSLWPGFTDTFNMDTRKPRVIPGSRTAFFGYTVQQHDISGNKWLVVGAPLETNGYQKTGDVYKCPVIHGNCTKLNLGRVTLSNVSERKDNMRLGLSLATNPKDNSFLACSPLWSHECGSSYYTTGMCSRVNSNFRFSKTVAPALQRCQTYMDIVIVLDGSNSIYPWVEVQHFLINILKKFYIGPGQIQVGVVQYGEDVVHEFHLNDYRSVKDVVEAASHIEQRGGTETRTAFGIEFARSEAFQKGGRKGAKKVMIVITDGESHDSPDLEKVIQQSERDNVTRYAVAVLGYYNRRGINPETFLNEIKYIASDPDDKHFFNVTDEAALKDIVDALGDRIFSLEGTNKNETSFGLEMSQTGFSSHVVEDGVLLGAVGAYDWNGAVLKETSAGKVIPLRESYLKEFPEELKNHGAYLGYTVTSVVSSRQGRVYVAGAPRFNHTGKVILFTMHNNRSLTIHQAMRGQQIGSYFGSEITSVDIDGDGVTDVLLVGAPMYFNEGRERGKVYVYELRQNLFVYNGTLKDSHSYQNARFGSSIASVRDLNQDSYNDVVVGAPLEDNHAGAIYIFHGFRGSILKTPKQRITASELATGLQYFGCSIHGQLDLNEDGLIDLAVGALGNAVILWSRPVVQINASLHFEPSKINIFHRDCKRSGRDATCLAAFLCFTPIFLAPHFQTTTVGIRYNATMDERRYTPRAHLDEGGDRFTNRAVLLSSGQELCERINFHVLDTADYVKPVTFSVEYSLEDPDHGPMLDDGWPTTLRVSVPFWNGCNEDEHCVPDLVLDARSDLPTAMEYCQRVLRKPAQDCSAYTLSFDTTVFIIESTRQRVAVEATLENRGENAYSTVLNISQSANLQFASLIQKEDSDGSIECVNEERRLQKQVCNVSYPFFRAKAKVAFRLDFEFSKSIFLHHLEIELAAGSDSNERDSTKEDNVAPLRFHLKYEADVLFTRSSSLSHYEVKPNSSLERYDGIGPPFSCIFRIQNLGLFPIHGMMMKITIPIATRSGNRLLKLRDFLTDEVANTSCNIWGNSTEYRPTPVEEDLRRAPQLNHSNSDVVSINCNIRLVPNQEINFHLLGNLWLRSLKALKYKSMKIMVNAALQRQFHSPFIFREEDPSRQIVFEISKQEDWQVPIWIIVGSTLGGLLLLALLVLALWKLGFFRSARRRREPGLDPTPKVLE

SEQ ID NO: 23268 - protein, 623 aa, Homo sapiens
MPPPQGDVTALFLGPPGLGKSALIAALCDKDVETLEAPEGRPDSGVPSLRAAGPGLFLGELSCPPAAPGPWAAEANVLVLVLPGPEGNGEPLAPALGEAALAALARGTPLLAVRNLRPGDSQTAAQARDQTAALLNSAGLGAADLFVLPANCGSSDGCEELERLRAALQSQAEALRRLLPPAQDGFEVLGAAELEAVREAFETGGLEAALSWVRSGLERLGSARLDLAVAGKADVGLVVDMLLGLDPGDPGAAPASVPTAPTPFPAPERPNVVLWTVPLGHTGTATTAAAASHPTHYDALILVTPGAPTEKDWAQVQALLLPDAPLVCVRTDGEGEDPECLGEGKMENPKGESLKNAGGGGLENALSKGREKCSAGSQKAGSGEGPGKAGSEGLQQVVGMKKSGGGDSERAAALSPEDETWEVLEEAPPPVFPLRPGGLPGLCEWLRRALPPAQAGALLLALPPASPSAARTKAAALRAGAWRPALLASLAAAAAPLPGLGWACDVALLRGQLAEWRRGLGLEPTALARRERALGLASGELAARAHFPGPVTRAEVEARLGAWAGEGTAGGAALGALSFLWPAGGAAATGGLGYRAAHGVLLQALDEMRADAEAVLAPPEPAQ

SEQ ID NO: 23269 - protein, 1181 aa, Homo sapiens
MGPERTGAAPLPLLLVLALSQGILNCCLAYNVGLPEAKIFSGPSSEQFGYAVQQFINPKGNWLLVGSPWSGFPENRMGDVYKCPVDLSTATCEKLNLQTSTSIPNVTEMKTNMSLGLILTRNMGTGGFLTCGPLWAQQCGNQYYTTGVCSDISPDFQLSASFSPATQPCPSLIDVVVVCDESNSIYPWDAVKNFLEKFVQGLDIGPTKTQVGLIQYANNPRVVFNLNTYKTKEEMIVATSQTSQYGGDLTNTFGAIQYARKYAYSAASGGRRSATKVMVVVTDGESHDGSMLKAVIDQCNHDNILRFGIAVLGYLNRNALDTKNLIKEIKAIASIPTERYFFNVSDEAALLEKAGTLGEQIFSIEGTVQGGDNFQMEMSQVGFSADYSSQNDILMLGAVGAFGWSGTIVQKTSHGHLIFPKQAFDQILQDRNHSSYLGYSVAAISTGESTHFVAGAPRANYTGQIVLYSVNENGNITVIQAHRGDQIGSYFGSVLCSVDVDKDTITDVLLVGAPMYMSDLKKEEGRVYLFTIKKGILGQHQFLEGPEGIENTRFGSAIAALSDINMDGFNDVIVGSPLENQNSGAVYIYNGHQGTIRTKYSQKILGSDGAFRSHLQYFGRSLDGYGDLNGDSITDVSIGAFGQVVQLWSQSIADVAIEASFTPEKITLVNKNAQIILKLCFSAKFRPTKQNNQVAIVYNITLDADGFSSRVTSRGLFKENNERCLQKNMVVNQAQSCPEHIIYIQEPSDVVNSLDLRVDISLENPGTSPALEAYSETAKVFSIPFHKDCGEDGLCISDLVLDVRQIPAAQEQPFIVSNQNKRLTFSVTLKNKRESAYNTGIVVDFSENLFFASFSLPVDGTEVTCQVAASQKSVACDVGYPALKREQQVTFTINFDFNLQNLQNQASLSFQALSESQEENKADNLVNLKIPLLYDAEIHLTRSTNINFYEISSDGNVPSIVHSFEDVGPKFIFSLKVTTGSVPVSMATVIIHIPQYTKEKNPLMYLTGVQTDKAGDISCNADINPLKIGQTSSSVSFKSENFRHTKELNCRTASCSNVTCWLKDVHMKGEYFVNVTTRIWNGTFASSTFQTVQLTAAAEINTYNPEIYVIEDNTVTIPLMIMKPDEKAEVPTGVIIGSIIAGILLLLALVAILWKLGFFKRKYEKMTKNPDEIDETTELSS

SEQ ID NO: 23270 - protein, 547 aa, Homo sapiens
MAMGLFRVCLVVVTAIINHPLLFPRENATVPENEEEIIRKMQAHQEKLQLEQLRLEEEVARLAAEKEALEQVAEEGRQQNETRVAWDLWSTLCMILFLMIEVWRQDHQEGPSPECLGGEEDELPGLGGAPLQGLTLPNKATLGHFYERCIRGATADAARTREFLEGFVDDLLEALRSLCNRDTDMEVEDFIGVDSMYENWQVDRPLLCHLFVPFTPPEPYRFHPELWCSGRSVPLDRQGYGQIKVVRADGDTLSCICGKTKLGEDMLCLLHGRNSMAPPCGDMENLLCATDSLYLDTMQVMKWFQTALTRAWKGIAHKYEFDLAFGQLDSPGSLKIKFRSGKFMPFNLIPVIQCDDSDLYFVSHLPREPSEGTPASSTDWLLSFAVYERHFLRTTLKALPEGACHLSCLQIASFLLSKQSRLTGPSGLSSYHLKTALLHLLLLRQAADWKAGQLDARLHELLCFLEKSLLQKKLHHFFIGNRKVPEAMGLPEAVLRAEPLNLFRPFVLQRSLYRKTLDSFYEMLKNAPALISEYSLHVPSDQPTPKS

SEQ ID NO: 23271 - protein, 1051 aa, Homo sapiens
MGPGPSRAPRAPRLMLCALALMVAAGGCVVSAFNLDTRFLVVKEAGNPGSLFGYSVALHRQTERQQRYLLLAGAPRELAVPDGYTNRTGAVYLCPLTAHKDDCERMNITVKNDPGHHIIEDMWLGVTVASQGPAGRVLVCAHRYTQVLWSGSEDQRRMVGKCYVRGNDLELDSSDDWQTYHNEMCNSNTDYLETGMCQLGTSGGFTQNTVYFGAPGAYNWKGNSYMIQRKEWDLSEYSYKDPEDQGNLYIGYTMQVGSFILHPKNITIVTGAPRHRHMGAVFLLSQEAGGDLRRRQVLEGSQVGAYFGSAIALADLNNDGWQDLLVGAPYYFERKEEVGGAIYVFMNQAGTSFPAHPSLLLHGPSGSAFGLSVASIGDINQDGFQDIAVGAPFEGLGKVYIYHSSSKGLLRQPQQVIHGEKLGLPGLATFGYSLSGQMDVDENFYPDLLVGSLSDHIVLLRARPVINIVHKTLVPRPAVLDPALCTATSCVQVELCFAYNQSAGNPNYRRNITLAYTLEADRDRRPPRLRFAGSESAVFHGFFSMPEMRCQKLELLLMDNLRDKLRPIIISMNYSLPLRMPDRPRLGLRSLDAYPILNQAQALENHTEVQFQKECGPDNKCESNLQMRAAFVSEQQQKLSRLQYSRDVRKLLLSINVTNTRTSERSGEDAHEALLTLVVPPALLLSSVRPPGACQANETIFCELGNPFKRNQRMELLIAFEVIGVTLHTRDLQVQLQLSTSSHQDNLWPMILTLLVDYTLQTSLSMVNHRLQSFFGGTVMGESGMKTVEDVGSPLKYEFQVGPMGEGLVGLGTLVLGLEWPYEVSNGKWLLYPTEITVHGNGSWPCRPPGDLINPLNLTLSDPGDRPSSPQRRRRQLDPGGGQGPPPVTLAAAKKAKSETVLTCATGRAHCVWLECPIPDAPVVTNVTVKARVWNSTFIEDYRDFDRVRVNGWATLFLRTSIPTINMENKTTWFSVDIDSELVEELPAEIELWLVLVAVGAGLLLLGLIILLLWKCGFFKRARTRALYEAKRQKAEMKSQPSETERLTDDY

SEQ ID NO: 23272 - protein, 1066 aa, Homo sapiens
MGPGPSRAPRAPRLMLCALALMVAAGGCVVSAFNLDTRFLVVKEAGNPGSLFGYSVALHRQTERQQRYLLLAGAPRELAVPDGYTNRTGAVYLCPLTAHKDDCERMNITVKNDPGHHIIEDMWLGVTVASQGPAGRVLVCAHRYTQVLWSGSEDQRRMVGKCYVRGNDLELDSSDDWQTYHNEMCNSNTDYLETGMCQLGTSGGFTQNTVYFGAPGAYNWKGNSYMIQRKEWDLSEYSYKDPEDQGNLYIGYTMQVGSFILHPKNITIVTGAPRHRHMGAVFLLSQEAGGDLRRRQVLEGSQVGAYFGSAIALADLNNDGWQDLLVGAPYYFERKEEVGGAIYVFMNQAGTSFPAHPSLLLHGPSGSAFGLSVASIGDINQDGFQDIAVGAPFEGLGKVYIYHSSSKGLLRQPQQVIHGEKLGLPGLATFGYSLSGQMDVDENFYPDLLVGSLSDHIVLLRARPVINIVHKTLVPRPAVLDPALCTATSCVQVELCFAYNQSAGNPNYRRNITLAYTLEADRDRRPPRLRFAGSESAVFHGFFSMPEMRCQKLELLLMDNLRDKLRPIIISMNYSLPLRMPDRPRLGLRSLDAYPILNQAQALENHTEVQFQKECGPDNKCESNLQMRAAFVSEQQQKLSRLQYSRDVRKLLLSINVTNTRTSERSGEDAHEALLTLVVPPALLLSSVRPPGACQANETIFCELGNPFKRNQRMELLIAFEVIGVTLHTRDLQVQLQLSTSSHQDNLWPMILTLLVDYTLQTSLSMVNHRLQSFFGGTVMGESGMKTVEDVGSPLKYEFQVGPMGEGLVGLGTLVLGLEWPYEVSNGKWLLYPTEITVHGNGSWPCRPPGDLINPLNLTLSDPGDRPSSPQRRRRQLDPGGGQGPPPVTLAAAKKAKSETVLTCATGRAHCVWLECPIPDAPVVTNVTVKARVWNSTFIEDYRDFDRVRVNGWATLFLRTSIPTINMENKTTWFSVDIDSELVEELPAEIELWLVLVAVGAGLLLLGLIILLLWKCDFFKRTRYYQIMPKYHAVRIREEERYPPPGSTLPTKKHWVTSWQTRDQYY

SEQ ID NO: 23273 - protein, 426 aa, Homo sapiens
MCDRNGGRRLRQWLIEQIDSSMYPGLIWENEEKSMFRIPWKHAGKQDYNQEVDASIFKAWAVFKGKFKEGDKAEPATWKTRLRCALNKSPDFEEVTDRSQLDISEPYKVYRIVPEEEQKCKLGVATAGCVNEVTEMECGRSEIDELIKEPSVDDYMGMIKRSPSPPEACRSQLLPDWWAQQPSTGVPLVTGYTTYDAHHSAFSQMVISFYYGGKLVGQATTTCPEGCRLSLSQPGLPGTKLYGPEGLELVRFPPADAIPSERQRQVTRKLFGHLERGVLLHSSRQGVFVKRLCQGRVFCSGNAVVCKGRPNKLERDEVVQVFDTSQFFRELQQFYNSQGRLPDGRVVLCFGEEFPDMAPLRSKLILVQIEQLYVRQLAEEAGKSCGAGSVMQAPEEPPPDQVFRMFPDICASHQRSFFRENQQITV

SEQ ID NO: 23274 - protein, 1291 aa, Homo sapiens
MPPNFPEFAERIEASLSEVSEAGASNPSLQEKKESSSALTESSGHLDHREPQSESVTLEHVSKSIGIPEVQDFKNLSGDCQDFRFQQHSANPPHEFQPVESEAVATSGNTDVMQESRFSSATWPRATKSLAKGGFSEKQHPLGDTACTVEMPPLSPCLSEELLDPELHVLITPSLREKTESELKFEEDERWIMMEAEGEWEEEKLSDREKTFLMADEKNSLADIFEEREQANTAVVEDGSDCLAAVLRTFGHLSLGQICCPDDPQPAKDQLATVPKDIPLDCDCVLTGEDILGEVANRTAQGLEGLVSDSACTVGTIDAEQLSDTDSVQMFLELEKECLCEEGVTPLVELQNQISSEGLAASQDAENLLVISHFSGAALEKEQHLGLLHVRAKDYDTRLDCGYFNTLDSSQVPNAVELIAHVDIMRDTSTVSKEECEKVPFSPRTAEFKSRQPADLDSLEKLDPGGLLNSDHRVSHEEKLSGFIASELAKDNGSLSQGDCSQTEGNGEECIERVTFSFAFNHELTDVTSGPEVEVLYESNLLTDEIHLESGNVTVNQENNSLTSMGNVVTCELSVEKVCDEDGEAKELDYQATLLEDQAPAHFHRNFPEQVFQDLQRKSPESEILSLHLLVEELRLNPDGVETVNDTKPELNVASSEGGEMERRDSDSFLNIFPEKQVTKAGNTEPVLEEWIPVLQRPSRTAAVPTVKDALDAALPSPEEGTSIAAVPAPEGTAVVAALVPFPHEDILVASIVSLEEEDVTAAAVSAPERATVPAVTVSVPEGTAAVAAVSSPEETAPAVAAAITQEGMSAVAGFSPEWAALAITVPITEEDGTPEGPVTPATTVHAPEEPDTAAVRVSTPEEPASPAAAVPTPEEPTSPAAAVPTPEEPTSPAAAVPPPEEPTSPAAAVPTPEEPTSPAAAVPTPEEPTSPAAAVPTPEEPTSPAAAVPTPEEPTSPAAAVPTPEEPTSPAAAVPTPEEPASPAAAVPTPEEPASPAAAVPTPEEPAFPAPAVPTPEESASAAVAVPTPEESASPAAAVPTPAESASFAAVVATLEEPTSPAASVPTPAAMVATLEEFTSPAASVPTSEEPASLAAAVSNPEEPTSPAAAVPTLEEPTSSAAAVLTPEELSSPAASVPTPEEPASPAAAVSNLEEPASPAAAVPTPEVAAIPAASVPTPEVPAIPAAAVPPMEEVSPIGVPFLGVSAHTDSVPISEEGTPVLEEASSTGMWIKEDLDSLVFGIKEVTSTVLHGKVPLAATAGLNSDEVIVHFDSGKGLKSKVRFAGLTWW

SEQ ID NO: 23275 - protein, 980 aa, Homo sapiens
MPPNFPEFAERIEASLSEVSEAGASNPSLQEKKESSSALTESSGHLDHREPQSESVTLEHVSKSIGIPEVQDFKNLSGDCQDFRFQQHSANPPHEFQPVESEAVATSGNTDVMQESRFSSATWPRATKSLAKGGFSEKQHPLGDTACTVEMPPLSPCLSEELLDPELHVLITPSLREKTESELKFEEDERWIMMEAEGEWEEEKLSDREKTFLMADEKNSLADIFEEREQANTAVVEDGSDCLAAVLRTFGHLSLGQICCPDDPQPAKDQLATVPKDIPLDCDCVLTGEDILGEVANRTAQGLEGLVSDSACTVGTIDAEQLSDTDSVQMFLELEKECLCEEGVTPLVELQNQISSEGLAASQDAENLLVISHFSGAALEKEQHLGLLHVRAKDYDTRLDCGYFNTLDSSQVPNAVELIAHVDIMRDTSTVSKEECEKVPFSPRTAEFKSRQPADLDSLEKLDPGGLLNSDHRVSHEEKLSGFIASELAKDNGSLSQGDCSQTEGNGEECIERVTFSFAFNHELTDVTSGPEVEVLYESNLLTDEIHLESGNVTVNQENNSLTSMGNVVTCELSVEKVCDEDGEAKELDYQATLLEDQAPAHFHRNFPEQVFQDLQRKSPESEILSLHLLVEELRLNPDGVETVNDTKPELNVASSEGGEMERRDSDSFLNIFPEKQVTKAGNTEPVLEEWIPVLQRPSRTAAVPTVKDALDAALPSPEEGTSIAAVPAPEGTAVVAALVPFPHEDILVASIVSLEEEDVTAAAVSAPERATVPAVTVSVPEGTAAVAAVSSPEETAPAVAAAITQEGMSAVAGFSPEWAALAITVPITEEDGTPEGPVTPATTVHAPEEPDTAAVRVSTPEEPASPAAAVPTPEEPTSPAAAVPTPEEPTSPAAAVPPPEEPTSPAAAVPTPEEPTSPAAAVPTPEEPTSPAAAVPTPEEPTSPAAAVPTPEEPTSPAAAVPTPEDAPHPTTHSKNPYT

SEQ ID NO: 23276 - protein, 634 aa, Homo sapiens
MWLQQRLKGLPGLLSSSWARRLLCLLGLLLLLLWFGGSGARRAAGGLHLLPWSRGEPGAAEPSACLEAATRAWRGLRERGEVVPLGPGVPALVANGFLALDVAANRLWVTPGEREPAVAPDFVPFVQLRPLSALAEAGEAVLLLREGLLRRVRCLQLGSPGPGPVAAGPGPASVSGLAAGSGRDCVLLQEDFLAHRGRPHVYLQRIQLNNPTERVAALQTVGPTAGPAPKAFTSTLEKVGDHQFLLYSGRSPPTPTGLVHLVVVAAKKLVNRLQVAPKTQLDETVLWVVHVSGPINPQVLKSKAAKELKALQDLARKEMLELLDMPAAELLQDHQLLWAQLFSPGVEMKKITDTHTPSGLTVNLTLYYMLSCSPAPLLSPSLSHRERDQMESTLNYEDHCFSGHATMHAENLWPGRLSSVQQILQLSDLWRLTLQKRGCKGLVKVGAPGILQGMVLSFGGLQFTENHLQFQADPDVLHNSYALHGIRYKNDHINLAVLADAEGKPYLHVSVESRGQPVKIYACKAGCLDEPVELTSAPTGHTFSVMVTQPITPLLYISTDLTHLQDLRHTLHLKAILAHDEHMAQQDPGLPFLFWFSVASLITLFHLFLFKLIYNEYCGPGAKPLFRSKEDPSV

SEQ ID NO: 23277 - protein, 667 aa, Homo sapiens
MWLQQRLKGLPGLLSSSWARRLLCLLGLLLLLLWFGGSGARRAAGGLHLLPWSRGEPGAAEPSACLEAATRAWRGLRERGEVVPLGPGVPALVANGFLALDVAANRLWVTPGEREPAVAPDFVPFVQLRPLSALAEAGEAVLLLREGLLRRVRCLQLGSPGPGPVAAGPGPASVSGLAAGSGRDCVLLQEDFLAHRGRPHVYLQRIQLNNPTERVAALQTVGPTAGPAPKAFTSTLEKVGDHQFLLYSGRSPPTPTGLVHLVVVAAKKLVNRLQVAPKTQLDETVLWVVHVSGPINPQVLKSKAAKELKALQDLARKEMLELLDMPAAELLQDHQLLWAQLFSPGVEMKKITDTHTPSGLTVNLTLYYMLSCSPAPLLSPSLSHRERDQMESTLNYEDHCFSGHATMHAENLWPGRLSSVQQILQLSDLWRLTLQKRGCKGLVKVGAPGILQGMVLSFGGLQFTENHLQFQADPDVLHNSYALHGIRYKNDHINLAVLADAEGKPYLHVSVESRGQPVKIYACKAGCLDEPVELTSAPTGHTFSVMVTQPITPLLYISTDLTHLQDLRHTLHLKAILAHDEHMAQQDPGLPFLFWFSVASLITLFHLFLFKLIYNEYCGPGAKPLFRSKVGSRHLVETRGLGLALSPVSRKGLAWRGGVRPGQEWVS

SEQ ID NO: 23278 - protein, 1275 aa, Homo sapiens
MDWDDEYSHNSFDLHCLLNSFPGDLEFEQIFSDIDEKIEQNAASIKHCIKEIQSEINKQCPGVQLQTTTDCFEWLTNYNYSTSESSFISHGDLIKFFKTLQDLLKNEQNQEEMTLDLLWDLSCHSSVSFPSTLSGTSFHFLSRTSLHSVEDNSSMDVKSMWDDIRLHLRRFLVSKLQSHNEINNSQQKILLKKQCLQQLLFLYPESEVIIKYQNIQNKLLANLLWNCFPSYNRDSNLDVIAHGYQSTMLKLYSVIKEDFNTLCEILAPSSMVKFIKETYLDTVTEEMAKFLENFCELQFRENAVRVVKTSKSSSKHRGAVHALVTTECPQKGRNFSLPLDKVEFLSQLIKSFMKLEKGVQELFDEILLSLKITRDTSGILEKSDREVVMEKPRANETNIPSEQSLPGKEATLLDFGWRSAFKEVSLPMAHCVVTAIEGFSTKILQQEQNERSSAVSYAMNLVNVQQVWQDSHMFPEEEQPKKIGKFCSDIMEKLDTMLPLALACRDDSFQEIRANLVEACCKVATAVLQRLQERAKEVPSKAPLKNLHTYLSTAVYVFQHFKRYDNLMKEMTKKPIFLVLVQRYQEFINTLQFQVTNYCVRVCATSILQDAESHHWDDYKAFYEGERCSFSIQMWHYFCWSLHYDLWTILPPKLAQEILVEVLEKSLSLLASRYARAHPSRKRTPQLRLDVTTILICTENMLWSVCTSVQKLLNPHQHTDDKIFKIHTHCNNLFTTLVILTSPLTELYKTFQHGLDESASDSLKSFFKQPLYWVSCISHFYPSLLRTPSAGGLKAEGQLKLLLSQPRCNWNLLLETLLHHDGLLLRILLKSSKQVSDTENNLNQGPSLMEAIFKILYHCSFSPQTFANVFVSYMEEEQLWDFLYNIPVSTCVEYELEVIRCLRLALTDAIKDTVQQIVSVMSSRRNCETNLNKHIVPDCLLESMPKEWNYSPKETNRKESCKSFTRLTAQAVSIVISKLPTVIACLPPPVKYFFFLSERKMSKKFVELKKAGLLVWNLIVIICRIFEDGNTVELLTGASLDRWSKEKLGLICMCLKSIMGDQTSIHNQMIQKVIQSIEQQKPNWIERQLLKARKLSTECAFMTIEKSTALQEGDVALELTEQKINTMVLDLCHKPGGREYLRQIYHIMQLNEEYLKEQLFSMNSSEEKPLPIRPLKTTLRSIEDQPSAFNPFHVYKAFSENMLDQSAITKWNWNWAKLLPNYLRLDKMTFSVLLKNRWEMKKDETLEEEEKAILEHLKQICTPQNSSASDNIEEQ

SEQ ID NO: 23279 - protein, 324 aa, Homo sapiens
MDWDDEYSHNSFDLHCLLNSFPGDLEFEQIFSDIDEKIEQNAASIKHCIKEIQSEINKQCPGVQLQTTTDCFEWLTNYNYSTSESSFISHGDLIKFFKTLQDLLKNEQNQEEMTLDLLWDLSCHSSVSFPSTLSGTSFHFLSRTSLHSVEDNSSMDVKSMWDDIRLHLRRFLVSKLQSHNEINNSQQKILLKKQCLQQLLFLYPESEVIIKYQNIQNKLLANLLWNCFPSYNRDSNLDVIAHGYQSTMLKLYSVIKEDFNTLCEILAPSSMVKFIKETYLDTVTEEMAKFLENFCELQFRENAVRVVKTSKSSSKHRGAVHALG

SEQ ID NO: 23280 - protein, 938 aa, Homo sapiens
MDWDDEYSHNSFDLHCLLNSFPGDLEFEQIFSDIDEKIEQNAASIKHCIKEIQSEINKQCPGVQLQTTTDCFEWLTNYNYSTSESSFISHGDLIKFFKTLQDLLKNEQNQEEMTLDLLWDLSCHSSVSFPSTLSGTSFHFLSRTSLHSVEDNSSMDVKSMWDDIRLHLRRFLVSKLQSHNEINNSQQKILLKKQCLQQLLFLYPESEVIIKYQNIQNKLLANLLWNCFPSYNRDSNLDVIAHGYQSTMLKLYSVIKEDFNTLCEILAPSSMVKFIKETYLDTVTEEMAKFLENFCELQFRENAVRVVKTSKSSSKHRGAVHALVTTECPQKGRNFSLPLDKVEFLSQLIKSFMKLEKGVQELFDEILLSLKITRDTSGILEKSDREVVMEKPRANETNIPSEQSLPGKEATLLDFGWRSAFKEVSLPMAHCVVTAIEGFSTKILQQEQNERSSAVSYAMNLVNVQQVWQDSHMFPEEEQPKKIGKFCSDIMEKLDTMLPLALACRDDSFQEIRANLVEACCKVATAVLQRLQERAKEVPSKAPLKNLHTYLSTAVYVFQHFKRYDNLMKEMTKKPIFLVLVQRYQEFINTLQFQVTNYCVRVCATSILQDAESHHWDDYKAFYEGERCSFSIQMWHYFCWSLHYDLWTILPPKLAQEILVEVLEKSLSLLASRYARAHPSRKRTPQLRLDVTTILICTENMLWSVCTSVQKLLNPHQHTDDKIFKIHTHCNNLFTTLVILTSPLTELYKTFQHGLDESASDSLKSFFKQPLYWVSCISHFYPSLLRTPSAGGLKAEGQLKLLLSQPRCNWNLLLETLLHHDGLLLRILLKSSKRTFQEQVSDTENNLNQGPSLMEAIFKILYHCSFSPQTFANVFVSYMEEEQLWDFLYNIPGMRHLLFVKEMFYRYLYVPLKMFRSCIDTGFAESVVGESLPYIFSV

SEQ ID NO: 23281 - protein, 1200 aa, Homo sapiens
MDPPSLDTAIQHALAGLYPPFEATAPTVLGQVFRLLDSGFQGDGLSFLLDFLIPAKRLCEQVREAACAPYSHCLFLHEGWPLCLRDEVVVHLAPLNPLLLRQGDFYLQVEPQEEQSVCIMIKCLSLDLCTVDKKPVPEPAYPILFTQEWLEAINSDFEGNPLHNCLVASENGIAPVPWTKITSPEFVDDRPQVVNALCQAWGPLPLEALDLSSPQELHQASSPDNQVLPAQSLAKGKGRTYGSKYPGLIKVEQARCGEVAFRMDEVVSQDFEGDYVALLGFSQESRGESPSREAGTSSGCTSGALEEIAGTKETPLFQKILPLSEANEGPSLGNRACTKPESSEERPYNLGFRRKVNLKAPTHNSERPPQGSYMNVLEDALDCASGLRAGVSQEPAASKMQGPLGNPENMVQLRPGPRQASSPRLSPASPAAAASETKIEVKTKERNGRLPKPMPCPSRNTSSPEPPTPGLKFSFLRGQRQPSVTPEKASLQHNGPWKVLCSLYSPKPNRAKSLGKAGTTQTKTSGPATAPSPLTEEKAALPEASAGSPERGPTLEEEPPGPEPRIGALGVKVFRSRIACLPGGRDRAGRPLLLVSTTEGAWEAPWCTVSEVTKLLSYLCTIPRPEDKAKGLAVLIDARRQPPQPGLVSALQATQAQVPASIRAILFLGEKEAALQLQTLPDVQVEVLTSLKALSHHVDPSQLPAVLEGPFPYCHTEWVHFFQKLDPFLADLHQASSLLQASIEEFEKADPPGGMQEATRCLSKSKELMEAVLRDPGLLGLQREGGATLARLQHDASRLDFSPDVRSHLAAATALYSLVDEQLHVLVTASNSLLGKLELRVRLGRLEAAIHQVSDWMEQEGRRCLQSLTPKDGSLETVEKAHAEFENFFLQAAAQYRRGLELSKQAAQLGATARGAGEAERAEFPELAAFASTQRAFQAELTHFYMAAERQRTDLETLLHLHRFCKRMTWFHMDCQDLMAQLRLDKTSRVSPGDQRRLHRYLQRLASEFPAEKLAAVGLQVASLSRAGLGQELWEEARIRHEEIRMLLEKALTHSSCPEAPAAHSARPERRGVAAKGQGVSVEVTSKGRWDQPPLDSLGMDHLPKSYWPPGPPRGEQNRTFQAGSPPQEAGQAAEAEDGKGSHKLPDPAREHLLATTFFRQQPPRQSQVPRLTGGSFSSEGTDSQTSLEDSPQTSPLASL

SEQ ID NO: 23282 - protein, 523 aa, Homo sapiens
MSRQFTCKSGAAAKGGFSGCSAVLSGGSSSSFRAGSKGLSGGFGSRSLYSLGGVRSLNVASGSGKSGGYGFGRGRASGFAGSMFGSVALGPVCPTVCPPGGIHQVTVNESLLAPLNVELDPEIQKVRAQEREQIKALNNKFASFIDKVRFLEQQNQVLETKWELLQQLDLNNCKNNLEPILEGYISNLRKQLETLSGDRVRLDSELRNVRDVVEDYKKRYEEEINKRTAAENEFVLLKKDVDAAYANKVELQAKVESMDQEIKFFRCLFEAEITQIQSHISDMSVILSMDNNRNLDLDSIIDEVRTQYEEIALKSKAEAEALYQTKFQELQLAAGRHGDDLKNTKNEISELTRLIQRIRSEIENVKKQASNLETAIADAEQRGDNALKDARAKLDELEGALHQAKEELARMLREYQELMSLKLALDMEIATYRKLLESEECRMSGEFPSPVSISIISSTSGGSVYGFRPSMVSGGYVANSSNCISGVCSVRGGEGRSRGSANDYKDTLGKGSSLSAPSKKTSR

SEQ ID NO: 23283 - protein, 962 aa, Homo sapiens
MASNSTKSFLADAGYGEQELDANSALMELDKGLRSGKLGEQCEAVVRFPRLFQKYPFPILINSAFLKLADVFRVGNNFLRLCVLKVTQQSEKHLEKILNVDEFVKRIFSVIHSNDPVARAITLRMLGSLASIIPERKNAHHSIRQSLDSHDNVEVEAAVFAAANFSAQSKDFAVGICNKISEMIQGLATPVDLKLKLIPILQHMHHDAILASSARQLLQQLVTSYPSTKMVIVSLHTFTLLAASSLVDTPKQIQLLLQYLKNDPRKAVKRLAIQDLKLLANKTPHTWSRENIQALCECALQTPYDSLKLGMLSVLSTLSGTIAIKHYFSIVPGNVSSSPRSSDLVKLAQECCYHNNRGIAAHGVRVLTNITVSCQEKDLLALEQDAVFGLESLLVLCSQDDSPGAQATLKIALNCMVKLAKGRPHLSQSVVETLLTQLHSAQDAARILMCHCLAAIAMQLPVLGDGMLGDLMELYKVIGRSATDKQQELLVSLATVIFVASQKALSVESKAVIKQQLESVSNGWTVYRIARQASRMGNHDMAKELYQSLLTQVASEHFYFWLNSLKEFSHAEQCLTGLQEENYSSALSCIAESLKFYHKGIASLTAASTPLNPLSFQCEFVKLRIDLLQAFSQLICTCNSLKTSPPPAIATTIAMTLGNDLQRCGRISNQMKQSMEEFRSLASRYGDLYQASFDADSATLRNVELQQQSCLLISHAIEALILDPESASFQEYGSTGTAHADSEYERRMMSVYNHVLEEVESLNRKYTPVSYMHTACLCNAIIALLKVPLSFQRYFFQKLQSTSIKLALSPSPRNPAEPIAVQNNQQLALKVEGVVQHGSKPGLFRKIQSVCLNVSSTLQSKSGQDYKIPIDNMTNEMEQRVEPHNDYFSTQFLLNFAILGTHNITVESSVKDANGIVWKTGPRTTIFVKSLEDPYSQQIRLQQQQAQQPLQQQQQRNAYTRF

SEQ ID NO: 23284 - protein, 948 aa, Homo sapiens
MASNSTKSFLADAGYGEQELDANSALMELDKGLRSGKLGEQCEAVVRFPRLFQKYPFPILINSAFLKLADVFRVGNNFLRLCVLKVTQQSEKHLEKILNVDEFVKRIFSVIHSNDPVARAITLRMLGSLASIIPERKNAHHSIRQSLDSHDNVEVEAAVFAAANFSAQSKDFAVGICNKISEMIQGLATPVDLKLKLIPILQHMHHDAILASSARQLLQQLVTSYPSTKMVIVSLHTFTLLAASSLVDTPKQIQLLLQYLKNDPRKAVKRLAIQDLKLLANKTPHTWSRENIQALCECALQTPYDSLKLGMLSVLSTLSGTIAIKHYFSIVPGNVSSSPRSSDLVKLAQECCYHNNRGIAAHGVRVLTNITVSCQEKDLLALEQDAVFGLESLLVLCSQDDSPGAQATLKIALNCMVKLAKGRPHLSQSVVETLLTQLHSAQDAARILMCHCLAAIAMQLPVLGDGMLGDLMELYKVIGRSATDKQQELLVSLATVIFVASQKALSVESKAVIKQQLESVSNGWTVYRIARQASRMGNHDMAKELYQSLLTQVASEHFYFWLNSLKEFSHAEQCLTGLQEENYSSALSCIAESLKFYHKGIASLTAASTPLNPLSFQCEFVKLRIDLLQAFSQLICTCNSLKTSPPPAIATTIAMTLGNDLQRCGRISNQMKQSMEEFRSLASRYGDLYQASFDADSATLRNVELQQQSCLLISHAIEALILDPESASFQEYGSTGTAHADSEYERRMMSVYNHVLEEHTACLCNAIIALLKVPLSFQRYFFQKLQSTSIKLALSPSPRNPAEPIAVQNNQQLALKVEGVVQHGSKPGLFRKIQSVCLNVSSTLQSKSGQDYKIPIDNMTNEMEQRVEPHNDYFSTQFLLNFAILGTHNITVESSVKDANGIVWKTGPRTTIFVKSLEDPYSQQIRLQQQQAQQPLQQQQQRNAYTRF

SEQ ID NO: 23285 - protein, 942 aa, Homo sapiens
MASNSTKSFLADAGYGEQELDANSALMELDKGLRSGKLGEQCEAVVRFPRLFQKYPFPILINSAFLKLADVFRVGNNFLRLCVLKVTQQSEKHLEKILNVDEFVKRIFSVIHSNDPVARAITLRMLGSLASIIPERKNAHHSIRQSLDSHDNVEVEAAVFAAANFSAQSKDFAVGICNKISEMIQGLATPVDLKLKLIPILQHMHHDAILASSARQLLQQLVTSYPSTKMVIVSLHTFTLLAASSLVDTPKQIQLLLQYLKNDPRKAVKRLAIQDLKLLANKTPHTWSRENIQALCECALQTPYDSLKLGMLSVLSTLSGTIAIKHYFSIVPGNVSSSPRSSDLVKLAQECCYHNNRGIAAHGVRVLTNITVSCQEKDLLALEQDAVFGLESLLVLCSQDDSPGAQATLKIALNCMVKLAKGRPHLSQSVVETLLTQLHSAQDAARILMCHCLAAIAMQLPVLGDGMLGDLMELYKVIGRSATDKQQELLVSLATVIFVASQKALSVESKAVIKQQLESVSNGWTVYRIARQASRMGNHDMAKELYQSLLTQVASEHFYFWLNSLKEFSHAEQCLTGLQEENYSSALSCIAESLKFYHKGIASLTAASTPLNPLSFQCEFVKLRIDLLQAFSQLICTCNSLKTSPPPAIATTIAMTLGNDLQRCGRISNQMKQSMEEFRSLASRYGDLYQASFDADSATLRNVELQQQSCLLISHAIEALILDPESASFQEYGSTGTAHADSEYERRMMSVYNHVLEEVESLNRKYTPVSYMRYFFQKLQSTSIKLALSPSPRNPAEPIAVQNNQQLALKVEGVVQHGSKPGLFRKIQSVCLNVSSTLQSKSGQDYKIPIDNMTNEMEQRVEPHNDYFSTQFLLNFAILGTHNITVESSVKDANGIVWKTGPRTTIFVKSLEDPYSQQIRLQQQQAQQPLQQQQQRNAYTRF

SEQ ID NO: 23286 - protein, 913 aa, Homo sapiens
MASNSTKSFLADAGYGEQELDANSALMELDKGLRSGKLGEQCEAVVRFPRLFQKYPFPILINSAFLKLADVFRVGMLGSLASIIPERKNAHHSIRQSLDSHDNVEVEAAVFAAANFSAQSKDFAVGICNKISEMIQGLATPVDLKLKLIPILQHMHHDAILASSARQLLQQLVTSYPSTKMVIVSLHTFTLLAASSLVDTPKQIQLLLQYLKNDPRKAVKRLAIQDLKLLANKTPHTWSRENIQALCECALQTPYDSLKLGMLSVLSTLSGTIAIKHYFSIVPGNVSSSPRSSDLVKLAQECCYHNNRGIAAHGVRVLTNITVSCQEKDLLALEQDAVFGLESLLVLCSQDDSPGAQATLKIALNCMVKLAKGRPHLSQSVVETLLTQLHSAQDAARILMCHCLAAIAMQLPVLGDGMLGDLMELYKVIGRSATDKQQELLVSLATVIFVASQKALSVESKAVIKQQLESVSNGWTVYRIARQASRMGNHDMAKELYQSLLTQVASEHFYFWLNSLKEFSHAEQCLTGLQEENYSSALSCIAESLKFYHKGIASLTAASTPLNPLSFQCEFVKLRIDLLQAFSQLICTCNSLKTSPPPAIATTIAMTLGNDLQRCGRISNQMKQSMEEFRSLASRYGDLYQASFDADSATLRNVELQQQSCLLISHAIEALILDPESASFQEYGSTGTAHADSEYERRMMSVYNHVLEEVESLNRKYTPVSYMHTACLCNAIIALLKVPLSFQRYFFQKLQSTSIKLALSPSPRNPAEPIAVQNNQQLALKVEGVVQHGSKPGLFRKIQSVCLNVSSTLQSKSGQDYKIPIDNMTNEMEQRVEPHNDYFSTQFLLNFAILGTHNITVESSVKDANGIVWKTGPRTTIFVKSLEDPYSQQIRLQQQQAQQPLQQQQQRNAYTRF

SEQ ID NO: 23287 - protein, 769 aa, Homo sapiens
MLGLRPPLLALVGLLSLGCVLSQECTKFKVSSCRECIESGPGCTWCQKLNFTGPGDPDSIRCDTRPQLLMRGCAADDIMDPTSLAETQEDHNGGQKQLSPQKVTLYLRPGQAAAFNVTFRRAKGYPIDLYYLMDLSYSMLDDLRNVKKLGGDLLRALNEITESGRIGFGSFVDKTVLPFVNTHPDKLRNPCPNKEKECQPPFAFRHVLKLTNNSNQFQTEVGKQLISGNLDAPEGGLDAMMQVAACPEEIGWRNVTRLLVFATDDGFHFAGDGKLGAILTPNDGRCHLEDNLYKRSNEFDYPSVGQLAHKLAENNIQPIFAVTSRMVKTYEKLTEIIPKSAVGELSEDSSNVVQLIKNAYNKLSSRVFLDHNALPDTLKVTYDSFCSNGVTHRNQPRGDCDGVQINVPITFQVKVTATECIQEQSFVIRALGFTDIVTVQVLPQCECRCRDQSRDRSLCHGKGFLECGICRCDTGYIGKNCECQTQGRSSQELEGSCRKDNNSIICSGLGDCVCGQCLCHTSDVPGKLIYGQYCECDTINCERYNGQVCGGPGRGLCFCGKCRCHPGFEGSACQCERTTEGCLNPRRVECSGRGRCRCNVCECHSGYQLPLCQECPGCPSPCGKYISCAECLKFEKGPFGKNCSAACPGLQLSNNPVKGRTCKERDSEGCWVAYTLEQQDGMDRYLIYVDESRECVAGPNIAAIVGGTVAGIVLIGILLLVIWKALIHLSDLREYRRFEKEKLKSQWNNDNPLFKSATTTVMNPKFAES

SEQ ID NO: 23288 - protein, 280 aa, Homo sapiens
MLGQQQQQLYSSAALLTGERSRLLTCYVQDYLECVESLPHDMQRNVSVLRELDNKYQETLKEIDDVYEKYKKEDDLNQKKRLQQLLQRALINSQELGDEKIQIVTQMLELVENRARQMELHSQCFQDPAESERASDKAKMDSSQPERSSRRPRRQRTSESRDLCHMANGIEDCDDQPPKEKKSKSAKKKKRSKAKQEREASPVEFAIDPNEPTYCLCNQVSYGEMIGCDNEQCPIEWFHFSCVSLTYKPKGKWYCPKCRGDNEKTMDKSTEKTKKDRRSR

SEQ ID NO: 23289 - protein, 240 aa, Homo sapiens
MDQDGDQQLGPSRILAPQTLKEIDDVYEKYKKEDDLNQKKRLQQLLQRALINSQELGDEKIQIVTQMLELVENRARQMELHSQCFQDPAESERASDKAKMDSSQPERSSRRPRRQRTSESRDLCHMANGIEDCDDQPPKEKKSKSAKKKKRSKAKQEREASPVEFAIDPNEPTYCLCNQVSYGEMIGCDNEQCPIEWFHFSCVSLTYKPKGKWYCPKCRGDNEKTMDKSTEKTKKDRRSR

SEQ ID NO: 23290 - protein, 769 aa, Homo sapiens
MCGSALAFFTAAFVCLQNDRRGPASFLWAAWVFSLVLGLGQGEDNRCASSNAASCARCLALGPECGWCVQEDFISGGSRSERCDIVSNLISKGCSVDSIEYPSVHVIIPTENEINTQVTPGEVSIQLRPGAEANFMLKVHPLKKYPVDLYYLVDVSASMHNNIEKLNSVGNDLSRKMAFFSRDFRLGFGSYVDKTVSPYISIHPERIHNQCSDYNLDCMPPHGYIHVLSLTENITEFEKAVHRQKISGNIDTPEGGFDAMLQAAVCESHIGWRKEAKRLLLVMTDQTSHLALDSKLAGIVVPNDGNCHLKNNVYVKSTTMEHPSLGQLSEKLIDNNINVIFAVQGKQFHWYKDLLPLLPGTIAGEIESKAANLNNLVVEAYQKLISEVKVQVENQVQGIYFNITAICPDGSRKPGMEGCRNVTSNDEVLFNVTVTMKKCDVTGGKNYAIIKPIGFNETAKIHIHRNCSCQCEDNRGPKGKCVDETFLDSKCFQCDENKCHFDEDQFSSESCKSHKDQPVCSGRGVCVCGKCSCHKIKLGKVYGKYCEKDDFSCPYHHGNLCAGHGECEAGRCQCFSGWEGDRCQCPSAAAQHCVNSKGQVCSGRGTCVCGRCECTDPRSIGRFCEHCPTCYTACKENWNCMQCLHPHNLSQAILDQCKTSCALMEQQHYVDQTSECFSSPSYLRIFFIIFIVTFLIGLLKVLIIRQVILQWNSNKIKSSSDYRVSASKKDKLILQSVCTRAVTYRREKPEEIKMDISKLNAHETFRCNF

SEQ ID NO: 23291 - protein, 634 aa, Homo sapiens
MLKVHPLKKYPVDLYYLVDVSASMHNNIEKLNSVGNDLSRKMAFFSRDFRLGFGSYVDKTVSPYISIHPERIHNQCSDYNLDCMPPHGYIHVLSLTENITEFEKAVHRQKISGNIDTPEGGFDAMLQAAVCESHIGWRKEAKRLLLVMTDQTSHLALDSKLAGIVVPNDGNCHLKNNVYVKSTTMEHPSLGQLSEKLIDNNINVIFAVQGKQFHWYKDLLPLLPGTIAGEIESKAANLNNLVVEAYQKLISEVKVQVENQVQGIYFNITAICPDGSRKPGMEGCRNVTSNDEVLFNVTVTMKKCDVTGGKNYAIIKPIGFNETAKIHIHRNCSCQCEDNRGPKGKCVDETFLDSKCFQCDENKCHFDEDQFSSESCKSHKDQPVCSGRGVCVCGKCSCHKIKLGKVYGKYCEKDDFSCPYHHGNLCAGHGECEAGRCQCFSGWEGDRCQCPSAAAQHCVNSKGQVCSGRGTCVCGRCECTDPRSIGRFCEHCPTCYTACKENWNCMQCLHPHNLSQAILDQCKTSCALMEQQHYVDQTSECFSSPSYLRIFFIIFIVTFLIGLLKVLIIRQVILQWNSNKIKSSSDYRVSASKKDKLILQSVCTRAVTYRREKPEEIKMDISKLNAHETFRCNF

SEQ ID NO: 23292 - protein, 658 aa, Homo sapiens
MKLYCLSGHPTLPCNVLKFKSTTIMLDCGLDMTSTLNFLPLPLVQSPRLSNLPGWSLKDGNAFLDKELKECSGHVFVDSVPEFCLPETELIDLSTVDVILISNYHCMMALPYITEHTGFTGTVYATEPTVQIGRLLMEELVNFIERVPKAQSASLWKNKDIQRLLPSPLKDAVEVSTWRRCYTMQEVNSALSKIQLVGYSQKIELFGAVQVTPLSSGYALGSSNWIIQSHYEKVSYVSGSSLLTTHPQPMDQASLKNSDVLVLTGLTQIPTANPDGMVGEFCSNLALTVRNGGNVLVPCYPSGVIYDLLECLYQYIDSAGLSSVPLYFISPVANSSLEFSQIFAEWLCHNKQSKVYLPEPPFPHAELIQTNKLKHYPSIHGDFSNDFRQPCVVFTGHPSLRFGDVVHFMELWGKSSLNTVIFTEPDFSYLEALAPYQPLAMKCIYCPIDTRLNFIQVSKLLKEVQPLHVVCPEQYTQPPPAQSHRMDLMIDCQPPAMSYRRAEVLALPFKRRYEKIEIMPELADSLVPMEIKPGISLATVSAVLHTKDNKHLLQPPPRPAQPTSGKKRKRVSDDVPDCKVLKPLLSGSIPVEQFVQTLEKHGFSDIKVEDTAKGHIVLLQEAETLIQIEEDSTHIICDNDEMLRVRLRDLVLKFLQKF

SEQ ID NO: 23293 - protein, 637 aa, Homo sapiens
MKLYCLSGHPTLPCNVLKFKSTTIMLDCGLDMTSTLNFLPLPLVQSPRLSNLPGWSLKDGNAFLDKTELIDLSTVDVILISNYHCMMALPYITEHTGFTGTVYATEPTVQIGRLLMEELVNFIERVPKAQSASLWKNKDIQRLLPSPLKDAVEVSTWRRCYTMQEVNSALSKIQLVGYSQKIELFGAVQVTPLSSGYALGSSNWIIQSHYEKVSYVSGSSLLTTHPQPMDQASLKNSDVLVLTGLTQIPTANPDGMVGEFCSNLALTVRNGGNVLVPCYPSGVIYDLLECLYQYIDSAGLSSVPLYFISPVANSSLEFSQIFAEWLCHNKQSKVYLPEPPFPHAELIQTNKLKHYPSIHGDFSNDFRQPCVVFTGHPSLRFGDVVHFMELWGKSSLNTVIFTEPDFSYLEALAPYQPLAMKCIYCPIDTRLNFIQVSKLLKEVQPLHVVCPEQYTQPPPAQSHRMDLMIDCQPPAMSYRRAEVLALPFKRRYEKIEIMPELADSLVPMEIKPGISLATVSAVLHTKDNKHLLQPPPRPAQPTSGKKRKRVSDDVPDCKVLKPLLSGSIPVEQFVQTLEKHGFSDIKVEDTAKGHIVLLQEAETLIQIEEDSTHIICDNDEMLRVRLRDLVLKFLQKF

SEQ ID NO: 23294 - protein, 634 aa, Homo sapiens
MLDCGLDMTSTLNFLPLPLVQSPRLSNLPGWSLKDGNAFLDKELKECSGHVFVDSVPEFCLPETELIDLSTVDVILISNYHCMMALPYITEHTGFTGTVYATEPTVQIGRLLMEELVNFIERVPKAQSASLWKNKDIQRLLPSPLKDAVEVSTWRRCYTMQEVNSALSKIQLVGYSQKIELFGAVQVTPLSSGYALGSSNWIIQSHYEKVSYVSGSSLLTTHPQPMDQASLKNSDVLVLTGLTQIPTANPDGMVGEFCSNLALTVRNGGNVLVPCYPSGVIYDLLECLYQYIDSAGLSSVPLYFISPVANSSLEFSQIFAEWLCHNKQSKVYLPEPPFPHAELIQTNKLKHYPSIHGDFSNDFRQPCVVFTGHPSLRFGDVVHFMELWGKSSLNTVIFTEPDFSYLEALAPYQPLAMKCIYCPIDTRLNFIQVSKLLKEVQPLHVVCPEQYTQPPPAQSHRMDLMIDCQPPAMSYRRAEVLALPFKRRYEKIEIMPELADSLVPMEIKPGISLATVSAVLHTKDNKHLLQPPPRPAQPTSGKKRKRVSDDVPDCKVLKPLLSGSIPVEQFVQTLEKHGFSDIKVEDTAKGHIVLLQEAETLIQIEEDSTHIICDNDEMLRVRLRDLVLKFLQKF

SEQ ID NO: 23295 - protein, 237 aa, Homo sapiens
MGCCGCSGGCGSGCGGRGSGCGGCGSGCGGCGSGCGGCGSGCGGCGGCGSGCAGCGGCGSGCCVPVCCCKPMCCCVPACSCSSCGKGGCGSCGGSKRGCVSCGVSKGACGSCGGSKGGCGSCGGSKGGCGSCGGSKGGCGSCGGSKGGCGSYGCSQSSCCKPCCCSSGCGSSCCQSSCCKPYCCQSSCCKPYCCQSSCCKPCSCFSGCGSSCCQSSCYKPCCCQSSCCVPVCCQCKI

SEQ ID NO: 23296 - protein, 154 aa, Homo sapiens
MTHCCSPCCQPTCCRTTCCRTTCWKPTTVTTCSSTPCCQPSCCVSSCCQPCCRPACCQNTCCRTTCCQPTCLSSCCGQTSCGSSCGQSSSCAPVYCRRTCYYPTTVCLPGCLNQSCGSSCCQPCCRPACCETTCCRTTCFQPTCVSSCCQPSCC

SEQ ID NO: 23297 - protein, 174 aa, Homo sapiens
MTHCCSPCCQPTCCRTTCCRTTCWKPTTVTTCSSTPCCQPSCCVSSCCQPCCRPACCQNTCCRTTCCQPTCLTSCCQPSCCSTTCCQPICCGSSCCGQTSCGSSCGQSSSCAPVYCRRTCYYPTTVCLPGCLNQSCGSSCCQPCCRPACCETTCCRTTCFQPTCVSSCCQPSCC

SEQ ID NO: 23298 - protein, 169 aa, Homo sapiens
MTHCCSPCCQPTCCRTTCWKPTTVTTCSSTPCCQPSCCVSSCCQPCCRPACCQNTCCRTTCCQPTCLTSCCQPSCCSTTCCQPICCGSSCCGQTSCGSSCGQSSSCAPVYCRRTCYYPTTVCLPGCLNQSCGSSCCQPCCRPACCETTCCRTTCFQPTCVSSCCQPSCC

SEQ ID NO: 23299 - protein, 98 aa, Homo sapiens
MDCCASRGCSVPTGPATTICSSDKSCRCGVCLPSTCPHTVWLLEPTCCDNCPPPCHIPQPCVPTCFLLNSCQPTPGLETLNLTTFTQPCCEPCLPRGC

SEQ ID NO: 23300 - protein, 622 aa, Homo sapiens
MAMMVFPREEKLSQDEIVLGTKAVIQGLETLRGEHRALLAPLVAPEAGEAEPGSQERCILLRRSLEAIELGLGEAQVILALSSHLGAVESEKQKLRAQVRRLVQENQWLREELAGTQQKLQRSEQAVAQLEEEKQHLLFMSQIRKLDEDASPNEEKGDVPKDTLDDLFPNEDEQSPAPSPGGGDVSGQHGGYEIPARLRTLHNLVIQYASQGRYEVAVPLCKQALEDLEKTSGHDHPDVATMLNILALVYRDQNKYKEAAHLLNDALAIREKTLGKDHPAVAATLNNLAVLYGKRGKYKEAEPLCKRALEIREKVLGKFHPDVAKQLSNLALLCQNQGKAEEVEYYYRRALEIYATRLGPDDPNVAKTKNNLASCYLKQGKYQDAETLYKEILTRAHEKEFGSVNGDNKPIWMHAEEREESKDKRRDSAPYGEYGSWYKACKVDSPTVNTTLRSLGALYRRQGKLEAAHTLEDCASRNRKQGLDPASQTKVVELLKDGSGRRGDRRSSRDMAGGAGPRSESDLEDVGPTAEWNGDGSGSLRRSGSFGKLRDALRRSSEMLVKKLQGGTPQEPPNPRMKRASSLNFLNKSVEEPTQPGGTGLSDSRTLSSSSMDLSRRSSLVG

SEQ ID NO: 23301 - protein, 545 aa, Homo sapiens
MAMMVFPREEKLSQDEIVLGTKAVIQGLETLRGEHRALLAPLVAPEAGEAEPGSQERCILLRRSLEAIELGLGEAQEEKGDVPKDTLDDLFPNEDEQSPAPSPGGGDVSGQHGGYEIPARLRTLHNLVIQYASQGRYEVAVPLCKQALEDLEKTSGHDHPDVATMLNILALVYRDQNKYKEAAHLLNDALAIREKTLGKDHPAVAATLNNLAVLYGKRGKYKEAEPLCKRALEIREKVLGKFHPDVAKQLSNLALLCQNQGKAEEVEYYYRRALEIYATRLGPDDPNVAKTKNNLASCYLKQGKYQDAETLYKEILTRAHEKEFGSVNGDNKPIWMHAEEREESKDKRRDSAPYGEYGSWYKACKVDSPTVNTTLRSLGALYRRQGKLEAAHTLEDCASRNRKQGLDPASQTKVVELLKDGSGRRGDRRSSRDMAGGAGPRSESDLEDVGPTAEWNGDGSGSLRRSGSFGKLRDALRRSSEMLVKKLQGGTPQEPPNPRMKRASSLNFLNKSVEEPTQPGGTGLSDSRTLSSSSMDLSRRSSLVG

SEQ ID NO: 23302 - protein, 160 aa, Homo sapiens
MTHCCSPGCQPTCCRTTCCRTTCWQPTIVTTCSSTPCCQPSCCVSSCCQPYCHPTCCQNTCCRTTCCQPTCVTSCCQPSCCSTPCYQPICCGSSCCGQTSCGSSCGQSSSCAPVYCRRTCYHPTTVCLPGCLNQSCGSSCCQPCYCPACCVSSCCQHSCC

SEQ ID NO: 23303 - protein, 278 aa, Homo sapiens
MGCCGCSGGCGSSCGGCGSGCGGCGSGCGGCGSGCGGSGSSCCVPVCCCKPVCCRVPTCSCSSCGKGGCGSSGGSKGGCGSCGGCKGGCGSCGGSKGGCGSCGGSKGGCGSCGGSKGGCGSGCGGCGSSCCVPVCCCKPMCCCVPACSCSSCGKGGCGSCGCSKGACGSCGGSKGGCGSCGGCKGGCGSCGGSKGGCGSGCGGCGSGCGVPVCCCSCSSCGSCAGSKGGCGSSCSQCSCCKPCCCSSGCGSSCCQSSCCKPCCSQSSCCVPVCCQCKI

SEQ ID NO: 23304 - protein, 128 aa, Homo sapiens
MTGSCCGSTLSSLSYGGGCCQPCCCRDPCCCRPVTCQTTVCRPVTCVPRCTRPICEPCRRPVCCDPCSLQEGCCRPITCCPSSCTAVVCRPCCWATTCCQPVSVQSPCCRPPCGQPTPCSTTCRTSSC

SEQ ID NO: 23305 - protein, 238 aa, Homo sapiens
MGCSGCSGGCGSSCGGCGSSCGGCGSGYGGCGSGCCVPVCCCKPVCCCVPACSCSSCGSCGGSKGVCGSCGGCKGGCGSCGGSKGGCGSSCCVPVCCSSSCGSCGGSKGVCGFRGGSKGGCGSCGCSQCSCYKPCCCSSGCGSSCCQSSCCKPSCSQSSCCKPCCSQSSCCKPCCCSSGCGSSCCQSSCCKPCCSQSSCCKPCCCSSGCGSSCCQSSCCKPCSSQSSCCVPICCQCKI

SEQ ID NO: 23306 - protein, 608 aa, Homo sapiens
MEMESAAASTRFHQPHMERKMSAMACEIFNELRLEGKLCDVVIKVNGFEFSAHKNILCSCSSYFRALFTSGWNNTEKKVYNIPGISPDMMKLIIEYAYTRTVPITPDNVEKLLAAADQFNIMGIVRGCCEFLKSELCLDNCIGICKFTDYYYCPELRQKAYMFILHNFEEMVKVSAEFLELSVTELKDIIEKDELNVKQEDAVFEAILKWISHDPQNRKQHISILLPKVRLALMHAEYFMNNVKMNDYVKDSEECKPVIINALKAMYDLNMNGPSNSDFTNPLTRPRLPYAILFAIGGWSGGSPTNAIEAYDARADRWVNVTCEEESPRAYHGAAYLKGYVYIIGGFDSVDYFNSVKRFDPVKKTWHQVAPMHSRRCYVSVTVLGNFIYAMGGFDGYVRLNTAERYEPETNQWTLIAPMHEQRSDASATTLYGKVYICGGFNGNECLFTAEVYNTESNQWTVIAPMRSRRSGIGVIAYGEHVYAVGGFDGANRLRSAEAYSPVANTWRTIPTMFNPRSNFGIEVVDDLLFVVGGFNGFTTTFNVECYDEKTDEWYDAHDMSIYRSALSCCVVPGLANVEEYAARRDNFPGLALRDEVKYSASTSTLPV

SEQ ID NO: 23307 - protein, 369 aa, Homo sapiens
MFCVTPPELETKMNITKGGLVLFSANSNSSCMELSKKIAERLGVEMGKVQVYQEPNRETRVQIQESVRGKDVFIIQTVSKDVNTTIMELLIMVYACKTSCAKSIIGVIPYFPYSKQCKMRKRGSIVSKLLASMMCKAGLTHLITMDLHQKEIQGFFNIPVDNLRASPFLLQYIQEEIPDYRNAVIVAKSPASAKRAQSFAERLRLGIAVIHGEAQDAESDLVDGRHSPPMVRSVAAIHPSLEIPMLIPKEKPPITVVGDVGGRIAIIVDDIIDDVDSFLAAAETLKERGAYKIFVMATHGLLSSDAPRRIEESAIDEVVVTNTIPHEVQKLQCPKIKTVDISMILSEAIRRIHNGESMSYLFRNIGLDD

SEQ ID NO: 23308 - protein, 329 aa, Homo sapiens
MFCVTPPELETKMNITKGGLVLFSANSNSSCMELSKKIAEDVNTTIMELLIMVYACKTSCAKSIIGVIPYFPYSKQCKMRKRGSIVSKLLASMMCKAGLTHLITMDLHQKEIQGFFNIPVDNLRASPFLLQYIQEEIPDYRNAVIVAKSPASAKRAQSFAERLRLGIAVIHGEAQDAESDLVDGRHSPPMVRSVAAIHPSLEIPMLIPKEKPPITVVGDVGGRIAIIVDDIIDDVDSFLAAAETLKERGAYKIFVMATHGLLSSDAPRRIEESAIDEVVVTNTIPHEVQKLQCPKIKTVDISMILSEAIRRIHNGESMSYLFRNIGLDD

SEQ ID NO: 23309 - protein, 320 aa, Homo sapiens
MFCVTPPELETKMNITKGGLVLFSANSNSSCMELSKKIAERLGVEMGKVQVYQEPNRETRVQIQESVRGKDVFIIQTVSKDVNTTIMELLIMVYACKTSCAKSIIGVIPYFPYSKQCKMRKRGSIVSKLLASMMCKAGLTHLITMDLHQKEIQGFFNIPVDNLRASPFLLQYIQEEIPDYRNAVIVAKSPASAKRAQSFAERLRLGIAVIHGEAQDAESDLVDGRHSPPMVRSVAAIHPSLEIPMLIPKEKPPITVVGDVGGRIAIIVVVVTNTIPHEVQKLQCPKIKTVDISMILSEAIRRIHNGESMSYLFRNIGLDD

SEQ ID NO: 23310 - protein, 283 aa, Homo sapiens
MELLIMVYACKTSCAKSIIGVIPYFPYSKQCKMRKRGSIVSKLLASMMCKAGLTHLITMDLHQKEIQGFFNIPVDNLRASPFLLQYIQEEIPDYRNAVIVAKSPASAKRAQSFAERLRLGIAVIHGEAQDAESDLVDGRHSPPMVRSVAAIHPSLEIPMLIPKEKPPITVVGDVGGRIAIIVDDIIDDVDSFLAAAETLKERGAYKIFVMATHGLLSSDAPRRIEESAIDEVVVTNTIPHEVQKLQCPKIKTVDISMILSEAIRRIHNGESMSYLFRNIGLDD

SEQ ID NO: 23311 - protein, 628 aa, Homo sapiens
MSRSGDRTSTFDPSHSDNLLHGLNLLWRKQLFCDVTLTAQGQQFHCHKAVLASCSQYFRSLFSSHPPLGGGVGGQDGLGAPKDQQQPPQQQPSQQQQPPPQEEPGTPSSSPDDKLLTSPRAINNLVLQGCSSIGLRLVLEYLYTANVTLSLDTVEEVLSVSKILHIPQVTKLCVQFLNDQISVQNYKQVCKIAALHGLEETKKLANKYLVEDVLLLNFEEMRALLDSLPPPVESELALFQMSVLWLEHDRETRMQYAPDLMKRLRFALIPAPELVERVQSVDFMRTDPVCQKLLLDAMNYHLMPFRQHCRQSLASRIRSNKKMLLLVGGLPPGPDRLPSNLVQYYDDEKKTWKILTIMPYNSAHHCVVEVENFLFVLGGEDQWNPNGKHSTNFVSRYDPRFNSWIQLPPMQERRASFYACRLDKHLYVIGGRNETGYLSSVECYNLETNEWRYVSSLPQPLAAHAGAVHNGKIYISGGVHNGEYVPWLYCYDPVMDVWARKQDMNTKRAIHTLAVMNDRLYAIGGNHLKGFSHLDVMLVECYDPKGDQWNILQTPILEGRSGPGCAVLDDSIYLVGGYSWSMGAYKSSTICYCPEKGTWTELEGDVAEPLAGPACVTVILPSCVPYNK

SEQ ID NO: 23312 - protein, 388 aa, Homo sapiens
MSRSGDRTSTFDPSHSDNLLHGLNLLWRKQLFCDVTLTAQGQQFHCHKAVLASCSQYFRSLFSSHPPLGGGVGGQDGLGAPKDQQQPPQQQPSQQQQPPPQEEPGTPSSSPDDKLLTSPRAINNLVLQGCSSIGLRLVLEYLYTANVTLSLDTVEEVLSVSKILHIPQVTKLCVQFLNDQISVQNYKQVCKIAALHGLEETKKLANKYLVEDVLLLNFEEMRALLDSLPPPVESELALFQMSVLWLEHDRETRMQYAPDLMKRLRFALIPAPELVERVQSVDFMRTDPVCQKLLLDAMNYHLMPFRQHCRQSLASRIRSNKKMLLLVGGLPPGPDRLPSNLVQYYDDEKKTWKILTITGPHPISGKQESASSPEFRRRKTREFSNNTM

SEQ ID NO: 23313 - protein, 128 aa, Homo sapiens
MAVGTSALSKEPWWTLPENFHSPMVFHMEEDQEELIFGLDDTYLRCIELHSHTLIQLERCFTATGQTRVTVVGPPMAKQWLLLMFHCVGSQDSKCHARGLKMLERVRSQPLTNDDLVTSVSLPPYTGD

SEQ ID NO: 23314 - protein, 644 aa, Homo sapiens
MSYFLSYCKAHGGALLTGYQALRAEGFLCDVTLETEGSEFPAHRSLLACSSDYFRALFKSHTQESRARVIHLHVPSAAGLQRLLDFIYTAWLSLSMDTVEDTLEAASYLQVTEALGLCGRYLERQLAPENCCFAANVAARFGLAHTLDAAERCIVSHLQELLARGAGPAGLLELNPTSLRAVLGAPDVARVPEARLLGLALAWLRQEPTTERLAHCTELLERVRFGLVPADVLRRVYSGSGLVLPARVKGLIIQALNYHTTPSRQPLMQGEQTSIRSPQTRILLVGGRRAREVVIEEVAAPQRAARGQVAAPEPEEEEEELEEEEEEEEWELTQNVVAFDVYNHRWRSLTQLPTPLLGHSVCTAGNFLFVLGGESPSGSASSPLADDSRVVTAQVHRYDPRFHAWTEVPAMREARAHFWCGAVGERLLAVGGLGAGGEVLASVEMYDLRRDRWTAAGALPRALHGHAGAVGDRGVVYISGGKAGRGEGGASSLRDLYVLGPEEQVWSKKAPMGTARFGHHMAVLRGAVFAFLGRYEPFSEIERYDPGADQWTRLRPLPYDRFCYGLAVVEETALLLGGLKWRDSRQVPTRNVVGYDLDLDRWEDIGCALPWAWSGLRCAVLQLAEGGDDEREGEVGEALDLVLG

SEQ ID NO: 23315 - protein, 2073 aa, Homo sapiens
MVKLANPLYTEWILEAIQKIKKQKQRPSEERICHAVSTSHGLDKKTVSEQLELSVQDGSVLKVTNKGLASYKDPDNPGRFSSVKPGTFPKSAKGSRGSCNDLRNVDWNKLLRRAIEGLEEPNGSSLKNIEKYLRSQSDLTSTTNNPAFQQRLRLGAKRAVNNGRLLKDGPQYRVNYGSLDGKGAPQYPSAFPSSLPPVSLLPHEKDQPRADPIPICSFCLGTKESNREKKPEELLSCADCGSSGHPSCLKFCPELTTNVKALRWQCIECKTCSACRVQGRNADNMLFCDSCDRGFHMECCDPPLSRMPKGMWICQVCRPKKKGRKLLHEKAAQIKRRYAKPIGRPKNKLKQRLLSVTSDEGSMNAFTGRGSPGRGQKTKVCTTPSSGHAASGKDSSSRLAVTDPTRPGATTKITTTSTYISASTLKVNKKTKGLIDGLTKFFTPSPDGRRSRGEIIDFSKHYRPRKKVSQKQSCTSHVLATGTTQKLKPPPSSLPPPTPISGQSPSSQKSSTATSSPSPQSSSSQCSVPSLSSLTTNSQLKALFDGLSHIYTTQGQSRKKGHPSYAPPKRMRRKTELSSTAKSKAHFFGKRDIRSRFISHSSSSSWGMARGSIFKAIAHFKRTTFLKKHRMLGRLKYKVTPQMGTPSPGKGSLTDGRIKPDQDDDTEIKINIKQESADVNVIGNKDVVTEEDLDVFKQAQELSWEKIECESGVEDCGRYPSVIEFGKYEIQTWYSSPYPQEYARLPKLYLCEFCLKYMKSKNILLRHSKKCGWFHPPANEIYRRKDLSVFEVDGNMSKIYCQNLCLLAKLFLDHKTLYYDVEPFLFYVLTKNDEKGCHLVGYFSKEKLCQQKYNVSCIMIMPQHQRQGFGRFLIDFSYLLSRREGQAGSPEKPLSDLGRLSYLAYWKSVILEYLYHHHERHISIKAISRATGMCPHDIATTLQHLHMIDKRDGRFVIIRREKLILSHMEKLKTCSRANELDPDSLRWTPILISNAAVSEEEREAEKEAERLMEQASCWEKEEQEILSTRANSRQSPAKVQSKNKYLHSPESRPVTGERGQLLELSKESSEEEEEEEDEEEEEEEEEEEEDEEEEEEEEEEEEEENIQSSPPRLTKPQSVAIKRKRPFVLKKKRGRKRRRINSSVTTETISETTEVLNEPFDNSDEERPMPQLEPTCEIEVEEDGRKPVLRKAFQHQPGKKRQTEEEEGKDNHCFKNADPCRNNMNDDSSNLKEGSKDNPEPLKCKQVWPKGTKRGLSKWRQNKERKTGFKLNLYTPPETPMEPDEQVTVEEQKETSEGKTSPSPIRIEEEVKETGEALLPQEENRREETCAPVSPNTSPGEKPEDDLIKPEEEEEEEEEEEEEEEEEEGEEEEGGGNVEKDPDGAKSQEKEEPEISTEKEDSARLDDHEEEEEEDEEPSHNEDHDADDEDDSHMESAEVEKEELPRESFKEVLENQETFLDLNVQPGHSNPEVLMDCGVDLTASCNSEPKELAGDPEAVPESDEEPPPGEQAQKQDQKNSKEVDTEFKEGNPATMEIDSETVQAVQSLTQESSEQDDTFQDCAETQEACRSLQNYTRADQSPQIATTLDDCQQSDHSSPVSSVHSHPGQSVRSVNSPSVPALENSYAQISPDQSAISVPSLQNMETSPMMDVPSVSDHSQQVVDSGFSDLGSIESTTENYENPSSYDSTMGGSICGNGSSQNSCSYSNLTSSSLTQSSCAVTQQMSNISGSCSMLQQTSISSPPTCSVKSPQGCVVERPPSSSQQLAQCSMAANFTPPMQLAEIPETSNANIGLYERMGQSDFGAGHYPQPSATFSLAKLQQLTNTLIDHSLPYSHSAAVTSYANSASLSTPLSNTGLVQLSQSPHSVPGGPQAQATMTPPPNLTPPPMNLPPPLLQRNMAASNIGISHSQRLQTQIASKGHISMRTKSASLSPAAATHQSQIYGRSQTVAMQGPARTLTMQRGMNMSVNLMPAPAYNVNSVNMNMNTLNAMNGYSMSQPMMNSGYHSNHGYMNQTPQYPMQMQMGMMGTQPYAQQPMQTPPHGNMMYTAPGHHGYMNTGMSKQSLNGSYMRR

SEQ ID NO: 23316 - protein, 1890 aa, Homo sapiens
MVKLANPLYTEWILEAIQKIKKQKQRPSEERICHAVSTSHGLDKKTVSEQLELSVQDGSVLKVTNKGLASYKDPDNPGRFSSVKPGTFPKSAKGSRGSCNDLRNVDWNKLLRRAIEGLEEPNGSSLKNIEKYLRSQSDLTSTTNNPAFQQRLRLGAKRAVNNGRLLKDGPQYRVNYGSLDGKGAPQYPSAFPSSLPPVSLLPHEKDQPRADPIPICSFCLGTKESNREKKPEELLSCADCGSSGHPSCLKFCPELTTNVKALRWQCIECKTCSACRVQGRNADNMLFCDSCDRGFHMECCDPPLSRMPKGMWICQVCRPKKKGRKLLHEKAAQIKRRYAKPIGRPKNKLKQRLLSVTSDEGSMNAFTGRGSPGRGQKTKVCTTPSSGHAASGKDSSSRLAVTDPTRPGATTKITTTSTYISASTLKVNKKTKGLIDGLTKFFTPSPDGRRSRGEIIDFSKHYRPRKKVSQKQSCTSHVLATDTEIKINIKQESADVNVIGNKDVVTEEDLDVFKQAQELSWEKIECESGVEDCGRYPSVIEFGKYEIQTWYSSPYPQEYARLPKLYLCEFCLKYMKSKNILLRHSKKCGWFHPPANEIYRRKDLSVFEVDGNMSKIYCQNLCLLAKLFLDHKTLYYDVEPFLFYVLTKNDEKGCHLVGYFSKEKLCQQKYNVSCIMIMPQHQRQGFGRFLIDFSYLLSRREGQAGSPEKPLSDLGRLSYLAYWKSVILEYLYHHHERHISIKAISRATGMCPHDIATTLQHLHMIDKRDGRFVIIRREKLILSHMEKLKTCSRANELDPDSLRWTPILISNAAVSEEEREAEKEAERLMEQASCWEKEEQEILSTRANSRQSPAKVQSKNKYLHSPESRPVTGERGQLLELSKESSEEEEEEEDEEEEEEEEEEEEDEEEEEEEEEEEEEENIQSSPPRLTKPQSVAIKRKRPFVLKKKRGRKRRRINSSVTTETISETTEVLNEPFDNSDEERPMPQLEPTCEIEVEEDGRKPVLRKAFQHQPGKKRQTEEEEGKDNHCFKNADPCRNNMNDDSSNLKEGSKDNPEPLKCKQVWPKGTKRGLSKWRQNKERKTGFKLNLYTPPETPMEPDEQVTVEEQKETSEGKTSPSPIRIEEEVKETGEALLPQEENRREETCAPVSPNTSPGEKPEDDLIKPEEEEEEEEEEEEEEEEEEGEEEEGGGNVEKDPDGAKSQEKEEPEISTEKEDSARLDDHEEEEEEDEEPSHNEDHDADDEDDSHMESAEVEKEELPRESFKEVLENQETFLDLNVQPGHSNPEVLMDCGVDLTASCNSEPKELAGDPEAVPESDEEPPPGEQAQKQDQKNSKEVDTEFKEGNPATMEIDSETVQAVQSLTQESSEQDDTFQDCAETQEACRSLQNYTRADQSPQIATTLDDCQQSDHSSPVSSVHSHPGQSVRSVNSPSVPALENSYAQISPDQSAISVPSLQNMETSPMMDVPSVSDHSQQVVDSGFSDLGSIESTTENYENPSSYDSTMGGSICGNGSSQNSCSYSNLTSSSLTQSSCAVTQQMSNISGSCSMLQQTSISSPPTCSVKSPQGCVVERPPSSSQQLAQCSMAANFTPPMQLAEIPETSNANIGLYERMGQSDFGAGHYPQPSATFSLAKLQQLTNTLIDHSLPYSHSAAVTSYANSASLSTPLSNTGLVQLSQSPHSVPGGPQAQATMTPPPNLTPPPMNLPPPLLQRNMAASNIGISHSQRLQTQIASKGHISMRTKSASLSPAAATHQSQIYGRSQTVAMQGPARTLTMQRGMNMSVNLMPAPAYNVNSVNMNMNTLNAMNGYSMSQPMMNSGYHSNHGYMNQTPQYPMQMQMGMMGTQPYAQQPMQTPPHGNMMYTAPGHHGYMNTGMSKQSLNGSYMRR

SEQ ID NO: 23317 - protein, 1781 aa, Homo sapiens
MVKLANPLYTEWILEAIQKIKKQKQRPSEERICHAVSTSHGLDKKTVSEQLELSVQDGSVLKVTNKGLASYKDPDNPGRFSSVKPGTFPKSAKGSRGSCNDLRNVDWNKLLRRAIEGLEEPNGSSLKNIEKYLRSQSDLTSTTNNPAFQQRLRLGAKRAVNNGRLLKDGPQYRVNYGSLDGKGAPQYPSAFPSSLPPVSLLPHEKDQPRADPIPICSFCLGTKESNREKKPEELLSCADCGSSGHPSCLKFCPELTTNVKALRWQCIECKTCSACRVQGRNADNMLFCDSCDRGFHMECCDPPLSRMPKGMWICQVCRPKKKGRKLLHEKAAQIKRRYAKPIGRPKNKLKQRLLSVTSDEGSMNAFTGRGSPDTEIKINIKQESADVNVIGNKDVVTEEDLDVFKQAQELSWEKIECESGVEDCGRYPSVIEFGKYEIQTWYSSPYPQEYARLPKLYLCEFCLKYMKSKNILLRHSKKCGWFHPPANEIYRRKDLSVFEVDGNMSKIYCQNLCLLAKLFLDHKTLYYDVEPFLFYVLTKNDEKGCHLVGYFSKEKLCQQKYNVSCIMIMPQHQRQGFGRFLIDFSYLLSRREGQAGSPEKPLSDLGRLSYLAYWKSVILEYLYHHHERHISIKAISRATGMCPHDIATTLQHLHMIDKRDGRFVIIRREKLILSHMEKLKTCSRANELDPDSLRWTPILISNAAVSEEEREAEKEAERLMEQASCWEKEEQEILSTRANSRQSPAKVQSKNKYLHSPESRPVTGERGQLLELSKESSEEEEEEEDEEEEEEEEEEEEDEEEEEEEEEEEEEENIQSSPPRLTKPQSVAIKRKRPFVLKKKRGRKRRRINSSVTTETISETTEVLNEPFDNSDEERPMPQLEPTCEIEVEEDGRKPVLRKAFQHQPGKKRQTEEEEGKDNHCFKNADPCRNNMNDDSSNLKEGSKDNPEPLKCKQVWPKGTKRGLSKWRQNKERKTGFKLNLYTPPETPMEPDEQVTVEEQKETSEGKTSPSPIRIEEEVKETGEALLPQEENRREETCAPVSPNTSPGEKPEDDLIKPEEEEEEEEEEEEEEEEEEGEEEEGGGNVEKDPDGAKSQEKEEPEISTEKEDSARLDDHEEEEEEDEEPSHNEDHDADDEDDSHMESAEVEKEELPRESFKEVLENQETFLDLNVQPGHSNPEVLMDCGVDLTASCNSEPKELAGDPEAVPESDEEPPPGEQAQKQDQKNSKEVDTEFKEGNPATMEIDSETVQAVQSLTQESSEQDDTFQDCAETQEACRSLQNYTRADQSPQIATTLDDCQQSDHSSPVSSVHSHPGQSVRSVNSPSVPALENSYAQISPDQSAISVPSLQNMETSPMMDVPSVSDHSQQVVDSGFSDLGSIESTTENYENPSSYDSTMGGSICGNGSSQNSCSYSNLTSSSLTQSSCAVTQQMSNISGSCSMLQQTSISSPPTCSVKSPQGCVVERPPSSSQQLAQCSMAANFTPPMQLAEIPETSNANIGLYERMGQSDFGAGHYPQPSATFSLAKLQQLTNTLIDHSLPYSHSAAVTSYANSASLSTPLSNTGLVQLSQSPHSVPGGPQAQATMTPPPNLTPPPMNLPPPLLQRNMAASNIGISHSQRLQTQIASKGHISMRTKSASLSPAAATHQSQIYGRSQTVAMQGPARTLTMQRGMNMSVNLMPAPAYNVNSVNMNMNTLNAMNGYSMSQPMMNSGYHSNHGYMNQTPQYPMQMQMGMMGTQPYAQQPMQTPPHGNMMYTAPGHHGYMNTGMSKQSLNGSYMRR

SEQ ID NO: 23318 - protein, 254 aa, Homo sapiens
MATAGNPWGWFLGYLILGVAGSLVSGSCSQIINGEDCSPHSQPWQAALVMENELFCSGVLVHPQWVLSAAHCFQNSYTIGLGLHSLEADQEPGSQMVEASLSVRHPEYNRPLLANDLMLIKLDESVSESDTIRSISIASQCPTAGNSCLVSGWGLLANGRMPTVLQCVNVSVVSEEVCSKLYDPLYHPSMFCAGGGHDQKDSCNGDSGGPLICNGYLQGLVSFGKAPCGQVGVPGVYTNLCKFTEWIEKTVQAS

SEQ ID NO: 23319 - protein, 110 aa, Homo sapiens
MENELFCSGVLVHPQWVLSAAHCFQNSYTIGLGLHSLEADQEPGSQMVEASLSVRHPEYNRPLLANDLMLIKLDESVSESDTIRSISIASQCPTAGNSCLVSGWGLLANG

SEQ ID NO: 23320 - protein, 593 aa, Homo sapiens
METPPLPPACTKQGHQKPLDSKDDNTEKHCPVTVNPWHMKKAFKVMNELRSQNLLCDVTIVAEDMEISAHRVVLAACSPYFHAMFTGEMSESRAKRVRIKEVDGWTLRMLIDYVYTAEIQVTEENVQVLLPAAGLLQLQDVKKTCCEFLESQLHPVNCLGIRAFADMHACTDLLNKANTYAEQHFADVVLSEEFLNLGIEQVCSLISSDKLTISSEEKVFEAVIAWVNHDKDVRQEFMARLMEHVRLPLLPREYLVQRVEEEALVKNSSACKDYLIEAMKYHLLPTEQRILMKSVRTRLRTPMNLPKLMVVVGGQAPKAIRSVECYDFKEERWHQVAELPSRRCRAGMVYMAGLVFAVGGFNGSLRVRTVDSYDPVKDQWTSVANMRDRRSTLGAAVLNGLLYAVGGFDGSTGLSSVEAYNIKSNEWFHVAPMNTRRSSVGVGVVGGLLYAVGGYDGASRQCLSTVECYNATTNEWTYIAEMSTRRSGAGVGVLNNLLYAVGGHDGPLVRKSVEVYDPTTNAWRQVADMNMCRRNAGVCAVNGLLYVVGGDDGSCNLASVEYYNPTTDKWTVVSSCMSTGRSYAGVTVIDKPL

SEQ ID NO: 23321 - protein, 597 aa, Homo sapiens
MVWLEARPQILFVCTKQGHQKPLDSKDDNTEKHCPVTVNPWHMKKAFKVMNELRSQNLLCDVTIVAEDMEISAHRVVLAACSPYFHAMFTGEMSESRAKRVRIKEVDGWTLRMLIDYVYTAEIQVTEENVQVLLPAAGLLQLQDVKKTCCEFLESQLHPVNCLGIRAFADMHACTDLLNKANTYAEQHFADVVLSEEFLNLGIEQVCSLISSDKLTISSEEKVFEAVIAWVNHDKDVRQEFMARLMEHVRLPLLPREYLVQRVEEEALVKNSSACKDYLIEAMKYHLLPTEQRILMKSVRTRLRTPMNLPKLMVVVGGQAPKAIRSVECYDFKEERWHQVAELPSRRCRAGMVYMAGLVFAVGGFNGSLRVRTVDSYDPVKDQWTSVANMRDRRSTLGAAVLNGLLYAVGGFDGSTGLSSVEAYNIKSNEWFHVAPMNTRRSSVGVGVVGGLLYAVGGYDGASRQCLSTVECYNATTNEWTYIAEMSTRRSGAGVGVLNNLLYAVGGHDGPLVRKSVEVYDPTTNAWRQVADMNMCRRNAGVCAVNGLLYVVGGDDGSCNLASVEYYNPTTDKWTVVSSCMSTGRSYAGVTVIDKPL

SEQ ID NO: 23322 - protein, 505 aa, Homo sapiens
MSESRAKRVRIKEVDGWTLRMLIDYVYTAEIQVTEENVQVLLPAAGLLQLQDVKKTCCEFLESQLHPVNCLGIRAFADMHACTDLLNKANTYAEQHFADVVLSEEFLNLGIEQVCSLISSDKLTISSEEKVFEAVIAWVNHDKDVRQEFMARLMEHVRLPLLPREYLVQRVEEEALVKNSSACKDYLIEAMKYHLLPTEQRILMKSVRTRLRTPMNLPKLMVVVGGQAPKAIRSVECYDFKEERWHQVAELPSRRCRAGMVYMAGLVFAVGGFNGSLRVRTVDSYDPVKDQWTSVANMRDRRSTLGAAVLNGLLYAVGGFDGSTGLSSVEAYNIKSNEWFHVAPMNTRRSSVGVGVVGGLLYAVGGYDGASRQCLSTVECYNATTNEWTYIAEMSTRRSGAGVGVLNNLLYAVGGHDGPLVRKSVEVYDPTTNAWRQVADMNMCRRNAGVCAVNGLLYVVGGDDGSCNLASVEYYNPTTDKWTVVSSCMSTGRSYAGVTVIDKPL

SEQ ID NO: 23323 - protein, 638 aa, Homo sapiens
MILFKQATYFISLFATVSCGCLTQLYENAFFRGGDVASMYTPNAQYCQMRCTFHPRCLLFSFLPASSINDMEKRFGCFLKDSVTGTLPKVHRTGAVSGHSLKQCGHQISACHRDIYKGVDMRGVNFNVSKVSSVEECQKRCTNNIRCQFFSYATQTFHKAEYRNNCLLKYSPGGTPTAIKVLSNVESGFSLKPCALSEIGCHMNIFQHLAFSDVDVARVLTPDAFVCRTICTYHPNCLFFTFYTNVWKIESQRNVCLLKTSESGTPSSSTPQENTISGYSLLTCKRTLPEPCHSKIYPGVDFGGEELNVTFVKGVNVCQETCTKMIRCQFFTYSLLPEDCKEEKCKCFLRLSMDGSPTRIAYGTQGSSGYSLRLCNTGDNSVCTTKTSTRIVGGTNSSWGEWPWQVSLQVKLTAQRHLCGGSLIGHQWVLTAAHCFDGLPLQDVWRIYSGILNLSDITKDTPFSQIKEIIIHQNYKVSEGNHDIALIKLQAPLNYTEFQKPICLPSKGDTSTIYTNCWVTGWGFSKEKGEIQNILQKVNIPLVTNEECQKRYQDYKITQRMVCAGYKEGGKDACKGDSGGPLVCKHNGMWRLVGITSWGEGCARREQPGVYTKVAEYMDWILEKTQSSDGKAQMQSPA

SEQ ID NO: 23324 - protein, 313 aa, Homo sapiens
MRRGALLAGALAAYAAYLVLGALLVARLEGPHEARLRAELETLRAQLLQRSPCVAAPALDAFVERVLAAGRLGRVVLANASGSANASDPAWDFASALFFASTLITTVGYGYTTPLTDAGKAFSIAFALLGVPTTMLLLTASAQRLSLLLTHVPLSWLSMRWGWDPRRAACWHLVALLGVVVTVCFLVPAVIFAHLEEAWSFLDAFYFCFISLSTIGLGDYVPGEAPGQPYRALYKVLVTVYLFLGLVAMVLVLQTFRHVSDLHGLTELILLPPPCPASFNADEDDRVDILGPQPESHQQLSASSHTDYASIPR

SEQ ID NO: 23325 - protein, 179 aa, Homo sapiens
MLLLTASAQRLSLLLTHVPLSWLSMRWGWDPRRAACWHLVALLGVVVTVCFLVPAVIFAHLEEAWSFLDAFYFCFISLSTIGLGDYVPGEAPGQPYRALYKVLVTVYLFLGLVAMVLVLQTFRHVSDLHGLTELILLPPPCPASFNADEDDRVDILGPQPESHQQLSASSHTDYASIPR

SEQ ID NO: 23326 - protein, 567 aa, Homo sapiens
MRPDSPTMAAPAESLRRRKTGYSDPEPESPPAPGRGPAGSPAHLHTGTFWLTRIVLLKALAFVYFVAFLVAFHQNKQLIGDRGLLPCRVFLKNFQQYFQDRTSWEVFSYMPTILWLMDWSDMNSNLDLLALLGLGISSFVLITGCANMLLMAALWGLYMSLVNVGHVWYSFGWESQLLETGFLGIFLCPLWTLSRLPQHTPTSRIVLWGFRWLIFRIMLGAGLIKIRGDRCWRDLTCMDFHYETQPMPNPVAYYLHHSPWWFHRFETLSNHFIELLVPFFLFLGRRACIIHGVLQILFQAVLIVSGNLSFLNWLTMVPSLACFDDATLGFLFPSGPGSLKDRVLQMQRDIRGARPEPRFGSVVRRAANVSLGVLLAWLSVPVVLNLLSSRQVMNTHFNSLHIVNTYGAFGSITKERAEVILQGTASSNASAPDAMWEDYEFKCKPGDPSRRPCLISPYHYRLDWLMWFAAFQTYEHNDWIIHLAGKLLASDAEALSLLAHNPFAGRPPPRWVRGEHYRYKFSRPGGRHAAEGKWWVRKRIGAYFPPLSLEELRPYFRDRGWPLPGPL

SEQ ID NO: 23327 - protein, 330 aa, Homo sapiens
MDFHYETQPMPNPVAYYLHHSPWWFHRFETLSNHFIELLVPFFLFLGRRACIIHGVLQILFQAVLIVSGNLSFLNWLTMVPSLACFDDATLGFLFPSGPGSLKDRVLQMQRDIRGARPEPRFGSVVRRAANVSLGVLLAWLSVPVVLNLLSSRQVMNTHFNSLHIVNTYGAFGSITKERAEVILQGTASSNASAPDAMWEDYEFKCKPGDPSRRPCLISPYHYRLDWLMWFAAFQTYEHNDWIIHLAGKLLASDAEALSLLAHNPFAGRPPPRWVRGEHYRYKFSRPGGRHAAEGKWWVRKRIGAYFPPLSLEELRPYFRDRGWPLPGPL

SEQ ID NO: 23328 - protein, 165 aa, Homo sapiens
MVNPGSSSQPPPVTAGSLSWKRCAGCGGKIADRFLLYAMDSYWHSRCLKCSCCQAQLGDIGTSCYTKSGMILCRNDYIRLFGNSGACSACGQSIPASELVMRAQGNVYHLKCFTCSTCRNRLVPGDRFHYINGSLFCEHDRPTALINGHLNSLQSNPLLPDQKVC

SEQ ID NO: 23329 - protein, 612 aa, Homo sapiens
MSHPSWLPPKSTGEPLGHVPARMETTHSFGNPSISVSTQQPPKKFAPVVAPKPKYNPYKQPGGEGDFLPPPPPPLDDSSALPSISGNFPPPPPLDEEAFKVQGNPGGKTLEERRSSLDAEIDSLTSILADLECSSPYKPRPPQSSTGSTASPPVSTPVTGHKRMVIPNQPPLTATKKSTLKPQPAPQAGPIPVAPIGTLKPQPQPVPASYTTASTSSRPTFNVQVKSAQPSPHYMAAPSSGQIYGSGPQGYNTQPVPVSGQCPPPSTRGGMDYAYIPPPGLQPEPGYGYAPNQGRYYEGYYAAGPGYGGRNDSDPTYGQQGHPNTWKREPGYTPPGAGNQNPPGMYPVTGPKKTYITDPVSAPCAPPLQPKGGHSGQLGPSSVAPSFRPEDELEHLTKKMLYDMENPPADEYFGRCARCGENVVGEGTGCTAMDQVFHVDCFTCIICNNKLRGQPFYAVEKKAYCEPCYINTLEQCNVCSKPIMERILRATGKAYHPHCFTCVMCHRSLDGIPFTVDAGGLIHCIEDFHKKFAPRCSVCKEPIMPAPGQEETVRIVALDRDFHVHCYRCEDCGGLLSEGDNQGCYPLDGHILCKTCNSARIRVLTAKASTDL

SEQ ID NO: 23330 - protein, 428 aa, Homo sapiens
MSYYLSSENHLDPGPIYMRENGQLHMVNLALDGVRSSLQKPRPFRLFPKGFSVELCMNREDDTARKEKTDHFIFTYTREGNLRYSAKSLFSLVLGFISDNVDHIDSLIGFPEQIAEKLFSAAEARQKFTEPGAGLRALQKFTEAYGSLVLCSLCLRNRYLVISEKLEEIKSFRELTCLDLSCCKLGDEHELLEHLTNEALSSVTQLHLKDNCLSDAGVRKMTAPVRVMKRGLENLTLLDLSCNPEITDAGIGYLFSFRKLNCLDISGTGLKDIKTVKHKLQTHIGLVHSKVPLKEFDHSNCKTEGWADQIVLQWERVTAEAVKPRETSEPRAAAQRFYGKRSRAEAPLKCPLADTHMNSSEKLQFYKEKAPDCHGPVLKHEAISSQESKKSKKRPFEESETEQNNSSQPSKQKYVCLAVEDWDLLNSY

SEQ ID NO: 23331 - protein, 552 aa, Homo sapiens
MSQTRKKTSSEGETKPQTSTVNKFLRGSNAESRKEDNDLKTSDSQPSDWIQKTATSETAKPLSSEMEWRSSMEKNEHFLQKLGKKAVNKCLDLNNCGLTTADMKEMVALLPFLPDLEELDISWNGFVGGTLLSITQQMHLVSKLKILRLGSCRLTTDDVQALGEAFEMIPELEELNLSWNSKVGGNLPLILQKFQKGSKIQMIELVDCSLTSEDGTFLGQLLPMLQSLEVLDLSINRDIVGSLNSIAQGLKSTSNLKVLKLHSCGLSQKSVKILDAAFRYLGELRKLDLSCNKDLGGGFEDSPAQLVMLKHLQVLDLHQCSLTADDVMSLTQVIPLLSNLQELDLSANKKMGSSSENLLSRLRFLPALKSLVINNCALESETFTALAEASVHLSALEVFNLSWNKCVGGNLKLLLETLKLSMSLQVLRLSSCSLVTEDVALLASVIQTGHLAKLQKLDLSYNDSICDAGWTMFCQNVRFLKELIELDISLRPSNFRDCGQWFRHLLYAVTKLPQITEIGMKRWILPASQEEELECFDQDKKRSIHFDHGGFQ

SEQ ID NO: 23332 - protein, 496 aa, Homo sapiens
MSQTRKKTSSEGETKPQTSTVNKFLRGSNAESRKEDNDLKTSDSQPSDWIQKTATSETAKPLSSEMEWRSSMEKNEHFLQKLGKKAVNKCLDLNNCGLTTADMKEMGEAFEMIPELEELNLSWNSKVGGNLPLILQKFQKGSKIQMIELVDCSLTSEDGTFLGQLLPMLQSLEVLDLSINRDIVGSLNSIAQGLKSTSNLKVLKLHSCGLSQKSVKILDAAFRYLGELRKLDLSCNKDLGGGFEDSPAQLVMLKHLQVLDLHQCSLTADDVMSLTQVIPLLSNLQELDLSANKKMGSSSENLLSRLRFLPALKSLVINNCALESETFTALAEASVHLSALEVFNLSWNKCVGGNLKLLLETLKLSMSLQVLRLSSCSLVTEDVALLASVIQTGHLAKLQKLDLSYNDSICDAGWTMFCQNVRFLKELIELDISLRPSNFRDCGQWFRHLLYAVTKLPQITEIGMKRWILPASQEEELECFDQDKKRSIHFDHGGFQ

SEQ ID NO: 23333 - protein, 346 aa, Homo sapiens
MSQTRKKTSSEGETKPQTSTVNKFLRGSNAESRKEDNDLKTSDSQPSDWIQKTATSETAKPLSSEMEWRSSMEKNEHFLQKLGKKAVNKCLDLNNCGLTTADMKEMVALLPFLPDLEELDISWNGFVGGTLLSITQQMHLVSKLKILRLGSCRLTTDDVQALGEAFEMIPELEELNLSWNSKVGGNLPLILQKFQKGSKIQMIELVDCSLTSEDGTFLGQLLPMLQSLEVLDLSINRDIVGSLNSIAQGLKSTSNLKVLKLHSCGLSQKSVKILDAAFRYLGELRKLDLSCNKDLGGGFEDSPAQLVMLKHLQVLDLHQCSLTADDVMSLNSYLSIWENGKNSRLS

SEQ ID NO: 23334 - protein, 443 aa, Homo sapiens
MSQTRKKTSSEGETKPQTSTVNKFLRGSNAESRKEDNDLKTSDSQPSDWIQKTATSETAKPLSSEMEWRSSMEKNEHFLQKLGKKAVNKCLDLNNCGLTTADMKEMVALLPFLPDLEELDISWNGFVGGTLLSITQQMHLVSKLKILRLGSCRLTTDDVQALGEAFEMIPELEELNLSWNSKVGGNLPLILQKFQKGSKIQMIELVDCSLTSEDGTFLGQLLPMLQSLEVLDLSINRDIVGSLNSIAQGLKSTSNLKVLKLHSCGLSQKSVKILDAAFRYLGELRKLDLSCNKDLGGGFEDSPAQLVMLKHLQVLDLHQCSLTADDVMSLTQVIPLLSNLQELDLSANKKMGSSSENLLSRLRFLPALKSLVINNCALESETFTALAEASVHLSALEVFNLSWNKCVGGNLKLLLETLKLSMSLQVLRLSSCSLVTEDVALLE

SEQ ID NO: 23335 - protein, 125 aa, Homo sapiens
MAGAGPTMLLREENGCCSRRQSSSSAGDSDGEREDSAAERARQQLEALLNKTMRIRMTDGRTLVGCFLCTDRDCNVILGSAQEFLKPSDSFSAGEPRVLGLAMVPGHHIVSIEVQRESLTGPPYL

SEQ ID NO: 23336 - protein, 173 aa, Homo sapiens
MAVAVGVRAAPVLGLARALVLGLRGSQAARWRGWGTAAPGSLWALCECPAGCRELWFRGRAAWAARSERLLHPAQDSDGEREDSAAERARQQLEALLNKTMRIRMTDGRTLVGCFLCTDRDCNVILGSAQEFLKPSDSFSAGEPRVLGLAMVPGHHIVSIEVQRESLTGPPYL

SEQ ID NO: 23337 - protein, 1063 aa, Homo sapiens
MALQVELVPTGEIIRVVHPHRPCKLALGSDGVRVTMESALTARDRVGVQDFVLLENFTSEAAFIENLRRRFRENLIYTYIGPVLVSVNPYRDLQIYSRQHMERYRGVSFYEVPPHLFAVADTVYRALRTERRDQAVMISGESGAGKTEATKRLLQFYAETCPAPERGGAVRDRLLQSNPVLEAFGNAKTLRNDNSSRFGKYMDVQFDFKGAPVGGHILSYLLEKSRVVHQNHGERNFHIFYQLLEGGEEETLRRLGLERNPQSYLYLVKGQCAKVSSINDKSDWKVVRKALTVIDFTEDEVEDLLSIVASVLHLGNIHFAANEESNAQVTTENQLKYLTRLLSVEGSTLREALTHRKIIAKGEELLSPLNLEQAAYARDALAKAVYSRTFTWLVGKINRSLASKDVESPSWRSTTVLGLLDIYGFEVFQHNSFEQFCINYCNEKLQQLFIELTLKSEQEEYEAEGIAWEPVQYFNNKIICDLVEEKFKGIISILDEECLRPGEATDLTFLEKLEDTVKHHPHFLTHKLADQRTRKSLGRGEFRLLHYAGEVTYSVTGFLDKNNDLLFRNLKETMCSSKNPIMSQCFDRSELSDKKRPETVATQFKMSLLQLVEILQSKEPAYVRCIKPNDAKQPGRFDEVLIRHQVKYLGLLENLRVRRAGFAYRRKYEAFLQRYKSLCPETWPTWAGRPQDGVAVLVRHLGYKPEEYKMGRTKIFIRFPKTLFATEDALEVRRQSLATKIQAAWRGFHWRQKFLRVKRSAICIQSWWRGTLGRRKAAKRKWAAQTIRRLIRGFVLRHAPRCPENAFFLDHVRTSFLLNLRRQLPQNVLDTSWPTPPPALREASELLRELCIKNMVWKYCRSISPEWKQQLQQKAVASEIFKGKKDNYPQSVPRLFISTRLGTDEISPRVLQALGSEPIQYAVPVVKYDRKGYKPRSRQLLLTPNAVVIVEDAKVKQRIDYANLTGISVSSLSDSLFVLHVQRADNKQKGDVVLQSDHVIETLTKTALSANRVNSININQGSITFAGGPGRDGTIDFTPGSELLITKAKNGHLAVVAPRLNSR

SEQ ID NO: 23338 - protein, 1028 aa, Homo sapiens
MESALTARDRVGVQDFVLLENFTSEAAFIENLRRRFRENLIYTYIGPVLVSVNPYRDLQIYSRQHMERYRGVSFYEVPPHLFAVADTVYRALRTERRDQAVMISGESGAGKTEATKRLLQFYAETCPAPERGGAVRDRLLQSNPVLEAFGNAKTLRNDNSSRFGKYMDVQFDFKGAPVGGHILSYLLEKSRVVHQNHGERNFHIFYQLLEGGEEETLRRLGLERNPQSYLYLVKGQCAKVSSINDKSDWKVVRKALTVIDFTEDEVEDLLSIVASVLHLGNIHFAANEESNAQVTTENQLKYLTRLLSVEGSTLREALTHRKIIAKGEELLSPLNLEQAAYARDALAKAVYSRTFTWLVGKINRSLASKDVESPSWRSTTVLGLLDIYGFEVFQHNSFEQFCINYCNEKLQQLFIELTLKSEQEEYEAEGIAWEPVQYFNNKIICDLVEEKFKGIISILDEECLRPGEATDLTFLEKLEDTVKHHPHFLTHKLADQRTRKSLGRGEFRLLHYAGEVTYSVTGFLDKNNDLLFRNLKETMCSSKNPIMSQCFDRSELSDKKRPETVATQFKMSLLQLVEILQSKEPAYVRCIKPNDAKQPGRFDEVLIRHQVKYLGLLENLRVRRAGFAYRRKYEAFLQRYKSLCPETWPTWAGRPQDGVAVLVRHLGYKPEEYKMGRTKIFIRFPKTLFATEDALEVRRQSLATKIQAAWRGFHWRQKFLRVKRSAICIQSWWRGTLGRRKAAKRKWAAQTIRRLIRGFVLRHAPRCPENAFFLDHVRTSFLLNLRRQLPQNVLDTSWPTPPPALREASELLRELCIKNMVWKYCRSISPEWKQQLQQKAVASEIFKGKKDNYPQSVPRLFISTRLGTDEISPRVLQALGSEPIQYAVPVVKYDRKGYKPRSRQLLLTPNAVVIVEDAKVKQRIDYANLTGISVSSLSDSLFVLHVQRADNKQKGDVVLQSDHVIETLTKTALSANRVNSININQGSITFAGGPGRDGTIDFTPGSELLITKAKNGHLAVVAPRLNSR

SEQ ID NO: 23339 - protein, 1044 aa, Homo sapiens
MRYRASALGSDGVRVTMESALTARDRVGVQDFVLLENFTSEAAFIENLRRRFRENLIYTYIGPVLVSVNPYRDLQIYSRQHMERYRGVSFYEVPPHLFAVADTVYRALRTERRDQAVMISGESGAGKTEATKRLLQFYAETCPAPERGGAVRDRLLQSNPVLEAFGNAKTLRNDNSSRFGKYMDVQFDFKGAPVGGHILSYLLEKSRVVHQNHGERNFHIFYQLLEGGEEETLRRLGLERNPQSYLYLVKGQCAKVSSINDKSDWKVVRKALTVIDFTEDEVEDLLSIVASVLHLGNIHFAANEESNAQVTTENQLKYLTRLLSVEGSTLREALTHRKIIAKGEELLSPLNLEQAAYARDALAKAVYSRTFTWLVGKINRSLASKDVESPSWRSTTVLGLLDIYGFEVFQHNSFEQFCINYCNEKLQQLFIELTLKSEQEEYEAEGIAWEPVQYFNNKIICDLVEEKFKGIISILDEECLRPGEATDLTFLEKLEDTVKHHPHFLTHKLADQRTRKSLGRGEFRLLHYAGEVTYSVTGFLDKNNDLLFRNLKETMCSSKNPIMSQCFDRSELSDKKRPETVATQFKMSLLQLVEILQSKEPAYVRCIKPNDAKQPGRFDEVLIRHQVKYLGLLENLRVRRAGFAYRRKYEAFLQRYKSLCPETWPTWAGRPQDGVAVLVRHLGYKPEEYKMGRTKIFIRFPKTLFATEDALEVRRQSLATKIQAAWRGFHWRQKFLRVKRSAICIQSWWRGTLGRRKAAKRKWAAQTIRRLIRGFVLRHAPRCPENAFFLDHVRTSFLLNLRRQLPQNVLDTSWPTPPPALREASELLRELCIKNMVWKYCRSISPEWKQQLQQKAVASEIFKGKKDNYPQSVPRLFISTRLGTDEISPRVLQALGSEPIQYAVPVVKYDRKGYKPRSRQLLLTPNAVVIVEDAKVKQRIDYANLTGISVSSLSDSLFVLHVQRADNKQKGDVVLQSDHVIETLTKTALSANRVNSININQGSITFAGGPGRDGTIDFTPGSELLITKAKNGHLAVVAPRLNSR

SEQ ID NO: 23340 - protein, 498 aa, Homo sapiens
MFNYERPKHFIQSQNPCGSRLQPPGPETSSFSSQTKQSSIIIQPRQCTEQRFSASSTLSSHITMSSSAFPASPKQHAGSNPGQRVTTTYNQSPASFLSSILPSQPDYNSSKIPSAMDSNYQQSSAGQPINAKPSQTANAKPIPRTPDHEIQGSKEALIQDLERKLKCKDTLLHNGNQRLTYEEKMARRLLGPQNAAAVFQAQDDSGAQDSQQHNSEHARLQVPTSQVRSRSTSRGDVNDQDAIQEKFYPPRFIQVPENMSIDEGRFCRMDFKVSGLPAPDVSWYLNGRTVQSDDLHKMIVSEKGLHSLIFEVVRASDAGAYACVAKNRAGEATFTVQLDVLAKEHKRAPMFIYKPQSKKVLEGDSVKLECQISAIPPPKLFWKRNNEMVQFNTDRISLYQDNTGRVTLLIKDVNKKDAGWYTVSAVNEAGVTTCNTRLDVTARPNQTLPAPKQLRVRPTFSKYLALNGKGLNVKQAFNPEGEFQRLAAQSGLYESEEL

SEQ ID NO: 23341 - protein, 314 aa, Homo sapiens
MARRLLGPQNAAAVFQAQDDSGAQDSQQHNSEHARLQVPTSQVRSRSTSRGDVNDQDAIQEKFYPPRFIQVPENMSIDEGRFCRMDFKVSGLPAPDVSWYLNGRTVQSDDLHKMIVSEKGLHSLIFEVVRASDAGAYACVAKNRAGEATFTVQLDVLAKEHKRAPMFIYKPQSKKVLEGDSVKLECQISAIPPPKLFWKRNNEMVQFNTDRISLYQDNTGRVTLLIKDVNKKDAGWYTVSAVNEAGVTTCNTRLDVTARPNQTLPAPKQLRVRPTFSKYLALNGKGLNVKQAFNPEGEFQRLAAQSGLYESEEL

SEQ ID NO: 23342 - protein, 1194 aa, Homo sapiens
MMCEVMPTISEDGRRGSALGPDEAGGELERLMVTMLTERERLLETLREAQDGLATAQLRLRELGHEKDSLQRQLSIALPQEFAALTKELNLCREQLLEREEEIAELKAERNNTRLLLEHLECLVSRHERSLRMTVVKRQAQSPGGVSSEVEVLKALKSLFEHHKALDEKVRERLRMALERVAVLEEELELSNQETLNLREQLSRRRSGLEEPGKDGDGQTLANGLGPGGDSNRRTAELEEALERQRAEVCQLRERLAVLCRQMSQLEEELGTAHRELGKAEEANSKLQRDLKEALAQREDMEERITTLEKRYLSAQREATSLHDANDKLENELASKESLYRQSEEKSRQLAEWLDDAKQKLQQTLQKAETLPEIEAQLAQRVAALNKAEERHGNFEERLRQLEAQLEEKNQELQRARQREKMNDDHNKRLSETVDKLLSESNERLQLHLKERMGALEEKNSLSEEIANMKKLQDELLLNKEQLLAEMERMQMEIDQLRGRPPSSYSRSLPGSALELRYSQAPTLPSGAHLDPYVAGSGRAGKRGRWSGVKEEPSKDWERSAPAGSIPPPFPGELDGSDEEEAEGMFGAELLSPSGQADVQTLAIMLQEQLEAINKEIKLIQEEKETTEQRAEELESRVSSSGLDSLGRYRSSCSLPPSLTTSTLASPSPPSSGHSTPRLAPPSPAREGTDKANHVPKEEAGAPRGEGPAIPGDTPPPTPRSARLERMTQALALQAGSLEDGGPPRGSEGTPDSLHKAPKKKSIKSSIGRLFGKKEKGRMGPPGRDSSSLAGTPSDETLATDPLGLAKLTGPGDKDRRNKRKHELLEEACRQGLPFAAWDGPTVVSWLELWVGMPAWYVAACRANVKSGAIMANLSDTEIQREIGISNPLHRLKLRLAIQEMVSLTSPSAPASSRTSTGNVWMTHEEMESLTATTKPETKEISWEQILAYGDMNHEWVGNDWLPSLGLPQYRSYFMESLVDARMLDHLNKKELRGQLKMVDSFHRVSLHYGIMCLKRLNYDRKDLERRREESQTQIRDVMVWSNERVMGWVSGLGLKEFATNLTESGVHGALLALDETFDYSDLALLLQIPTQNAQARQLLEKEFSNLISLGTDRRLDEDSAKSFSRSPSWRKMFREKDLRGVTPDSAEMLPPNFRSAAAGALGSPGLPLRKLQPEGQTSGSSRADGVSVRTYSC

SEQ ID NO: 23343 - protein, 1185 aa, Homo sapiens
MMCEVMPTISEDGRRGSALGPDEAGGELERLMVTMLTERERLLETLREAQDGLATAQLRLRELGHEKDSLQRQLSIALPQEFAALTKELNLCREQLLEREEEIAELKAERNNTRLLLEHLECLVSRHERSLRMTVVKRQAQSPGGVSSEVEVLKALKSLFEHHKALDEKVRERLRMALERVAVLEEELELSNQETLNLREQLSRRRSGLEEPGKDGDGQTLANGLGPGGDSNRRTAELEEALERQRAEVCQLRERLAVLCRQMSQLEEELGTAHRELGKAEEANSKLQRDLKEALAQREDMEERITTLEKRYLSAQREATSLHDANDKLENELASKESLYRQSEEKSRQLAEWLDDAKQKLQQTLQKAETLPEIEAQLAQRVAALNKAEERHGNFEERLRQLEAQLEEKNQELQRARQREKMNDDHNKRLSETVDKLLSESNERLQLHLKERMGALEEKNSLSEEIANMKKLQDELLLNKEQLLAEMERMQMEIDQLRGRPPSSYSRSLPGSALELRYSQAPTLPSGAHLDPYVAGSGRAGKRGRWSGVKEEPSKDWERSAPAGSIPPPFPGELDGSDEEEAEGMFGAELLSPSGQADVQTLAIMLQEQLEAINKEIKLIQEEKETTEQRAEELESRVSSSGLDSLGRYRSSCSLPPSLTTSTLASPSPPSSGHSTPRLAPPSPAREGTDKANHVPKEEAGAPRGEGPAIPGDTPPPTPRSARLERMTQALALQAGSLEDGGPPRGSEGTPDSLHKAPKKKSIKSSIGRLFGKKEKGRMGPPGRDSSSLAGTPSDETLATDPLGLAKLTGPGDKDRRNKRKHELLEEACRQGLPFAAWDGPTVVSWLELWVGMPAWYVAACRANVKSGAIMANLSDTEIQREIGISNPLHRLKLRLAIQEMVSLTSPSAPASSRTSTGNVWMTHEEMESLTATTKPILAYGDMNHEWVGNDWLPSLGLPQYRSYFMESLVDARMLDHLNKKELRGQLKMVDSFHRVSLHYGIMCLKRLNYDRKDLERRREESQTQIRDVMVWSNERVMGWVSGLGLKEFATNLTESGVHGALLALDETFDYSDLALLLQIPTQNAQARQLLEKEFSNLISLGTDRRLDEDSAKSFSRSPSWRKMFREKDLRGVTPDSAEMLPPNFRSAAAGALGSPGLPLRKLQPEGQTSGSSRADGVSVRTYSC

SEQ ID NO: 23344 - protein, 150 aa, Homo sapiens
MKDEVALLAAVTLLGVLLQAYFSLQVISARRAFRVSPPLTTGPPEFERVYRAQVNCSEYFPLFLATLWVAGIFFHEGAAALCGLVYLFARLRYFQGYARSAQLRLAPLYASARALWLLVALAALGLLAHFLPAALRAALLGRLRTLLPWA

SEQ ID NO: 23345 - protein, 423 aa, Homo sapiens
MLETLSRQWIVSHRMEMWLLILVAYMFQRNVNSVHMPTKAVDPEAFMNISEIIQHQGYPCEEYEVATEDGYILSVNRIPRGLVQPKKTGSRPVVLLQHGLVGGASNWISNLPNNSLGFILADAGFDVWMGNSRGNAWSRKHKTLSIDQDEFWAFSYDEMARFDLPAVINFILQKTGQEKIYYVGYSQGTTMGFIAFSTMPELAQKIKMYFALAPIATVKHAKSPGTKFLLLPDMMIKGLFGKKEFLYQTRFLRQLVIYLCGQVILDQICSNIMLLLGGFNTNNMNMSRASVYAAHTLAGTSVQNILHWSQAVNSGELRAFDWGSETKNLEKCNQPTPVRYRVRDMTVPTAMWTGGQDWLSNPEDVKMLLSEVTNLIYHKNIPEWAHVDFIWGLDAPHRMYNEIIHLMQQEETNLSQGRCEAVL

SEQ ID NO: 23346 - protein, 383 aa, Homo sapiens
MTRPLDRKQSEIIQHQGYPCEEYEVATEDGYILSVNRIPRGLVQPKKTGSRPVVLLQHGLVGGASNWISNLPNNSLGFILADAGFDVWMGNSRGNAWSRKHKTLSIDQDEFWAFSYDEMARFDLPAVINFILQKTGQEKIYYVGYSQGTTMGFIAFSTMPELAQKIKMYFALAPIATVKHAKSPGTKFLLLPDMMIKGLFGKKEFLYQTRFLRQLVIYLCGQVILDQICSNIMLLLGGFNTNNMNMSRASVYAAHTLAGTSVQNILHWSQAVNSGELRAFDWGSETKNLEKCNQPTPVRYRVRDMTVPTAMWTGGQDWLSNPEDVKMLLSEVTNLIYHKNIPEWAHVDFIWGLDAPHRMYNEIIHLMQQEETNLSQGRCEAVL

SEQ ID NO: 23347 - protein, 864 aa, Homo sapiens
MGCWGQLLVWFGAAGAILCSSPGSQETFLRSSPLPLASPSPRDPKVSAPPSILEPASPLNSPGTEGSWLFSTCGASGRHGPTQTQCDGAYAGTSVVVTVGAAGQLRGVQLWRVPGPGQYLISAYGAAGGKGAKNHLSRAHGVFVSAIFSLGLGESLYILVGQQGEDACPGGSPESQLVCLGESRAVEEHAAMDGSEGVPGSRRWAGGGGGGGGATYVFRVRAGELEPLLVAAGGGGRAYLRPRDRGRTQASPEKLENRSEAPGSGGRGGAAGGGGGWTSRAPSPQAGRSLQEGAEGGQGCSEAWATLGWAAAGGFGGGGGACTAGGGGGGYRGGDASETDNLWADGEDGVSFIHPSSELFLQPLAVTENHGEVEIRRHLNCSHCPLRDCQWQAELQLAECLCPEGMELAVDNVTCMDLHKPPGPLVLMVAVVATSTLSLLMVCGVLILVKQKKWQGLQEMRLPSPELELSKLRTSAIRTAPNPYYCQVGLGPAQSWPLPPGVTEVSPANVTLLRALGHGAFGEVYEGLVIGLPGDSSPLQVAIKTLPELCSPQDELDFLMEALIISKFRHQNIVRCVGLSLRATPRLILLELMSGGDMKSFLRHSRPHLGQPSPLVMRDLLQLAQDIAQGCHYLEENHFIHRDIAARNCLLSCAGPSRVAKIGDFGMARDIYRASYYRRGDRALLPVKWMPPEAFLEGIFTSKTDSWSFGVLLWEIFSLGYMPYPGRTNQEVLDFVVGGGRMDPPRGCPGPVYRIMTQCWQHEPELRPSFASILERLQYCTQDPDVLNSLLPMELGPTPEEEGTSGLGNRSLECLRPPQPQELSPEKLKSWGGSPLGPWLSSGLKPLKSRGLQPQNLWNPTYRS

SEQ ID NO: 23348 - protein, 220 aa, Homo sapiens
MGCWGQLLVWFGAAGAILCSSPGSQETFLRSSPLPLASPSPRDPKVSAPPSILEPASPLNSPGTEGSWLFSTCGASGRHGPTQTQCDGAYAGTSVVVTVGAAGQLRGVQLWRVPGPGQYLISAYGAAGGKGAKNHLSRAHGVFVSAIFSLGLGESLYILVGQQGEDACPVAAASGDGAAPAPGARAAWGPGERAFLGAGSPAQRGEAPGPRRFPPPLPAG

SEQ ID NO: 23349 - protein, 477 aa, Homo sapiens
MGCWGQLLVWFGAAGAILCSSPGSQETFLRSSPLPLASPSPRDPKVSAPPSILEPASPLNSPGTEGSWLFSTCGASGRHGPTQTQCDGAYAGTSVVVTVGAAGQLRGVQLWRVPGPGQYLISAYGAAGGKGAKNHLSRAHGVFVSAIFSLGLGESLYILVGQQGEDACPGGSPESQLVCLGESRAVEEHAAMDGSEGVPGSRRWAGGGGGGGGATYVFRVRAGELEPLLVAAGGGGRAYLRPRDRGRTQASPEKLENRSEAPGSGGRGGAAGGGGGWTSRAPSPQAGRSLQEGAEGGQGCSEAWATLGWAAAGGFGGGGGACTAGGGGGGYRGGDASETDNLWADGEDGVSFIHPSSELFLQPLAVTENHGEVEIRRHLNCSHCPLRDCQWQAELQLAECLCPEGMELAVDNVTCMDLHKPPGPLVLMVAVVATSTLSLLMVCGVLIGTKRLAGTVDSRLLLSSELGWVSAAGSRRQ

SEQ ID NO: 23350 - protein, 803 aa, Homo sapiens
MGCWGQLLVWFGAAGAILCSSPGSQETFLRSSPLPLASPSPRDPKVSAPPSILEPASPLNSPGTEGSWLFSTCGASGRHGPTQTQCDGAYAGTSVVVTVGAAGQLRGVQLWRVPGPGQYLISAYGAAGGKGAKNHLSRAHGVFVSAIFSLGLGESLYILVGQQGEDACPGGSPESQLVCLGESRAVEEHAAMDGSEGVPGSRRWAGGGGGGGGATYVFRVRAGELEPLLVAAGGGGRAYLRPRDRGRTQASPEKLENRSEAPGSGGRGGAAGGDASETDNLWADGEDGVSFIHPSSELFLQPLAVTENHGEVEIRRHLNCSHCPLRDCQWQAELQLAECLCPEGMELAVDNVTCMDLHKPPGPLVLMVAVVATSTLSLLMVCGVLILVKQKKWQGLQEMRLPSPELELSKLRTSAIRTAPNPYYCQVGLGPAQSWPLPPGVTEVSPANVTLLRALGHGAFGEVYEGLVIGLPGDSSPLQVAIKTLPELCSPQDELDFLMEALIISKFRHQNIVRCVGLSLRATPRLILLELMSGGDMKSFLRHSRPHLGQPSPLVMRDLLQLAQDIAQGCHYLEENHFIHRDIAARNCLLSCAGPSRVAKIGDFGMARDIYRASYYRRGDRALLPVKWMPPEAFLEGIFTSKTDSWSFGVLLWEIFSLGYMPYPGRTNQEVLDFVVGGGRMDPPRGCPGPVYRIMTQCWQHEPELRPSFASILERLQYCTQDPDVLNSLLPMELGPTPEEEGTSGLGNRSLECLRPPQPQELSPEKLKSWGGSPLGPWLSSGLKPLKSRGLQPQNLWNPTYRS

SEQ ID NO: 23351 - protein, 734 aa, Homo sapiens
MGCWGQLLVWFGAAGAILCSSPGSQETFLRSSPLPLASPSPRDPKVSAPPSILEPASPLNSPGTEGSWLFSTCGASGRHGPTQTQCDGAYAGTSVVVTVGAAGQLRGVQLWRVPGPGQYLISAYGAAGGKGAKNHLSRAHGVFVSAIFSLGLGESLYILVGQQGEDACPGGSPESQLVCLGESRAVEEHAAMDGSEGVPGSRRWAGGGGGGGGATYVFRVRAGELEPLLVAAGGGGRAYLRPRDRGRTQASPEKLENRSEAPGSGGRGGAAGGDASETDNLWADGEDGVSFIHPSSELFLQPLAVTENHGEVEIRRHLNCSHCPLRDCQWQAELQLAECLCPEGMELAVDNVTCMDLHKPPGPLVLMVAVVATSTLSLLMVCGVLILGGAWPGPVLASATRCHRGFPSQCYSAQTLPELCSPQDELDFLMEALIISKFRHQNIVRCVGLSLRATPRLILLELMSGGDMKSFLRHSRPHLGQPSPLVMRDLLQLAQDIAQGCHYLEENHFIHRDIAARNCLLSCAGPSRVAKIGDFGMARDIYRASYYRRGDRALLPVKWMPPEAFLEGIFTSKTDSWSFGVLLWEIFSLGYMPYPGRTNQEVLDFVVGGGRMDPPRGCPGPVYRIMTQCWQHEPELRPSFASILERLQYCTQDPDVLNSLLPMELGPTPEEEGTSGLGNRSLECLRPPQPQELSPEKLKSWGGSPLGPWLSSGLKPLKSRGLQPQNLWNPTYRS

SEQ ID NO: 23352 - protein, 373 aa, Homo sapiens
MLIPFSMKNCFQLLCNCQVPAAGFKKTVKNGLILQSISNDVYQNLAVEDWIHDHMNLEGKPILFFWQNSPSVVIGRHQNPWQECNLNLMREEGIKLARRRSGGGTVYHDMGNINLTFFTTKKKYDRMENLKLIVRALNAVQPQLDVQATKRFDLLLDGQFKISGTASKIGRTTAYHHCTLLCSTDGTFLSSLLKSPYQGIRSNATASIPSLVKNLLEKDPTLTCEVLMNAVATEYAAYHQIDNHIHLINPTDETLFPGINSKAKELQTWEWIYGKTPKFSINTSFHVLYEQSHLEIKVFIDIKNGRIEICNIEAPDHWLPLEIRDKLNSSLIGSKFCPTETTMLTNILLRTCPQDHKLNSKWNILCEKIKGIM

SEQ ID NO: 23353 - protein, 402 aa, Homo sapiens
MMVHCAGCERPILDRFLLNVLDRAWHIKCVQCCECKTNLSEKCFSREGKLYCKNDFFRRFGTKCAGCAQGISPSDLVRKARSKVFHLNCFTCMVCNKQLSTGEELYVIDENKFVCKDDYLSSSSLKEGSLNSVSSCTDRSLSPDLQDALQDDPKETDNSTSSDKETANNENEEQNSGTKRRGPRTTIKAKQLETLKAAFAATPKPTRHIREQLAQETGLNMRVIQVWFQNRRSKERRMKQLSALGARRHAFFRSPRRMRPLGGRLDESEMLGSTPYTYYGDYQGDYYAPGSNYDFFAHGPPSQAQSPADSSFLAASGPGSTPLGALEPPLAGPHAADNPRFTDMISHPDTPSPEPGLPGTLHPMPGEVFSGGPSPPFPMSGTSGYSGPLSHPNPELNEAAVW

SEQ ID NO: 23354 - protein, 367 aa, Homo sapiens
MLAVGAMEGTRQSAFLLSSPPLAALHSMAEMKTPLYPAAYPPLPAGPPSSSSSSSSSSSPSPPLGTHNPGGLKPPATGGLSSLGSPPQQLSAATPHGINDILSRPSMPVASGAALPSASPSGSSSSSSSSASASSASAAAAAAAAAAAAASSPAGLLAGLPRFSSLSPPPPPPGLYFSPSAAAVAAVGRYPKPLAELPGRTPIFWPGVMQSPPWRDARLACTPHQGSILLDKDGKRKHTRPTFSGQQIFALEKTFEQTKYLAGPERARLAYSLGMTESQVKVWFQNRRTKWRKKHAAEMATAKKKQDSETERLKGASENEEEDDDYNKPLDPNSDDEKITQLLKKHKSSSGGGGGLLLHASEPESSS

SEQ ID NO: 23355 - protein, 246 aa, Homo sapiens
MYQVSGQRPSGCDAPYGAPSAAPGPAQTLSLLPGLEVVTGSTHPAEAAPEEGSLEEAATPMPQGNGPGIPQGLDSTDLDVPTEAVTCQPQGNPLGCTPLLPNDSGHPSELGGTRRAGNGALGGPKAHRKLQTHPSLASQGSKKSKSSSKSTTSQIPLQAQEDCCVHCILSCLFCEFLTLCNIVLDCATCGSCSSEDSCLCCCCCGSGECADCDLPCDLDCGILDACCESADCLEICMECCGLCFSS

SEQ ID NO: 23356 - protein, 277 aa, Homo sapiens
MDTNRPGAFVLSSAPLAALHNMAEMKTSLFPYALQGPAGFKAPALGGLGAQLPLGTPHGISDILGRPVGAAGGGLLGGLPRLNGLASSAGVYFGPAAAVARGYPKPLAELPGRPPIFWPGVVQGAPWRDPRLAGPAPAGGVLDKDGKKKHSRPTFSGQQIFALEKTFEQTKYLAGPERARLAYSLGMTESQVKVWFQNRRTKWRKRHAVEMASAKKKQDSDAEKLKVGGSDAEDDDEYNRPLDPNSDDEKITRLLKKHKPSNLALVSPCGGGAGDAL

SEQ ID NO: 23357 - protein, 956 aa, Homo sapiens
MDLLYGLVWLLTVLLEGISGQGVYAPPTVRIVHSGLACNIEEERYSERVYTIREGETLELTCLVTGHPRPQIRWTKTAGSASDRFQDSSVFNETLRITNIQRHQGGRYYCKAENGLGSPAIKSIRVDVYYLDDPVVTVHQSIGEAKEQFYYERTVFLRCVANSNPPVRYSWRRGQEVLLQGSDKGVEIYEPFFTQGETKILKLKNLRPQDYANYSCIASVRNVCNIPDKMVSFRLSNKTASPSIKLLVDDPIVVNPGEAITLVCVTTGGEPAPSLTWVRSFGTLPEKTVLNGGTLTIPAITSDDAGTYSCIANNNVGNPAKKSTNIIVRALKKGRFWITPDPYHKDDNIQIGREVKISCQVEAVPSEELTFSWFKNGRPLRSSERMVITQTDPDVSPGTTNLDIIDLKFTDFGTYTCVASLKGGGISDISIDVNISSSTVPPNLTVPQEKSPLVTREGDTIELQCQVTGKPKPIILWSRADKEVAMPDGSMQMESYDGTLRIVNVSREMSGMYRCQTSQYNGFNVKPREALVQLIVQYPPAVEPAFLEIRQGQDRSVTMSCRVLRAYPIRVLTYEWRLGNKLLRTGQFDSQEYTEYAVKSLSNENYGVYNCSIINEAGAGRCSFLVTGKAYAPEFYYDTYNPVWQNRHRVYSYSLQWTQMNPDAVDRIVAYRLGIRQAGQQRWWEQEIKINGNIQKGELITYNLTELIKPEAYEVRLTPLTKFGEGDSTIRVIKYSAPVNPHLREFHCGFEDGNICLFTQDDTDNFDWTKQSTATRNTKYTPNTGPNADRSGSKEGFYMYIETSRPRLEGEKARLLSPVFSIAPKNPYGPTNTAYCFSFFYHMYGQHIGVLNVYLRLKGQTTIENPLWSSSGNKGQRWNEAHVNIYPITSFQLIFEGIRGPGIEGDIAIDDVSIAEGECAKQDLATKNSVDGAVGILVHIWLFPIIVLISILSPRR

SEQ ID NO: 23358 - protein, 727 aa, Homo sapiens
MVSFRLSNKTASPSIKLLVDDPIVVNPGEAITLVCVTTGGEPAPSLTWVRSFGTLPEKTVLNGGTLTIPAITSDDAGTYSCIANNNVGNPAKKSTNIIVRALKKGRFWITPDPYHKDDNIQIGREVKISCQVEAVPSEELTFSWFKNGRPLRSSERMVITQTDPDVSPGTTNLDIIDLKFTDFGTYTCVASLKGGGISDISIDVNISSSTVPPNLTVPQEKSPLVTREGDTIELQCQVTGKPKPIILWSRADKEVAMPDGSMQMESYDGTLRIVNVSREMSGMYRCQTSQYNGFNVKPREALVQLIVQYPPAVEPAFLEIRQGQDRSVTMSCRVLRAYPIRVLTYEWRLGNKLLRTGQFDSQEYTEYAVKSLSNENYGVYNCSIINEAGAGRCSFLVTGKAYAPEFYYDTYNPVWQNRHRVYSYSLQWTQMNPDAVDRIVAYRLGIRQAGQQRWWEQEIKINGNIQKGELITYNLTELIKPEAYEVRLTPLTKFGEGDSTIRVIKYSAPVNPHLREFHCGFEDGNICLFTQDDTDNFDWTKQSTATRNTKYTPNTGPNADRSGSKEGFYMYIETSRPRLEGEKARLLSPVFSIAPKNPYGPTNTAYCFSFFYHMYGQHIGVLNVYLRLKGQTTIENPLWSSSGNKGQRWNEAHVNIYPITSFQLIFEGIRGPGIEGDIAIDDVSIAEGECAKQDLATKNSVDGAVGILVHIWLFPIIVLISILSPRR

SEQ ID NO: 23359 - protein, 1025 aa, Homo sapiens
MSVWSAGLLRSARRRRRGRTDGRRFLLRRAVPGHLGLARARVERAWLAAGLLKVPLRTPWAGYVHVHVKMDLLYGLVWLLTVLLEGISGQGVYAPPTVRIVHSGLACNIEEERYSERVYTIREGETLELTCLVTGHPRPQIRWTKTAGSASDRFQDSSVFNETLRITNIQRHQGGRYYCKAENGLGSPAIKSIRVDVYYLDDPVVTVHQSIGEAKEQFYYERTVFLRCVANSNPPVRYSWRRGQEVLLQGSDKGVEIYEPFFTQGETKILKLKNLRPQDYANYSCIASVRNVCNIPDKMVSFRLSNKTASPSIKLLVDDPIVVNPGEAITLVCVTTGGEPAPSLTWVRSFGTLPEKTVLNGGTLTIPAITSDDAGTYSCIANNNVGNPAKKSTNIIVRALKKGRFWITPDPYHKDDNIQIGREVKISCQVEAVPSEELTFSWFKNGRPLRSSERMVITQTDPDVSPGTTNLDIIDLKFTDFGTYTCVASLKGGGISDISIDVNISSSTVPPNLTVPQEKSPLVTREGDTIELQCQVTGKPKPIILWSRADKEVAMPDGSMQMESYDGTLRIVNVSREMSGMYRCQTSQYNGFNVKPREALVQLIVQYPPAVEPAFLEIRQGQDRSVTMSCRVLRAYPIRVLTYEWRLGNKLLRTGQFDSQEYTEYAVKSLSNENYGVYNCSIINEAGAGRCSFLVTGKAYAPEFYYDTYNPVWQNRHRVYSYSLQWTQMNPDAVDRIVAYRLGIRQAGQQRWWEQEIKINGNIQKGELITYNLTELIKPEAYEVRLTPLTKFGEGDSTIRVIKYSAPVNPHLREFHCGFEDGNICLFTQDDTDNFDWTKQSTATRNTKYTPNTGPNADRSGSKEGFYMYIETSRPRLEGEKARLLSPVFSIAPKNPYGPTNTAYCFSFFYHMYGQHIGVLNVYLRLKGQTTIENPLWSSSGNKGQRWNEAHVNIYPITSFQLIFEGIRGPGIEGDIAIDDVSIAEGECAKQDLATKNSVDGAVGILVHIWLFPIIVLISILSPRR

SEQ ID NO: 23360 - protein, 396 aa, Homo sapiens
MAVQESAAQLSMTLKVQEYPTLKVPYETLNKRFRAAQKNIDRETSHVTMVVAELEKTLSGCPAVDSVVSLLDGVVEKLSVLKRKAVESIQAEDESAKLCKRRIEHLKEHSSDQPAAASVWKRKRMDRMMVEHLLRCGYYNTAVKLARQSGIEDLVNIEMFLTAKEVEESLERRETATCLAWCHDNKSRLRKMKSCLEFSLRIQEFIELIRQNKRLDAVRHARKHFSQAEGSQLDEVRQAMGMLAFPPDTHISPYKDLLDPARWRMLIQQFRYDNYRLHQLGNNSVFTLTLQAGLSAIKTPQCYKEDGSSKSPDCPVCSRSLNKLAQPLPMAHCANSRLVCKISGDVMNENNPPMMLPNGYVYGYNSLLSIRQDDKVVCPRTKEVFHFSQAEKVYIM

SEQ ID NO: 23361 - protein, 360 aa, Homo sapiens
MAVQESAAQLSMTLKVQEYPTLKVPYETLNKRFRAAQKNIDRETSHVTMVVAELEKTLSGCPAVDSVVSLLDGVVEKLSVLKRKAVESIQAEDESAKLCKRRIEHLKEHSSDQPAAASVWKRKRMDRMMVEHLLRCGYYNTAVKLARQSGIESCLEFSLRIQEFIELIRQNKRLDAVRHARKHFSQAEGSQLDEVRQAMGMLAFPPDTHISPYKDLLDPARWRTCTVADLIQQFRYDNYRLHQLGNNSVFTLTLQAGLSAIKTPQCYKEDGSSKSPDCPVCSRSLNKLAQPLPMAHCANSRLVCKISGDVMNENNPPMMLPNGYVYGYNSLLSIRQDDKVVCPRTKEVFHFSQAEKVYIM

SEQ ID NO: 23362 - protein, 355 aa, Homo sapiens
MAVQESAAQLSMTLKVQEYPTLKVPYETLNKRFRAAQKNIDRETSHVTMVVAELEKTLSGCPAVDSVVSLLDGVVEKLSVLKRKAVESIQAEDESAKLCKRRIEHLKEHSSDQPAAASVWKRKRMDRMMVEHLLRCGYYNTAVKLARQSGIESCLEFSLRIQEFIELIRQNKRLDAVRHARKHFSQAEGSQLDEVRQAMGMLAFPPDTHISPYKDLLDPARWRMLIQQFRYDNYRLHQLGNNSVFTLTLQAGLSAIKTPQCYKEDGSSKSPDCPVCSRSLNKLAQPLPMAHCANSRLVCKISGDVMNENNPPMMLPNGYVYGYNSLLSIRQDDKVVCPRTKEVFHFSQAEKVYIM

SEQ ID NO: 23363 - protein, 328 aa, Homo sapiens
MAVQESAAQLSMTLKVQEYPTLKVPYETLNKRFRAAQKNIDRETSHVTMVVAELEKTLSGCPAVDSVVSLLDGVVEKLSVLKRKAVESIQAEDESAKLCKRRIEHLKEHSSDQPAAASVWKRKRMDRMMVEHLLRCGYYNTAVKLARQSGIGTCKKALQPSRREPAGRGAPGHGHAGLPARHAHLPVQGPSGPCTVADADPAVPVRQLPTTPAGKQFCVHPHPAGWPLSHQDQCYKEDGSSKSPDCPVCSRSLNKLAQPLPMAHCANSRLVCKISGDVMNENNPPMMLPNGYVYGYNSLLSIRQDDKVVCPRTKEVFHFSQAEKVYIM

SEQ ID NO: 23364 - protein, 245 aa, Homo sapiens
MAVQESAAQLSMTLKVQEYPTLKVPYETLNKRFRAAQKNIDRETSHVTMVVAELEKTLSGCPAVDSVVSLLDGVVEKLSVLKRKAVESIQAEDESAKLCKRRIEHLKEHSSDQPAAASVWKRKRMDRMMVEHLLRCGYYNTAVKLARQSGIETCKKALQPSRREPAGRGAPGHGHAGLPARHAHLPVQGPSGPCTVADADPAVPVRQLPTTPAGKQFCVHPHPAGRPLSHQDTTVLQGGRQLQEP

SEQ ID NO: 23365 - protein, 156 aa, Homo sapiens
MTTNPKPNKALKVKKEAGENAPVLSDDELVSMSVRELNQHLRGLTKEEVTRLKQRRRTLKNRGYAASCRIKRVTQKEELERQRVELQQEVEKLARENSSMRLELDALRSKYEALQTFARTVARGPVAPSKVATTSVITIVKSTELSSTSVPFSAAS

SEQ ID NO: 23366 - protein, 347 aa, Homo sapiens
MPRGQKSKLRAREKRRKAREETQGLKVAHATAAEKEECPSSSPVLGDTPTSSPAAGIPQKPQGAPPTTTAAAAVSCTESDEGAKCQGEENASFSQATTSTESSVKDPVAWEAGMLMHFILRKYKMREPIMKADMLKVVDEKYKDHFTEILNGASRRLELVFGLDLKEDNPSGHTYTLVSKLNLTNDGNLSNDWDFPRNGLLMPLLGVIFLKGNSATEEEIWKFMNVLGAYDGEEHLIYGEPRKFITQDLVQEKYLKYEQVPNSDPPRYQFLWGPRAYAETTKMKVLEFLAKMNGATPRDFPSHYEEALRDEEERAQVRSSVRARRRTTATTFRARSRAPFSRSSHPM

SEQ ID NO: 23367 - protein, 319 aa, Homo sapiens
MPRGQKSKLRAREKRRKARDETRGLNVPQVTEAEEEEAPCCSSSVSGGAASSSPAAGIPQEPQRAPTTAAAAAAGVSSTKSKKGAKSHQGEKNASSSQASTSTKSPSEDPLTRKSGSLVQFLLYKYKIKKSVTKGEMLKIVGKRFREHFPEILKKASEGLSVVFGLELNKVNPNGHTYTFIDKVDLTDEESLLSSWDFPRRKLLMPLLGVIFLNGNSATEEEIWEFLNMLGVYDGEEHSVFGEPWKLITKDLVQEKYLEYKQVPSSDPPRFQFLWGPRAYAETSKMKVLEFLAKVNGTTPCAFPTHYEEALKDEEKAGV

SEQ ID NO: 23368 - protein, 604 aa, Homo sapiens
MGAALGTGTRLAPWPGRACGALPRWTPTAPAQGCHSKPGPARPVPLKKRGYDVTRNPHLNKGMAFTLEERLQLGIHGLIPPCFLSQDVQLLRIMRYYERQQSDLDKYIILMTLQDRNEKLFYRVLTSDVEKFMPIVYTPTVGLACQHYGLTFRRPRGLFITIHDKGHLATMLNSWPEDNIKAVVVTDGERILGLGDLGCYGMGIPVGKLALYTACGGVNPQQCLPVLLDVGTNNEELLRDPLYIGLKHQRVHGKAYDDLLDEFMQAVTDKFGINCLIQFEDFANANAFRLLNKYRNKYCMFNDDIQGTASVAVAGILAALRITKNKLSNHVFVFQGAGEAAMGIAHLLVMALEKEGVPKAEATRKIWMVDSKGLIVKGRSHLNHEKEMFAQDHPEVNSLEEVVRLVKPTAIIGVAAIAGAFTEQILRDMASFHERPIIFALSNPTSKAECTAEKCYRVTEGRGIFASGSPFKSVTLEDGKTFIPGQGNNAYVFPGVALGVIAGGIRHIPDEIFLLTAEQIAQEVSEQHLSQGRLYPPLSTIRDVSLRIAIKVLDYAYKHNLASYYPEPKDKEAFVRSLVYTPDYDSFTLDSYTWPKEAMNVQTV

SEQ ID NO: 23369 - protein, 342 aa, Homo sapiens
MGAALGTGTRLAPWPGRACGALPRWTPTAPAQGCHSKPGPARPVPLKKRGYDVTRNPHLNKGMAFTLEERLQLGIHGLIPPCFLSQDVQLLRIMRYYERQQSDLDKYIILMTLQDRNEKLFYRVLTSDVEKFMPIVYTPTVGLACQHYGLTFRRPRGLFITIHDKGHLATMLNSWPEDNIKAVVVTDGERILGLGDLGCYGMGIPVGKLALYTACGGVNPQQCLPVLLDVGTNNEELLRDPLYIGLKHQRVHGKAYDDLLDEFMQAVTDKFGINCLIQFEDFANANAFRLLNKYRNKYCMFNDDIQGTTCHTFSCPWHLWAQVMFQHIPGPMGFSEWLPRNS

SEQ ID NO: 23370 - protein, 343 aa, Homo sapiens
MPRGQKSKLRAREKRHQARCENQDLGATQATVAEGESPSPAYLLFGDRPQNLPAAETPSIPEALQGAPSTTNAIAPVSCSSNEGASSQDEKSLGSSREAEGWKEDPLNKKVVSLVHFLLQKYETKEPITKGDMIKFVIRKDKCHFNEILKRASEHMELALGVDLKEVDPIRHYYAFFSKLDLTYDETTSDEEKIPKTGLLMIALGVIFLNGNRAPEEAVWEIMNMMGVYADRKHFLYGDPRKVMTKDLVQLKYLEYQQVPNSDPPRYEFLWGPRAHAETSKMKVLEFVAKIHDTVPSAFPSCYEEALRDEEQRTQARAAARAHTAAMANARSRTTSSSFSHAK

SEQ ID NO: 23371 - protein, 584 aa, Homo sapiens
MLSRLRVVSTTCTLACRHLHIKEKGKPLMLNPRTNKGMAFTLQERQMLGLQGLLPPKIETQDIQALRFHRNLKKMTSPLEKYIYIMGIQERNEKLFYRILQDDIESLMPIVYTPTVGLACSQYGHIFRRPKGLFISISDRGHVRSIVDNWPENHVKAVVVTDGERILGLGDLGVYGMGIPVGKLCLYTACAGIRPDRCLPVCIDVGTDNIALLKDPFYMGLYQKRDRTQQYDDLIDEFMKAITDRYGRNTLIQFEDFGNHNAFRFLRKYREKYCTFNDDIQGTAAVALAGLLAAQKVISKPISEHKILFLGAGEAALGIANLIVMSMVENGLSEQEAQKKIWMFDKYGLLVKGRKAKIDSYQEPFTHSAPESIPDTFEDAVNILKPSTIIGVAGAGRLFTPDVIRAMASINERPVIFALSNPTAQAECTAEEAYTLTEGRCLFASGSPFGPVKLTDGRVFTPGQGNNVYIFPGVALAVILCNTRHISDSVFLEAAKALTSQLTDEELAQGRLYPPLANIQEVSINIAIKVTEYLYANKMAFRYPEPEDKAKYVKERTWRSEYDSLLPDVYEWPESASSPPVITE

SEQ ID NO: 23372 - protein, 479 aa, Homo sapiens
MLSRLRVVSTTCTLACRHLHIKEKGKPLMLNPRTNKGMAFTLQERQMLGLQGLLPPKIETQDIQALRFHRNLKKMTSPLEKYIYIMGIQERNEKLFYRILQDDIESLMPIVYTPTVGLACSQYGHIFRRPKGLFISISDRGHVRSIVDNWPENHVKAVVVTDGERILGLGDLGVYGMGIPVGKLCLYTACAGIRPDRCLPVCIDVGTDNIALLKDPFYMGLYQKRDRTQQYDDLIDEFMKAITDRYGRNTLIQFEDFGNHNAFRFLRKYREKYCTFNDDIQGTAAVALAGLLAAQKVISKPISEHKILFLGAGEAALGIANLIVMSMVENGLSEQEAQKKIWMFDKYGLLVKGRKAKIDSYQEPFTHSAPESIPDTFEDAVNILKPSTIIGVAGAGRLFTPDVIRAMASINERPVIFALSNPTAQAECTAEEAYTLTEGRCLFASGSPFGPVKLTDGRVFTPGQGNNVYIFPGYRIPIC

SEQ ID NO: 23373 - protein, 324 aa, Homo sapiens
MSQDQESPRCTHDQHLQTFSETQSLEVAQVSKALEKTLLSSSHPLVPGKLKEAPAAKAESPLEVPQSFCSSSIAVTTTSSSESDEASSNQEEEDSPSSSEDTSDPRNVPADALDQKVAFLVNFMLHKCQMKKPITKADMLKIIIKDDESHFSEILLRASEHLEMIFGLDVVEVDPTTHCYGLFIKLGLTYDGMLSGEKGVPKTGLLIIVLGVIFMKGNRATEEEVWEVLNLTGVYSGKKHFIFGEPRMLITKDFVKEKYLEYQQVANSDPARYEFLWGPRAKAETSKMKVLEFVAKVHGSYPHSFPSQYAEALKEEEERARARI

SEQ ID NO: 23374 - protein, 1142 aa, Homo sapiens
MGDKDMPTAGMPSLLQSSSESPQSCPEGEDSQSPLQIPQSSPESDDTLYPLQSPQSRSEGEDSSDPLQRPPEGKDSQSPLQIPQSSPEGDDTQSPLQNSQSSPEGKDSLSPLEISQSPPEGEDVQSPLQNPASSFFSSALLSIFQSSPESTQSPFEGFPQSVLQIPVSAASSSTLVSIFQSSPESTQSPFEGFPQSPLQIPVSRSFSSTLLSIFQSSPERTQSTFEGFAQSPLQIPVSPSSSSTLLSLFQSFSERTQSTFEGFAQSSLQIPVSPSFSSTLVSLFQSSPERTQSTFEGFPQSPLQIPVSSSSSSTLLSLFQSSPERTHSTFEGFPQSLLQIPMTSSFSSTLLSIFQSSPESAQSTFEGFPQSPLQIPGSPSFSSTLLSLFQSSPERTHSTFEGFPQSPLQIPMTSSFSSTLLSILQSSPESAQSAFEGFPQSPLQIPVSSSFSYTLLSLFQSSPERTHSTFEGFPQSPLQIPVSSSSSSSTLLSLFQSSPECTQSTFEGFPQSPLQIPQSPPEGENTHSPLQIVPSLPEWEDSLSPHYFPQSPPQGEDSLSPHYFPQSPPQGEDSLSPHYFPQSPQGEDSLSPHYFPQSPPQGEDSMSPLYFPQSPLQGEEFQSSLQSPVSICSSSTPSSLPQSFPESSQSPPEGPVQSPLHSPQSPPEGMHSQSPLQSPESAPEGEDSLSPLQIPQSPLEGEDSLSSLHFPQSPPEWEDSLSPLHFPQFPPQGEDFQSSLQSPVSICSSSTSLSLPQSFPESPQSPPEGPAQSPLQRPVSSFFSYTLASLLQSSHESPQSPPEGPAQSPLQSPVSSFPSSTSSSLSQSSPVSSFPSSTSSSLSKSSPESPLQSPVISFSSSTSLSPFSEESSSPVDEYTSSSDTLLESDSLTDSESLIESEPLFTYTLDEKVDELARFLLLKYQVKQPITKAEMLTNVISRYTGYFPVIFRKAREFIEILFGISLREVDPDDSYVFVNTLDLTSEGCLSDEQGMSQNRLLILILSIIFIKGTYASEEVIWDVLSGIGVRAGREHFAFGEPRELLTKVWVQEHYLEYREVPNSSPPRYEFLWGPRAHSEVIKRKVVEFLAMLKNTVPITFPSSYKDALKDVEERAQAIIDTTDDSTATESASSSVMSPSFSSE

SEQ ID NO: 23375 - protein, 209 aa, Homo sapiens
MLTNVISRYTGYFPVIFRKAREFIEILFGISLREVDPDDSYVFVNTLDLTSEGCLSDEQGMSQNRLLILILSIIFIKGTYASEEVIWDVLSGIGVRAGREHFAFGEPRELLTKVWVQEHYLEYREVPNSSPPRYEFLWGPRAHSEVIKRKVVEFLAMLKNTVPITFPSSYKDALKDVEERAQAIIDTTDDSTATESASSSVMSPSFSSE

SEQ ID NO: 23376 - protein, 911 aa, Homo sapiens
MEASWRQVAGGRGRSRGRATAAPSGNGVHLRGAGGGREKGSVGAVPSGTSPGGVATTAAAGSRHSPAGSQALQTTAASELMSQKKFEEIKKANQAAARKLVEEQFSSSSEEGDEDFEGKQGKILANTFITYTTQTDGDTRELERTKQYVNEAFQAGAMTCLICIASVKRNQAVWSCSGCFCIFHMPCIQKWAKDSQFLVSSVTDDDFGKKDCPWPCPKCRFEYKRSETPSRYYCYCGKVEDPPLDPWLVPHSCGQVCEREFKPPCGHKCLLLCHPGPCPPCPKMVTTTCYCKKAKPIPRRCSAKEWSCQLPCGQKLLCGQHKCENPCHAGSCQPCPRVSRQKCVCGKKVAERSCASPLWHCDQVCGKTLPCGNHTCEQVCHVGACGECPRSGKRFCPCQKSKFSLPCTEDVPTCGDSCDKVLECGIHRCSQRCHRGPCETCRQEVEKHCRCGKHTKRMPCHKPYLCETKCVKMRDCQKHQCRRKCCPGNCPPCDQNCGRTLGCRNHKCPSVCHRGSCYPCPETVDVKCNCGNTKVTVPCGRERTTRPPKCKEQCSRPPTCHHTSQEKHRCHFGSCPPCHQPCQKVLEKCGHLCPAPCHDQALIKQTGRHQPTGPWEQPSEPAFIQTALPCPPCQVPIPMECLGKHEVSPLPCHAVGPYSCKRVCGRILDCQNHTCMKECHKVTKTDGCTGKNKAGPECLHCEEGCSKSRPLGCLHPCILRCHPGECPPCVQMLRIKCHCKITSLYVECRKITTADVNEKNLLSCCKNQCPKELPCGHRCKEMCHPGECPFNCNQKVKLRCPCKRIKKELQCNKVRENQVSIECDTTCKEMKRKASEIKEAEAKAALEEEKRRQQAELEAFENRLKGRRKKNRKRDEVAVELSLWQKHKYYLISVCGVVVVVFAWYITHDVN

SEQ ID NO: 23377 - protein, 733 aa, Homo sapiens
MEASWRQVAGGRGRSRGRATAAPSGNGVHLRGAGGGREKGSVGAVPSGTSPGGVATTAAAGSRHSPAGSQALQTTAASELMSQKKFEEIKKANQAAARKLVEEQFSSSSEEGDEDFEGKQGKILANTFITYTTQTDGDTRELERTKQYVNEAFQAGAMTCLICIASVKRNQAVWSCSGCFCIFHMPCIQKWAKDSQFLVSSVTDDDFGKKDCPWPCPKCRFEYKRSETPSRYYCYCGKVEDPPLDPWLVPHSCGQVCEREFKPPCGHKCLLLCHPGPCPPCPKMVTTTCYCKKAKPIPRRCSAKEWSCQLPCGQKLLCGQHKCENPCHAGSCQPCPRVSRQKCVCGKKVAERSCASPLWHCDQVCGKTLPCGNHTCEQVCHVGACGECPRSGKRFCPCQKSKFSLPCTEDVPTCGDSCDKVLECGIHRCSQRCHRGPCETCRQEVEKHCRCGKHTKRMPCHKPYLCETKCVKMRDCQKHQCRRKCCPGNCPPCDQNCGRTLGCRNHKCPSVCHRGSCYPCPETVDVKCNCGNTKVTVPCGRERTTRPPKCKEQCSRPPTCHHTSQEKHRCHFGSCPPCHQPCQKVLEKCGHLCPAPCHDQALIKQTGRHQPTGPWEQPSEPAFIQTALPCPPCQVPIPMECLGKHEVSPLPCHAVGPYSCKRVCGRILDCQNHTCMKECHKVTKTDGCTGKNKIGKLKLCDLSMILQQESSKSESTVPDLLTPSPMCSSTHVI

SEQ ID NO: 23378 - protein, 137 aa, Homo sapiens
MQCGLVGKIIKRFEQKGFRLVAMKFLPASEEHLKQHYIDLKDRPFFPGLVKYMNSGPVVAMVWEGLNVVKTGRVMLGETNPADSKPGTIRGDFCIQVGRNIIHGSDSVKSAEKEISLRFKPEELVDYKSCAHDWVYE

SEQ ID NO: 23379 - protein, 335 aa, Homo sapiens
MAAPSGVHLLVRRGSHRIFSSPLNHIYLHKQSSSQQRRNFFFRRQRDISHSIVLPAAVSSAHPVPKHIKKPDYVTTGIVPDWGDSIEVKNEDQIQGLHQACQLARHVLLLAGKSLKVDMTTEEIDALVHREIISHNAYPSPLGYGGFPKSVCTSVNNVLCHGIPDSRPLQDGDIINIDVTVYYNGYHGDTSETFLVGNVDECGKKLVEVARRCRDEAIAACRAGAPFSVIGNTISHITHQNGFQVCPHFVGHGIGSYFHGHPEIWHHANDSDLPMEEGMAFTIEPIITEGSPEFKVLEDAWTVVSLDNQRSAQFEHTVLITSRGAQILTKLPHEA

SEQ ID NO: 23380 - protein, 1144 aa, Homo sapiens
MKLSRQFTVFGSAIFCVVIFSLYLMLDRGHLDYPRNPRREGSFPQGQLSMLQEKIDHLERLLAENNEIISNIRDSVINLSESVEDGPKSSQSNFSQGAGSHLLPSQLSLSVDTADCLFASQSGSHNSDVQMLDVYSLISFDNPDGGVWKQGFDITYESNEWDTEPLQVFVVPHSHNDPGWLKTFNDYFRDKTQYIFNNMVLKLKEDSRRKFIWSEISYLSKWWDIIDIQKKDAVKSLIENGQLEIVTGGWVMPDEATPHYFALIDQLIEGHQWLENNIGVKPRSGWAIDPFGHSPTMAYLLNRAGLSHMLIQRVHYAVKKHFALHKTLEFFWRQNWDLGSVTDILCHMMPFYSYDIPHTCGPDPKICCQFDFKRLPGGRFGCPWGVPPETIHPGNVQSRARMLLDQYRKKSKLFRTKVLLAPLGDDFRYCEYTEWDLQFKNYQQLFDYMNSQSKFKVKIQFGTLSDFFDALDKADETQRDKGQSMFPVLSGDFFTYADRDDHYWSGYFTSRPFYKRMDRIMESHLRAAEILYYFALRQAHKYKINKFLSSSLYTALTEARRNLGLFQHHDAITGTAKDWVVVDYGTRLFHSLMVLEKIIGNSAFLLILKDKLTYDSYSPDTFLEMDLKQKSQDSLPQKNIIRLSAEPRYLVVYNPLEQDRISLVSVYVSSPTVQVFSASGKPVEVQVSAVWDTANTISETAYEISFRAHIPPLGLKVYKILESASSNSHLADYVLYKNKVEDSGIFTIKNMINTEEGITLENSFVLLRFDQTGLMKQMMTKEDGKHHEVNVQFSWYGTTIKRDKSGAYLFLPDGNAKPYVYTTPPFVRVTHGRIYSEVTCFFDHVTHRVRLYHIQGIEGQSVEVSNIVDIRKVYNREIAMKISSDIKSQNRFYTDLNGYQIQPRMTLSKLPLQANVYPMTTMAYIQDAKHRLTLLSAQSLGVSSLNSGQIEVIMDRRLMQDDNRGLEQGIQDNKITANLFRILLEKRSAVNTEEEKKSVSYPSLLSHITSSLMNHPVIPMANKFSSPTLELQGEFSPLQSSLPCDIHLVNLRTIQSKVGNGHSNEAALILHRKGFDCRFSSKGTGLFCSTTQGKILVQKLLNKFIVESLTPSSLSLMHSPPGTQNISEINLSPMEISTFRIQLR

SEQ ID NO: 23381 - protein, 334 aa, Homo sapiens
MEPRTGDAADPRGSRGGRGPSPLAGPSARQLLARLDARPLAARAAVDVAALVRRAGATLRLRRKEAVSVLDSADIEVTDSRLPHATIVDHRPQHRWLETCNAPPQLIQGKARSAPKPSQASGHFSVELVRGYAGFGLTLGGGRDVAGDTPLAVRGLLKDGPAQRCGRLEVGDLVLHINGESTQGLTHAQAVERIRAGGPQLHLVIRRPLETHPGKPRGVGEPRKGVVPSWPDRSPDPGGPEVTGSRSSSTSLVQHPPSRTTLKKTRGSPEPSPEAAADGPTVSPPERRAEDPNDQIPGSPGPWLVPSEERLSRALGVRGAAQLAQEMAAGRRRH

SEQ ID NO: 23382 - protein, 275 aa, Homo sapiens
MPLLWITGPRYHLILLSEASCLRANYVHLCPLFQHRWLETCNAPPQLIQGKARSAPKPSQASGHFSVELVRGYAGFGLTLGGGRDVAGDTPLAVRGLLKDGPAQRCGRLEVGDLVLHINGESTQGLTHAQAVERIRAGGPQLHLVIRRPLETHPGKPRGVGEPRKGVVPSWPDRSPDPGGPEVTGSRSSSTSLVQHPPSRTTLKKTRGSPEPSPEAAADGPTVSPPERRAEDPNDQIPGSPGPWLVPSEERLSRALGVRGAAQLAQEMAAGRRRH

SEQ ID NO: 23383 - protein, 270 aa, Homo sapiens
MPLLWITGPRYHLILLSEASCLRANYVHLCPLFQHRWLETCNAPPQLIQGKARSAPKPSQASGHFSVELVRGYAGFGLTLGGGRDVAGDTPLAVRGLLKDGPAQRCGRLEVGDLVLHINGESTQGLTHAQAVERIRAGGPQLHLVIRRPLETHPGKPRGVGEPRKGVDRSPDPGGPEVTGSRSSSTSLVQHPPSRTTLKKTRGSPEPSPEAAADGPTVSPPERRAEDPNDQIPGSPGPWLVPSEERLSRALGVRGAAQLAQEMAAGRRRH

SEQ ID NO: 23384 - protein, 359 aa, Homo sapiens
MIAAQAKLVYHLNKYYNEKCQARKAAIAKTIREVCKVVSDVLKEVEVQEPRFISSLNEMDNRYEGLEVISPTEFEVVLYLNQMGVFNFVDDGSLPGCAVLKLSDGRKRSMSLWVEFITASGYLSARKIRSRFQTLVAQAVDKCSYRDVVKMVADTSEVKLRIRDRYVVQITPAFKCTGIWPRSAAHWPLPHIPWPGPNRVAEVKAEGFNLLSKECHSLAGKQSSAESDAWVLQFAEAENRLQMGGCRKKCLSILKTLRDRHLELPGQPLNNYHMKTLVSYECEKHPRESDWDESCLGDRLNGILLQLISCLQCRRCPHYFLPNLDLFQGKPHSALENAAKQTWRLAREILTNPKSLEKL

SEQ ID NO: 23385 - protein, 1011 aa, Homo sapiens
MGAYARASGVCARGCLDSAGPWTMSRALRPPLPPLCFFLLLLAAAGARAGGYETCPTVQPNMLNVHLLPHTHDDVGWLKTVDQYFYGIKNDIQHAGVQYILDSVISALLADPTRRFIYVEIAFFSRWWHQQTNATQEVVRDLVRQGRLEFANGGWVMNDEAATHYGAIVDQMTLGLRFLEDTFGNDGRPRVAWHIDPFGHSREQASLFAQMGFDGFFFGRLDYQDKWVRMQKLEMEQVWRASTSLKPPTADLFTGVLPNGYNPPRNLCWDVLCVDQPLVEDPRSPEYNAKELVDYFLNVATAQGRYYRTNHTVMTMGSDFQYENANMWFKNLDKLIRLVNAQQAKGSSVHVLYSTPACYLWELNKANLTWSVKHDDFFPYADGPHQFWTGYFSSRPALKRYERLSYNFLQVCNQLEALVGLAANVGPYGSGDSAPLNEAMAVLQHHDAVSGTSRQHVANDYARQLAAGWGPCEVLLSNALARLRGFKDHFTFCQQLNISICPLSQTAARFQVIVYNPLGRKVNWMVRLPVSEGVFVVKDPNGRTVPSDVVIFPSSDSQAHPPELLFSASLPALGFSTYSVAQVPRWKPQARAPQPIPRRSWSPALTIENEHIRATFDPDTGLLMEIMNMNQQLLLPVRQTFFWYNASIGDNESDQASGAYIFRPNQQKPLPVSRWAQIHLVKTPLVQEVHQNFSAWCSQVVRLYPGQRHLELEWSVGPIPVGDTWGKEVISRFDTPLETKGRFYTDSNGREILERRRDYRPTWKLNQTEPVAGNYYPVNTRIYITDGNMQLTVLTDRSQGGSSLRDGSLELMVHRRLLKDDGRGVSEPLMENGSGAWVRGRHLVLLDTAQAAAAGHRLLAEQEVLAPQVVLAPGGGAAYNLGAPPRTQFSGLRRDLPPSVHLLTLASWGPEMVLLRLEHQFAVGEDSGRNLSAPVTLNLRDLFSTFTITRLQETTLVANQLREAASRLKWTTNTGPTPHQTPYQLDPANITLEPMEIRTFLASVQWKEVDG

SEQ ID NO: 23386 - protein, 1010 aa, Homo sapiens
MGAYARASGVCARGCLDSAGPWTMSRALRPPLPPLCFFLLLLAAAGARAGGYETCPTVQPNMLNVHLLPHTHDDVGWLKTVDQYFYGIKNDIQHAGVQYILDSVISALLADPTRRFIYVEIAFFSRWWHQQTNATQEVVRDLVRQGRLEFANGGWVMNDEAATHYGAIVDQMTLGLRFLEDTFGNDGRPRVAWHIDPFGHSREQASLFAQMGFDGFFFGRLDYQDKWVRMQKLEMEQVWRASTSLKPPTADLFTGVLPNGYNPPRNLCWDVLCVDQPLVEDPRSPEYNAKELVDYFLNVATAQGRYYRTNHTVMTMGSDFQYENANMWFKNLDKLIRLVNAQAKGSSVHVLYSTPACYLWELNKANLTWSVKHDDFFPYADGPHQFWTGYFSSRPALKRYERLSYNFLQVCNQLEALVGLAANVGPYGSGDSAPLNEAMAVLQHHDAVSGTSRQHVANDYARQLAAGWGPCEVLLSNALARLRGFKDHFTFCQQLNISICPLSQTAARFQVIVYNPLGRKVNWMVRLPVSEGVFVVKDPNGRTVPSDVVIFPSSDSQAHPPELLFSASLPALGFSTYSVAQVPRWKPQARAPQPIPRRSWSPALTIENEHIRATFDPDTGLLMEIMNMNQQLLLPVRQTFFWYNASIGDNESDQASGAYIFRPNQQKPLPVSRWAQIHLVKTPLVQEVHQNFSAWCSQVVRLYPGQRHLELEWSVGPIPVGDTWGKEVISRFDTPLETKGRFYTDSNGREILERRRDYRPTWKLNQTEPVAGNYYPVNTRIYITDGNMQLTVLTDRSQGGSSLRDGSLELMVHRRLLKDDGRGVSEPLMENGSGAWVRGRHLVLLDTAQAAAAGHRLLAEQEVLAPQVVLAPGGGAAYNLGAPPRTQFSGLRRDLPPSVHLLTLASWGPEMVLLRLEHQFAVGEDSGRNLSAPVTLNLRDLFSTFTITRLQETTLVANQLREAASRLKWTTNTGPTPHQTPYQLDPANITLEPMEIRTFLASVQWKEVDG

SEQ ID NO: 23387 - protein, 335 aa, Homo sapiens
MAARWRFWCVSVTMVVALLIVCDVPSASAQRKKEMVLSEKVSQLMEWTNKRPVIRMNGDKFRRLVKAPPRNYSVIVMFTALQLHRQCVVCKQADEEFQILANSWRYSSAFTNRIFFAMVDFDEGSDVFQMLNMNSAPTFINFPAKGKPKRGDTYELQVRGFSAEQIARWIADRTDVNIRVIRPPNYAGPLMLGLLLAVIGGLVYLRRSNMEFLFNKTGWAFAALCFVLAMTSGQMWNHIRGPPYAHKNPHTGHVNYIHGSSQAQFVAETHIVLLFNGGVTLGMVLLCEAATSDMDIGKRKIMCVAGIGLVVLFFSWMLSIFRSKYHGYPYSFLMS

SEQ ID NO: 23388 - protein, 134 aa, Homo sapiens
MAARWRFWCVSVTMVVALLIVCDVPSASAQRKKEMVLSEKVSQLMEWTNKRPVIRMNGDKFRRLVKAPPRNYSVIVMFTALQLHRQCVVCKQADEEFQILANSWRYSSAFTNRIFFAMVDFDEGSDVFQMFQVF

SEQ ID NO: 23389 - protein, 362 aa, Homo sapiens [sequence omitted]

SEQ ID NO: 23390 - protein, 860 aa, Homo sapiens
MAASRSAGEAGPGGSQGRVVRMKRRGGRGPRRGPAGGGEKALKRLKLAVEEFVHATSEGEAPGGCEGRGAPVSFRPGGRKSRKELRKEKRHLRKARRLQRTAGPEQGPGLGGRSGAEEASGHRQDTEERARPAPSRDPSPPRKPRPSRVKAKATAATAKTRPSAAATAAARKRALLAANEEEDREIRKLERCLGLNKRKKKDGSSSVPLSFARDGLDYILGALESGKNSGLYDSSGEEEEDAGQTLPESDLESDSQDESEEEEEGDVEKEKKAQEAEAQSEDDDEDTEEEQGEEKEKGAQEKRRGKRVRFAEDEEKSENSSEDGDITDKSLCGSGEKYIPPHVRQAEETVDFKKKEELERLKKHVKGLLNRLSEPNMASISGQLEELYMAHSRKDMNDTLTSALMGACVTASAMPSRLMMEHVLLVSILHHTVGIEVGAHFLEAVVRKFDAIYKYGSEGKECDNLFTVIAHLYNFHVVQSLLIFDILKKLIGTFTEKDIELILLMLKNVGFSLRKDDALSLKELITEAQTKASGAGSEFQDQTRIRFMLETMLALKNNDMRKIPGYDPEPVEKLRKLQRALVRNAGSGSETQLRVSWDSVLSAEQTGRWWIVGSAWSGAPMIDNSHHTHLQKQLVGTVSSKILELARKQRMNTDIRRNIFCTIMTSEDFLDAFEKLLKLGLKDQQEREIIHVLMDCCLQEKTYNPFYAFLASKFCEYERRFQMTFQFSIWDKFRDLENLPATNFSNLVHLVAHLLKTKSLSLSILKVVEFSELDKPRVRFLRKVLSILLMETEVEDLSLIFTRVSDNPKLGVLREGLKLFISHFLLKNAQAHRSADEANVLREKADLATKCLQGKASLRM

SEQ ID NO: 23391 - protein, 390 aa, Homo sapiens
MPEGPELHLASQFVNEACRALVFGGCVEKSSVSRNPEVPFESSAYRISASARGKELRLILSPLPGAQPQQEPLALVFRFGMSGSFQLVPREELPRHAHLRFYTAPPGPRLALCFVDIRRFGRWDLGGKWQPGRGPCVLQEYQQFRENVLRNLADKAFDRPICEALLDQRFFNGIGNYLRAEILYRLKIPPFEKARSVLEALQQHRPSPELTLSQKIRTKLQNPDLLELCHSVPKEVVQLGGKGYGSESGEEDFAAFRAWLRCYGMPGMSSLQDRHGRTIWFQGDPGPLAPKGRKSRKKKSKATQLSPEDRVEDALPPSKAPSRTRRAKRDLPKRTATQRPEGTSLQQDPEAPTVPKKGRRKGRQAASGHCRPRKVKADIPSLEPEGTSAS

SEQ ID NO: 23392 - protein, 187 aa, Homo sapiens
MGGLFWRSALRGLRCGPRAPGPSLLVRHGSGGPSWTRERTLVAVKPDGVQRRLVGDVIQRFERRGFTLVGMKMLQAPESVLAEHYQDLRRKPFYPALIRYMSSGPVVAMVWEGYNVVRASRAMIGHTDSAEAAPGTIRGDFSVHISRNVIHASDSVEGAQREIQLWFQSSELVSWADGGQHSSIHPA

SEQ ID NO: 23393 - protein, 117 aa, Homo sapiens
MKMLQAPESVLAEHYQDLRRKPFYPALIRYMSSGPVVAMVWEGYNVVRASRAMIGHTDSAEAAPGTIRGDFSVHISRNVIHASDSVEGAQREIQLWFQSSELVSWADGGQHSSIHPA

SEQ ID NO: 23394 - protein, 1222 aa, Homo sapiens
MLVGQGAGPLGPAVVTAAVVLLLSGVGPAHGSEDIVVGCGGFVKSDVEINYSLIEIKLYTKHGTLKYQTDCAPNNGYFMIPLYDKGDFILKIEPPLGWSFEPTTVELHVDGVSDICTKGGDINFVFTGFSVNGKVLSKGQPLGPAGVQVSLRNTGTEAKIQSTVTQPGGKFAFFKVLPGDYEILATHPTWALKEASTTVRVTNSNANAASPLIVAGYNVSGSVRSDGEPMKGVKFLLFSSLVTKEDVLGCNVSPVPGFQPQDESLVYLCYTVSREDGSFSFYSLPSGGYTVIPFYRGERITFDVAPSRLDFTVEHDSLKIEPVFHVMGFSVTGRVLNGPEGDGVPEAVVTLNNQIKVKTKADGSFRLENITTGTYTIHAQKEHLYFETVTIKIAPNTPQLADIIATGFSVCGQISIIRFPDTVKQMNKYKVVLSSQDKDKSLVTVETDAHGSFCFKAKPGTYKVQVMVPEAETRAGLTLKPQTFPLTVTNRPMMDVAFVQFLASVSGKVSCLDTCGDLLVTLQSLSRQGEKRSLQLSGKVNAMTFTFDNVLPGKYKISIMHEDWCWKNKSLEVEVLEDDMSAVEFRQTGYMLRCSLSHAITLEFYQDGNGRENVGIYNLSKGVNRFCLSKPGVYKVTPRSCHRFEQAFYTYDTSSPSILTLTAIRHHVLGTITTDKMMDVTVTIKSSIDSEPALVLGPLKSVQELRREQQLAEIEARRQEREKNGNEEGEERMTKPPVQEMVDELQGPFSYDFSYWARSGEKITVTPSSKELLFYPPSMEAVVSGESCPGKLIEIHGKAGLFLEGQIHPELEGVEIVISEKGASSPLITVFTDDKGAYSVGPLHSDLEYTVTSQKEGYVLTAVEGTIGDFKAYALAGVSFEIKAEDDQPLPGVLLSLSGGLFRSNLLTQDNGILTFSNLSPGQYYFKPMMKEFRFEPSSQMIEVQEGQNLKITITGYRTAYSCYGTVSSLNGEPEQGVAMEAVGQNDCSIYGEDTVTDEEGKFRLRGLLPGCVYHVQLKAEGNDHIERALPHHRVIEVGNNDIDDVNIIVFRQINQFDLSGNVITSSEYLPTLWVKLYKSENLDNPIQTVSLGQSLFFHFPPLLRDGENYVVLLDSTLPRSQYDYILPQVSFTAVGYHKHITLIFNPTRKLPEQDIAQGSYIALPLTLLVLLAGYNHDKLIPLLLQLTSRLQGVRALGQAASDNSGPEDAKRQAKKQKTRRT

SEQ ID NO: 23395 - protein, 352 aa, Homo sapiens
MPECWDGEHDIETPYGLLHVVIRGSPKGNRPAILTYHDVGLNHKLCFNTFFNFEDMQEITKHFVVCHVDAPGQQVGASQFPQGYQFPSMEQLAAMLPSVVQHFGFKYVIGIGVGAGAYVLAKFALIFPDLVEGLVLVNIDPNGKGWIDWAATKLSGLTSTLPDTVLSHLFSQEELVNNTELVQSYRQQIGNVVNQANLQLFWNMYNSRRDLDINRPGTVPNAKTLRCPVMLVVGDNAPAEDGVVECNSKLDPTTTTFLKMADSGGLPQVTQPGKLTEAFKYFLQGMGYIAYLKDRRLSGGAVPSASMTRLARSRTASLTSASSVDGSRPQACTHSESSEGLGQVNHTMEVSC

SEQ ID NO: 23396 - protein, 339 aa, Homo sapiens
MPECWDGEHDIETPYGLLHVVIRGSPKGNRPAILTYHDVGLNHKLCFNTFFNFEDMQEITKHFVVCHVDAPGQQVGASQFPQGYQFPSMEQLAAMLPSVVQHFGFKYVIGIGVGAGAYVLAKFALIFPDLVEGLVLVNIDPNGKGWIDWAATKLSGLTSTLPDTVLSHLFSQEELVNNTELVQSYRQQIGNVVNQANLQLFWNMYNSRRDLDINRPGTVPNAKTLRCPVMLVVGDNAPAEDGVVECNSKLDPTTTTFLKMADSGGLPQVTQPGKLTEAFKYFLQGMGYMPSASMTRLARSRTASLTSASSVDGSRPQACTHSESSEGLGQVNHTMEVSC

SEQ ID NO: 23397 - protein, 371 aa, Homo sapiens
MAGLQELRFPEEKPLLRGQDATELESSDAFLLAADTDWKEHDIETPYGLLHVVIRGSPKGNRPAILTYHDVGLNHKLCFNTFFNFEDMQEITKHFVVCHVDAPGQQVGASQFPQGYQFPSMEQLAAMLPSVVQHFGFKYVIGIGVGAGAYVLAKFALIFPDLVEGLVLVNIDPNGKGWIDWAATKLSGLTSTLPDTVLSHLFSQEELVNNTELVQSYRQQIGNVVNQANLQLFWNMYNSRRDLDINRPGTVPNAKTLRCPVMLVVGDNAPAEDGVVECNSKLDPTTTTFLKMADSGGLPQVTQPGKLTEAFKYFLQGMGYMPSASMTRLARSRTASLTSASSVDGSRPQACTHSESSEGLGQVNHTMEVSC

SEQ ID NO: 23398 - protein, 339 aa, Homo sapiens
MPECWDGEHDIETPYGLLHVVIRGSPKGNRPAILTYHDVGLNHKLCFNTFFNFEDMQEITKHFVVCHVDAPGQQVGASQFPQGYQFPSMEQLAAMLPSVVQHFGFKYVIGIGVGAGAYVLAKFALIFPDLVEGLVLVNIDPNGKGWIDWAATKLSGLTSTLPDTVLSHLFSQEELVNNTELVQSYRQQIGNVVNQANLQLFWNMYNSRRDLDINRPGTVPNAKTLRCPVMLVVGDNAPAEDGVVECNSKLDPTTTTFLKMADSGGLPQVTQPGKLTEAFKYFLQGMGYIASASMTRLARSRTASLTSASSVDGSRPQACTHSESSEGLGQVNHTMEVSC

SEQ ID NO: 23399 - protein, 357 aa, Homo sapiens
MPECWDGEHDIETPYGLLHVVIRGSPKGNRPAILTYHDVGLNRKCSPASVSPPLPPISQSDKLCFNTFFNFEDMQEITKHFVVCHVDAPGQQVGASQFPQGYQFPSMEQLAAMLPSVVQHFGFKYVIGIGVGAGAYVLAKFALIFPDLVEGLVLVNIDPNGKGWIDWAATKLSGLTSTLPDTVLSHLFSQEELVNNTELVQSYRQQIGNVVNQANLQLFWNMYNSRRDLDINRPGTVPNAKTLRCPVMLVVGDNAPAEDGVVECNSKLDPTTTTFLKMADSGGLPQVTQPGKLTEAFKYFLQGMGYMPSASMTRLARSRTASLTSASSVDGSRPQACTHSESSEGLGQVNHTMEVSC

SEQ ID NO: 23400 - protein, 391 aa, Homo sapiens
MKVLGHRLELLTGLLLHDVTMAGLQELRFPEEKPLLRGQDATELESSDAFLLAADTDWKEHDIETPYGLLHVVIRGSPKGNRPAILTYHDVGLNHKLCFNTFFNFEDMQEITKHFVVCHVDAPGQQVGASQFPQGYQFPSMEQLAAMLPSVVQHFGFKYVIGIGVGAGAYVLAKFALIFPDLVEGLVLVNIDPNGKGWIDWAATKLSGLTSTLPDTVLSHLFSQEELVNNTELVQSYRQQIGNVVNQANLQLFWNMYNSRRDLDINRPGTVPNAKTLRCPVMLVVGDNAPAEDGVVECNSKLDPTTTTFLKMADSGGLPQVTQPGKLTEAFKYFLQGMGYMPSASMTRLARSRTASLTSASSVDGSRPQACTHSESSEGLGQVNHTMEVSC

SEQ ID NO: 23401 - protein, 369 aa, Homo sapiens
MPECWDGVGEGNAGAVKLAGLGDPRWSPGHLLSPGHQEHDIETPYGLLHVVIRGSPKGNRPAILTYHDVGLNHKLCFNTFFNFEDMQEITKHFVVCHVDAPGQQVGASQFPQGYQFPSMEQLAAMLPSVVQHFGFKYVIGIGVGAGAYVLAKFALIFPDLVEGLVLVNIDPNGKGWIDWAATKLSGLTSTLPDTVLSHLFSQEELVNNTELVQSYRQQIGNVVNQANLQLFWNMYNSRRDLDINRPGTVPNAKTLRCPVMLVVGDNAPAEDGVVECNSKLDPTTTTFLKMADSGGLPQVTQPGKLTEAFKYFLQGMGYMPSASMTRLARSRTASLTSASSVDGSRPQACTHSESSEGLGQVNHTMEVSC

SEQ ID NO: 23402 - protein, 357 aa, Homo sapiens
MPECWDGRSQERRLPRVSSTVSPLQEHDIETPYGLLHVVIRGSPKGNRPAILTYHDVGLNHKLCFNTFFNFEDMQEITKHFVVCHVDAPGQQVGASQFPQGYQFPSMEQLAAMLPSVVQHFGFKYVIGIGVGAGAYVLAKFALIFPDLVEGLVLVNIDPNGKGWIDWAATKLSGLTSTLPDTVLSHLFSQEELVNNTELVQSYRQQIGNVVNQANLQLFWNMYNSRRDLDINRPGTVPNAKTLRCPVMLVVGDNAPAEDGVVECNSKLDPTTTTFLKMADSGGLPQVTQPGKLTEAFKYFLQGMGYMPSASMTRLARSRTASLTSASSVDGSRPQACTHSESSEGLGQVNHTMEVSC

SEQ ID NO: 23403 - protein, 288 aa, Homo sapiens
MSRLRALLGLGLLVAGSRVPRIKSQTIACRSGPTWWGPQRLNSGGRWDSEVMASTVVKYLSQEEAQAVDQELFNEYQFSVDQLMELAGLSCATAIAKAYPPTSMSRSPPTVLVICGPGNNGGDGLVCARHLKLFGYEPTIYYPKRPNKPLFTALVTQCQKMDIPFLGEMPAEPMTIDELYELVVDAIFGFSFKGDVREPFHSILSVLKGLTVPIASIDIPSGWDVEKGNAGGIQPDLLISLTAPKKSATQFTGRYHYLGGRFVPPALEKKYQLNLPPYPDTECVYRLQ

SEQ ID NO: 23404 - protein, 185 aa, Homo sapiens
MSRSPPTVLVICGPGNNGGDGLVCARHLKLFGYEPTIYYPKRPNKPLFTALVTQCQKMDIPFLGEMPAEPMTIDELYELVVDAIFGFSFKGDVREPFHSILSVLKGLTVPIASIDIPSGWDVEKGNAGGIQPDLLISLTAPKKSATQFTGRYHYLGGRFVPPALEKKYQLNLPPYPDTECVYRLQ

SEQ ID NO: 23405 - protein, 332 aa, Homo sapiens
MPEGPLVRKFHHLVSPFVGQQVVKTGGSSKKLQPASLQSLWLQDTQVHGKKLFLRFDLDEEMGPPGSSPTPEPPQKEVQKEGAADPKQVGEPSGQKTLDGSSRSAELVPQGEDDSEYLERDAPAGDAGRWLRVSFGLFGSVWVNDFSRAKKANKRGDWRDPSPRLVLHFGGGGFLAFYNCQLSWSSSPVVTPTCDILSEKFHRGQALEALGQAQPVCYTLLDQRYFSGLGNIIKNEALYRAGIHPLSLGSVLSASRREVLVDHVVEFSTAWLQGKFQGRPQHTQVYQKEQCPAGHQVMKEAFGPEDGLQRLTWWCPQCQPQLSEEPEQCQFS

SEQ ID NO: 23406 - protein, 316 aa, Homo sapiens
MPEGPLVRKFHHLVSPFVGQQVVKTGGSSKKLQPASLQSLWLQDTQVHGKKLFLRFDLDEEMGPPGSSPTPEPPQKEVQKTLDGSSRSAELVPQGEDDSEYLERDAPAGDAGRWLRVSFGLFGSVWVNDFSRAKKANKRGDWRDPSPRLVLHFGGGGFLAFYNCQLSWSSSPVVTPTCDILSEKFHRGQALEALGQAQPVCYTLLDQRYFSGLGNIIKNEALYRAGIHPLSLGSVLSASRREVLVDHVVEFSTAWLQGKFQGRPQHTQVYQKEQCPAGHQVMKEAFGPEDGLQRLTWWCPQCQPQLSEEPEQCQFS

SEQ ID NO: 23407 - protein, 271 aa, Homo sapiens
MGPPGSSPTPEPPQKEVQKEGAADPKQVGEPSGQKTLDGSSRSAELVPQGEDDSEYLERDAPAGDAGRWLRVSFGLFGSVWVNDFSRAKKANKRGDWRDPSPRLVLHFGGGGFLAFYNCQLSWSSSPVVTPTCDILSEKFHRGQALEALGQAQPVCYTLLDQRYFSGLGNIIKNEALYRAGIHPLSLGSVLSASRREVLVDHVVEFSTAWLQGKFQGRPQHTQVYQKEQCPAGHQVMKEAFGPEDGLQRLTWWCPQCQPQLSEEPEQCQFS

SEQ ID NO: 23408 - protein, 216 aa, Homo sapiens
MPEGPLVRKFHHLVSPFVGQQVVKTGGSSKKLQPASLQSLWLQDTQVRLVLHFGGGGFLAFYNCQLSWSSSPVVTPTCDILSEKFHRGQALEALGQAQPVCYTLLDQRYFSGLGNIIKNEALYRAGIHPLSLGSVLSASRREVLVDHVVEFSTAWLQGKFQGRPQHTQVYQKEQCPAGHQVMKEAFGPEDGLQRLTWWCPQCQPQLSEEPEQCQFS

SEQ ID NO: 23409 - protein, 928 aa, Homo sapiens
MGGSASSQLDEGKCAYIRGKTEAAIKNFSPYYSRQYSVAFCNHVRTEVEQQRDLTSQFLKTKPPLAPGTILYEAELSQFSEDIKKWKERYVVVKNDYAVESYENKEAYQRGAAPKCRILPAGGKVLTSEDEYNLLSDRHFPDPLASSEKENTQPFVVLPKEFPVYLWQPFFRHGYFCFHEAADQKRFSALLSDCVRHLNHDYMKQMTFEAQAFLEAVQFFRQEKGHYGSWEMITGDEIQILSNLVMEELLPTLQTDLLPKMKGKKNDRKRTWLGLLEEAYTLVQHQVSEGLSALKEECRALTKGLEGTIRSDMDQIVNSKNYLIGKIKAMVAQPAEKSCLESVQPFLASILEELMGPVSSGFSEVRVLFEKEVNEVSQNFQTTKDSVQLKEHLDRLMNLPLHSVKMEPCYTKVNLLHERLQDLKSRFRFPHIDLVVQRTQNYMQELMENAVFTFEQLLSPHLQGEASKTAVAIEKVKLRVLKQYDYDSSTIRKKIFQEALVQITLPTVQKALASTCKPELQKYEQFIFADHTNMIHVENVYEEILHQILLDETLKVIKEAAILKKHNLFEDNMALPSESVSSLTDLKPPTGSNQASPARRASAILPGVLGSETLSNEVFQESEEEKQPEVPSSLAKGESLSLPGPSPPPDGTEQVIISRVDDPVVNPVATEDTAGLPGTCSSELEFGGTLEDEEPAQEEPEPITASGSLKALRKLLTASVEVPVDSAPVMEEDTNGESHVPQENEEEEEKEPSQAAAIHPDNCEESEVSEREAQPPCPEAHGEELGGFPEVGSPASPPASGGLTEEPLGPMEGELPGEACTLTAHEGRGGKCTEEGDASQQEGCTLGSDPICLSESQVSEEQEEMGGQSSAAQATASVNAEEIKVARIHECQWVVEDAPNPDVLLSHKDDVKEGEGGQESFPELPSEE

SEQ ID NO: 23410 - protein, 1267 aa, Homo sapiens
MLVGQGAGLLGPAVVTAAVVLLLSGVGPAHGSEDIVVGCGGFVKSDVEINYSLIEIKLYTKHGTLKYQTDCAPNNGYFMIPLYDKGDFILKIEPPLGWSFEPTTVELHVDGVSDICTKGGDINFVFTGFSVNGKVLSKGQPLGPAGVQVSLRNTGTEAKIQSTVTQPGGKFAFFKVLPGDYEILATHPTWALKEASTTVRVTNSNANAASPLIVAGYNVSGSVRSDGEPMKGVKFLLFSSLVTKEDVLGCNVSPVPGFQPQDESLVYLCYTVSREDGSFSFYSLPSGGYTVIPFYRGERITFDVAPSRLDFTVEHDSLKIEPVFHVMGFSVTGRVLNGPEGDGVPEAVVTLNNQIKVKTKADGSFRLENITTGTYTIHAQKEHLYFETVTIKIAPNTPQLADIVATGFSVCGRISIIRFPDTVKQMNKYKVVLSSQDKDKSLVTVETDAHGSFCFKAKPGTYKVQVMVPEAETRAGLTLKPQTFPLTVTDRPVMDVAFVQFLASVSGKVSCLDTCGDLLVTLQSLSRQGEKRSLQLSGKVNAMTFTFDNVLPGKYKISIMHEDWCWKNKSLEVEVLEDDVSAVEFRQTGYMLRCSLSHAITLEFYQDGNGRENVGIYNLSKGVNRFCLSKPGVYKVTPRSCHRFEQAFYTYDTSSPSILTLTAIRHHVLGTITTDKMMDVTVTIKSSIDSEPALVLGPLKSVQELRREQQLAEIEARRQEREKNGNEEGEERMTKPPVQEMVDELQGPFSYDFSYWARSGEKITVTPSSKELLFYPPSMEAVVSGESCPGKLIEIHGKAGLFLEGQIHPELEGVEIVISEKGASSPLITVFTDDKGAYSVGPLHSDLEYTVTSQKEGYVLTAVEGTIGDFKAYALAGVSFEIKAEDDQPLPGVLLSLSGGLFRSNLLTQDNGILTFSNLSPGQYYFKPMMKEFRFEPSSQMIEVQEGQNLKITITGYRTAYSCYGTVSSLNGEPEQGVAMEAVGQNDCSIYGEDTVTDEEGKFRLRGLLPGCVYHVQLKAEGNDHIERALPHHRVIEVGNNDIDDVNIIVFRQINQFDLSGNVITSSEYLPTLWVKLYKSENLDNPIQTVSLGQSLFFHFPPLLRDGENYVVLLDSTLPRSQYDYILPQVSFTAVGYHKHITLIFNPTRKLPEQDIAQGSYIALPLTLLVLLAGYNHDKLIPLLLQLTSRLQGVGALGQAASDNSGPEDAKRQAKKQKTRRTLRLQEEFQLMWCLVPWRGTLGIHLFSSLPFASEILLETTATCIHY

SEQ ID NO: 23411 - protein, 1222 aa, Homo sapiens
MLVGQGAGLLGPAVVTAAVVLLLSGVGPAHGSEDIVVGCGGFVKSDVEINYSLIEIKLYTKHGTLKYQTDCAPNNGYFMIPLYDKGDFILKIEPPLGWSFEPTTVELHVDGVSDICTKGGDINFVFTGFSVNGKVLSKGQPLGPAGVQVSLRNTGTEAKIQSTVTQPGGKFAFFKVLPGDYEILATHPTWALKEASTTVRVTNSNANAASPLIVAGYNVSGSVRSDGEPMKGVKFLLFSSLVTKEDVLGCNVSPVPGFQPQDESLVYLCYTVSREDGSFSFYSLPSGGYTVIPFYRGERITFDVAPSRLDFTVEHDSLKIEPVFHVMGFSVTGRVLNGPEGDGVPEAVVTLNNQIKVKTKADGSFRLENITTGTYTIHAQKEHLYFETVTIKIAPNTPQLADIVATGFSVCGRISIIRFPDTVKQMNKYKVVLSSQDKDKSLVTVETDAHGSFCFKAKPGTYKVQVMVPEAETRAGLTLKPQTFPLTVTDRPVMDVAFVQFLASVSGKVSCLDTCGDLLVTLQSLSRQGEKRSLQLSGKVNAMTFTFDNVLPGKYKISIMHEDWCWKNKSLEVEVLEDDVSAVEFRQTGYMLRCSLSHAITLEFYQDGNGRENVGIYNLSKGVNRFCLSKPGVYKVTPRSCHRFEQAFYTYDTSSPSILTLTAIRHHVLGTITTDKMMDVTVTIKSSIDSEPALVLGPLKSVQELRREQQLAEIEARRQEREKNGNEEGEERMTKPPVQEMVDELQGPFSYDFSYWARSGEKITVTPSSKELLFYPPSMEAVVSGESCPGKLIEIHGKAGLFLEGQIHPELEGVEIVISEKGASSPLITVFTDDKGAYSVGPLHSDLEYTVTSQKEGYVLTAVEGTIGDFKAYALAGVSFEIKAEDDQPLPGVLLSLSGGLFRSNLLTQDNGILTFSNLSPGQYYFKPMMKEFRFEPSSQMIEVQEGQNLKITITGYRTAYSCYGTVSSLNGEPEQGVAMEAVGQNDCSIYGEDTVTDEEGKFRLRGLLPGCVYHVQLKAEGNDHIERALPHHRVIEVGNNDIDDVNIIVFRQINQFDLSGNVITSSEYLPTLWVKLYKSENLDNPIQTVSLGQSLFFHFPPLLRDGENYVVLLDSTLPRSQYDYILPQVSFTAVGYHKHITLIFNPTRKLPEQDIAQGSYIALPLTLLVLLAGYNHDKLIPLLLQLTSRLQGVGALGQAASDNSGPEDAKRQAKKQKTRRT

SEQ ID NO: 23412 - protein, 1100 aa, Homo sapiens
MARFAFFKVLPGDYEILATHPTWALKEASTTVRVTNSNANAASPLIVAGYNVSGSVRSDGEPMKGVKFLLFSSLVTKEDVLGCNVSPVPGFQPQDESLVYLCYTVSREDGSFSFYSLPSGGYTVIPFYRGERITFDVAPSRLDFTVEHDSLKIEPVFHVMGFSVTGRVLNGPEGDGVPEAVVTLNNQIKVKTKADGSFRLENITTGTYTIHAQKEHLYFETVTIKIAPNTPQLADIVATGFSVCGRISIIRFPDTVKQMNKYKVVLSSQDKDKSLVTVETDAHGSFCFKAKPGTYKVQVMVPEAETRAGLTLKPQTFPLTVTDRPVMDVAFVQFLASVSGKVSCLDTCGDLLVTLQSLSRQGEKRSLQLSGKVNAMTFTFDNVLPGKYKISIMHEDWCWKNKSLEVEVLEDDVSAVEFRQTGYMLRCSLSHAITLEFYQDGNGRENVGIYNLSKGVNRFCLSKPGVYKVTPRSCHRFEQAFYTYDTSSPSILTLTAIRHHVLGTITTDKMMDVTVTIKSSIDSEPALVLGPLKSVQELRREQQLAEIEARRQEREKNGNEEGEERMTKPPVQEMVDELQGPFSYDFSYWARSGEKITVTPSSKELLFYPPSMEAVVSGESCPGKLIEIHGKAGLFLEGQIHPELEGVEIVISEKGASSPLITVFTDDKGAYSVGPLHSDLEYTVTSQKEGYVLTAVEGTIGDFKAYALAGVSFEIKAEDDQPLPGVLLSLSGGLFRSNLLTQDNGILTFSNLSPGQYYFKPMMKEFRFEPSSQMIEVQEGQNLKITITGYRTAYSCYGTVSSLNGEPEQGVAMEAVGQNDCSIYGEDTVTDEEGKFRLRGLLPGCVYHVQLKAEGNDHIERALPHHRVIEVGNNDIDDVNIIVFRQINQFDLSGNVITSSEYLPTLWVKLYKSENLDNPIQTVSLGQSLFFHFPPLLRDGENYVVLLDSTLPRSQYDYILPQVSFTAVGYHKHITLIFNPTRKLPEQDIAQGSYIALPLTLLVLLAGYNHDKLIPLLLQLTSRLQGVGALGQAASDNSGPEDAKRQAKKQKTRRTLRLQEEFQLMWCLVPWRGTLGIHLFSSLPFASEILLETTATCIHY

SEQ ID NO: 23413 - protein, 1222 aa, Homo sapiens
MLVGQGAGPLGPAVVTAAVVLLLSGVGPAHGSEDIVVGCGGFVKSDVEINYSLIEIKLYTKHGTLKYQTDCAPNNGYFMIPLYDKGDFILKIEPPLGWSFEPTTVELHVDGVSDICTKGGDINFVFTGFSVNGKVLSKGQPLGPAGVQVSLRNTGTEAKIQSTVTQPGGKFAFFKVLPGDYEILATHPTWALKEASTTVRVTNSNANAASPLIVAGYNVSGSVRSDGEPMKGVKFLLFSSLVTKEDVLGCNVSPVPGFQPQDESLVYLCYTVSREDGSFSFYSLPSGGYTVIPFYRGERITFDVAPSRLDFTVEHDSLKIEPVFHVMGFSVTGRVLNGPEGDGVPEAVVTLNNQIKVKTKADGSFRLENITTGTYTIHAQKEHLYFETVTIKIAPNTPQLADIVATGFSVCGQISIIRFPDTVKQMNKYKVVLSSQDKDKSLVTVETDAHGSFCFKANPGTYKVQVMVPEAETRAGLTLKPQTFPLTVTDRPVMDVAFVQFLASVSGKVSCLDTCGDLLVTLQSLSRQGEKRSLQLSGKVNAMTFTFDNVLPGKYKISIMHEDWCWKNKSLEVEVLEDDVSAVEFRQTGYMLRCSLSHAITLEFYQDGNGRENVGIYNLSKGVNRFCLSKPGVYKVTPRSCHRFEQAFYTYDTSSPSILTLTAIRHHVLGTITTDKMMDVTVTIKSSIDSEPALVLGPLKSVQELRREQQLAEIEARRQEREKNGNEEGEERMTKPPVQEMVDELQGPFSYDFSYWARSGEKITVTPSSKELLFYPPSMEAVVSGESCPGKLIEIHGKAGLFLEGQIHPELEGVEIVISEKGASSPLITVFTDDKGAYSVGPLHSDLEYTVTSQKEGYVLTAVEGTIGDFKAYALAGVSFEIKAEDDQPLPGVLLSLSGGLFRSNLLTQDNGILTFSNLSPGQYYFKPMMKEFRFEPSSQMIEVQEGQNLKITITGYRTAYSCYGTVSSLNGEPEQGVAMEAVGQNDCSIYGEDTVTDEEGKFRLRGLLPGCVYHVQLKAEGNDHIERALPHHRVIEVGNNDIDDVNIIVFRQINQFDLSGNVITSSEYLPTLWVKLYKSENLDNPIQTVSLGQSLFFHFPPLLRDGENYVVLLDSTLPRSQYDYILPQVSFTAVGYHKHITLIFNPTRKLPEQDIAQGSYIALPLTLLVLLAGYNHDKLIPLLLQLTSRLQGVGALGQAASDNSGPEDAKRQAKKQKTRRT

SEQ ID NO: 23414 - protein, 207 aa, Homo sapiens
MTMDGDSSTTDASQLGISADYIGGSHYVIQPHDDTEDSMNDHEDTNGSKESFREQDIYLPIANVARIMKNAIPQTGKIAKDAKECVQECVSEFISFITSEASERCHQEKRKTINGEDILFAMSTLGFDSYVEPLKLYLQKFREAMKGEKGIGGAVTATDGLSEELTEEAFTNQLPAGLITTDGQQQNVMVYTTSYQQISGVQQIQFS

SEQ ID NO: 23415 - protein, 605 aa, Homo sapiens
MVEGPGCTLNGEKIRARVLPGQAVTGVRGSALRSLQGRALRLAASTVVVSPQAAALNNDSSQNVLSLFNGYVYSGVETLGKELFMYFGPKALRIHFGMKGFIMINPLEYKYKNGASPVLEVQLTKDLICFFDSSVELRNSMESQQRIRMMKELDVCSPEFSFLRAESEVKKQKGRMLGDVLMDQNVLPGVGNIIKNEALFDSGLHPAVKVCQLTDEQIHHLMKMIRDFSILFYRCRKAGLALSKHYKVYKRPNCGQCHCRITVCRFGDNNRMTYFCPHCQKENPQHVDICKLPTRNTIISWTSSRVDHVMDSVARKSEEHWTCVVCTLINKPSSKACDACLTSRPIDSVLKSEENSTVFSHLMKYPCNTFGKPHTEVKINRKTAFGTTTLVLTDFSNKSSTLERKTKQNQILDEEFQNSPPASVCLNDIQHPSKKTTNDITQPSSKVNISPTISSESKLFSPAHKKPKTAQYSSPELKSCNPGYSNSELQINMTDGPRTLNPDSPRCSKHNRLCILRVVGKDGENKGRQFYACPLPREAQCGFFEWADLSFPFCNHGKRSTMKTVLKIGPNNGKNFFVCPLGKEKQCNFFQWAENGPGIKIIPGC

SEQ ID NO: 23416 - protein, 746 aa, Homo sapiens
MGDVLSTHLDDARRQHIAEKTGKILTEFLQFYEDQYGVALFNSMRHEIEGTGLPQAQLLWRKVPLDERIVFSGNLFQHQEDSKKWRNRFSLVPHNYGLVLYENKAAYERQVPPRAVINSAGYKILTSVDQYLELIGNSLPGTTAKSGSAPILKCPTQFPLILWHPYARHYYFCMMTEAEQDKWQAVLQDCIRHCNNGIPEDSKVEGPAFTDAIRMYRQSKELYGTWEMLCGNEVQILSNLVMEELGPELKAELGPRLKGKPQERQRQWIQISDAVYHMVYEQAKARFEEVLSKVQQVQPAMQAVIRTDMDQIITSKEHLASKIRAFILPKAEVCVRNHVQPYIPSILEALMVPTSQGFTEVRDVFFKEVTDMNLNVINEGGIDKLGEYMEKLSRLAYHPLKMQSCYEKMESLRLDGLQQRFDVSSTSVFKQRAQIHMREQMDNAVYTFETLLHQELGKGPTKEELCKSIQRVLERVLKKYDYDSSSVRKRFFREALLQISIPFLLKKLAPTCKSELPRFQELIFEDFARFILVENTYEEVVLQTVMKDILQAVKEAAVQRKHNLYRDSMVMHNSDPNLHLLAEGAPIDWGEEYSNSGGGGSPSPSTPESATLSEKRRRAKQVVSVVQDEEVGLPFEASPESPPPASPDGVTEIRGLLAQGLRPESPPPAGPLLNGAPAGESPQPKAAPEASSPPASPLQHLLPGKAVDLGPPKPSDQETGEQVSSPSSHPALHTTTEDSAGVQTEF

SEQ ID NO: 23417 - protein, 733 aa, Homo sapiens
MGWMGEKTGKILTEFLQFYEDQYGVALFNSMRHEIEGTGLPQAQLLWRKVPLDERIVFSGNLFQHQEDSKKWRNRFSLVPHNYGLVLYENKAAYERQVPPRAVINSAGYKILTSVDQYLELIGNSLPGTTAKSGSAPILKCPTQFPLILWHPYARHYYFCMMTEAEQDKWQAVLQDCIRHCNNGIPEDSKVEGPAFTDAIRMYRQSKELYGTWEMLCGNEVQILSNLVMEELGPELKAELGPRLKGKPQERQRQWIQISDAVYHMVYEQAKARFEEVLSKVQQVQPAMQAVIRTDMDQIITSKEHLASKIRAFILPKAEVCVRNHVQPYIPSILEALMVPTSQGFTEVRDVFFKEVTDMNLNVINEGGIDKLGEYMEKLSRLAYHPLKMQSCYEKMESLRLDGLQQRFDVSSTSVFKQRAQIHMREQMDNAVYTFETLLHQELGKGPTKEELCKSIQRVLERVLKKYDYDSSSVRKRFFREALLQISIPFLLKKLAPTCKSELPRFQELIFEDFARFILVENTYEEVVLQTVMKDILQAVKEAAVQRKHNLYRDSMVMHNSDPNLHLLAEGAPIDWGEEYSNSGGGGSPSPSTPESATLSEKRRRAKQVVSVVQDEEVGLPFEASPESPPPASPDGVTEIRGLLAQGLRPESPPPAGPLLNGAPAGESPQPKAAPEASSPPASPLQHLLPGKAVDLGPPKPSDQETGEQVSSPSSHPALHTTTEDSAGVQTEF

SEQ ID NO: 23418 - protein, 152 aa, Homo sapiens
MDSGTEEYELNGGLPPGTPGSPDASPARWGWRHGPINVNHYASKKSAAESMLDIALLMANASQLKAVVEQGPSFAFYVPLVVLISISLVLQIGVGVLLIFLVKYDLNNPAKHAKLDFLNNLATGLVFIIVVVNIFITAFGVQKPLMDMAPQQ

SEQ ID NO: 23419 - protein, 697 aa, Homo sapiens
MGPDRKEVPLSRGTQAVVVGKGRGAPGDDSSMGGRPSSPLDKQQRQHLRGQVDTLLRNFLPCYRGQLAASVLRQISRELGPQEPTGSQLLRSKKLPRVREHRGPLTQLRGHPPRWQPIFCVLRGDGRLEWFSHKEEYENGGHCLGSTALTGYTLLTSQREYLRLLDALCPESLGDHTQEEPDSLLEVPVSFPLFLQHPFRRHLCFSAATREAQHAWRLALQGGIRLQGIVLQRSQAPAARAFLDAVRLYRQHQGHFGDDDVTLGSDAEVLTAVLMREQLPALRAQTLPGLRGAGRARAWAWTELLDAVHAAVLAGASAGLCAFQPEKDELLASLEKTIRPDVDQLLRQRARVAGRLRTDIRGPLESCLRREVDPQLPRVVQTLLRTVEASLEAVRTLLAQGMDRLSHRLRQSPSGTRLRREVYSFGEMPWDLALMQTCYREAERSRGRLGQLAAPFGFLGMQSLVFGAQDLAQQLMADAVATFLQLADQCLTTALNCDQAAQRLERVRGRVLKKFKSDSGLAQRRFIRGWGLCIFLPFVLSQLEPGCKKELPEFEGDVLAVGSQALTTEGIYEDVIRGCLLQRIDQELKKTLGANDVSCTLDGCLEVPWEQEGAAPNLNLVSSFLAGRQAFTDFLCLPAKSSANWILAASLLSCSCFRSGFHRDSRVFLVQLAEGLSHSLETVSSHSVWSFRPTPRQ

SEQ ID NO: 23420 - protein, 666 aa, Homo sapiens
MGPDRKEVPLSRGTQAVVVGKGRGAPGDDSSMGGRPSSPLDKQQRQHLRGQVDTLLRNFLPCYRGQLAASVLRQISRELGPQEPTGSQLLRSKKLPRVREHRGPLTQLRGHPPRWQPIFCVLRGDGRLEWFSHKEEYENGGHCLGSTALTGYTLLTSQREYLRLLDALCPESLGDHTQEEPDSLLEVPVSFPLFLQHPFRRHLCFSAATREAQHAWRLALQGGIRLQGIVLQRSQAPAARAFLDAVRLYRQHQGHFGDDDVTLGSDAEVLTAVLMREQLPALRAQTLPGLRGAGRARAWAWTELLDAVHAAVLAGASAGLCAFQPEKDELLASLEKTIRPDVDQLLRQRARVAGRLRTDIRGPLESCLRREVDPQLPRVVQTLLRTVEASLEAVRTLLAQGMDRLSHRLRQSPSGTRLRREVYSFGEMPWDLALMQTCYREAERSRGRLGQLAAPFGFLGMQSLVFGAQDLAQQLMADAVATFLQLADQCLTTALNCDQAAQRLERVRGRVLKKFKSDSGLAQRRFIRGWGLCIFLPFVLSQLEPGCKKELPEFEGDVLAVGSQALTTEGIYEDVIRGCLLQRIDQELKKTLGANDVSCTLDGCLEVPWEQEGAGGELHRLLKHASDCWGWGGGGPHGVYGIVMSVGSWTEQNALCLLTQPAWPSS

SEQ ID NO: 23421 - protein, 651 aa, Homo sapiens
MGPDRKEVPLSRGTQAVVVGKGRGAPGDDSSMGGRPSSPLDKQQRQHLRGQVDTLLRNFLPCYRGQLAASVLRQISRELGPQEPTGSQLLRSKKLPRVREHRGPLTQLRGHPPRWQPIFCVLRGDGRLEWFSHKEEYENGGHCLGSTALTGYTLLTSQREYLRLLDALCPESLGDHTQEEPDSLLEVPVSFPLFLQHPFRRHLCFSAATREAQHAWRLALQGGIRLQGIVLQRSQAPAARAFLDAVRLYRQHQGHFGDDDVTLGSDAEVLTAVLMREQLPALRAQTLPGLRGAGRARAWAWTELLDAVHAAVLAGASAGLCAFQPEKDELLASLEKTIRPDVDQLLRQRARVAGRLRTDIRGPLESCLRREVDPQLPRVVQTLLRTVEASLEAVRTLLAQGMDRLSHRLRQSPSGTRLRREVYSFGEMPWDLALMQTCYREAERSRGRLGQLAAPFGFLGMQSLVFGAQDLAQQLMADAVATFLQLADQCLTTALNCDQAAQRLERVRGRVLKKFKSDSGLAQRRFIRGWGLCIFLPFVLSQLEPGCKKELPEFEGDVLAVGSQALTTEGIYEDVIRGCLLQRIDQELKKTLGANDVSCTLDGCLEVPWEQEGADEETEAEREGGACPRQPDSGAQIQPLCPPPSPGTFRS

SEQ ID NO: 23422 - protein, 615 aa, Homo sapiens
MGPDRKEVPLSRGTQAVVVGKGRGAPGDDSSMGGRPSSPLDKQQRQHLRGQVDTLLRNFLPCYRGQLAASVLRQISRELGPQEPTGSQLLRSKKLPRVREHRGPLTQLRGHPPRWQPIFCVLRGDGRLEWFSHKEEYENGGHCLGSTALTGYTLLTSQREYLRLLDALCPESLGDHTQEEPDSLLEVPVSFPLFLQHPFRRHLCFSAATREAQHAWRLALQGGIRLQGIVLQRSQAPAARAFLDAVRLYRQHQGHFGDDDVTLGSDAEVLTAVLMREQLPALRAQTLPGLRGAGRARAWAWTELLDAVHAAVLAGASAGLCAFQPEKDELLASLEKTIRPDVDQLLRQRARVAGRLRTDIRGPLESCLRREVDPQLPRVVQTLLRTVEASLEAVRTLLAQGMDRLSHRLRQSPSGTRLRREVYSFGEMPWDLALMQTCYREAERSRGRLGQLAAPFGFLGMQSLVFGAQDLAQQLMADAVATFLQLADQCLTTALNCDQAAQRLERVRGRVLKELPEFEGDVLAVGSQALTTEGIYEDVIRGCLLQRIDQELKKTLGANDVSCTLDGCLEVPWEQEGADEETEAEREGGACPRQPDSGAQIQPLCPPPSPGTFRS

SEQ ID NO: 23423 - protein, 593 aa, Homo sapiens
MGPDRKEVPLSRGTQAVVVGKGRGAPGDDSSMGGRPSSPLDKQQRQHLRGQVDTLLRNFLPCYRGQLAASVLRQISRELGPQEPTGSQLLRSKKLPRVREHRGPLTQLRGHPPRWQPIFCVLRGDGRLEWFSHKEEYENGGHCLGSTALTGYTLLTSQREYLRLLDALCPESLGDHTQEEPDSLLEVPVSFPLFLQHPFRRHLCFSAATREAQHAWRLALQGGIRLQGIVLQRSQAPAARAFLDAVRLYRQHQGHFGDDDVTLGSDAEVLTAVLMREQLPALRAQTLPGLRGAGRARAWAWTELLDAVHAAVLAGASAGLCAFQPEKDELLASLEKTIRPDVDQLLRQRARVAGRLRTDIRGPLESCLRREVDPQLPRVVQTLLRTVEASLEAVRTLLAQGMDRLSHRLRQSPSGTRLRREVYSFGEMPWDLALMQTCYREAERSRGRLGQLAAPFGFLGMQSLVFGAQDLAQQLMADAVATFLQLADQCLTTALNCDQAAQRLERVRGRVLKKFKSDSGLAQRRFIRGWGLCIFLPFVLSQLEPGCKKTESRSVAQAVVQWCDLGSLRPPPPRFKRSSHLGLPSSWDYRHPL

SEQ ID NO: 23424 - protein, 423 aa, Homo sapiens
MREQLPALRAQTLPGLRGAGRARAWAWTELLDAVHAAVLAGASAGLCAFQPEKDELLASLEKTIRPDVDQLLRQRARVAGRLRTDIRGPLESCLRREVDPQLPRVVQTLLRTVEASLEAVRTLLAQGMDRLSHRLRQSPSGTRLRREVYSFGEMPWDLALMQTCYREAERSRGRLGQLAAPFGFLGMQSLVFGAQDLAQQLMADAVATFLQLADQCLTTALNCDQAAQRLERVRGRVLKKFKSDSGLAQRRFIRGWGLCIFLPFVLSQLEPGCKKELPEFEGDVLAVGSQALTTEGIYEDVIRGCLLQRIDQELKKTLGANDVSCTLDGCLEVPWEQEGAAPNLNLVSSFLAGRQAFTDFLCLPAKSSANWILAASLLSCSCFRSGFHRDSRVFLVQLAEGLSHSLETVSSHSVWSFRPTPRQ

SEQ ID NO: 23425 - protein, 600 aa, Homo sapiens
MGPDRKEVPLSRGTQAVVVGKGRGAPGDDSSMGGRPSSPLDKQQRQHLRGQVDTLLRNFLPCYRGQLAASVLPRVREHRGPLTQLRGHPPRWQPIFCVLRGDGRLEWFSHKEEYENGGHCLGSTALTGYTLLTSQREYLRLLDALCPESLGDHTQEEPDSLLEVPVSFPLFLQHPFRRHLCFSAATREAQHAWRLALQGGIRLQGIVLQRSQAPAARAFLDAVRLYRQHQGHFGDDDVTLGSDAEVLTAVLMREQLPALRAQTLPGLRGAGRARAWAWTELLDAVHAAVLAGASAGLCAFQPEKDELLASLEKTIRPDVDQLLRQRARVAGRLRTDIRGPLESCLRREVDPQLPRVVQTLLRTVEASLEAVRTLLAQGMDRLSHRLRQSPSGTRLRREVYSFGEMPWDLALMQTCYREAERSRGRLGQLAAPFGFLGMQSLVFGAQDLAQQLMADAVATFLQLADQCLTTALNCDQAAQRLERVRGRVLKKFKSDSGLAQRRFIRGWGLCIFLPFVLSQLEPGCKKELPEFEGDVLAVGSQALTTEGIYEDVIRGCLLQRIDQDEETEAEREGGACPRQPDSGAQIQPLCPPPSPGTFRS

SEQ ID NO: 23426 - protein, 841 aa, Homo sapiens
MESGPRAELGAGAPPAVVARTPPEPRPSPEGDPSPPPPPMSALVPDTPPDTPPAMKNATSSKQLPLEPESPSGQVGPRPAPPQEESPSSEAKSRGPTPPAMGPRDARPPRRSSQPSPTAVPASDSPPTKQEVKKAGERHKLAKERREERAKYLAAKKAVWLEKEEKAKALREKQLQERRRRLEEQRLKAEQRRAALEERQRQKLEKNKERYEAAIQRSVKKTWAEIRQQRWSWAGALHHSSPGHKTSGSRCSVSAVNLPKHVDSIINKRLSKSSATLWNSPSRNRSLQLSAWESSIVDRLMTPTLSFLARSRSAVTLPRNGRDQGRGCDPGRGPTWGRAGASLARGPQPDRTHPSAAVPVCPRSASASPLTPCSVTRSVHRCAPAGERGERRKPNAGGSPAPVRRRPEASPVQKKEKKDKERENEKEKSALARERSLKKRQSLPASPRARLSASTASELSPKSKARPSSPSTSWHRPASPCPSPGPGHTLPPKPPSPRGTTASPKGRVRRKEEAKESPSAAGPEDKSQSKRRASNEKESAAPASPAPSPAPSPTPAPPQKEQPPAETPTDAAVLTSPPAPAPPVTPSKPMAGTTDREEATRLLAEKRRQAREQREREEQERRLQAERDKRMREEQLAREAEARAEREAEARRREEQEAREKAQAEQEEQERLQKQKEEAEARSREEAERQRLEREKHFQQQEQERQERRKRLEEIMKRTRKSEVSETKQKQDSKEANANGSSPEPVKAVEARSPGLQKEAVQKEEPIPQEPQWSLPSKELPASLVNGLQPLPAHQENGFSTNGPSGDKSLSRTPETLLPFAEAEAFLKKAVVQSPQVTEVL

SEQ ID NO: 23427 - protein, 803 aa, Homo sapiens
MESGPRAELGAGAPPAVVARTPPEPRPSPEGDPSPPPPPMSALVPDTPPDTPPAMKNATSSKQLPLEPESPSGQVGPRPAPPQEESPSSEAKSRGPTPPAMGPRDARPPRRSSQPSPTAVPASDSPPTKQEVKKAGERHKLAKERREERAKYLAAKKAVWLEKEEKAKALREKQLQERRRRLEEQRLKAEQRRAALEERQRQKLEKNKERYEAAIQRSVKKTWAEIRQQRWSWAGALHHSSPGHKTNRSLQLSAWESSIVDRLMTPTLSFLARSRSAVTLPRNGRDQGRGCDPGRGPTWGRAGASLARGPQPDRTHPSAAVPVCPRSASASPLTPCSVTRSVHRCAPAGERGERRKPNAGGSPAPVRRRPEASPVQKKEKKDKERENEKEKSALARERSLKKRQSLPASPRARLSASTASELSPKSKARPSSPSTSWHRPASPCPSPGPGHTLPPKPPSPRGTTASPKGRVRRKEEAKESPSAAGPEDKSQSKRRASNEKESAAPASPAPSPAPSPTPAPPQKEQPPAETPTDAAVLTSPPAPAPPVTPSKPMAGTTDREEATRLLAEKRRQAREQREREEQERRLQAERDKRMREEQLAREAEARAEREAEARRREEQEAREKAQAEQEEQERLQKQKEEAEARSREEAERQRLEREKHFQQQEQERQERRKRLEEIMKRTRKSEVSETKKQDSKEANANGSSPEPVKAVEARSPGLQKEAVQKEEPIPQEPQWSLPSKELPASLVNGLQPLPAHQENGFSTNGPSGDKSLSRTPETLLPFAEAEAFLKKAVVQSPQVTEVL

SEQ ID NO: 23428 - protein, 377 aa, Homo sapiens
MNGPVSPKSKARPSSPSTSWHRPASPCPSPGPGHTLPPKPPSPRGTTASPKGRVRRKEEAKESPSAAGPEDKSQSKRRASNEKESAAPASPAPSPAPSPTPAPPQKEQPPAETPTAPAPPVTPSKPMAGTTDREEATRLLAEKRRQAREQREREEQERRLQAERDKRMREEQLAREAEARAEREAEARRREEQEAREKAQAEQEEQERLQKQKEEAEARSREEAERQRLEREKHFQQQEQERQERRKRLEEIMKRTRKSEVSETKKQDSKEANANGSSPEPVKAVEARSPGLQKEAVQKEEPIPQEPQWSLPSKELPASLVNGLQPLPAHQENGFSTNGPSGDKSLSRTPETLLPFAEAEAFLKKAVVQSPQVTEVL

SEQ ID NO: 23429 - protein, 808 aa, Homo sapiens
MESGPRAELGAGAPPAVVARTPPEPRPSPEGDPSPPPPPMSALVPDTPPDTPPAMKNATSSKQLPLEPESPSGQVGPRPAPPQEESPSSEAKSRGPTPPAMGPRDARPPRRSSQPSPTAVPASDSPPTKQEVKKAGERHKLAKERREERAKYLAAKKAVWLEKEEKAKALREKQLQERRRRLEEQRLKAEQRRAALEERQRQKLEKNKERYEAAIQRSVKKTWAEIRQQRWSWAGALHHSSPGHKTSGSRCSVSAVNLPKHVDSIINKRLSKSSATLWNSPSRNRSLQLSAWESSIVDRLMTPTLSFLARSRSAVTLPRNGRDQAVPVCPRSASASPLTPCSVTRSVHRCAPAGERGERRKPNAGGSPAPVRRRPEASPVQKKEKKDKERENEKEKSALARERSLKKRQSLPASPRARLSASTASELSPKSKARPSSPSTSWHRPASPCPSPGPGHTLPPKPPSPRGTTASPKGRVRRKEEAKESPSAAGPEDKSQSKRRASNEKESAAPASPAPSPAPSPTPAPPQKEQPPAETPTDAAVLTSPPAPAPPVTPSKPMAGTTDREEATRLLAEKRRQAREQREREEQERRLQAERDKRMREEQLAREAEARAEREAEARRREEQEAREKAQAEQEEQERLQKQKEEAEARSREEAERQRLEREKHFQQQEQERQERRKRLEEIMKRTRKSEVSETKKQDSKEANANGSSPEPVKAVEARSPGLQKEAVQKEEPIPQEPQWSLPSKELPASLVNGLQPLPAHQENGFSTNGPSGDKSLSRTPETLLPFAEAEAFLKKAVVQSPQVTEVL

SEQ ID NO: 23430 - protein, 176 aa, Homo sapiens
MSLKPFTYPFPETRFLHAGPNVYKFKIRYGKSIRGEEIENKEVITQELEVPVEKKAVGAVMRKRKHMDEPSSPSRPGLDRAKIGTSSQGPSKKKPPVETRRNRERKTQQGLQETLASDITDVQKQDSEWGHSLPGRIVPPLQHNSPPPKERAATGFFGFLSSLFPFRYFFRKSSHS

SEQ ID NO: 23431 - protein, 216 aa, Homo sapiens
MSLKPFTYPFPETRFLHAGPNVYKFKIRYGKSIRGEEIENKEVITQELEDSVRVVLGNLDNLQPFATEHFIVFPYKSKWERVSHLKFKHGEIILIPYPFVFTLYVEMKWFHENLSPGKPISDSPLGLVPVEKKAVGAVMRKRKHMDEPSSPSRPGLDRIGKEKPNKDCRRLWPLISLMSRNKILSGDTACQGELSHPCSTTHLHLRSEQPPASLGF

SEQ ID NO: 23432 - protein, 148 aa, Homo sapiens
MKWFHENLSPGKPISDSPLGLVPVEKKAVGAVMRKRKHMDEPSSPSRPGLDRAKIGTSSQGPSKKKPPVETRRNRERKTQQGLQETLASDITDVQKQDSEWGHSLPGRIVPPLQHNSPPPKERAATGFFGFLSSLFPFRYFFRKSSHS

SEQ ID NO: 23433 - protein, 563 aa, Homo sapiens
MWAVLRLALRPCARASPAGPRAYHGDSVASLGTQPDLGSALYQENYKQMKALVNQLHERVEHIKLGGGEKARALHISRGKLLPRERIDNLIDPGSPFLELSQFAGYQLYDNEEVPGGGIITGIGRVSGVECMIIANDATVKGGAYYPVTVKKQLRAQEIAMQNRLPCIYLVDSGGAYLPRQADVFPDRDHFGRTFYNQAIMSSKNIAQIAVVMGSCTAGGAYVPAMADENIIVRKQGTIFLAGPPLVKAATGEEVSAEDLGGADLHCRKSGVSDHWALDDHHALHLTRKVVRNLNYQKKLDVTIEPSEEPLFPADELYGIVGANLKRSFDVREVIARIVDGSRFTEFKAFYGDTLVTGFARIFGYPVGIVGNNGVLFSESAKKGTHFVQLCCQRNIPLLFLQNITGFMVGREYEAEGIAKDGAKMVAAVACAQVPKITLIIGGSYGAGNYGMCGRAYSPRFLYIWPNARISVMGGEQAANVLATITKDQRAREGKQFSSADEAALKEPIIKKFEEEGNPYYSSARVWDDGIIDPADTRLVLGLSFSAALNAPIEKTDFGIFRM

SEQ ID NO: 23434 - protein, 525 aa, Homo sapiens
MWAVLRLALRPCARASPAGPRAYHGDSVASLGTQPDLGSALYQENYKQMKALVNQLHERVEHIKLGGGEKARALHISRGKLLPRERIDNLIDPGSPFLELSQFAGYQLYDNEEVPGGGIITGIGRVSGVECMIIANDATVKGGAYYPVTVKKQLRAQEIAMQNRLPCIYLVDSGGAYLPRQADVFPDRDHFGRTFYNQAIMSSKNIAQVKAATGEEVSAEDLGGADLHCRKSGVSDHWALDDHHALHLTRKVVRNLNYQKKLDVTIEPSEEPLFPADELYGIVGANLKRSFDVREVIARIVDGSRFTEFKAFYGDTLVTGFARIFGYPVGIVGNNGVLFSESAKKGTHFVQLCCQRNIPLLFLQNITGFMVGREYEAEGIAKDGAKMVAAVACAQVPKITLIIGGSYGAGNYGMCGRAYSPRFLYIWPNARISVMGGEQAANVLATITKDQRAREGKQFSSADEAALKEPIIKKFEEEGNPYYSSARVWDDGIIDPADTRLVLGLSFSAALNAPIEKTDFGIFRM

SEQ ID NO: 23435 - protein, 142 aa, Homo sapiens
MESARENIDLQPGSSDPRSQPINLNHYATKKSVAESMLDVALFMSNAMRLKAVLEQGPSSHYYTTLVTLISLSLLLQVVIGVLLVVIARLNLNEVEKQWRLNQLNNAATILVFFTVVINVFITAFGAHKTGFLAARASRNPL

SEQ ID NO: 23436 - protein, 471 aa, Homo sapiens
MQSNKTFNLEKQNHTPRKHHQHHHQQQHHQQQQQQPPPPPIPANGQQASSQNEGLTIDLKNFRKPGEKTFTQRSRLFVGNLPPDITEEEMRKLFEKYGKAGEVFIHKDKGFGFIRLETRTLAEIAKVELDNMPLRGKQLRVRFACHSASLTVRNLPQYVSNELLEEAFSVFGQVERAVVIVDDRGRPSGKGIVEFSGKPAARKALDRCSEGSFLLTTFPRPVTVEPMDQLDDEEGLPEKLVIKNQQFHKEREQPPRFAQPGSFEYEYAMRWKALIEMEKQQQDQVDRNIKEAREKLEMEMEAARHEHQVMLMRQDLMRRQEELRRMEELHNQEVQKRKQLELRQEEERRRREEEMRRQQEEMMRRQQEGFKGTFPDAREQEIRMGQMAMGGAMGINNRGAMPPAPVPAGTPAPPGPATMMPDGTLGLTPPTTERFGQAATMEGIGAIGGTPPAFNRAAPGAEFAPNKRRRY

SEQ ID NO: 23437 - protein, 382 aa, Homo sapiens
MRKLFEKYGKAGEVFIHKDKGFGFIRLETRTLAEIAKVELDNMPLRGKQLRVRFACHSASLTVRNLPQYVSNELLEEAFSVFGQVERAVVIVDDRGRPSGKGIVEFSGKPAARKALDRCSEGSFLLTTFPRPVTVEPMDQLDDEEGLPEKLVIKNQQFHKEREQPPRFAQPGSFEYEYAMRWKALIEMEKQQQDQVDRNIKEAREKLEMEMEAARHEHQVMLMRQDLMRRQEELRRMEELHNQEVQKRKQLELRQEEERRRREEEMRRQQEEMMRRQQEGFKGTFPDAREQEIRMGQMAMGGAMGINNRGAMPPAPVPAGTPAPPGPATMMPDGTLGLTPPTTERFGQAATMEGIGAIGGTPPAFNRAAPGAEFAPNKRRRY

SEQ ID NO: 23438 - protein, 882 aa, Homo sapiens
MPALACLRRLCRHVSPQAVLFLLFIFCLFSVFISAYYLYGWKRGLEPSADAPEPDCGDPPPVAPSRLLPLKPVQAATPSRTDPLVLVFVESLYSQLGQEVVAILESSRFKYRTEIAPGKGDMPTLTDKGRGRFALIIYENILKYVNLDAWNRELLDKYCVAYGVGIIGFFKANENSLLSAQLKGFPLFLHSNLGLKDCSINPKSPLLYVTRPSEVEKGVLPGEDWTVFQSNHSTYEPVLLAKTRSSESIPHLGADAGLHAALHATVVQDLGLHDGIQRVLFGNNLNFWLHKLVFVDAVAFLTGKRLSLPLDRYILVDIDDIFVGKEGTRMKVEDVKALFDTQNELRAHIPNFTFNLGYSGKFFHTGTNAEDAGDDLLLSYVKEFWWFPHMWSHMQPHLFHNQSVLAEQMALNKKFAVEHGIPTDMGYAVAPHHSGVYPVHVQLYEAWKQVWSIRVTSTEEYPHLKPARYRRGFIHNGIMVLPRQTCGLFTHTIFYNEYPGGSSELDKIINGGELFLTVLLNPISIFMTHLSNYGNDRLGLYTFKHLVRFLHSWTNLRLQTLPPVQLAQKYFQIFSEEKDPLWQDPCEDKRHKDIWSKEKTCDRFPKLLIIGPQKTGTTALYLFLGMHPDLSSNYPSSETFEEIQFFNGHNYHKGIDWYMEFFPIPSNTTSDFYFEKSANYFDSEVAPRRAAALLPKAKVLTILINPADRAYSWYQHQRAHDDPVALKYTFHEVITAGSDASSKLRALQNRCLVPGWYATHIERWLSAYHANQILVLDGKLLRTEPAKVMDMVQKFLGVTNTIDYHKTLAFDPKKGFWCQLLEGGKTKCLGKSKGRKYPEMDLDSRAFLKDYYRDHNIELSKLLYKMGQTLPTWLREDLQNTR

SEQ ID NO: 23439 - protein, 556 aa, Homo sapiens
MPALACLRRLCRHVSPQAVLFLLFIFCLFSVFISAYYLYGWKRGLEPSADAPEPDCGDPPPVAPSRLLPLKPVQAATPSRTDPLVLVFVESLYSQLGQEVVAILESSRFKYRTEIAPGKGDMPTLTDKGRGRFALIIYENILKYVNLDAWNRELLDKYCVAYGVGIIGFFKANENSLLSAQLKGFPLFLHSNLGLKDCSINPKSPLLYVTRPSEVEKGVLPGEDWTVFQSNHSTYEPVLLAKTRSSESIPHLGADAGLHAALHATVVQDLGLHDGIQRVLFGNNLNFWLHKLVFVDAVAFLTGKRLSLPLDRYILVDIDDIFVGKEGTRMKVEDVKALFDTQNELRAHIPNFTFNLGYSGKFFHTGTNAEDAGDDLLLSYVKEFWWFPHMWSHMQPHLFHNQSVLAEQMALNKKFAVEHGIPTDMGYAVAPHHSGVYPVHVQLYEAWKQVWSIRVTSTEEYPHLKPARYRRGFIHNGIMVLPRQTCGLFTHTIFYNEYPGGSSELDKIINGGELFLTVLLNPVSAPQPMAAGEKGLLHSLSAADTGFLEPGKGGEA

SEQ ID NO: 23440 - protein, 645 aa, Homo sapiens
MLKFQEAAKCVSGSTAISTYPKTLIARRYVLQQKLGSGSFGTVYLVSDKKAKRGEELKVLKEISVGELNPNETVQANLEAQLLSKLDHPAIVKFHASFVEQDNFCIITEYCEGRDLDDKIQEYKQAGKIFPENQIIEWFIQLLLGVDYMHERRILHRDLKSKNVFLKNNLLKIGDFGVSRLLMGSCDLATTLTGTPHYMSPEALKHQGYDTKSDIWSLACILYEMCCMNHAFAGSNFLSIVLKIVEGDTPSLPERYPKELNAIMESMLNKNPSLRPSAIEILKIPYLDEQLQNLMCRYSEMTLEDKNLDCQKEAAHIINAMQKRIHLQTLRALSEVQKMTPRERMRLRKLQAADEKARKLKKIVEEKYEENSKRMQELRSRNFQQLSVDVLHEKTHLKGMEEKEEQPEGRLSCSPQDEDEERWQGREEESDEPTLENLPESQPIPSMDLHELESIVEDATSDLGYHEIPEDPLVAEEYYADAFDSYCEESDEEEEEIALERPEKEIRNEGSQPAYRTNQQDSDIEALARCLENVLGCTSLDTKTITTMAEDMSPGPPIFNSVMARTKMKRMRESAMQKLGTEVFEEVYNYLKRARHQNASEAEIRECLEKVVPQASDCFEVDQLLYFEEQLLITMGKEPTLQNHL

SEQ ID NO: 23441 - protein, 470 aa, Homo sapiens
MLKFQEAAKCVSGSTAISTYPKTLIARRYVLQQKLGSGSFGTVYLVSDKKAKRGEELKVLKEISVGELNPNETVQANLEAQLLSKLDHPAIVKFHASFVEQDNFCIITEYCEGRDLDDKIQEYKQAGKIFPENQIIEWFIQLLLGVDYMHERRILHRDLKSKNVFLKNNLLKIGDFGVSRLLMGSCDLATTLTGTPHYMSPEALKHQGYDTKSDIWSLACILYEMCCMNHAFAGSNFLSIVLKIVEGDTPSLPERYPKELNAIMESMLNKNPSLRPSAIEILKIPYLDEQLQNLMCRYSEMTLEDKNLDCQKEAAHIINAMQKRIHLQTLRALSEVQKMTPRERMRLRKLQAADEKARKLKKIVEEKYEENSKRMQELRSRNFQQLSVDVLHEKTHLKGMEEKEEQPEGRLSCSPQDEDEERWQGREEESDEPTLENLPESQPIPSMDLHELESIVEDATSDLGYHATHS

SEQ ID NO: 23442 - protein, 482 aa, Homo sapiens
MLKFQEAAKCVSGSTAISTYPKTLIARRYVLQQKLGSGSFGTVYLVSDKKAKRGEELKVLKEISVGELNPNETVQANLEAQLLSKLDHPAIVKFHASFVEQDNFCIITEYCEGRDLDDKIQEYKQAGKIFPENQIIEWFIQLLLGVDYMHERRILHRDLKSKNVFLKNNLLKIGDFGVSRLLMGSCDLATTLTGTPHYMSPEALKHQGYDTKSDIWSLACILYEMCCMNHAFAGSNFLSIVLKIVEGDTPSLPERYPKELNAIMESMLNKNPSLRPSAIEILKIPYLDEQLQNLMCRYSEMTLEDKNLDCQKEAAHIINAMQKRIHLQTLRALSEVQKMTPRERMRLRKLQAADEKARKLKKIVEEKYEENSKRMQELRSRNFQQLSVDVLHEKTHLKGMEEKEEQPEGRLSCSPQDEDEERWQGREEESDEPTLENLPESQPIPSMDLHELESIVEDATSDLGYHGDCNLISLDEYWKNEK

SEQ ID NO: 23443 - protein, 599 aa, Homo sapiens
MLKFQEAAKCVSGSTAISTYPKTLIARRYVLQQKLGSGSFGTVYLVSDKKAKRGEELKVLKEISVGELNPNETVQANLEAQLLSKLDHPAIVKFHASFVEQDNFCIITEYCEGRDLDDKIQEYKQAGKIFPENQIIEWFIQLLLGVDYMHERRILHRDLKSKNVFLKNNLLKIGDFGVSRLLMGSCDLATTLTGTPHYMSPEALKHQGYDTKSDIWSLACILYEMCCMNHAFAGSNFLSIVLKIVEGDTPSLPERYPKELNAIMESMLNKNPSLRPSAIEILKIPYLDEQLQNLMCRYSEMTLEDKNLDCQKEAAHIINAMQKRIHLQTLRALSEVQKMTPRERMRLRKLQAADEKARKLKKIVEEKYEENSKRMQELRSRNFQQLSVDVLHEKTHLKGMEEKEEQPEGRLSCSPQDEDEERWQGREEESDEPTLENLPESQPIPSMDLHELESIVEDATSDLGYHEIPEDPLVAEEYYADAFDSYCEESDEEEEEIALERPEKEIRNEGSQPAYRTNQQDSDIEALARCLENVLGCTSLDQPCRSWGQKYLKRSIITSREQGIRMLAKQRSASVWKKWCLKPATVLKWTSSCTLKSSC

SEQ ID NO: 23444 - protein, 1382 aa, Homo sapiens
MDEEENHYVSQLREVYSSCDTTGTGFLDRQELTQLCLKLHLEQQLPVLLQTLLGNDHFARVNFEEFKEGFVAVLSSNAGVRPSDEDSSSLESAASSAIPPKYVNGSKWYGRRSRPELCDAATEARRVPEQQTQASLKSHLWRSASLESVESPKSDEEAESTKEAQNELFEAQGQLQTWDSEDFGSPQKSCSPSFDTPESQIRGVWEELGVGSSGHLSEQELAVVCQSVGLQGLEKEELEDLFNKLDQDGDGKVSLEEFQLGLFSHEPALLLESSTRVKPSKAWSHYQVPEESGCHTTTTSSLVSLCSSLRLFSSIDDGSGFAFPDQVLAMWTQEGIQNGREILQSLDFSVDEKVNLLELTWALDNELMTVDSAVQQAALACYHQELSYQQGQVEQLARERDKARQDLERAEKRNLEFVKEMDDCHSTLEQLTEKKIKHLEQGYRERLSLLRSEVEAERELFWEQAHRQRAALEWDVGRLQAEEAGLREKLTLALKENSRLQKEIVEVVEKLSDSERLALKLQKDLEFVLKDKLEPQSAELLAQEERFAAVLKEYELKCRDLQDRNDELQAELEGLWARLPKNRHSPSWSPDGRRRQLPGLGPAGISFLGNSAPVSIETELMMEQVKEHYQDLRTQLETKVNYYEREIAALKRNFEKERKDMEQARRREVSVLEGQKADLEELHEKSQEVIWGLQEQLQDTARGPEPEQMGLAPCCTQALCGLALRHHSHLQQIRREAEAELSGELSGLGALPARRDLTLELEEPPQGPLPRGSQRSEQLELERALKLQPCASEKRAQMCVSLALEEEELELARGKRVDGPSLEAEMQALPKDGLVAGSGQEGTRGLLPLRPGCGERPLAWLAPGDGRESEEAAGAGPRRRQAQDTEATQSPAPAPAPASHGPSERWSRMQPCGVDGDIVPKEPEPFGASAAGLEQPGARELPLLGTERDASQTQPRMWEPPLRPAASCRGQAERLQAIQEERARSWSRGTQEQASEQQARAEGALEPGCHKHSVEVARRGSLPSHLQLADPQGSWQEQLAAPEEGETKIALEREKDDMETKLLHLEDVVRALEKHVDLRENDRLEFHRLSEENTLLKNDLGRVRQELEAAESTHDAQRKEIEVLKKDKEKACSEMEVLNRQNQNYKDQLSQLNVRVLQLGQEASTHQAQNEEHRVTIQMLTQSLEEVVRSGQQQSDQIQKLRVELECLNQEHQSLQLPWSELTQTLEESQDQVQGAHLRLRQAQAQHLQEVRLVPQDRVAELHRLLSLQGEQARRRLDAQREEHEKQLKATEERVEEAEMILKNMEMLLQEKVDKLKEQFEKNTKSDLLLKELYVENAHLVRALQATEEKQRGAEKQSRLLEEKVRALNKLVSRIAPAALSV

SEQ ID NO: 23445 - protein, 1033 aa, Homo sapiens
MDEEENHYVSQLREVYSSCDTTGTGFLDRQELTQLCLKLHLEQQLPVLLQTLLGNDHFARVNFEEFKEGFVAVLSSNAGVRPSDEDSSSLESAASSAIPPKYVNGSKWYGRRSRPELCDAATEARRVPEQQTQASLKSHLWRSASLESVESPKSDEEAESTKEAQNELFEAQGQLQTWDSEDFGSPQKSCSPSFDTPESQIRGVWEELGVGSSGHLSEQELAVVCQSVGLQGLEKEELEDLFNKLDQDGDGKVSLEEFQLGLFSHEPALLLESSTRVKPSKAWSHYQVPEESGCHTTTTSSLVSLCSSLRLFSSIDDGSGFAFPDQVLAMWTQEGIQNGREILQSLDFSVDEKVNLLELTWALDNELMTVDSAVQQAALACYHQELSYQQGQVEQLARERDKARQDLERAEKRNLEFVKEMDDCHSTLEQLTEKKIKHLEQGYRERLSLLRSEVEAERELFWEQAHRQRAALEWDVGRLQAEEAGLREKLTLALKENSRLQKEIVEVVEKLSDSERLALKLQKDLEFVLKDKLEPQSAELLAQEERFAAVLKEYELKCRDLQDRNDELQAELEGLWARLPKNRHSPSWSPDGRRRQLPGLGPAGISFLGNSAPVSIETELMMEQVKEHYQDLRTQLETKVNYYEREIAALKRNFEKERKDMEQARRREVSVLEGQKADLEELHEKSQEVIWGLQEQLQDTARGPEPEQMGLAPCCTQALCGLALRHHSHLQQIRLEFHRLSEENTLLKNDLGRVRQELEAAESTHDAQRKEIEVLKKDKEKACSEMEVLNRQNQNYKDQLSQLNVRVLQLGQEASTHQAQNEEHRVTIQMLTQSLEEVVRSGQQQSDQIQKLRVELECLNQEHQSLQLPWSELTQTLEESQDQVQGAHLRLRQAQAQHLQEVRLVPQDRVAELHRLLSLQGEQARRRLDAQREEHEKQLKATEERVEEAEMILKNMEMLLQEKVDKLKEQFEKNTKSDLLLKELYVENAHLVRALQATEEKQRGAEKQSRLLEEKVRALNKLVSRIAPAALSV

SEQ ID NO: 23446 - protein, 883 aa, Homo sapiens
MLQLWKVVRPARQLELHRLILLLIAFSLGSMGFLAYYVSTSPKAKEPLPLPLGDCSSGGAAGPGPARPPVPPRPPRPPETARTEPVVLVFVESAYSQLGQEIVAILESSRFRYSTELAPGRGDMPTLTDNTHGRYVLVIYENLLKYVNLDAWSRELLDRYCVEYGVGIIGFFRAHEHSLLSAQLKGFPLFLHSNLGLRDYQVNPSAPLLHLTRPSRLEPGPLPGDDWTIFQSNHSTYEPVLLASLRPAEPAVPGPVLRRARLPTVVQDLGLHDGIQRVLFGHGLSFWLHKLIFVDAVAYLTGKRLCLDLDRYILVDIDDIFVGKEGTRMKVADVEALLTTQNKLRTLVPNFTFNLGFSGKFYHTGTEEEDAGDDMLLKHRKEFWWFPHMWSHMQPHLFHNRSVLADQMRLNKQFALEHGIPTDLGYAVAPHHSGVYPIHTQLYEAWKSVWGIQVTSTEEYPHLRPARYRRGFIHNGIMVLPRQTCGLFTHTIFYNEYPGGSRELDRSIRGGELFLTVLLNPISIFMTHLSNYGNDRLGLYTFESLVRFLQCWTRLRLQTLPPVPLAQKYFELFPQERSPLWQNPCDDKRHKDIWSKEKTCDRLPKFLIVGPQKTGTTAIHFFLSLHPAVTSSFPSPSTFEEIQFFNSPNYHKGIDWYMDFFPVPSNASTDFLFEKSATYFDSEVVPRRGAALLPRAKIITVLTNPADRAYSWYQHQRAHGDPVALNYTFYQVISASSQTPLALRSLQNRCLVPGYYSTHLQRWLTYYPSGQLLIVDGQELRTNPAASMESIQKFLGITPFLNYTRTLRFDDDKGFWCQGLEGGKTRCLGRSKGRRYPDMDTESRLFLTDFFRNHNLELSKLLSRLGQPVPSWLREELQHSSLG

SEQ ID NO: 23447 - protein, 377 aa, Homo sapiens
MLQLWKVVRPARQLELHRLILLLIAFSLGSMGFLAYYVSTSPKAKEPLPLPLGDCSSGGAAGPGPARPPVPPRPPRPPETARTEPVVLVFVESAYSQLGQEIVAILESSRFRYSTELAPGRGDMPTLTDNTHGRYVLVIYENLLKYVNLDAWSRELLDRYCVEYGVGIIGFFRAHEHSLLSAQLKGFPLFLHSNLGLRDYQVNPSAPLLHLTRPSRLEPGPLPGDDWTIFQSNHSTYEPVLLASLRPAEPAVPGPVLRRARLPTVVQDLGLHDGIQRVLFGHGLSFWLHKLIFVDAVAYLTGKRLCLDLDRYILVDIDDIFVGKEGTRMKVADVEALLTTQNKLRTLVPNFTFNLGFSGKFYHTGELIPLLLWHIIV

SEQ ID NO: 23448 - protein, 1258 aa, Homo sapiens
MEKYVRLQKIGEGSFGKAILVKSTEDGRQYVIKEINISRMSSKEREESRREVAVLANMKHPNIVQYRESFEENGSLYIVMDYCEGGDLFKRINAQKGVLFQEDQILDWFVQICLALKHVHDRKILHRDIKSQNIFLTKDGTVQLGDFGIARVLNSTVELARTCIGTPYYLSPEICENKPYNNKSDIWALGCVLYELCTLKHAFEAGSMKNLVLKIISGSFPPVSLHYSYDLRSLVSQLFKRNPRDRPSVNSILEKGFIAKRIEKFLSPQLIAEEFCLKTFSKFGSQPIPAKRPASGQNSISVMPAQKITKPAAKYGIPLAYKKYGDKKLHEKKPLQKHKQAHQTPEKRVNTGEERRKISEEAARKRRLEFIEKEKKQKDQIISLMKAEQMKRQEKERLERINRAREQGWRNVLSAGGSGEVKAPFLGSGGTIAPSSFSSRGQYEHYHAIFDQMQQQRAEDNEAKWKREIYGRGLPERGILPGVRPGFPYGAAGHHHFPDADDIRKTLKRLKAVSKQANANRQKGQLAVERAKQVEEFLQRKREAMQNKARAEGHMVYLARLRQIRLQNFNERQQIKAKLRGEKKEANHSEGQEGSEEADMRRKKIESLKAHANARAAVLKEQLERKRKEAYEREKKVWEEHLVAKGVKSSDVSPPLGQHETGGSPSKQQMRSVISVTSALKEVGVDSSLTDTRETSEEMQKTNNAISSKREILRRLNENLKAQEDEKGKQNLSDTFEINVHEDAKEHEKEKSVSSDRKKWEAGGQLVIPLDELTLDTSFSTTERHTVGEVIKLGPNGSPRRAWGKSPTDSVLKILGEAELQLQTELLENTTIRSEISPEGEKYKPLITGEKKVQCISHEINPSAIVDSPVETKSPEFSEASPQMSLKLEGNLEEPDDLETEILQEPSGTNKDESLPCTITDVWISEEKETKETQSADRITIQENEVSEDGVSSTVDQLSDIHIEPGTNDSQHSKCDVDKSVQPEPFFHKVVHSEHLNLVPQVQSVQCSPEESFAFRSHSHLPPKNKNKNSLLIGLSTGLFDANNPKMLRTCSLPDLSKLFRTLMDVPTVGDVRQDNLEIDEIEDENIKEGPSDSEDIVFEETDTDLQELQASMEQLLREQPGEEYSEEEESVLKNSDVEPTANGTDVADEDDNPSSESALNEEWHSDNSDGEIASECECDSVFNHLEELRLHLEQEMGFEKFFEVYEKIKAIHEDEDENIEICSKIVQNILGNEHQHLYAKILHLVMADGAYQEDNDE

SEQ ID NO: 23449 - protein, 1214 aa, Homo sapiens
MEKYVRLQKIGEGSFGKAILVKSTEDGRQYVIKEINISRMSSKEREESRREVAVLANMKHPNIVQYRESFEENGSLYIVMDYCEGGDLFKRINAQKGVLFQEDQILDWFVQICLALKHVHDRKILHRDIKSQNIFLTKDGTVQLGDFGIARVLNSTVELARTCIGTPYYLSPEICENKPYNNKSDIWALGCVLYELCTLKHAFEAGSMKNLVLKIISGSFPPVSLHYSYDLRSLVSQLFKRNPRDRPSVNSILEKGFIAKRIEKFLSPQLIAEEFCLKTFSKFGSQPIPAKRPASGQNSISVMPAQKITKPAAKYGIPLAYKKYGDKKLHEKKPLQKHKQAHQTPEKRVNTGEERRKISEEAARKRRLEFIEKEKKQKDQIISLMKAEQMKRQEKERLERINRAREQGWRNVLSAGGSGEVKAPFLGSGGTIAPSSFSSRGQYEHYHAIFDQMQQQRAEDNEAKWKREIYGRGLPERQKGQLAVERAKQVEEFLQRKREAMQNKARAEGHMVYLARLRQIRLQNFNERQQIKAKLRGEKKEANHSEGQEGSEEADMRRKKIESLKAHANARAAVLKEQLERKRKEAYEREKKVWEEHLVAKGVKSSDVSPPLGQHETGGSPSKQQMRSVISVTSALKEVGVDSSLTDTRETSEEMQKTNNAISSKREILRRLNENLKAQEDEKGKQNLSDTFEINVHEDAKEHEKEKSVSSDRKKWEAGGQLVIPLDELTLDTSFSTTERHTVGEVIKLGPNGSPRRAWGKSPTDSVLKILGEAELQLQTELLENTTIRSEISPEGEKYKPLITGEKKVQCISHEINPSAIVDSPVETKSPEFSEASPQMSLKLEGNLEEPDDLETEILQEPSGTNKDESLPCTITDVWISEEKETKETQSADRITIQENEVSEDGVSSTVDQLSDIHIEPGTNDSQHSKCDVDKSVQPEPFFHKVVHSEHLNLVPQVQSVQCSPEESFAFRSHSHLPPKNKNKNSLLIGLSTGLFDANNPKMLRTCSLPDLSKLFRTLMDVPTVGDVRQDNLEIDEIEDENIKEGPSDSEDIVFEETDTDLQELQASMEQLLREQPGEEYSEEEESVLKNSDVEPTANGTDVADEDDNPSSESALNEEWHSDNSDGEIASECECDSVFNHLEELRLHLEQEMGFEKFFEVYEKIKAIHEDEDENIEICSKIVQNILGNEHQHLYAKILHLVMADGAYQEDNDE

SEQ ID NO: 23450 - protein, 1286 aa, Homo sapiens
MEKYVRLQKIGEGSFGKAILVKSTEDGRQYVIKEINISRMSSKEREESRREVAVLANMKHPNIVQYRESFEENGSLYIVMDYCEGGDLFKRINAQKGVLFQEDQILDWFVQICLALKHVHDRKILHRDIKSQNIFLTKDGTVQLGDFGIARVLNSTVELARTCIGTPYYLSPEICENKPYNNKSDIWALGCVLYELCTLKHAFEAGSMKNLVLKIISGSFPPVSLHYSYDLRSLVSQLFKRNPRDRPSVNSILEKGFIAKRIEKFLSPQLIAEEFCLKTFSKFGSQPIPAKRPASGQNSISVMPAQKITKPAAKYGIPLAYKKYGDKKLHEKKPLQKHKQAHQTPEKRVNTGEERRKISEEAARKRRLEFIEKEKKQKDQIISLMKAEQMKRQEKERLERINRAREQGWRNVLSAGGSGEVKAPFLGSGGTIAPSSFSSRGQYEHYHAIFDQMQQQRAEDNEAKWKREIYGRGLPERGILPGVRPGFPYGAAGHHHFPDADDIRKTLKRLKAVSKQANANRQKGQLAVERAKQVEEFLQRKREAMQNKARAEGHMGILQNLAAMYGGRPSSSRGGKPRNKEEEVYLARLRQIRLQNFNERQQIKAKLRGEKKEANHSEGQEGSEEADMRRKKIESLKAHANARAAVLKEQLERKRKEAYEREKKVWEEHLVAKGVKSSDVSPPLGQHETGGSPSKQQMRSVISVTSALKEVGVDSSLTDTRETSEEMQKTNNAISSKREILRRLNENLKAQEDEKGKQNLSDTFEINVHEDAKEHEKEKSVSSDRKKWEAGGQLVIPLDELTLDTSFSTTERHTVGEVIKLGPNGSPRRAWGKSPTDSVLKILGEAELQLQTELLENTTIRSEISPEGEKYKPLITGEKKVQCISHEINPSAIVDSPVETKSPEFSEASPQMSLKLEGNLEEPDDLETEILQEPSGTNKDESLPCTITDVWISEEKETKETQSADRITIQENEVSEDGVSSTVDQLSDIHIEPGTNDSQHSKCDVDKSVQPEPFFHKVVHSEHLNLVPQVQSVQCSPEESFAFRSHSHLPPKNKNKNSLLIGLSTGLFDANNPKMLRTCSLPDLSKLFRTLMDVPTVGDVRQDNLEIDEIEDENIKEGPSDSEDIVFEETDTDLQELQASMEQLLREQPGEEYSEEEESVLKNSDVEPTANGTDVADEDDNPSSESALNEEWHSDNSDGEIASECECDSVFNHLEELRLHLEQEMGFEKFFEVYEKIKAIHEDEDENIEICSKIVQNILGNEHQHLYAKILHLVMADGAYQEDNDE

SEQ ID NO: 23451 - protein, 1189 aa, Homo sapiens
MEKYVRLQKIGEGSFGKAILVKSTEDGRQYVIKEINISRMSSKEREESRREVAVLANMKHPNIVQYRESFEENGSLYIVMDYCEGGDLFKRINAQKGVLFQEDQILDWFVQICLALKHVHDRKILHRDIKSQNIFLTKDGTVQLGDFGIARVLNSTVELARTCIGTPYYLSPEICENKPYNNKSDIWALGCVLYELCTLKHAFEAGSMKNLVLKIISGSFPPVSLHYSYDLRSLVSQLFKRNPRDRPSVNSILEKGFIAKRIEKFLSPQLIAEEFCLKTFSKFGSQPIPAKRPASGQNSISVMPAQKITKPAAKYGIPLAYKKYGDKKLHEKKPLQKHKQAHQTPEKRVNTGEERRKISEEAARKRRLEFIEKEKKQKDQIISLMKAEQMKRQEKERAPFLGSGGTIAPSSFSSRGQYEHYHAIFDQMQQQRAEDNEAKWKREIYGRGLPERQKGQLAVERAKQVEEFLQRKREAMQNKARAEGHMVYLARLRQIRLQNFNERQQIKAKLRGEKKEANHSEGQEGSEEADMRRKKIESLKAHANARAAVLKEQLERKRKEAYEREKKVWEEHLVAKGVKSSDVSPPLGQHETGGSPSKQQMRSVISVTSALKEVGVDSSLTDTRETSEEMQKTNNAISSKREILRRLNENLKAQEDEKGKQNLSDTFEINVHEDAKEHEKEKSVSSDRKKWEAGGQLVIPLDELTLDTSFSTTERHTVGEVIKLGPNGSPRRAWGKSPTDSVLKILGEAELQLQTELLENTTIRSEISPEGEKYKPLITGEKKVQCISHEINPSAIVDSPVETKSPEFSEASPQMSLKLEGNLEEPDDLETEILQEPSGTNKDESLPCTITDVWISEEKETKETQSADRITIQENEVSEDGVSSTVDQLSDIHIEPGTNDSQHSKCDVDKSVQPEPFFHKVVHSEHLNLVPQVQSVQCSPEESFAFRSHSHLPPKNKNKNSLLIGLSTGLFDANNPKMLRTCSLPDLSKLFRTLMDVPTVGDVRQDNLEIDEIEDENIKEGPSDSEDIVFEETDTDLQELQASMEQLLREQPGEEYSEEEESVLKNSDVEPTANGTDVADEDDNPSSESALNEEWHSDNSDGEIASECECDSVFNHLEELRLHLEQEMGFEKFFEVYEKIKAIHEDEDENIEICSKIVQNILGNEHQHLYAKILHLVMADGAYQEDNDE

SEQ ID NO: 23452 - protein, 527 aa, Homo sapiens
MEKYVRLQKIGEGSFGKAILVKSTEDGRQYVIKEINISRMSSKEREESRREVAVLANMKHPNIVQYRESFEENGSLYIVMDYCEGGDLFKRINAQKGVLFQEDQILDWFVQICLALKHVHDRKILHRDIKSQNIFLTKDGTVQLGDFGIARVLNSTVELARTCIGTPYYLSPEICENKPYNNKSDIWALGCVLYELCTLKHAFEAGSMKNLVLKIISGSFPPVSLHYSYDLRSLVSQLFKRNPRDRPSVNSILEKGFIAKRIEKFLSPQLIAEEFCLKTFSKFGSQPIPAKRPASGQNSISVMPAQKITKPAAKYGIPLAYKKYGDKKLHEKKPLQKHKQAHQTPEKRVNTGEERRKISEEAARKRRLEFIEKEKKQKDQIISLMKAEQMKRQEKERLERINRAREQGWRNVLSAGGSGEVKAPFLGSGGTIAPSSFSSRGQYEHYHAIFDQMQQQRAEDNEAKWKREIYGRGLPERGILPGVRPGFPYGAAGHHHFPDADDIRKTLKRLKAVSKQANANRLDCDDP

SEQ ID NO: 23453 - protein, 1242 aa, Homo sapiens
MEKYVRLQKIGEGSFGKAILVKSTEDGRQYVIKEINISRMSSKEREESRREVAVLANMKHPNIVQYRESFEENGSLYIVMDYCEGGDLFKRINAQKGVLFQEDQILDWFVQICLALKHVHDRKILHRDIKSQNIFLTKDGTVQLGDFGIARVLNSTVELARTCIGTPYYLSPEICENKPYNNKSDIWALGCVLYELCTLKHAFEAGSMKNLVLKIISGSFPPVSLHYSYDLRSLVSQLFKRNPRDRPSVNSILEKGFIAKRIEKFLSPQLIAEEFCLKTFSKFGSQPIPAKRPASGQNSISVMPAQKITKPAAKYGIPLAYKKYGDKKLHEKKPLQKHKQAHQTPEKRVNTGEERRKISEEAARKRRLEFIEKEKKQKDQIISLMKAEQMKRQEKERLERINRAREQGWRNVLSAGGSGEVKAPFLGSGGTIAPSSFSSRGQYEHYHAIFDQMQQQRAEDNEAKWKREIYGRGLPERQKGQLAVERAKQVEEFLQRKREAMQNKARAEGHMGILQNLAAMYGGRPSSSRGGKPRNKEEEVYLARLRQIRLQNFNERQQIKAKLRGEKKEANHSEGQEGSEEADMRRKKIESLKAHANARAAVLKEQLERKRKEAYEREKKVWEEHLVAKGVKSSDVSPPLGQHETGGSPSKQQMRSVISVTSALKEVGVDSSLTDTRETSEEMQKTNNAISSKREILRRLNENLKAQEDEKGKQNLSDTFEINVHEDAKEHEKEKSVSSDRKKWEAGGQLVIPLDELTLDTSFSTTERHTVGEVIKLGPNGSPRRAWGKSPTDSVLKILGEAELQLQTELLENTTIRSEISPEGEKYKPLITGEKKVQCISHEINPSAIVDSPVETKSPEFSEASPQMSLKLEGNLEEPDDLETEILQEPSGTNKDESLPCTITDVWISEEKETKETQSADRITIQENEVSEDGVSSTVDQLSDIHIEPGTNDSQHSKCDVDKSVQPEPFFHKVVHSEHLNLVPQVQSVQCSPEESFAFRSHSHLPPKNKNKNSLLIGLSTGLFDANNPKMLRTCSLPDLSKLFRTLMDVPTVGDVRQDNLEIDEIEDENIKEGPSDSEDIVFEETDTDLQELQASMEQLLREQPGEEYSEEEESVLKNSDVEPTANGTDVADEDDNPSSESALNEEWHSDNSDGEIASECECDSVFNHLEELRLHLEQEMGFEKFFEVYEKIKAIHEDEDENIEICSKIVQNILGNEHQHLYAKILHLVMADGAYQEDNDE

SEQ ID NO: 23454 - protein, 2090 aa, Homo sapiens
MDEVEQDQHEARLKELFDSFDTTGTGSLGQEELTDLCHMLSLEEVAPVLQQTLLQDNLLGRVHFDQFKEALILILSRTLSNEEHFQEPDCSLEAQPKYVRGGKRYGRRSLPEFQESVEEFPEVTVIEPLDEEARPSHIPAGDCSEHWKTQRSEEYEAEGQLRFWNPDDLNASQSGSSPPQDWIEEKLQEVCEDLGITRDGHLNRKKLVSICEQYGLQNVDGEMLEEVFHNLDPDGTMSVEDFFYGLFKNGKSLTPSASTPYRQLKRHLSMQSFDESGRRTTTSSAMTSTIGFRVFSCLDDGMGHASVERILDTWQEEGIENSQEILKALDFSLDGNINLTELTLALENELLVTKNSIHQAALASFKAEIRHLLERVDQVVREKEKLRSDLDKAEKLKSLMASEVDDHHAAIERRNEYNLRKLDEEYKERIAALKNELRKEREQILQQAGKQRLELEQEIEKAKTEENYIRDRLALSLKENSRLENELLENAEKLAEYENLTNKLQRNLENVLAEKFGDLDPSSAEFFLQEERLTQMRNEYERQCRVLQDQVDELQSELEEYRAQGRVLRLPLKNSPSEEVEANSGGIEPEHGLGSEECNPLNMSIEAELVIEQMKEQHHRDICCLRLELEDKVRHYEKQLDETVVSCKKAQENMKQRHENETHTLEKQISDLKNEIAELQGQAAVLKEAHHEATCRHEEEKKQLQVKLEEEKTHLQEKLRLQHEMELKARLTQAQASFEREREGLQSSAWTEEKVRGLTQELEQFHQEQLTSLVEKHTLEKEELRKELLEKHQRELQEGREKMETECNRRTSQIEAQFQSDCQKVTERCESALQSLEGRYRQELKDLQEQQREEKSQWEFEKDELTQECAEAQELLKETLKREKTTSLVLTQEREMLEKTYKEHLNSMVVERQQLLQDLEDLRNVSETQQSLLSDQILELKSSHKRELREREEVLCQAGASEQLASQRLERLEMEHDQERQEMMSKLLAMENIHKATCETADRERAEMSTEISRLQSKIKEMQQATSPLSMLQSGCQVIGEEEVEGDGALSLLQQGEQLLEENGDVLLSLQRAHEQAVKENVKMATEISRLQQRLQKLEPGLVMSSCLDEPATEFFGNTAEQTEQFLQQNRTKQVEGVTRRHVLSDLEDDEVRDLGSTGTSSVQRQEVKIEESEASVEGFSELENSEETRTESWELKNQISQLQEQLMMLCADCDRASEKKQDLLFDVSVLKKKLKMLERIPEASPKYKLLYEDVSRENDCLQEELRMMETRYDEALENNKELTAEVFRLQDELKKMEEVTETFLSLEKSYDEVKIENEGLNVLVLRLQGKIEKLQESVVQRCDCCLWEASLENLEIEPDGNILQLNQTLEECVPRVRSVHHVIEECKQENQYLEGNTQLLEKVKAHEIAWLHGTIQTHQERPRVQNQVILEENTTLLGFQDKHFQHQATIAELELEKTKLQELTRKLKERVTILVKQKDVLSHGEKEEELKAMMHDLQITCSEMQQKVELLRYESEKLQQENSILRNEITTLNEEDSISNLKLGTLNGSQEEMWQKTETVKQENAAVQKMVENLKKQISELKIKNQQLDLENTELSQKNSQNQEKLQELNQRLTEMLCQKEKEPGNSALEEREQEKFNLKEELERCKVQSSTLVSSLEAELSEVKIQTHIVQQENHLLKDELEKMKQLHRCPDLSDFQQKISSVLSYNEKLLKEKEALSEELNSCVDKLAKSSLLEHRIATMKQEQKSWEHQSASLKSQLVASQEKVQNLEDTVQNVNLQMSRMKSDLRVTQQEKEALKQEVMSLHKQLQNAGGKSWAPEIATHPSGLHNQQKRLSWDKLDHLMNEEQQLLWQENERLQTMVQNTKAELTHSREKVRQLESNLLPKHQKHLNPSGTMNPTEQEKLSLKRECDQFQKEQSPANRKVSQMNSLEQELETIHLENEGLKKKQVKLDEQLMEMQHLRSTATPSPSPHAWDLQLLQQQACPMVPREQFLQLQRQLLQAERINQHLQEELENRTSETNTPQGNQEQLVTVMEERMIEVEQKLKLVKRLLQEKVNQLKEQVSLPGHLCSPTSHSSFNSSFTSLYCH

SEQ ID NO: 23455 - protein, 2073 aa, Homo sapiens
MDEVEQDQHEARLKELFDSFDTTGTGSLGQEELTDLCHMLSLEEVAPVLQQTLLQDNLLGRVHFDQFKEALILILSRTLSNEEHFQEPDCSLEAQPKYVRGGKRYGRRSLPEFQESVEEFPEVTVIEPLDEEARPSHIPAGDCSEHWKTQRSEEYEAEGQLRFWNPDDLNASQSGSSPPQDWIEEKLQEVCEDLGITRDGHLNRKKLVSICEQYGLQNVDGEMLEEVFHNLDPDGTMSVEDFFYGLFKNGKSLTPSASTPYRQLKRHLSMQSFDESGRRTTTSSAMTSTIGFRVFSCLDDGMGHASVERILDTWQEEGIENSQEILKALDFSLDGNINLTELTLALENELLVTKNSIHQAALASFKAEIRHLLERVDQVVREKEKLRSDLDKAEKLKSLMASEVDDHHAAIERRNEYNLRKLDEEYKERIAALKNELRKEREQILQQAGKQRLELEQEIEKAKTEENYIRDRLALSLKENSRLENELLENAENVLAEKFGDLDPSSAEFFLQEERLTQMRNEYERQCRVLQDQVDELQSELEEYRAQGRVLRLPLKNSPSEEVEANSGGIEPEHGLGSEECNPLNMSIEAELVIEQMKEQHHRDICCLRLELEDKVRHYEKQLDETVVSCKKAQENMKQRHENETHTLEKQISDLKNEIAELQGQAAVLKEAHHEATCRHEEEKKQLQVKLEEEKTHLQEKLRLQHEMELKARLTQAQASFEREREGLQSSAWTEEKVRGLTQELEQFHQEQLTSLVEKHTLEKEELRKELLEKHQRELQEGREKMETECNRRTSQIEAQFQSDCQKVTERCESALQSLEGRYRQELKDLQEQQREEKSQWEFEKDELTQECAEAQELLKETLKREKTTSLVLTQEREMLEKTYKEHLNSMVVERQQLLQDLEDLRNVSETQQSLLSDQILELKSSHKRELREREEVLCQAGASEQLASQRLERLEMEHDQERQEMMSKLLAMENIHKATCETADRERAEMSTEISRLQSKIKEMQQATSPLSMLQSGCQVIGEEEVEGDGALSLLQQGEQLLEENGDVLLSLQRAHEQAVKENVKMATEISRLQQRLQKLEPGLVMSSCLDEPATEFFGNTAEQTEQFLQQNRTKQVEGVTRRHVLSDLEDDEVRDLGSTGTSSVQRQEVKIEESEASVEGFSELENSEETRTESWELKNQISQLQEQLMMLCADCDRASEKKQDLLFDVSVLKKKLKMLERIPEASPKYKLLYEDVSRENDCLQEELRMMETRYDEALENNKELTAEVFRLQDELKKMEEVTETFLSLEKSYDEVKIENEGLNVLVLRLQGKIEKLQESVVQRCDCCLWEASLENLEIEPDGNILQLNQTLEECVPRVRSVHHVIEECKQENQYLEGNTQLLEKVKAHEIAWLHGTIQTHQERPRVQNQVILEENTTLLGFQDKHFQHQATIAELELEKTKLQELTRKLKERVTILVKQKDVLSHGEKEEELKAMMHDLQITCSEMQQKVELLRYESEKLQQENSILRNEITTLNEEDSISNLKLGTLNGSQEEMWQKTETVKQENAAVQKMVENLKKQISELKIKNQQLDLENTELSQKNSQNQEKLQELNQRLTEMLCQKEKEPGNSALEEREQEKFNLKEELERCKVQSSTLVSSLEAELSEVKIQTHIVQQENHLLKDELEKMKQLHRCPDLSDFQQKISSVLSYNEKLLKEKEALSEELNSCVDKLAKSSLLEHRIATMKQEQKSWEHQSASLKSQLVASQEKVQNLEDTVQNVNLQMSRMKSDLRVTQQEKEALKQEVMSLHKQLQNAGGKSWAPEIATHPSGLHNQQKRLSWDKLDHLMNEEQQLLWQENERLQTMVQNTKAELTHSREKVRQLESNLLPKHQKHLNPSGTMNPTEQEKLSLKRECDQFQKEQSPANRKVSQMNSLEQELETIHLENEGLKKKQVKLDEQLMEMQHLRSTATPSPSPHAWDLQLLQQQACPMVPREQFLQLQRQLLQAERINQHLQEELENRTSETNTPQGNQEQLVTVMEERMIEVEQKLKLVKRLLQEKVNQLKEQVSLPGHLCSPTSHSSFNSSFTSLYCH

SEQ ID NO: 23456 - protein, 2116 aa, Homo sapiens
MDEVEQDQHEARLKELFDSFDTTGTGSLGQEELTDLCHMLSLEEVAPVLQQTLLQDNLLGRVHFDQFKEALILILSRTLSNEEHFQEPDCSLEAQPKYVRGGKRYGRRSLPEFQESVEEFPEVTVIEPLDEEARPSHIPAGDCSEHWKTQRSEEYEAEGQLRFWNPDDLNASQSGSSPPQDWIEEKLQEVCEDLGITRDGHLNRKKLVSICEQYGLQNVDGEMLEEVFHNLDPDGTMSVEDFFYGLFKNGKSLTPSASTPYRQLKRHLSMQSFDESGRRTTTSSAMTSTIGFRVFSCLDDGMGHASVERILDTWQEEGIENSQEILKALDFSLDGNINLTELTLALENELLVTKNSIHQAALASFKAEIRHLLERVDQVVREKEKLRSDLDKAEKLKSLMASEVDDHHAAIERRNEYNLRKLDEEYKERIAALKNELRKEREQILQQAGKQRLELEQEIEKAKTEENYIRDRLALSLKENSRLENELLENAENVLAEKFGDLDPSSAEFFLQEERLTQMRNEYERQCRVLQDQVDELQSELEEYRAQGRVLRLPLKNSPSEEVEANSGGIEPEHGLGSEECNPLNMSIEAELVIEQMKEQHHRDICCLRLELEDKVRHYEKQLDETVVSCKKAQENMKQRHENETHTLEKQISDLKNEIAELQGQAAVLKEAHHEATCRHEEEKKQLQVKLEEEKTHLQEKLRLQHEMELKARLTQAQASFEREREGLQSSAWTEEKVRGLTQELEQFHQEQLTSLVEKHTLEKEELRKELLEKHQRELQEGREKMETECNRRTSQIEAQFQSDCQKVTERCESALQSLEGRYRQELKDLQEQQREEKSQWEFEKDELTQECAEAQELLKETLKREKTTSLVLTQEREMLEKTYKEHLNSMVVERQQLLQDLEDLRNVSETQQSLLSDQILELKSSHKRELREREEVLCQAGASEQLASQRLERLEMEHDQERQEMMSKLLAMENIHKATCETADRERAEMSTEISRLQSKIKEMQQATSPLSMLQSGCQVIGEEEVEGDGALSLLQQGEQLLEENGDVLLSLQRAHEQAVKENVKMATEISRLQQRLQKLEPGLVMSSCLDEPATEFFGNTAEQTEQFLQQNRTKQVEGVTRRHVLSDLEDDEVRDLGSTGTSSVQRQEVKIEESEASVEGFSELENSEETRTESWELKNQISQLQEQLMMLCADCDRASEKKQDLLFDVSVLKKKLKMLERIPEASPKYKLLYEDVSRENDCLQEELRMMETRYDEALENNKELTAEVFRLQDELKKMEEVTETFLSLEKSYDEVKIENEGLNVLVLRLQGKIEKLQESVVQRCDCCLWEASLENLEIEPDGNILQLNQTLEECVPRVRSVHHVIEECKQENQYLEGNTQLLEKVKAHEIAWLHGTIQTHQERPRVQNQVILEENTTLLGFQDKHFQHQATIAELELEKTKLQELTRKLKERVTILVKQKDVLSHGEKEEELKAMMHDLQITCSEMQQKVELLRYESEKLQQENSILRNEITTLNEEDSISNLKLGTLNGSQEEMWQKTETVKQENAAVQKMVENLKKQISELKIKNQQLDLENTELSQKNSQNQEKLQELNQRLTEMLCQKEKEPGNSALEEREQEKFNLKEELERCKVQSSTLVSSLEAELSEVKIQTHIVQQENHLLKDELEKMKQLHRCPDLSDFQQKISSVLSYNEKLLKEKEALSEELNSCVDKLAKSSLLEHRIATMKQEQKSWEHQSASLKSQLVASQEKVQNLEDTVQNVNLQMSRMKSDLRVTQQEKEALKQEVMSLHKQLQNAGGKSWAPEIATHPSGLHNQQKRLSWDKLDHLMNEEQQLLWQENERLQTMVQNTKAELTHSREKVRQLESNLLPKHQKHLNPSGTMNPTEQEKLSLKRECDQFQKEQSPANRKVSQMNSLEQELETIHLENEGLKKKQVKLDEQLMEMQHLRSTATPSPSPHAWDLQLLQQQACPMVPREQFLQLQRQLLQAERINQHLQEELENRTSETNTPQGNQEQLVTVMEERMIEVEQKLKLVKRLLQEKVNQLKEQLCKNTKADAMVKDLYVENAQLLKALEVTEQRQKTAEKKNYLLEEKIASLSNIVRNLTPAPLTSTPPLRS

SEQ ID NO: 23457 - protein, 2029 aa, Homo sapiens
MDEVEQDQHEARLKELFDSFDTTGTGSLGQEELTDLCHMLSLEEVAPVLQQTLLQDNLLGRVHFDQFKEALILILSRTLSNEEHFQEPDCSLEAQPKYVRGGKRYGRRSLPEFQESVEEFPEVTVIEPLDEEARPSHIPAGDCSEHWKTQRSEEYEAEGQLRFWNPDDLNASQSGSSPPQDWIEEKLQEVCEDLGITRDGHLNRKKLVSICEQYGLQNVDGEMLEEVFHNLDPDGTMSVEDFFYGLFKNGKSLTPSASTPYRQLKRHLSMQSFDESGRRTTTSSAMTSTIGFRVFSCLDDGMGHASVERILDTWQEEGIENSQEILKALDFSLDGNINLTELTLALENELLVTKNSIHQAALASFKAEIRHLLERVDQVVREKEKLRSDLDKAEKLKSLMASEVDDHHAAIERRNEYNLRKLDEEYKERIAALKNELRKEREQILQQAGKQRLELEQEIEKAKTEENYIRDRLALSLKENSRLENELLENAENVLAEKFGDLDPSSAEFFLQEERLTQMRNEYERQCRVLQDQVDELQSELEEYRAQGRVLRLPLKNSPSEEVEANSGGIEPEHGLGSEECNPLNMSIEAELVIEQMKEQHHRDICCLRLELEDKVRHYEKQLDETVVSCKKAQENMKQRHENETHTLEKQISDLKNEIAELQGQAAVLKEAHHEATCRHEEEKKQLQVKLEEEKTHLQEKLRLQHEMELKARLTQAQASFEREREGLQSSAWTEEKVRGLTQELEQFHQEQLTSLVEKHTLEKEELRKELLEKHQRELQEGREKMETECNRRTSQIEAQFQSDCQKVTERCESALQSLEGRYRQELKDLQEQQREEKSQWEFEKDELTQECAEAQELLKETLKREKTTSLVLTQEREMLEKTYKEHLNSMVVERQQLLQDLEDLRNVSETQQSLLSDQILELKSSHKRELREREEVLCQAGASEQLASQRLERLEMEHDQERQEMMSKLLAMENIHKATCETADRERAEMSTEISRLQSKIKEMQQATSPLSMLQSGCQVIGEEEVEGDGALSLLQQGEQLLEENGDVLLSLQRAHEQAVKENVKMATEISRLQQRLQKLEPGLVMSSCLDEPATEFFGNTAEQTEQFLQQNRTKQVEGVTRRHVLSDLEDDEVRDLGSTGTSSVQRQEVKIEESEASVEGFSELENSEETRTESWELKNQISQLQEQLMMLCADCDRASEKKQDLLFDVSVLKKKLKMLERIPEASPKYKLLYEDVSRENDCLQEELRMMETRYDEALENNKELTAEVFRLQDELKKMEEVTETFLSLEKSYDEVKIENEGLNVLVLRLQGKIEKLQESVVQRCDCCLWEASLENLEIEPDGNILQLNQTLEECVPRVRSVHHVIEECKQENQYLEGNTQLLEKVKAHEIAWLHGTIQTHQERPRVQNQVILEENTTLLGFQDKHFQHQATIAELELEKTKLQELTRKLKERVTILVKQKDVLSHGEKEEELKAMMHDLQITCSEMQQKVELLRYESEKLQQENSILRNEITTLNEEDSISNLKLGTLNGSQEEMWQKTETVKQENAAVQKMVENLKKQISELKIKNQQLDLENTELSQKNSQNQEKLQELNQRLTEMLCQKEKEPGNSALEEREQEKFNLKEELERCKVQSSTLVSSLEAELSEVKIQTHIVQQENHLLKDELEKMKQLHRCPDLSDFQQKISSVLSYNEKLLKEKEALSEELNSCVDKLAKSSLLEHRIATMKQEQKSWEHQSASLKSQLVASQEKVQNLEDTVQNVNLQMSRMKSDLRVTQQEKEALKQEVMSLHKQLQNAGGKSWAPEIATHPSGLHNQQKRLSWDKLDHLMNEEQQLLWQENERLQTMVQNTKAELTHSREKVRQLESNLLPKHQKHLNPSGTMNPTEQEKLSLKRECDQFQKEQSPANRKVSQMNSLEQELETIHLENEGLKKKQVKLDEQLMEMQHLRSTATPSPSPHAWDLQLLQQQACPMVPREQFLQLQRQLLQAERINQHLQEELENRTSETNTPQALLPEQRAVHADSYRRIGHL

SEQ ID NO: 23458 - protein, 2096 aa, Homo sapiens
MAEVTVPRVYVVFGIHCIMAKASSDVQVSGFHRKIQHVKNELCHMLSLEEVAPVLQQTLLQDNLLGRVHFDQFKEALILILSRTLSNEEHFQEPDCSLEAQPKYVRGGKRYGRRSLPEFQESVEEFPEVTVIEPLDEEARPSHIPAGDCSEHWKTQRSEEYEAEGQLRFWNPDDLNASQSGSSPPQDWIEEKLQEVCEDLGITRDGHLNRKKLVSICEQYGLQNVDGEMLEEVFHNLDPDGTMSVEDFFYGLFKNGKSLTPSASTPYRQLKRHLSMQSFDESGRRTTTSSAMTSTIGFRVFSCLDDGMGHASVERILDTWQEEGIENSQEILKALDFSLDGNINLTELTLALENELLVTKNSIHQAALASFKAEIRHLLERVDQVVREKEKLRSDLDKAEKLKSLMASEVDDHHAAIERRNEYNLRKLDEEYKERIAALKNELRKEREQILQQAGKQRLELEQEIEKAKTEENYIRDRLALSLKENSRLENELLENAEKLAEYENLTNKLQRNLENVLAEKFGDLDPSSAEFFLQEERLTQMRNEYERQCRVLQDQVDELQSELEEYRAQGRVLRLPLKNSPSEEVEANSGGIEPEHGLGSEECNPLNMSIEAELVIEQMKEQHHRDICCLRLELEDKVRHYEKQLDETVVSCKKAQENMKQRHENETHTLEKQISDLKNEIAELQGQAAVLKEAHHEATCRHEEEKKQLQVKLEEEKTHLQEKLRLQHEMELKARLTQAQASFEREREGLQSSAWTEEKVRGLTQELEQFHQEQLTSLVEKHTLEKEELRKELLEKHQRELQEGREKMETECNRRTSQIEAQFQSDCQKVTERCESALQSLEGRYRQELKDLQEQQREEKSQWEFEKDELTQECAEAQELLKETLKREKTTSLVLTQEREMLEKTYKEHLNSMVVERQQLLQDLEDLRNVSETQQSLLSDQILELKSSHKRELREREEVLCQAGASEQLASQRLERLEMEHDQERQEMMSKLLAMENIHKATCETADRERAEMSTEISRLQSKIKEMQQATSPLSMLQSGCQVIGEEEVEGDGALSLLQQGEQLLEENGDVLLSLQRAHEQAVKENVKMATEISRLQQRLQKLEPGLVMSSCLDEPATEFFGNTAEQTEQFLQQNRTKQVEGVTRRHVLSDLEDDEVRDLGSTGTSSVQRQEVKIEESEASVEGFSELENSEETRTESWELKNQISQLQEQLMMLCADCDRASEKKQDLLFDVSVLKKKLKMLERIPEASPKYKLLYEDVSRENDCLQEELRMMETRYDEALENNKELTAEVFRLQDELKKMEEVTETFLSLEKSYDEVKIENEGLNVLVLRLQGKIEKLQESVVQRCDCCLWEASLENLEIEPDGNILQLNQTLEECVPRVRSVHHVIEECKQENQYLEGNTQLLEKVKAHEIAWLHGTIQTHQERPRVQNQVILEENTTLLGFQDKHFQHQATIAELELEKTKLQELTRKLKERVTILVKQKDVLSHGEKEEELKAMMHDLQITCSEMQQKVELLRYESEKLQQENSILRNEITTLNEEDSISNLKLGTLNGSQEEMWQKTETVKQENAAVQKMVENLKKQISELKIKNQQLDLENTELSQKNSQNQEKLQELNQRLTEMLCQKEKEPGNSALEEREQEKFNLKEELERCKVQSSTLVSSLEAELSEVKIQTHIVQQENHLLKDELEKMKQLHRCPDLSDFQQKISSVLSYNEKLLKEKEALSEELNSCVDKLAKSSLLEHRIATMKQEQKSWEHQSASLKSQLVASQEKVQNLEDTVQNVNLQMSRMKSDLRVTQQEKEALKQEVMSLHKQLQNAGGKSWAPEIATHPSGLHNQQKRLSWDKLDHLMNEEQQLLWQENERLQTMVQNTKAELTHSREKVRQLESNLLPKHQKHLNPSGTMNPTEQEKLSLKRECDQFQKEQSPANRKVSQMNSLEQELETIHLENEGLKKKQVKLDEQLMEMQHLRSTATPSPSPHAWDLQLLQQQACPMVPREQFLQLQRQLLQAERINQHLQEELENRTSETNTPQGNQEQLVTVMEERMIEVEQKLKLVKRLLQEKVNQLKEQVSLPGHLCSPTSHSSFNSSFTSLYCH

SEQ ID NO: 23459 - protein, 1275 aa, Homo sapiens
MDEVEQDQHEARLKELFDSFDTTGTGSLGQEELTDLCHMLSLEEVAPVLQQTLLQDNLLGRVHFDQFKEALILILSRTLSNEEHFQEPDCSLEAQPKYVRGGKRYGRRSLPEFQESVEEFPEVTVIEPLDEEARPSHIPAGDCSEHWKTQRSEEYEAEGQLRFWNPDDLNASQSGSSPPQDWIEEKLQEVCEDLGITRDGHLNRKKLVSICEQYGLQNVDGEMLEEVFHNLDPDGTMSVEDFFYGLFKNGKSLTPSASTPYRQLKRHLSMQSFDESGRRTTTSSAMTSTIGFRVFSCLDDGMGHASVERILDTWQEEGIENSQEILKALDFSLDGNINLTELTLALENELLVTKNSIHQAALASFKAEIRHLLERVDQVVREKEKLRSDLDKAEKLKSLMASEVDDHHAAIERRNEYNLRKLDEEYKERIAALKNELRKEREQILQQAGKQRLELEQEIEKAKTEENYIRDRLALSLKENSRLENELLENAEKLAEYENLTNKLQRNLENVLAEKFGDLDPSSAEFFLQEERLTQMRNEYERQCRVLQDQVDELQSELEEYRAQGRVLRLPLKNSPSEEVEANSGGIEPEHGLGSEECNPLNMSIEAELVIEQMKEQHHRDICCLRLELEDKVRHYEKQLDETVVSCKKAQENMKQRHENETHTLEKQISDLKNEIAELQGQAAVLKEAHHEATCRHEEEKKQLQVKLEEEKTHLQEKLRLQHEMELKARLTQAQASFEREREGLQSSAWTEEKVRGLTQELEQFHQEQLTSLVEKHTLEKEELRKELLEKHQRELQEGRYESEKLQQENSILRNEITTLNEEDSISNLKLGTLNGSQEEMQKTETVKQENAAVQKMVENLKKQISELKIKNQQLDLENTELSQKNSQNQEKLQELNQRLTEMLCQKEKEPGNSALEEREQEKFNLKEELERCKVQSSTLVSSLEAELSEVKIQTHIVQQENHLLKDELEKMKQLHRCPDLSDFQQKISSVLSYNEKLLKEKEALSEELNSCVDKLAKSSLLEHRIATMKQEQKSWEHQSASLKSQLVASQEKVQNLEDTVQNVNLQMSRMKSDLRVTQQEKEALKQEVMSLHKQLQNAGGKSWAPEIATHPSGLHNQQKRLSWDKLDHLMNEEQQLLWQENERLQTMVQNTKAELTHSREKVRQLESNLLPKHQKHLNPSGTMNPTEQEKLSLKRECDQFQKEQSPANRKVSQMNSLEQELETIHLENEGLKKKQVKLDEQLMENSVVGSSREGCSSLPEIVCEDAAPEVHCDA

SEQ ID NO: 23460 - protein, 2133 aa, Homo sapiens
MDEVEQDQHEARLKELFDSFDTTGTGSLGQEELTDLCHMLSLEEVAPVLQQTLLQDNLLGRVHFDQFKEALILILSRTLSNEEHFQEPDCSLEAQPKYVRGGKRYGRRSLPEFQESVEEFPEVTVIEPLDEEARPSHIPAGDCSEHWKTQRSEEYEAEGQLRFWNPDDLNASQSGSSPPQDWIEEKLQEVCEDLGITRDGHLNRKKLVSICEQYGLQNVDGEMLEEVFHNLDPDGTMSVEDFFYGLFKNGKSLTPSASTPYRQLKRHLSMQSFDESGRRTTTSSAMTSTIGFRVFSCLDDGMGHASVERILDTWQEEGIENSQEILKALDFSLDGNINLTELTLALENELLVTKNSIHQAALASFKAEIRHLLERVDQVVREKEKLRSDLDKAEKLKSLMASEVDDHHAAIERRNEYNLRKLDEEYKERIAALKNELRKEREQILQQAGKQRLELEQEIEKAKTEENYIRDRLALSLKENSRLENELLENAEKLAEYENLTNKLQRNLENVLAEKFGDLDPSSAEFFLQEERLTQMRNEYERQCRVLQDQVDELQSELEEYRAQGRVLRLPLKNSPSEEVEANSGGIEPEHGLGSEECNPLNMSIEAELVIEQMKEQHHRDICCLRLELEDKVRHYEKQLDETVVSCKKAQENMKQRHENETHTLEKQISDLKNEIAELQGQAAVLKEAHHEATCRHEEEKKQLQVKLEEEKTHLQEKLRLQHEMELKARLTQAQASFEREREGLQSSAWTEEKVRGLTQELEQFHQEQLTSLVEKHTLEKEELRKELLEKHQRELQEGREKMETECNRRTSQIEAQFQSDCQKVTERCESALQSLEGRYRQELKDLQEQQREEKSQWEFEKDELTQECAEAQELLKETLKREKTTSLVLTQEREMLEKTYKEHLNSMVVERQQLLQDLEDLRNVSETQQSLLSDQILELKSSHKRELREREEVLCQAGASEQLASQRLERLEMEHDQERQEMMSKLLAMENIHKATCETADRERAEMSTEISRLQSKIKEMQQATSPLSMLQSGCQVIGEEEVEGDGALSLLQQGEQLLEENGDVLLSLQRAHEQAVKENVKMATEISRLQQRLQKLEPGLVMSSCLDEPATEFFGNTAEQTEQFLQQNRTKQVEGVTRRHVLSDLEDDEVRDLGSTGTSSVQRQEVKIEESEASVEGFSELENSEETRTESWELKNQISQLQEQLMMLCADCDRASEKKQDLLFDVSVLKKKLKMLERIPEASPKYKLLYEDVSRENDCLQEELRMMETRYDEALENNKELTAEVFRLQDELKKMEEVTETFLSLEKSYDEVKIENEGLNVLVLRLQGKIEKLQESVVQRCDCCLWEASLENLEIEPDGNILQLNQTLEECVPRVRSVHHVIEECKQENQYLEGNTQLLEKVKAHEIAWLHGTIQTHQERPRVQNQVILEENTTLLGFQDKHFQHQATIAELELEKTKLQELTRKLKERVTILVKQKDVLSHGEKEEELKAMMHDLQITCSEMQQKVELLRYESEKLQQENSILRNEITTLNEEDSISNLKLGTLNGSQEEMWQKTETVKQENAAVQKMVENLKKQISELKIKNQQLDLENTELSQKNSQNQEKLQELNQRLTEMLCQKEKEPGNSALEEREQEKFNLKEELERCKVQSSTLVSSLEAELSEVKIQTHIVQQENHLLKDELEKMKQLHRCPDLSDFQQKISSVLSYNEKLLKEKEALSEELNSCVDKLAKSSLLEHRIATMKQEQKSWEHQSASLKSQLVASQEKVQNLEDTVQNVNLQMSRMKSDLRVTQQEKEALKQEVMSLHKQLQNAGGKSWAPEIATHPSGLHNQQKRLSWDKLDHLMNEEQQLLWQENERLQTMVQNTKAELTHSREKVRQLESNLLPKHQKHLNPSGTMNPTEQEKLSLKRECDQFQKEQSPANRKVSQMNSLEQELETIHLENEGLKKKQVKLDEQLMEMQHLRSTATPSPSPHAWDLQLLQQQACPMVPREQFLQLQRQLLQAERINQHLQEELENRTSETNTPQGNQEQLVTVMEERMIEVEQKLKLVKRLLQEKVNQLKEQLCKNTKADAMVKDLYVENAQLLKALEVTEQRQKTAEKKNYLLEEKIASLSNIVRNLTPAPLTSTPPLRS

SEQ ID NO: 23461 - protein, 2052 aa, Homo sapiens
MLSLEEVAPVLQQTLLQDNLLGRVHFDQFKEALILILSRTLSNEEHFQEPDCSLEAQPKYVRGGKRYGRRSLPEFQESVEEFPEVTVIEPLDEEARPSHIPAGDCSEHWKTQRSEEYEAEGQLRFWNPDDLNASQSGSSPPQDWIEEKLQEVCEDLGITRDGHLNRKKLVSICEQYGLQNVDGEMLEEVFHNLDPDGTMSVEDFFYGLFKNGKSLTPSASTPYRQLKRHLSMQSFDESGRRTTTSSAMTSTIGFRVFSCLDDGMGHASVERILDTWQEEGIENSQEILKALDFSLDGNINLTELTLALENELLVTKNSIHQAALASFKAEIRHLLERVDQVVREKEKLRSDLDKAEKLKSLMASEVDDHHAAIERRNEYNLRKLDEEYKERIAALKNELRKEREQILQQAGKQRLELEQEIEKAKTEENYIRDRLALSLKENSRLENELLENAEKLAEYENLTNKLQRNLENVLAEKFGDLDPSSAEFFLQEERLTQMRNEYERQCRVLQDQVDELQSELEEYRAQGRVLRLPLKNSPSEEVEANSGGIEPEHGLGSEECNPLNMSIEAELVIEQMKEQHHRDICCLRLELEDKVRHYEKQLDETVVSCKKAQENMKQRHENETHTLEKQISDLKNEIAELQGQAAVLKEAHHEATCRHEEEKKQLQVKLEEEKTHLQEKLRLQHEMELKARLTQAQASFEREREGLQSSAWTEEKVRGLTQELEQFHQEQLTSLVEKHTLEKEELRKELLEKHQRELQEGREKMETECNRRTSQIEAQFQSDCQKVTERCESALQSLEGRYRQELKDLQEQQREEKSQWEFEKDELTQECAEAQELLKETLKREKTTSLVLTQEREMLEKTYKEHLNSMVVERQQLLQDLEDLRNVSETQQSLLSDQILELKSSHKRELREREEVLCQAGASEQLASQRLERLEMEHDQERQEMMSKLLAMENIHKATCETADRERAEMSTEISRLQSKIKEMQQATSPLSMLQSGCQVIGEEEVEGDGALSLLQQGEQLLEENGDVLLSLQRAHEQAVKENVKMATEISRLQQRLQKLEPGLVMSSCLDEPATEFFGNTAEQTEQFLQQNRTKQVEGVTRRHVLSDLEDDEVRDLGSTGTSSVQRQEVKIEESEASVEGFSELENSEETRTESWELKNQISQLQEQLMMLCADCDRASEKKQDLLFDVSVLKKKLKMLERIPEASPKYKLLYEDVSRENDCLQEELRMMETRYDEALENNKELTAEVFRLQDELKKMEEVTETFLSLEKSYDEVKIENEGLNVLVLRLQGKIEKLQESVVQRCDCCLWEASLENLEIEPDGNILQLNQTLEECVPRVRSVHHVIEECKQENQYLEGNTQLLEKVKAHEIAWLHGTIQTHQERPRVQNQVILEENTTLLGFQDKHFQHQATIAELELEKTKLQELTRKLKERVTILVKQKDVLSHGEKEEELKAMMHDLQITCSEMQQKVELLRYESEKLQQENSILRNEITTLNEEDSISNLKLGTLNGSQEEMWQKTETVKQENAAVQKMVENLKKQISELKIKNQQLDLENTELSQKNSQNQEKLQELNQRLTEMLCQKEKEPGNSALEEREQEKFNLKEELERCKVQSSTLVSSLEAELSEVKIQTHIVQQENHLLKDELEKMKQLHRCPDLSDFQQKISSVLSYNEKLLKEKEALSEELNSCVDKLAKSSLLEHRIATMKQEQKSWEHQSASLKSQLVASQEKVQNLEDTVQNVNLQMSRMKSDLRVTQQEKEALKQEVMSLHKQLQNAGGKSWAPEIATHPSGLHNQQKRLSWDKLDHLMNEEQQLLWQENERLQTMVQNTKAELTHSREKVRQLESNLLPKHQKHLNPSGTMNPTEQEKLSLKRECDQFQKEQSPANRKVSQMNSLEQELETIHLENEGLKKKQVKLDEQLMEMQHLRSTATPSPSPHAWDLQLLQQQACPMVPREQFLQLQRQLLQAERINQHLQEELENRTSETNTPQGNQEQLVTVMEERMIEVEQKLKLVKRLLQEKVNQLKEQVSLPGHLCSPTSHSSFNSSFTSLYCH

SEQ ID NO: 23462 - protein, 1377 aa, Homo sapiens
MDEVEQDQHEARLKELFDSFDTTGTGSLGQEELTDLCHMLSLEEVAPVLQQTLLQDNLLGRVHFDQFKEALILILSRTLSNEEHFQEPDCSLEAQPKYVRGGKRYGRRSLPEFQESVEEFPEVTVIEPLDEEARPSHIPAGDCSEHWKTQRSEEYEAEGQLRFWNPDDLNASQSGSSPPQDWIEEKLQEVCEDLGITRDGHLNRKKLVSICEQYGLQNVDGEMLEEVFHNLDPDGTMSVEDFFYGLFKNGKSLTPSASTPYRQLKRHLSMQSFDESGRRTTTSSAMTSTIGFRVFSCLDDGMGHASVERILDTWQEEGIENSQEILKALDFSLDGNINLTELTLALENELLVTKNSIHQAALASFKAEIRHLLERVDQVVREKEKLRSDLDKAEKLKSLMASEVDDHHAAIERRNEYNLRKLDEEYKERIAALKNELRKEREQILQQAGKQRLELEQEIEKAKTEENYIRDRLALSLKENSRLENELLENAEKLAEYENLTNKLQRNLENVLAEKFGDLDPSSAEFFLQEERLTQMRNEYERQCRVLQDQVDELQSELEEYRAQGRVLRLPLKNSPSEEVEANSGGIEPEHGLGSEECNPLNMSIEAELVIEQMKEQHHRDICCLRLELEDKVRHYEKQLDETVVSCKKAQENMKQRHENETHTLEKQISDLKNEIAELQGQAAVLKEAHHEATCRHEEEKKQLQVKLEEEKTHLQEKLRLQHEMELKARLTQAQASFEREREGLQSSAWTEEKVRGLTQELEQFHQEQLTSLVEKHTLEKEELRKELLEKHQRELQEGRYESEKLQQENSILRNEITTLNEEDSISNLKLGTLNGSQEEMWQKTETVKQENAAVQKMVENLKKQISELKIKNQQLDLENTELSQKNSQNQEKLQELNQRLTEMLCQKEKEPGNSALEEREQEKFNLKEELERCKVQSSTLVSSLEAELSEVKIQTHIVQQENHLLKDELEKMKQLHRCPDLSDFQQKISSVLSYNEKLLKEKEALSEELNSCVDKLAKSSLLEHRIATMKQEQKSWEHQSASLKSQLVASQEKVQNLEDTVQNVNLQMSRMKSDLRVTQQEKEALKQEVMSLHKQLQNAGGKSWAPEIATHPSGLHNQQKRLSWDKLDHLMNEEQQLLWQENERLQTMVQNTKAELTHSREKVRQLESNLLPKHQKHLNPSGTMNPTEQEKLSLKRECDQFQKEQSPANRKVSQMNSLEQELETIHLENEGLKKKQVKLDEQLMEMQHLRSTATPSPSPHAWDLQLLQQQACPMVPREQFLQLQRQLLQAERINQHLQEELENRTSETNTPQGNQEQLVTVMEERMIEVEQKLKLVKRLLQEKVNQLKEQVSLPGHLCSPTSHSSFNSSFTSLYCH

SEQ ID NO: 23463 - protein, 445 aa, Homo sapiens
MPSRAEDYEVLYTIGTGSYGRCQKIRRKSDGKILVWKELDYGSMTEAEKQMLVSEVNLLRELKHPNIVRYYDRIIDRTNTTLYIVMEYCEGGDLASVITKGTKERQYLDEEFVLRVMTQLTLALKECHRRSDGGHTVLHRDLKPANVFLDGKQNVKLGDFGLARILNHDTSFAKTFVGTPYYMSPEQMNRMSYNEKSDIWSLGCLLYELCALMPPFTAFSQKELAGKIREGKFRRIPYRYSDELNEIITRMLNLKDYHRPSVEEILENPLIADLVADEQRRNLERRGRQLGEPEKSQDSSPVLSELKLKEIQLQERERALKAREERLEQKEQELCVRERLAEDKLARAENLLKNYSLLKERKFLSLASNPELLNLPSSVIKKKVHFSGESKENIMRSENSESQLTSKSKCKDLKKRLHAAQLRAQALSDIEKNYQLKSRQILGMR

SEQ ID NO: 23464 - protein, 384 aa, Homo sapiens
MPSRAEDYEVLYTIGTGSYGRCQKIRRKSDGKILVWKELDYGSMTEAEKQMLVSEVNLLRELKHPNIVRYYDRIIDRTNTTLYIVMEYCEGGDLASVITKGTKERQYLDEEFVLRVMTQLTLALKECHRRSDGGHTVLHRDLKPANVFLDGKQNVKLGDFGLARILNHDTSFAKTFVGTPYYMSPEQMNRMSYNEKSDIWSLGCLLYELCALMPPFTAFSQKELAGKIREGKFRRIPYRYSDELNEIITRMLNLKDYHRPSVEEILENPLIADLVADEQRRNLERRGRQLGEPEKSQDSSPVLSELKLKEIQLQERERALKAREERLEQKEQELCVRERLAEDKLARAENLLKNYSLLKERKFLSLASNPGMRINLVNRSWCYK

SEQ ID NO: 23465 - protein, 326 aa, Homo sapiens
MPSRAEDYEVLYTIGTGSYGRCQKIRRKSDGKILVWKELDYGSMTEAEKQMLVSEVNLLRELKHPNIVRYYDRIIDRTNTTLYIVMEYCEGGDLASVITKGTKERQYLDEEFVLRVMTQLTLALKECHRRSDGGHTVLHRDLKPANVFLDGKQNVKLGDFGLARILNHDTSFAKTFVGTPYYMSPEQMNRMSYNEKSDIWSLGCLLYELCALMPPFTAFSQKELAGKIREGKFRRIPYRYSDELNEIITRMLNLKDYHRPSVEEILENPLIADLVADEQRRNLERRGRQLGEPEKSQDSSPVLSELKLKEIQLQERERALKAKKKK

SEQ ID NO: 23466 - protein, 437 aa, Homo sapiens
MPSRAEDYEVLYTIGTGSYGRCQKIRRKSDGKILVWKELDYGSMTEAEKQMLVSEVNLLRELKHPNIVRYYDRIIDRTNTTLYIVMEYCEGGDLASVITKGTKERQYLDEEFVLRVMTQLTLALKECHRRSDGGHTVLHRDLKPANVFLDGKQNVKLGDFGLARILNHDTSFAKTFVGTPYYMSPEQMNRMSYNEKSDIWSLGCLLYELCALMPPFTAFSQKELAGKIREGKFRRIPYRYSDELNEIITRMLNLKDYHRPSVEEILENPLIADLVADEQRRNLERRGRQLGEPEKSQDSSPVLSELKLKEIQLQERERALKAREERLEQKEQELCVRERLAEDKLARAENLLKNYSLLKERKFLSLASNPVIKKKVHFSGESKENIMRSENSESQLTSKSKCKDLKKRLHAAQLRAQALSDIEKNYQLKSRQILGMR

SEQ ID NO: 23467 - protein, 1003 aa, Homo sapiens
MNGGNESSGADRAGGPVATSVPIGWQRCVREGAVLYISPSGTELSSLEQTRSYLLSDGTCKCGLECPLNVPKVFNFDPLAPVTPGGAGVGPASEEDMTKLCNHRRKAVAMATLYRSMETTCSHSSPGEGASPQMFHTVSPGPPSARPPCRVPPTTPLNGGPGSLPPEPPSVSQAFPTLAGPGGLFPPRLADPVPSGGSSSPRFLPRGNAPSPAPPPPPAISLNAPSYNWGAALRSSLVPSDLGSPPAPHASSSPPSDPPLFHCSDALTPPPLPPSNNLPAHPGPASQPPVSSATMHLPLVLGPLGGAPTVEGPGAPPFLASSLLSAAAKAQHPPLPPPSTLQGRRPRAQAPSASHSSSLRPSQRRPRRPPTVFRLLEGRGPQTPRRSRPRAPAPVPQPFSLPEPSQPILPSVLSLLGLPTPGPSHSDGSFNLLGSDAHLPPPPTLSSGSPPQPRHPIQPSLPGTTSGSLSSVPGAPAPPAASKAPVVPSPVLQSPSEGLGMGAGPACPLPPLAGGEAFPFPSPEQGLALSGAGFPGMLGALPLPLSLGQPPPSPLLNHSLFGVLTGGGGQPPPEPLLPPPGGPGPPLAPGEPEGPSLLVASLLPPPPSDLLPPPSAPPSNLLASFLPLLALGPTAGDGEGSAEGAGGPSGEPFSGLGDLSPLLFPPLSAPPTLIALNSALLAATLDPPSGTPPQPCVLSAPQPGPPTSSVTTATTDPGASSLGKAPSNSGRPPQLLSPLLGASLLGDLSSLTSSPGALPSLLQPPGPLLSGQLGLQLLPGGGAPPPLSEASSPLACLLQSLQIPPEQPEAPCLPPESPASALEPEPARPPLSALAPPHGSPDPPVPELLTGRGSGKRGRRGGGGLRGINGEARPARGRKPGSRREPGRLALKWGTRGGFNGQMERSPRRTHHWQHNGELAEGGAEPKDPPPPGPHSEDLKVPPGVVRKSRRGRRRKYNPTRNSNSSRQDITLEPSPTARAAVPLPPRARPGRPAKNKRRKLAP

SEQ ID NO: 23468 - protein, 1286 aa, Homo sapiens
MDLEAAKNGTAWRPTSAEGDFELGISSKQKRKKTKTVKMIGVLTLFRYSDWQDKLFMSLGTIMAIAHGSGLPLMMIVFGEMTDKFVDTAGNFSFPVNFSLSLLNPGKILEEEMTRYAYYYSGLGAGVLVAAYIQVSFWTLAAGRQIRKIRQKFFHAILRQEIGWFDINDTTELNTRLTDDISKISEGIGDKVGMFFQAVATFFAGFIVGFIRGWKLTLVIMAISPILGLSAAVWAKILSAFSDKELAAYAKAGAVAEEALGAIRTVIAFGGQNKELERYQKHLENAKEIGIKKAISANISMGIAFLLIYASYALAFWYGSTLVISKEYTIGNAMTVFFSILIGAFSVGQAAPCIDAFANARGAAYVIFDIIDNNPKIDSFSERGHKPDSIKGNLEFNDVHFSYPSRANVKILKGLNLKVQSGQTVALVGSSGCGKSTTVQLIQRLYDPDEGTINIDGQDIRNFNVNYLREIIGVVSQEPVLFSTTIAENICYGRGNVTMDEIKKAVKEANAYEFIMKLPQKFDTLVGERGAQLSGGQKQRIAIARALVRNPKILLLDEATSALDTESEAEVQAALDKAREGRTTIVIAHRLSTVRNADVIAGFEDGVIVEQGSHSELMKKEGVYFKLVNMQTSGSQIQSEEFELNDEKAATRMAPNGWKSRLFRHSTQKNLKNSQMCQKSLDVETDGLEANVPPVSFLKVLKLNKTEWPYFVVGTVCAIANGGLQPAFSVIFSEIIAIFGPGDDAVKQQKCNIFSLIFLFLGIISFFTFFLQGFTFGKAGEILTRRLRSMAFKAMLRQDMSWFDDHKNSTGALSTRLATDAAQVQGATGTRLALIAQNIANLGTGIIISFIYGWQLTLLLLAVVPIIAVSGIVEMKLLAGNAKRDKKELEAAGKIATEAIENIRTVVSLTQERKFESMYVEKLYGPYRNSVQKAHIYGITFSISQAFMYFSYAGCFRFGAYLIVNGHMRFRDVILVFSAIVFGAVALGHASSFAPDYAKAKLSAAHLFMLFERQPLIDSYSEEGLKPDKFEGNITFNEVVFNYPTRANVPVLQGLSLEVKKGQTLALVGSSGCGKSTVVQLLERFYDPLAGTVFVDFGFQLLDGQEAKKLNVQWLRAQLGIVSQEPILFDCSIAENIAYGDNSRVVSQDEIVSAAKAANIHPFIETLPHKYETRVGDKGTQLSGGQKQRIAIARALIRQPQILLLDEATSALDTESEKVVQEALDKAREGRTCIVIAHRLSTIQNADLIVVFQNGRVKEHGTHQQLLAQKGIYFSMVSVQAGTQNL

SEQ ID NO: 23469 - protein, 1279 aa, Homo sapiens
MDLEAAKNGTAWRPTSAEGDFELGISSKQKRKKTKTVKMIGVLTLFRYSDWQDKLFMSLGTIMAIAHGSGLPLMMIVFGEMTDKFVDTAGNFSFPVNFSLSLLNPGKILEEEMTRYAYYYSGLGAGVLVAAYIQVSFWTLAAGRQIRKIRQKFFHAILRQEIGWFDINDTTELNTRLTDDISKISEGIGDKVGMFFQAVATFFAGFIVGFIRGWKLTLVIMAISPILGLSAAVWAKILSAFSDKELAAYAKAGAVAEEALGAIRTVIAFGGQNKELERYQKHLENAKEIGIKKAISANISMGIAFLLIYASYALAFWYGSTLVISKEYTIGNAMTVFFSILIGAFSVGQAAPCIDAFANARGAAYVIFDIIDNNPKIDSFSERGHKPDSIKGNLEFNDVHFSYPSRANVKILKGLNLKVQSGQTVALVGSSGCGKSTTVQLIQRLYDPDEGTINIDGQDIRNFNVNYLREIIGVVSQEPVLFSTTIAENICYGRGNVTMDEIKKAVKEANAYEFIMKLPQKFDTLVGERGAQLSGGQKQRIAIARALVRNPKILLLDEATSALDTESEAEVQAALDKAREGRTTIVIAHRLSTVRNADVIAGFEDGVIVEQGSHSELMKKEGVYFKLVNMQTSGSQIQSEEFELNDEKAATRMAPNGWKSRLFRHSTQKNLKNSQMCQKSLDVETDGLEANVPPVSFLKVLKLNKTEWPYFVVGTVCAIANGGLQPAFSVIFSEIIAIFGPGDDAVKQQKCNIFSLIFLFLGIISFFTFFLQGFTFGKAGEILTRRLRSMAFKAMLRQDMSWFDDHKNSTGALSTRLATDAAQVQGATGTRLALIAQNIANLGTGIIISFIYGWQLTLLLLAVVPIIAVSGIVEMKLLAGNAKRDKKELEAAGKIATEAIENIRTVVSLTQERKFESMYVEKLYGPYRNSVQKAHIYGITFSISQAFMYFSYAGCFRFGAYLIVNGHMRFRDVILVFSAIVFGAVALGHASSFAPDYAKAKLSAAHLFMLFERQPLIDSYSEEGLKPDKFEGNITFNEVVFNYPTRANVPVLQGLSLEVKKGQTLALVGSSGCGKSTVVQLLERFYDPLAGTVLLDGQEAKKLNVQWLRAQLGIVSQEPILFDCSIAENIAYGDNSRVVSQDEIVSAAKAANIHPFIETLPHKYETRVGDKGTQLSGGQKQRIAIARALIRQPQILLLDEATSALDTESEKVVQEALDKAREGRTCIVIAHRLSTIQNADLIVVFQNGRVKEHGTHQQLLAQKGIYFSMVSVQAGTQNL

SEQ ID NO: 23470 - protein, 1232 aa, Homo sapiens
MDLEAAKNGTAWRPTSAEGDFELGISSKQKRKKTKTVKMIGVLTLFRYSDWQDKLFMSLGTIMAIAHGSGLPLMMIVFGEMTDKFVDTAGNFSFPVNFSLSLLNPGKILEEEMTRYAYYYSGLGAGVLVAAYIQVSFWTLAAGRQIRKIRQKFFHAILRQEIGWFDINDTTELNTRLTDDISKISEGIGDKVGMFFQAVATFFAGFIVGFIRGWKLTLVIMAISPILGLSAAVWAKILSAFSDKELAAYAKAGAVAEEALGAIRTVIAFGGQNKELERYQKHLENAKEIGIKKAISANISMGIAFLLIYASYALAFWYGSTLVISKEYTIGNAMTVFFSILIGAFSVGQAAPCIDAFANARGAAYVIFDIIDNNPKIDSFSERGHKPDSIKGNLEFNDVHFSYPSRANVKILKGLNLKVQSGQTVALVGSSGCGKSTTVQLIQRLYDPDEGTINIDGQDIRNFNVNYLREIIGVVSQEPVLFSTTIAENICYGRGNVTMDEIKKAVKEANAYEFIMKLPQKFDTLVGERGAQLSGGQKQRIAIARALVRNPKILLLDEATSALDTESEAEVQAALDKAREGRTTIVIAHRLSTVRNADVIAGFEDGVIVEQGSHSELMKKEGVYFKLVNMQTSGSQIQSEEFELNDEKAATRMAPNGWKSRLFRHSTQKNLKNSQMCQKSLDVETDGLEANVPPVSFLKVLKLNKTEWPYFVVGTVCAIANGGLQPAFSVIFSEIIAIFGPGDDAVKQQKCNIFSLIFLFLGIISFFTFFLQGFTFGKAGEILTRRLRSMAFKAMLRQDMSWFDDHKNSTGALSTRLATDAAQVQGATGTRLALIAQNIANLGTGIIISFIYGWQLTLLLLAVVPIIAVSGIVEMKLLAGNAKRDKKELEAAGKIATEAIENIRTVVSLTQERKFESMYVEKLYGPYRVFSAIVFGAVALGHASSFAPDYAKAKLSAAHLFMLFERQPLIDSYSEEGLKPDKFEGNITFNEVVFNYPTRANVPVLQGLSLEVKKGQTLALVGSSGCGKSTVVQLLERFYDPLAGTVLLDGQEAKKLNVQWLRAQLGIVSQEPILFDCSIAENIAYGDNSRVVSQDEIVSAAKAANIHPFIETLPHKYETRVGDKGTQLSGGQKQRIAIARALIRQPQILLLDEATSALDTESEKVVQEALDKAREGRTCIVIAHRLSTIQNADLIVVFQNGRVKEHGTHQQLLAQKGIYFSMVSVQAGTQNL

SEQ ID NO: 23471 - protein, 476 aa, Homo sapiens
MANSAKAEEYEKMSLEQAKASVNSETESSFNINENTTASGTGLSEKTSVCRQVDIARKRKEFEDDLVKESSSCGKDTPSKKRKLDPEIVPEEKDCGDAEGNSKKRKRETEDVPKDKSSTGDGTQNKRKIALEDVPEKQKNLEEGHSSTVAAHYNELQEVGLEKRSQSRIFYLRNFNNWMKSVLIGEFLEKVRQKKKRDITVLDLGCGKGGDLLKWKKGRINKLVCTDIADVSVKQCQQRYEDMKNRRDSEYIFSAEFITADSSKELLIDKFRDPQMCFDICSCQFVCHYSFESYEQADMMLRNACERLSPGGYFIGTTPNSFELIRRLEASETESFGNEIYTVKFQKKGDYPLFGCKYDFNLEGVVDVPEFLVYFPLLNEMAKKYNMKLVYKKTFLEFYEEKIKNNENKMLLKRMQALEPYPANESSKLVSEKVDDYEHAAKYMKNSQVRLPLGTLSKSEWEATSIYLVFAFEKQQ

SEQ ID NO: 23472 - protein, 504 aa, Homo sapiens
MANSAKAEEYEKMSLEQAKASVNSETESSFNINENTTASGTGLSEKTSVCRQVDIARKRKEFEDDLVKESSSCGKDTPSKKRKLDPEIVPEEKDCGDAEGNSKKRKRETEDVPKDKSSTGDGTQNKRKIALEDVPEKQKNLEEGHSSTVAAHYNELQEVGLEKRSQSRIFYLRNFNNWMKSVLIGEFLEKVRQKKKRDITVLDLGCGKGGDLLKWKKGRINKLVCTDIADVSVKQCQQRYEDMKNRRDSEYIFSAEFITADSSKELLIDKFRDPQMCFDICSCQFVCHYSFESYEQADMMLRNACERLSPGGYFIGTTPNSFELIRRLEASETESFGNEIYTVKFQKKGDYPLFGCKYDFNLEGVVDVPEFLVYFPLLNEMAKKYNMKLVYKKTFLEFYEEKIKNNENKMLLKRMQALEPYPANESSKLVSEKVDDYEHAAKYMKNSQVRLPLGTLSKSEWEATRLTVTIMREAWLSTVGPGRAPVAASSVKWGTPRPAMQFIL

SEQ ID NO: 23473 - protein, 692 aa, Homo sapiens
MEKYERIRVVGRGAFGIVHLCLRKADQKLVIIKQIPVEQMTKEERQAAQNECQVLKLLNHPNVIEYYENFLEDKALMIAMEYAPGGTLAEFIQKRCNSLLEEETILHFFVQILLALHHVHTHLILHRDLKTQNILLDKHRMVVKIGDFGISKILSSKSKAYTVVGTPCYISPELCEGKPYNQKSDIWALGCVLYELASLKRAFEAANLPALVLKIMSGTFAPISDRYSPELRQLVLSLLSLEPAQRPPLSHIMAQPLCIRALLNLHTDVGSVRMRRAEKSVAPSNTGSRTTSVRCRGIPRGPVRPAIPPPLSSVYAWGGGLGTPLRLPMLNTEVVQVAAGRTQKAGVTRSGRLILWEAPPLGAGGGSLLPGAVEQPQPQFISRFLEGQSGVTIKHVACGDFFTACLTDRGIIMTFGSGSNGCLGHGSLTDISQPTIVEALLGYEMVQVACGASHVLALSTERELFAWGRGDSGRLGLGTRESHSCPQQVPMPPGQEAQRVVCGIDSSMILTVPGQALACGSNRFNKLGLDHLSLGEEPVPHQQVEEALSFTLLGSAPLDQEPLLSIDLGTAHSAAVTASGDCYTFGSNQHGQLGTNTRRGSRAPCKVQGLEGIKMAMVACGDAFTVAIGAESEVYSWGKGARGRLGRRDEDAGLPRPVQLDETHPYTVTSVSCCHGNTLLAVRSVTDEPVPP

SEQ ID NO: 23474 - protein, 847 aa, Homo sapiens
MEPLKSLFLKSPLGSWNGSGSGGGGGGGGGRPEGSPKAAGYANPVWTALFDYEPSGQDELALRKGDRVEVLSRDAAISGDEGWWAGQVGGQVGIFPSNYVSRGGGPPPCEVASFQELRLEEVIGIGGFGKVYRGSWRGELVAVKAARQDPDEDISVTAESVRQEARLFAMLAHPNIIALKAVCLEEPNLCLVMEYAAGGPLSRALAGRRVPPHVLVNWAVQIARGMHYLHCEALVPVIHRDLKSNNILLLQPIESDDMEHKTLKITDFGLAREWHKTTQMSAAGTYAWMAPEVIKASTFSKGSDVWSFGVLLWELLTGEVPYRGIDCLAVAYGVAVNKLTLPIPSTCPEPFAQLMADCWAQDPHRRPDFASILQQLEALEAQVLREMPRDSFHSMQEGWKREIQGLFDELRAKEKELLSREEELTRAAREQRSQAEQLRRREHLLAQWELEVFERELTLLLQQVDRERPHVRRRRGTFKRSKLRARDGGERISMPLDFKHRITVQASPGLDRRRNVFEVGPGDSPTFPRFRAIQLEPAEPGQAWGRQSPRRLEDSSNGERRACWAWGPSSPKPGEAQNGRRRSRMDEATWYLDSDDSSPLGSPSTPPALNGNPPRPSLEPEEPKRPVPAERGSSSGTPKLIQRALLRGTALLASLGLGRDLQPPGGPGRERGESPTTPPTPTPAPCPTEPPPSPLICFSLKTPDSPPTPAPLLLDLGIPVGQRSAKSPRREEEPRGGTVSPPPGTSRSAPGTPGTPRSPPLGLISRPRPSPLRSRIDPWSFVSAGPRPSPLPSPQPAPRRAPWTLFPDSDPFWDSPPANPFQGGPQDCRAQTKDMGAQAPWVPEAGP

SEQ ID NO: 23475 - protein, 590 aa, Homo sapiens
MEHKTLKITDFGLAREWHKTTQMSAAGTYAWMAPEVIKASTFSKGSDVWSFGVLLWELLTGEVPYRGIDCLAVAYGVAVNKLTLPIPSTCPEPFAQLMADCWAQDPHRRPDFASILQQLEALEAQVLREMPRDSFHSMQEGWKREIQGLFDELRAKEKELLSREEELTRAAREQRSQAEQLRRREHLLAQWELEVFERELTLLLQQVDRERPHVRRRRGTFKRSKLRARDGGERISMPLDFKHRITVQASPGLDRRRNVFEVGPGDSPTFPRFRAIQLEPAEPGQAWGRQSPRRLEDSSNGERRACWAWGPSSPKPGEAQNGRRRSRMDEATWYLDSDDSSPLGSPSTPPALNGNPPRPSLEPEEPKRPVPAERGSSSGTPKLIQRALLRGTALLASLGLGRDLQPPGGPGRERGESPTTPPTPTPAPCPTEPPPSPLICFSLKTPDSPPTPAPLLLDLGIPVGQRSAKSPRREEEPRGGTVSPPPGTSRSAPGTPGTPRSPPLGLISRPRPSPLRSRIDPWSFVSAGPRPSPLPSPQPAPRRAPWTLFPDSDPFWDSPPANPFQGGPQDCRAQTKDMGAQAPWVPEAGP

SEQ ID NO: 23476 - protein, 315 aa, Homo sapiens
MAALGVLESDLPSAVTLLKNLQEQVMAVTAQVKSLTQKVQAGAYPTEKGLSFLEVKDQLLLMYLMDLTHLILDKASGGSLQGHDAVLRLVEIRTVLEKLRPLDQKLKYQIDKLIKTAVTGSLSENDPLRFKPHPSNMMSKLSSEDEEEDEAEDDQSEASGKKSVKGVSKKYVPPRLVPVHYDETEAEREKKRLERAKRRALSSSVIRELKEQYSDAPEEIRDARHPHVTRQSQEDQHRINYEESMMVRLSVSKREKGRRKRANVMSSQLHSLTHFSDISALTGGTVHLDEDQNPIKKRKKIPQKGRKKKGFRRRR

SEQ ID NO: 23477 - protein, 311 aa, Homo sapiens
MAALGVLESDLPSAVTLLKNLQEQVMAVTAQVKSLTQKVQAGAYPTEKGLSFLEVKDQLLLMYLMDLTHLILDKASGGSLQGHDAVLRLVEIRTVLEKLRPLDQKLKYQIDKLIKTAVTGSLSENDPLRFKPHPSNMMSKLSSEDEEEDEAEDDQSEASGKKSVKGVSKKYVPPRLVPVHYDETEAEREKKRLERAKRRALSSSVIRELKEQYSDAPEEIRDARHPHVTRQSQEDQHRINYEESMMVRLSVSKREKGRRKRANVMSSQLHSLTHFSDISALTGGTVHLDEDQNPIKKRKKIPQKGRKKKGQ

SEQ ID NO: 23478 - protein, 337 aa, Homo sapiens
MGAAGSSALARFVLLAQSRPGWLGVAALGLTAVALGAVAWRRAWPTRRRRLLQQVGTVAQLWIYPVKSCKGVPVSEAECTAMGLRSGNLRDRFWLVINQEGNMVTARQEPRLVLISLTCDGDTLTLSAAYTKDLLLPIKTPTTNAVHKCRVHGLEIEGRDCGEATAQWITSFLKSQPYRLVHFEPHMRPRRPHQIADLFRPKDQIAYSDTSPFLILSEASLADLNSRLEKKVKATNFRPNIVISGCDVYAEDSWDELLIGDVELKRVMACSRCILTTVDPDTGVMSRKEPLETLKSYRQCDPSERKLYGKSPLFGQYFVLENPGTIKVGDPVYLLGQ

SEQ ID NO: 23479 - protein, 354 aa, Homo sapiens
MGAAGSSALARFVLLAQSRPGWLGVAALGLTAVALGAVAWRRAWPTRRRRLLQQVGTVAQLWIYPVKSCKGVPVSEAECTAMGLRSGNLRDRFWLVINQEGNMVTARQEPRLVLISLTCDGDTLTLSAAYTKDLLLPIKTPTTNAVHKCRVHGLEIEGRDCGEATAQWITSFLKSQPYRLVHFEPHMRPRRPHQIADLFRPKDQIAYSDTSPFLILSEASLADLNSRLEKKVKATNFRPNIVISGCDVYAEVTLCPFGSFLGFDFFFKDSWDELLIGDVELKRVMACSRCILTTVDPDTGVMSRKEPLETLKSYRQCDPSERKLYGKSPLFGQYFVLENPGTIKVGDPVYLLGQ

SEQ ID NO: 23480 - protein, 252 aa, Homo sapiens
MVTARQEPRLVLISLTCDGDTLTLSAAYTKDLLLPIKTPTTNAVHKCRVHGLEIEGRDCGEATAQWITSFLKSQPYRLVHFEPHMRPRRPHQIADLFRPKDQIAYSDTSPFLILSEASLADLNSRLEKKVKATNFRPNIVISGCDVYAEVTLCPFGSFLGFDFFFKDSWDELLIGDVELKRVMACSRCILTTVDPDTGVMSRKEPLETLKSYRQCDPSERKLYGKSPLFGQYFVLENPGTIKVGDPVYLLGQ

SEQ ID NO: 23481 - protein, 410 aa, Homo sapiens
MGAQVRLPPGEPCREGYVLSLVCPNSSQAWCEITNVSQLLASPVLYTDLNYSINNLSISANVENKYSLYVGLVLAVSSSIFIGSSFILKKKGLLQLASKGFTRAGQGGHSYLKEWLWWVGLLSMGAGEAANFAAYAFAPATLVTPLGALSVLISAILSSYFLNEHLNIHGKIGCILSILGSTVMVIHAPQEEEVTSLHEMEMKLRDPGFISFAVIITVISLVLILIVAPKKGQTNILVYISICSLIGAFSVSSVKGLGIAIKELIEWKPVYKHPLVFVLLAVLVLSVTTQINYLNKALDTFNTSLVTPIYYVFFTSMVVTCSAILFQEWYGMTAGDIIGTLSGFFTIIIGIFLLHAFKNTDITWSELTSTAKKEAVSLNVNENNYVLLENLECSAPGYNDDVTLFSRTDD

SEQ ID NO: 23482 - protein, 840 aa, Homo sapiens
MNGEYRGRGFGRGRFQSWKRGRGGGNFSGKWREREHRPDLSKTTGKRTSEQTPQFLLSTKTPQSMQSTLDRFIPYKGWKLYFSEVYSDSSPLIEKIQAFEKFFTRHIDLYDKDEIERKGSILVDFKELTEGGEVTNLIPDIATELRDAPEKTLACMGLAIHQVLTKDLERHAAELQAQEGLSNDGETMVNVPHIHARVYNYEPLTQLKNVRANYYGKYIALRGTVVRVSNIKPLCTKMAFLCAACGEIQSFPLPDGKYSLPTKCPVPVCRGRSFTALRSSPLTVTMDWQSIKIQELMSDDQREAGRIPRTIECELVHDLVDSCVPGDTVTITGIVKVSNAEEGSRNKNDKCMFLLYIEANSISNSKGQKTKSSEDGCKHGMLMEFSLKDLYAIQEIQAEENLFKLIVNSLCPVIFGHELVKAGLALALFGGSQKYADDKNRIPIRGDPHILVVGDPGLGKSQMLQAACNVAPRGVYVCGNTTTTSGLTVTLSKDSSSGDFALEAGALVLGDQGICGIDEFDKMGNQHQALLEAMEQQSISLAKAGVVCSLPARTSIIAAANPVGGHYNKAKTVSENLKMGSALLSRFDLVFILLDTPNEHHDHLLSEHVIAIRAGKQRTISSATVARMNSQDSNTSVLEVVSEKPLSERLKVVPGETIDPIPHQLLRKYIGYARQYVYPRLSTEAARVLQDFYLELRKQSQRLNSSPITTRQLESLIRLTEARARLELREEATKEDAEDIVEIMKYSMLGTYSDEFGNLDFERSQHGSGMSNRSTAKRFISALNNVAERTYNNIFQFHQLRQIAKELNIQVADFENFIGSLNDQGYLLKKGPKVYQLQTM

SEQ ID NO: 23483 - protein, 793 aa, Homo sapiens
MNGEYRGRGFGRGRFQSWKRGRGGGNFSGKWREREHRPDLSKTTGKRTSEQTPQFLLSTKTPQSMQSTLDRFIPYKGWKLYFSEVYSDSSPLIEKIQAFEKFFTRHIDLYDKDEIERKGSILVDFKELTEGGEVTNLIPDIATELRDAPEKTLACMGLAIHQVLTKDLERHAAELQAQEGLSNDGETMVNVPHIHARVYNYEPLTQLKNVRANYYGKYIALRGTVVRVSNIKPLCTKMAFLCAACGEIQSFPLPDGKYSLPTKCPVPVCRGRSFTALRSSPLTVTMDWQSIKIQELMSDDQREAGRIPRTIECELVHDLVDSCVPGDTVTITGIVKVSNAEEGSRNKNDKCMFLLYIEANSISNSKGQKTKSSEDGCKHGMLMEFSLKDLYAIQEIQAEENLFKLIVNSLCPVIFGHEAACNVAPRGVYVCGNTTTTSGLTVTLSKDSSSGDFALEAGALVLGDQGICGIDEFDKMGNQHQALLEAMEQQSISLAKAGVVCSLPARTSIIAAANPVGGHYNKAKTVSENLKMGSALLSRFDLVFILLDTPNEHHDHLLSEHVIAIRAGKQRTISSATVARMNSQDSNTSVLEVVSEKPLSERLKVVPGETIDPIPHQLLRKYIGYARQYVYPRLSTEAARVLQDFYLELRKQSQRLNSSPITTRQLESLIRLTEARARLELREEATKEDAEDIVEIMKYSMLGTYSDEFGNLDFERSQHGSGMSNRSTAKRFISALNNVAERTYNNIFQFHQLRQIAKELNIQVADFENFIGSLNDQGYLLKKGPKVYQLQTM

SEQ ID NO: 23484 - protein, 824 aa, Homo sapiens
MNGEYRGRGFGRGRFQSWKRGRGGGNFSGKWREREHRPDLSKTTGKRTSEQTPQFLLSTKTPQSMQSTLDRFIPYKGWKLYFSEVYSDSSPLIEKIQAFEKFFTRHIDLYDKDEIERKGSILVDFKELTEGGEVTNLIPDIATELRDAPEKTLACMGLAIHQVLTKDLERHAAELQAQEGLSNDGETMVNVPHIHARVYNYEPLTQLKNVRANYYGKYIALRGTVVRVSNIKPLCTKMAFLCAACGEIQSFPLPDGKYSLPTKCPVPVCRGRSFTALRSSPLTVTMDWQSIKIQELMSDDQREAGRIPRTIECELVHDLVDSCVPGDTVTITGIVKVSNAEEANSISNSKGQKTKSSEDGCKHGMLMEFSLKDLYAIQEIQAEENLFKLIVNSLCPVIFGHELVKAGLALALFGGSQKYADDKNRIPIRGDPHILVVGDPGLGKSQMLQAACNVAPRGVYVCGNTTTTSGLTVTLSKDSSSGDFALEAGALVLGDQGICGIDEFDKMGNQHQALLEAMEQQSISLAKAGVVCSLPARTSIIAAANPVGGHYNKAKTVSENLKMGSALLSRFDLVFILLDTPNEHHDHLLSEHVIAIRAGKQRTISSATVARMNSQDSNTSVLEVVSEKPLSERLKVVPGETIDPIPHQLLRKYIGYARQYVYPRLSTEAARVLQDFYLELRKQSQRLNSSPITTRQLESLIRLTEARARLELREEATKEDAEDIVEIMKYSMLGTYSDEFGNLDFERSQHGSGMSNRSTAKRFISALNNVAERTYNNIFQFHQLRQIAKELNIQVADFENFIGSLNDQGYLLKKGPKVYQLQTM

SEQ ID NO: 23485 - protein, 880 aa, Homo sapiens
MNGEYRGRGFGRGRFQSWKRGRGGGNFSGKWREREHRPDLSKTTGKRTSEQTPQFLLSTKTPQSMQSTLDRFIPYKGWKLYFSEVYSDSSPLIEKIQAFEKFFTRHIDLYDKDEIERKGSILVDFKELTEGGEVTNLIPDIATELRDAPEKTLACMGLAIHQVLTKDLERHAAELQAQEGLSNDGETMVNVPHIHARVYNYEPLTQLKNVRANYYGKYIALRGTVVRVSNIKPLCTKMAFLCAACGEIQSFPLPDGKYSLPTKCPVPVCRGRSFTALRSSPLTVTMDWQSIKIQELMSDDQREAGRIPRTIECELVHDLVDSCVPGDTVTITGIVKVSNAEEGSRNKNDKCMFLLYIEANSISNSKGQKTKSSEDGCKHGMLMEFSLKDLYAIQEIQAEENLFKLIVKWSLALSPRLEYSGAISAHCNLHLPSSNSSPTSACRVAGTTGMRHQTQLLLLVKAGLALALFGGSQKYADDKNRIPIRGDPHILVVGDPGLGKSQMLQAACNVAPRGVYVCGNTTTTSGLTVTLSKDSSSGDFALEAGALVLGDQGICGIDEFDKMGNQHQALLEAMEQQSISLAKAGVVCSLPARTSIIAAANPVGGHYNKAKTVSENLKMGSALLSRFDLVFILLDTPNEHHDHLLSEHVIAIRAGKQRTISSATVARMNSQDSNTSVLEVVSEKPLSERLKVVPGETIDPIPHQLLRKYIGYARQYVYPRLSTEAARVLQDFYLELRKQSQRLNSSPITTRQLESLIRLTEARARLELREEATKEDAEDIVEIMKYSMLGTYSDEFGNLDFERSQHGSGMSNRSTAKRFISALNNVAERTYNNIFQFHQLRQIAKELNIQVADFENFIGSLNDQGYLLKKGPKVYQLQTM

SEQ ID NO: 23486 - protein, 1143 aa, Homo sapiens
MNSDQVTLVGQVFESYVSEYHKNDILLILKERDEDAHYPVVVNAMTLFETNMEIGEYFNMFPSEVLTIFDSALRRSALTILQSLSQPEAVSMKQNLHARISGLPVCPELVREHIPKTKDVGHFLSVTGTVIRTSLVKVLEFERDYMCNKCKHVFVIKADFEQYYTFCRPSSCPSLESCDSSKFTCLSGLSSSPTRCRDYQEIKIQEQVQRLSVGSIPRSMKVILEDDLVDSCKSGDDLTIYGIVMQRWKPFQQDVRCEVEIVLKANYIQVNNEQSSGIIMDEEVQKEFEDFWEYYKSDPFAGRNVILASLCPQVFGMYLVKLAVAMVLAGGIQRTDATGTRVRGESHLLLVGDPGTGKSQFLKYAAKITPRSVLTTGIGSTSAGLTVTAVKDSGEWNLEAGALVLADAGLCCIDEFNSLKEHDRTSIHEAMEQQTISVAKAGLVCKLNTRTTILAATNPKGQYDPQESVSVNIALGSPLLSRFDLILVLLDTKNEDWDRIISSFILENKGYPSKSEKLWSMEKMKTYFCLIRNLQPTLSDVGNQVLLRYYQMQRQSDCRNAARTTIRLLESLIRLAEAHARLMFRDTVTLEDAITVVSVMESSMQGGALLGGVNALHTSFPENPGEQYQRQCELILEKLELQSLLSEELRRLERLQNQSVHQSQPRVLEVETTPGSLRNGPGEESNFRTSSQQEINYSTHIFSPGGSPEGSPVLDPPPHLEPNRSTSRKHSAQHKNNRDDSLDWFDFMATHQSEPKNTVVVSPHPKTSGENMASKISNSTSQGKEKSEPGQRSKVDIGLLPSPGETGVPWRADNVESNKKKRLALDSEAAVSADKPDSVLTHHVPRNLQKLCKERAQKLCRNSTRVPAQCTVPSHPQSTPVHSPDRMLDSPKRKRPKSLAQVEEPAIENVKPPGSPVAKLAKFTFKQKSKLIHSFEDHSHVSPGATKIAVHSPKISQRRTRRDAALPVKRPGKLTSTPGNQISSQPQGETKEVSQQPPEKHGPREKVMCAPEKRIIQPELELGNETGCAHLTCEGDKKEEVSGSNKSGKVHACTLARLANFCFTPPSESKSKSPPPERKNRGERGPSSPPTTTAPMRVSKRKSFQLRGSTEKLIVSKESLFTLPELGDEAFDCDWDEEMRKKS

SEQ ID NO: 23487 - protein, 648 aa, Homo sapiens
MNSDQVTLVGQVFESYVSEYHKNDILLILKERDEDAHYPVVVNAMTLFETNMEIGEYFNMFPSEVLTIFDSALRRSALTILQSLSQPEAVSMKQNLHARISGLPVCPELVREHIPKTKDVGHFLSVTGTVIRTSLVKVLEFERDYMCNKCKHVFVIKADFEQYYTFCRPSSCPSLESCDSSKFTCLSGLSSSPTRCRDYQEIKIQEQVQRLSVGSIPRSMKVILEDDLVDSCKSGDDLTIYGIVMQRWKPFQQDVRCEVEIVLKANYIQVNNEQSSGIIMDEEVQKEFEDFWEYYKSDPFAGRNVILASLCPQVFGMYLVKLAVAMVLAGGIQRTDATGTRVRGESHLLLVGDPGTGKSQFLKYAAKITPRSVLTTGIGSTSAGLTVTAVKDSGEWNLEAGALVLADAGLCCIDEFNSLKEHDRTSIHEAMEQQTISVAKAGLVCKLNTRTTILAATNPKGQYDPQESVSVNIALGSPLLSRFDLILVLLDTKNEDWDRIISSFILENKGYPSKSEKLWSMEKMKTYFCLIRNLQPTLSDVGNQVLLRYYQMQRQSDCRNAARTTIRLLESLIRLAEAHARLMFRDTVTLEDAITVVSVMESSMQVTESECAPIPTTGIGGRDYSRILEKWSRGRIKLQNFITAGNQL

SEQ ID NO: 23488 - protein, 391 aa, Homo sapiens
MNSDQVTLVGQVFESYVSEYHKNDILLILKERDEDAHYPVVVNAMTLFETNMEIGEYFNMFPSEVLTIFDSALRRSALTILQSLSQPEAVSMKQNLHARISGLPVCPELVREHIPKTKDVGHFLSVTGTVIRTSLVKVLEFERDYMCNKCKHVFVIKADFEQYYTFCRPSSCPSLESCDSSKFTCLSGLSSSPTRCRDYQEIKIQEQVQRLSVGSIPRSMKVILEDDLVDSCKSGDDLTIYGIVMQRWKPFQQDVRCEVEIVLKANYIQVNNEQSSGIIMDEEVQKEFEDFWEYYKSDPFAGRNVILASLCPQVFGMYLVKLAVAMVLAGGIQRTDATGTRVRGESHLLLVGDPGTGKSQFLKYAAKITPRSVLTTGIGSTSAGIVCDNFK

SEQ ID NO: 23489 - protein, 762 aa, Homo sapiens
MSGLTVTAVKDSGEWNLEAGALVLADAGLCCIDEFNSLKEHDRTSIHEAMEQQTISVAKAGLVCKLNTRTTILAATNPKGQYDPQESVSVNIALGSPLLSRFDLILVLLDTKNEDWDRIISSFILENKGYPSKSEKLWSMEKMKTYFCLIRNLQPTLSDVGNQVLLRYYQMQRQSDCRNAARTTIRLLESLIRLAEAHARLMFRDTVTLEDAITVVSVMESSMQGGALLGGVNALHTSFPENPGEQYQRQCELILEKLELQSLLSEELRRLERLQNQSVHQSQPRVLEVETTPGSLRNGPGEESNFRTSSQQEINYSTHIFSPGGSPEGSPVLDPPPHLEPNRSTSRKHSAQHKNNRDDSLDWFDFMATHQSEPKNTVVVSPHPKTSGENMASKISNSTSQGKEKSEPGQRSKVDIGLLPSPGETGVPWRADNVESNKKKRLALDSEAAVSADKPDSVLTHHVPRNLQKLCKERAQKLCRNSTRVPAQCTVPSHPQSTPVHSPDRMLDSPKRKRPKSLAQVEEPAIENVKPPGSPVAKLAKFTFKQKSKLIHSFEDHSHVSPGATKIAVHSPKISQRRTRRDAALPVKRPGKLTSTPGNQISSQPQGETKEVSQQPPEKHGPREKVMCAPEKRIIQPELELGNETGCAHLTCEGDKKEEVSGSNKSGKVHACTLARLANFCFTPPSESKSKSPPPERKNRGERGPSSPPTTTAPMRVSKRKSFQLRGSTEKLIVSKESLFTLPELGDEAFDCDWDEEMRKKS

SEQ ID NO: 23490 - protein, 1313 aa, Homo sapiens
MESGGGNAPAGALGAASESPQCPPPPGVEGAAGPAEPDGAAEGAAGGSGEGESGGGPRRALRAVYVRSESSQGGAAGGPEAGARQCLLRACEAEGAHLTSVPFGELDFGETAVLDAFYDADVAVVDMSDVSRQPSLFYHLGVRESFDMANNVILYHDTDADTALSLKDMVTQKNTASSGNYYFIPYIVTPCADYFCCESDAQRRASEYMQPNWDNILGPLCMPLVDRFISLLKDIHVTSCVYYKETLLNDIRKAREKYQGEELAKELARIKLRMDNTEVLTSDIIINLLLSYRDIQDYDAMVKLVETLEMLPTCDLADQHNIKFHYAFALNRRNSTGDREKALQIMLQVLQSCDHPGPDMFCLCGRIYKDIFLDSDCKDDTSRDSAIEWYRKGFELQSSLYSGINLAVLLIVAGQQFETSLELRKIGVRLNSLLGRKGSLEKMNNYWDVGQFFSVSMLAHDVGKAVQAAERLFKLKPPVWYLRSLVQNLLLIRRFKKTIIEHSPRQERLNFWLDIIFEATNEVTNGLRFPVLVIEPTKVYQPSYVSINNEAEERTVSLWHVSPTEMKQMHEWNFTASSIKGISLSKFDERCCFLYVHDNSDDFQIYFSTEEQCSRFFSLVKEMITNTAGSTVELEGETDGDTLEYEYDHDANGERVVLGKGTYGIVYAGRDLSNQVRIAIKEIPERDSRYSQPLHEEIALHKYLKHRNIVQYLGSVSENGYIKIFMEQVPGGSLSALLRSKWGPMKEPTIKFYTKQILEGLKYLHENQIVHRDIKGDNVLVNTYSGVVKISDFGTSKRLAGVNPCTETFTGTLQYMAPEIIDQGPRGYGAPADIWSLGCTIIEMATSKPPFHELGEPQAAMFKVGMFKIHPEIPEALSAEARAFILSCFEPDPHKRATTAELLREGFLRQVNKGKKNRIAFKPSEGPRGVVLALPTQGEPMATSSSEHGSVSPDSDAQPDALFERTRAPRHHLGHLLSVPDESSALEDRGLASSPEDRDQGLFLLRKDSERRAILYKILWEEQNQVASNLQECVAQSSEELHLSVGHIKQIIGILRDFIRSPEHRVMATTISKLKVDLDFDSSSISQIHLVLFGFQDAVNKILRNHLIRPHWMFAMDNIIRRAVQAAVTILIPELRAHFEPTCETEGVDKDMDEAEEGYPPATGPGQEAQPHQQHLSLQLGELRQETNRLLEHLVEKEREYQNLLRQTLEQKTQELYHLQLKLKSNCITENPAGPYGQRTDKELIDWLRLQGADAKTIEKIVEEGYTLSDILNEITKEDLRYLRLRGGLLCRLWSAVSQYRRAQEASETKDKA

SEQ ID NO: 23491 - protein, 748 aa, Homo sapiens
MKQMHEWNFTASSIKGISLSKFDERCCFLYVHDNSDDFQIYFSTEEQCSRFFSLVKEMITNTAGSTVELEGETDGDTLEYEYDHDANGERVVLGKGTYGIVYAGRDLSNQVRIAIKEIPERDSRYSQPLHEEIALHKYLKHRNIVQYLGSVSENGYIKIFMEQVPGGSLSALLRSKWGPMKEPTIKFYTKQILEGLKYLHENQIVHRDIKGDNVLVNTYSGVVKISDFGTSKRLAGVNPCTETFTGTLQYMAPEIIDQGPRGYGAPADIWSLGCTIIEMATSKPPFHELGEPQAAMFKVGMFKIHPEIPEALSAEARAFILSCFEPDPHKRATTAELLREGFLRQVNKGKKNRIAFKPSEGPRGVVLALPTQGEPMATSSSEHGSVSPDSDAQPDALFERTRAPRHHLGHLLSVPDESSALEDRGLASSPEDRDQGLFLLRKDSERRAILYKILWEEQNQVASNLQECVAQSSEELHLSVGHIKQIIGILRDFIRSPEHRVMATTISKLKVDLDFDSSSISQIHLVLFGFQDAVNKILRNHLIRPHWMFAMDNIIRRAVQAAVTILIPELRAHFEPTCETEGVDKDMDEAEEGYPPATGPGQEAQPHQQHLSLQLGELRQETNRLLEHLVEKEREYQNLLRQTLEQKTQELYHLQLKLKSNCITENPAGPYGQRTDKELIDWLRLQGADAKTIEKIVEEGYTLSDILNEITKEDLRYLRLRGGLLCRLWSAVSQYRRAQEASETKDKA

SEQ ID NO: 23492 - protein, 788 aa, Homo sapiens
MACLTHRNETDARMEFYSLFHKGNKAGVQWHDLGSLQPLPPRFKRFSCLSLQSSWDYSLSKFDERCCFLYVHDNSDDFQIYFSTEEQCSRFFSLVKEMITNTAGSTVELEGETDGDTLEYEYDHDANGERVVLGKGTYGIVYAGRDLSNQVRIAIKEIPERDSRYSQPLHEEIALHKYLKHRNIVQYLGSVSENGYIKIFMEQVPGGSLSALLRSKWGPMKEPTIKFYTKQILEGLKYLHENQIVHRDIKGDNVLVNTYSGVVKISDFGTSKRLAGVNPCTETFTGTLQYMAPEIIDQGPRGYGAPADIWSLGCTIIEMATSKPPFHELGEPQAAMFKVGMFKIHPEIPEALSAEARAFILSCFEPDPHKRATTAELLREGFLRQVNKGKKNRIAFKPSEGPRGVVLALPTQGEPMATSSSEHGSVSPDSDAQPDALFERTRAPRHHLGHLLSVPDESSALEDRGLASSPEDRDQGLFLLRKDSERRAILYKILWEEQNQVASNLQECVAQSSEELHLSVGHIKQIIGILRDFIRSPEHRVMATTISKLKVDLDFDSSSISQIHLVLFGFQDAVNKILRNHLIRPHWMFAMDNIIRRAVQAAVTILIPELRAHFEPTCETEGVDKDMDEAEEGYPPATGPGQEAQPHQQHLSLQLGELRQETNRLLEHLVEKEREYQNLLRQTLEQKTQELYHLQLKLKSNCITENPAGPYGQRTDKELIDWLRLQGADAKTIEKIVEEGYTLSDILNEITKEDLRYLRLRGGLLCRLWSAVSQYRRAQEASETKDKA

SEQ ID NO: 23493 - protein, 800 aa, Homo sapiens
MSSLGASFVQIKFDDLQFFENCGGGSFGSVYRAKWISQDKEVAVKKLLKIEKEAEILSVLSHRNIIQFYGVILEPPNYGIVTEYASLGSLYDYINSNRSEEMDMDHIMTWATDVAKGMHYLHMEAPVKVIHRDLKSRNVVIAADGVLKICDFGASRFHNHTTHMSLVGTFPWMAPEVIQSLPVSETCDTYSYGVVLWEMLTREVPFKGLEGLQVAWLVVEKNERLTIPSSCPRSFAELLHQCWEADAKKRPSFKQIISILESMSNDTSLPDKCNSFLHNKAEWRCEIEATLERLKKLERDLSFKEQELKERERRLKMWEQKLTEQSNTPLLPSFEIGAWTEDDVYCWVQQLVRKGDSSAEMSVYASLFKENNITGKRLLLLEEEDLKDMGIVSKGHIIHFKSAIEKLTHDYINLFHFPPLIKDSGGEPEENEEKIVNLELVFGFHLKPGTGPQDCKWKMYMEMDGDEIAITYIKDVTFNTNLPDAEILKMTKPPFVMEKWIVGIAKSQTVECTVTYESDVRTPKSTKHVHSIQWSRTKPQDEVKAVQLAIQTLFTNSDGNPGSRSDSSADCQWLDTLRMRQIASNTSLQRSQSNPILGSPFFSHFDGQDSYAAAVRRPQVPIKYQQITPVNQSRSSSPTQYGLTKNFSSLHLNSRDSGFSSGNTDTSSERGRYSDRSRNKYGRGSISLNSSPRGRYSGKSQHSTPSRGRYPGKFYRVSQSALNPHQSPDFKRSPRDLHQPNTIPGMPLHPETDSRASEEDSKVSEGGWTKVEYRKKPHRPSPAKTNKERARGDHRGWRNF

SEQ ID NO: 23494 - protein, 455 aa, Homo sapiens
MSSLGASFVQIKFDDLQFFENCGGGSFGSVYRAKWISQDKEVAVKKLLKIEKEAEILSVLSHRNIIQFYGVILEPPNYGIVTEYASLGSLYDYINSNRSEEMDMDHIMTWATDVAKGMHYLHMEAPVKVIHRDLKSRNVVIAADGVLKICDFGASRFHNHTTHMSLVGTFPWMAPEVIQSLPVSETCDTYSYGVVLWEMLTREVPFKGLEGLQVAWLVVEKNERLTIPSSCPRSFAELLHQCWEADAKKRPSFKQIISILESMSNDTSLPDKCNSFLHNKAEWRCEIEATLERLKKLERDLSFKEQELKERERRLKMWEQKLTEQSNTPLLLPLAARMSEESYFESKTEESNSAEMSCQITATSNGEGHGMNPSLQAMMLMGFGDIFSMNKAGAVMHSGMQINMQAKQNSSKTTSKRRGKKVNMALGFSDFDLSEGDDDDDDDGEEEDNDMDNSE

SEQ ID NO: 23495 - protein, 312 aa, Homo sapiens
MSSLGASFVQIKFDDLQFFENCGGGSFGSVYRAKWISQDKEVAVKKLLKIEKEAEILSVLSHRNIIQFYGVILEPPNYGIVTEYASLGSLYDYINSNRSEEMDMDHIMTWATDVAKGMHYLHMEAPVKVIHRDLKSRNVVIAADGVLKICDFGASRFHNHTTHMSLVGTFPWMAPEVIQSLPVSETCDTYSYGVVLWEMLTREVPFKGLEGLQVAWLVVEKNERLTIPSSCPRSFAELLHQCWEADAKKRPSFKQIISILESMSNDTSLPDKCNSFLHNKAEWRWVAPTAGHSVWLSKTITRLNEEVNQRSE

SEQ ID NO: 23496 - protein, 1742 aa, Homo sapiens
MMEGNGTENSCSRTRGWLQQDNDAKPWLWKFSNCFSRPEQTLPHSPQTKEYMENKKVAVELKDVPSPLHAGSKLFPAVPLPDIRSLQQPKIQLSSVPKVSCCAHCPNEPSTSPMRFGGGGGGSGGTSSLIHPGALLDSQSTRTITCQVGSGFAFQSASSLQNASARNNLAGIASDFPSMCLESNLSSCKHLPCCGKLHFQSCHGNVHKLHQFPSLQGCTSAGYFPCSDFTSGAPGHLEEHISQSELTPHLCTNSLHLNVVPPVCLKGSLYCEDCLNKPARNSIIDAAKVWPNIPPPNTQPAPLAVPLCNGCGTKGTGKETTLLLATSLGKAASKFGSPEVAVAGQVLENLPPIGVFWDIENCSVPSGRSATAVVQRIREKFFKGHREAEFICVCDISKENKEVIQELNNCQVTVAHINATAKNAADDKLRQSLRRFANTHTAPATVVLVSTDVNFALELSDLRHRHGFHIILVHKNQASEALLHHANELIRFEEFISDLPPRLPLKMPQCHTLLYVYNLPANKDGKSVSNRLRRLSDNCGGKVLSITGCSAILRFINQDSAERAQKRMENEDVFGNRIIVSFTPKNRELCETKSSNAIADKVKSPKKLKNPKLCLIKDASEQSSSAKATPGKGSQANSGSATKNTNVKSLQELCRMESKTGHRNSEHQQGHLRLVVPTHGNSSAAVSTPKNSGVAEPVYKTSQKKENLSARSVTSSPVEKKDKEETVFQVSYPSAFSKLVASRQVSPLLASQSWSSRSMSPNLLNRASPLAFNIANSSSEADCPDPFANGADVQVSNIDYRLSRKELQQLLQEAFARHGKVKSVELSPHTDYQLKAVVQMENLQDAIGAVNSLHRYKIGSKKILVSLATGAASKSLSLLSAETMSVLQDAPACCLPLFKFTDIYEKKFGHKLNVSDLYKLTDTVAIREQGNGRLVCLLPSSQARQSPLGSSQSHDGSSTNCSPIIFEELEYHEPVCRQHCSNKDFSEHEFDPDSYKIPFVILSLKTFAPQVHSLLQTHEGTVPLLSFPDCYIAEFGDLEVVQENQGGVPLEHFITCVPGVNIATAQNGIKVVKWIHNKPPPPNTDPWLLRSKSPVGNPQLIQFSREVIDLLKSQPSCVIPISHFIPSYHHHFAKQCRVSDYGYSKLIELLEAVPHVLQILGMGSKRLLTLTHRAQVKRFTQDLLKLLKSQASKQVIVREFSQAYHWCFSKDWDVTEYGVCELIDIVSEIPDTTICLSQQDNEMVICIPKRERTQDEIERTKQFSKDVVDLLRHQPHFRMPFNKFIPSYHHHFGRQCKLAYYGFTKLLELFEAIPDTLQVLECGEEKILTLTEVERFKALAAQFVKLLRSQKDNCLMMTDLLTEYAKTFGYTFRLQDYDVSSISALTQKLCHVVKVADIESGRQIQLINRKSLRSLTAQLLVLLMSWEGTTHLSVEELKRHYESTHNTPLNPCEYGFMTLTELLKSLPYLVEVFTNDKMEECVKLTSLYLFAKNVRSLLHTYHYQQIFLHEFSMAYTKYVGETLQPKTYGHSSVEELLGAIPQVVWIKGHGHKRIVVLKNDMKSRLSSLSLSPANHENQPSEGERILEVPESHTASELKLGADGSGPSHTEQELLRLTDDSPVDLLCAPVPSCLPSPQLRPDPVILQSADLIQFEERPQEPSEIMILNQEEKMEIPIPGKSKTLTSDSSSSCISAAVPVPPCPSSETSESLLSKDPVESPAKKQPKNRVKLAANFSLAPITKL

SEQ ID NO: 23497 - protein, 1683 aa, Homo sapiens
MMEGNGTENSCSRTRGWLQQDNDAKPWLWKFSNCFSRPEQTLPHSPQTKEYMENKKVAVELKDVPSPLHAGSKLFPAVPLPDIRSLQQPKIQLSSVPKVSCCAHCPNEPSTSPMRFGGGGGGSGGTSSLIHPGALLDSQSTRTITCQVGSGFAFQSASSLQNASARNNLAGIASDFPSMCLESNLSSCKHLPCCGKLHFQSCHGNVHKLHQFPSLQGCTSAGYFPCSDFTSGAPGHLEEHISQSELTPHLCTNSLHLNVVPPVCLKGSLYCEDCLNKPARNSIIDAAKVWPNIPPPNTQPAPLAVPLCNGCGTKGTGKETTLLLATSLGKAASKFGSPEVAVAGQVLENLPPIGVFWDIENCSVPSGRSATAVVQRIREKFFKGHREAEFICVCDISKENKEVIQELNNCQVTVAHINATAKNAADDKLRQSLRRFANTHTAPATVVLVSTDVNFALELSDLRHRHGFHIILVHKNQASEALLHHANELIRFEEFISDLPPRLPLKMPQCHTLLYVYNLPANKDGKSVSNRLRRLSDNCGGKVLSITGCSAILRFINQDSAERAQKRMENEDVFGNRIIVSFTPKNRELCETKSSNAIADKVKSPKKLKNPKLCLIKDASEQSSSAKATPGKGSQANSGSATKNTNVKSLQELCRMESKTGHRNSEHQQGHLRLVVPTHGNSSAAVSTPKNSGVAEPVYKTSQKKENLSARSVTSSPVEKKDKEETVFQVSYPSAFSKLVASRQVSPLLASQSWSSRSMSPNLLNRASPLAFNIANSSSEADCPDPFANGADVQVSNIDYRLSRKELQQLLQEAFARHGKVKSVELSPHTDYQLKAVVQMENLQDAIGAVNSLHRYKIGSKKILVSLATGAASKSLSLLSAETMSVLQDAPACCLPLFKFTDIYEKKFGHKLNVSDLYKLTDTVAIREQGNGRLVCLLPSSQARQSPLGSSQSHDGSSTNCSPIIFEELEYHEPVCRQHCSNKDFSEHEFDPDSYKIPFVILSLKTFAPQVHSLLQTHEGTVPLLDPWLLRSKSPVGNPQLIQFSREVIDLLKSQPSCVIPISHFIPSYHHHFAKQCRVSDYGYSKLIELLEAVPHVLQILGMGSKRLLTLTHRAQVKRFTQDLLKLLKSQASKQVIVREFSQAYHWCFSKDWDVTEYGVCELIDIVSEIPDTTICLSQQDNEMVICIPKRERTQDEIERTKQFSKDVVDLLRHQPHFRMPFNKFIPSYHHHFGRQCKLAYYGFTKLLELFEAIPDTLQVLECGEEKILTLTEVERFKALAAQFVKLLRSQKDNCLMMTDLLTEYAKTFGYTFRLQDYDVSSISALTQKLCHVVKVADIESGRQIQLINRKSLRSLTAQLLVLLMSWEGTTHLSVEELKRHYESTHNTPLNPCEYGFMTLTELLKSLPYLVEVFTNDKMEECVKLTSLYLFAKNVRSLLHTYHYQQIFLHEFSMAYTKYVGETLQPKTYGHSSVEELLGAIPQVVWIKGHGHKRIVVLKNDMKSRLSSLSLSPANHENQPSEGERILEVPESHTASELKLGADGSGPSHTEQELLRLTDDSPVDLLCAPVPSCLPSPQLRPDPVILQSADLIQFEERPQEPSEIMILNQEEKMEIPIPGKSKTLTSDSSSSCISAAVPVPPCPSSETSESLLSKDPVESPAKKQPKNRVKLAANFSLAPITKL

SEQ ID NO: 23498 - protein, 1739 aa, Homo sapiens
MMEGNGTENSCSRTRGWLQQDNDAKPWLWKFSNCFSRPEQTLPHSPQTKEYMENKKVAVELKDVPSPLHAGSKLFPAVPLPDIRSLQQPKIQLSSVPKVSCCAHCPNEPSTSPMRFGGGGGGSGGTSSLIHPGALLDSQSTRTITCQVGSGFAFQSASSLQNASARNNLAGIASDFPSMCLESNLSSCKHLPCCGKLHFQSCHGNVHKLHQFPSLQGCTSAGYFPCSDFTSGAPGHLEEHISQSELTPHLCTNSLHLNVVPPVCLKGSLYCEDCLNKPARNSIIDAAKVWPNIPPPNTQPAPLAVPLCNGCGTKGTGKETTLLLATSLGKAASKFEVAVAGQVLENLPPIGVFWDIENCSVPSGRSATAVVQRIREKFFKGHREAEFICVCDISKENKEVIQELNNCQVTVAHINATAKNAADDKLRQSLRRFANTHTAPATVVLVSTDVNFALELSDLRHRHGFHIILVHKNQASEALLHHANELIRFEEFISDLPPRLPLKMPQCHTLLYVYNLPANKDGKSVSNRLRRLSDNCGGKVLSITGCSAILRFINQDSAERAQKRMENEDVFGNRIIVSFTPKNRELCETKSSNAIADKVKSPKKLKNPKLCLIKDASEQSSSAKATPGKGSQANSGSATKNTNVKSLQELCRMESKTGHRNSEHQQGHLRLVVPTHGNSSAAVSTPKNSGVAEPVYKTSQKKENLSARSVTSSPVEKKDKEETVFQVSYPSAFSKLVASRQVSPLLASQSWSSRSMSPNLLNRASPLAFNIANSSSEADCPDPFANGADVQVSNIDYRLSRKELQQLLQEAFARHGKVKSVELSPHTDYQLKAVVQMENLQDAIGAVNSLHRYKIGSKKILVSLATGAASKSLSLLSAETMSVLQDAPACCLPLFKFTDIYEKKFGHKLNVSDLYKLTDTVAIREQGNGRLVCLLPSSQARQSPLGSSQSHDGSSTNCSPIIFEELEYHEPVCRQHCSNKDFSEHEFDPDSYKIPFVILSLKTFAPQVHSLLQTHEGTVPLLSFPDCYIAEFGDLEVVQENQGGVPLEHFITCVPGVNIATAQNGIKVVKWIHNKPPPPNTDPWLLRSKSPVGNPQLIQFSREVIDLLKSQPSCVIPISHFIPSYHHHFAKQCRVSDYGYSKLIELLEAVPHVLQILGMGSKRLLTLTHRAQVKRFTQDLLKLLKSQASKQVIVREFSQAYHWCFSKDWDVTEYGVCELIDIVSEIPDTTICLSQQDNEMVICIPKRERTQDEIERTKQFSKDVVDLLRHQPHFRMPFNKFIPSYHHHFGRQCKLAYYGFTKLLELFEAIPDTLQVLECGEEKILTLTEVERFKALAAQFVKLLRSQKDNCLMMTDLLTEYAKTFGYTFRLQDYDVSSISALTQKLCHVVKVADIESGRQIQLINRKSLRSLTAQLLVLLMSWEGTTHLSVEELKRHYESTHNTPLNPCEYGFMTLTELLKSLPYLVEVFTNDKMEECVKLTSLYLFAKNVRSLLHTYHYQQIFLHEFSMAYTKYVGETLQPKTYGHSSVEELLGAIPQVVWIKGHGHKRIVVLKNDMKSRLSSLSLSPANHENQPSEGERILEVPESHTASELKLGADGSGPSHTEQELLRLTDDSPVDLLCAPVPSCLPSPQLRPDPVILQSADLIQFEERPQEPSEIMILNQEEKMEIPIPGKSKTLTSDSSSSCISAAVPVPPCPSSETSESLLSKDPVESPAKKQPKNRVKLAANFSLAPITKL

SEQ ID NO: 23499 - protein, 1742 aa, Homo sapiens
MMEGNGTENSCSRTRGWLQQDNDAKPWLWKFSNCFSRPEQTLPHSPQTKEYMENKKVAVELKDVPSPLHAGSKLFPAVPLPDIRSLQQPKIQLSSVPKVSCCAHCPNEPSTSPMRFGGGGGGSGGTSSLIHPGALLDSQSTRTITCQVGSGFAFQSASSLQNASARNNLAGIASDFPSMCLESNLSSCKHLPCCGKLHFQSCHGNVHKLHQFPSLQGCTSAGYFPCSDFTSGAPGHLEEHISQSELTPHLCTNSLHLNVVPPVCLKGSLYCEDCLNKPARNSIIDAAKVWPNIPPPNTQPAPLAVPLCNGCGTKGTGKETTLLLATSLGKAASKFGSPEVAVAGQVLENLPPIGVFWDIENCSVPSGRSATAVVQRIREKFFKGHREAEFICVCDISKENKEVIQELNNCQVTVAHINATAKNAADDKLRQSLRRFANTHTAPATVVLVSTDVNFALELSDLRHRHGFHIILVHKNQASEALLHHANELIRFEEFISDLPPRLPLKMPCHTLLYVYNLPANKDGKSVSNRLRRLSDNCGGKVLSITGCSAILRFINQDSAERAQKRMENEDVFGNRIIVSFTPKNRELCETKSSNAIADKVKSPKKLKNPKLCLIKDASEQSSSAKATPGKGSQANSGSATKNTNVKSLQELCRMESKTGHRNSEHQQGHLRLVVPTHGNSSAAVSTPKNSGVAEPVYKTSQKKENLSARSVTSSPVEKKDKEETVFQVSYPSAFSKLVASRQVSPLLASQSWSSSRSMSPNLLNRASPLAFNIANSSSEADCPDPFANGADVQVSNIDYRLSRKELQQLLQEAFARHGKVKSVELSPHTDYQLKAVVQMENLQDAIGAVNSLHRYKIGSKKILVSLATGAASKSLSLLSAETMSVLQDAPACCLPLFKFTDIYEKKFGHKLNVSDLYKLTDTVAIREQGNGRLVCLLPSSQARQSPLGSSQSHDGSSTNCSPIIFEELEYHEPVCRQHCSNKDFSEHEFDPDSYKIPFVILSLKTFAPQVHSLLQTHEGTVPLLSFPDCYIAEFGDLEVVQENQGGVPLEHFITCVPGVNIATAQNGIKVVKWIHNKPPPPNTDPWLLRSKSPVGNPQLIQFSREVIDLLKSQPSCVIPISHFIPSYHHHFAKQCRVSDYGYSKLIELLEAVPHVLQILGMGSKRLLTLTHRAQVKRFTQDLLKLLKSQASKQVIVREFSQAYHWCFSKDWDVTEYGVCELIDIVSEIPDTTICLSQQDNEMVICIPKRERTQDEIERTKQFSKDVVDLLRHQPHFRMPFNKFIPSYHHHFGRQCKLAYYGFTKLLELFEAIPDTLQVLECGEEKILTLTEVERFKALAAQFVKLLRSQKDNCLMMTDLLTEYAKTFGYTFRLQDYDVSSISALTQKLCHVVKVADIESGRQIQLINRKSLRSLTAQLLVLLMSWEGTTHLSVEELKRHYESTHNTPLNPCEYGFMTLTELLKSLPYLVEVFTNDKMEECVKLTSLYLFAKNVRSLLHTYHYQQIFLHEFSMAYTKYVGETLQPKTYGHSSVEELLGAIPQVVWIKGHGHKRIVVLKNDMKSRLSSLSLSPANHENQPSEGERILEVPESHTASELKLGADGSGPSHTEQELLRLTDDSPVDLLCAPVPSCLPSPQLRPDPVILQSADLIQFEERPQEPSEIMILNQEEKMEIPIPGKSKTLTSDSSSSCISAAVPVPPCPSSETSESLLSKDPVESPAKKQPKNRVKLAANFSLAPITKL

SEQ ID NO: 23500 - protein, 292 aa, Homo sapiens
MMEGNGTENSCSRTRGWLQQDNDAKPWLWKFSNCFSRPEQTLPHSPQTKEYMENKKVAVELKDVPSPLHAGSKLFPAVPLPDIRSLQQPKIQLSSVPKVSCCAHCPNEPSTSPMRFGGGGGGSGGTSSLIHPGALLDSQSTRTITCQVGSGFAFQSASSLQNASARNNLAGIASDFPSMCLESNLSSCKHLPCCGKLHFQSCHGNVHKLHQFPSLQGCTSAGYFPCSDFTSGAPGHLEEHISQSELTPHLCTNSLHLNVVPPVCLKGSLYCEDCLNKVRIFLFLKLGAAEDN

SEQ ID NO: 23501 - protein, 1288 aa, Homo sapiens
MAGPCPRSGAERAGSCWQDPLAVALSRGRQLAAPPGRGCARSRPLSVVYVLTREPQPGLEPREGTEAEPLPLRCLREACAQVPRPRPPPQLRSLPFGTLELGDTAALDAFYNADVVVLEVSSSLVQPSLFYHLGVRESFSMTNNVLLCSQADLPDLQALREDVFQKNSDCVGSYTLIPYVVTATGRVLCGDAGLLRGLADGLVQAGVGTEALLTPLVGRLARLLEATPTDSCGYFRETIRRDIRQARERFSGPQLRQELARLQRRLDSVELLSPDIIMNLLLSYRDVQDYSAIIELVETLQALPTCDVAEQHNVCFHYTFALNRRNRPGDRAKALSVLLPLVQLEGSVAPDLYCMCGRIYKDMFFSSGFQDAGHREQAYHWYRKAFDVEPSLHSGINAAVLLIAAGQHFEDSKELRLIGMKLGCLLARKGCVEKMQYYWDVGFYLGAQILANDPTQVVLAAEQLYKLNAPIWYLVSVMETFLLYQHFRPTPEPPGGPPRRAHFWLHFLLQSCQPFKTACAQGDQCLVLVLEMNKVLLPAKLEVRGTDPVSTVTLSLLEPETQDIPSSWTFPVASICGVSASKRDERCCFLYALPPAQDVQLCFPSVGHCQWFCGLIQAWVTNPDSTAPAEEAEGAGEMLEFDYEYTETGERLVLGKGTYGVVYAGRDRHTRVRIAIKEIPERDSRFSQPLHEEIALHRRLRHKNIVRYLGSASQGGYLKIFMEEVPGGSLSSLLRSVWGPLKDNESTISFYTRQILQGLGYLHDNHIVHRDIKGDNVLINTFSGLLKISDFGTSKRLAGITPCTETFTGTLQYMAPEIIDQGPRGYGKAADIWSLGCTVIEMATGRPPFHELGSPQAAMFQVGMYKVHPPMPSSLSAEAQAFLLRTFEPDPRLRASAQTLLGDPFLQPGKRSRSPSSPRHAPRPSDAPSASPTPSANSTTQSQTFPCPQAPSQHPPSPPKRCLSYGGTSQLRVPEEPAAEEPASPEESSGLSLLHQESKRRAMLAAVLEQELPALAENLHQEQKQEQGARLGRNHVEELLRCLGAHIHTPNRRQLAQELRALQGRLRAQGLGPALLHRPLFAFPDAVKQILRKRQIRPHWMFVLDSLLSRAVRAALGVLGPEVEKEAVSPRSEELSNEGDSQQSPGQQSPLPVEPEQGPAPLMVQLSLLRAETDRLREILAGKEREYQALVQRALQRLNEEARTYVLAPEPPTALSTDQGLVQWLQELNVDSGTIQMLLNHSFTLHTLLTYATRDDLIYTRIRGGMVCRIWRAILAQRAGSTPVTSGP

SEQ ID NO: 23502 - protein, 797 aa, Homo sapiens
MNLLLSYRDVQDYSAIIELVETLQALPTCDVAEQHNVCFHYTFALNRRNRPGDRAKALSVLLPLVQLEGSVAPDLYCMCGRIYKDMFFSSGFQDAGHREQAYHWYRKAFDVEPSLHSGINAAVLLIAAGQHFEDSKELRLIGMKLGCLLARKGCVEKMQYYWDVGFYLGAQILANDPTQVVLAAEQLYKLNAPIWYLVSVMETFLLYQHFRPTPEPPGGPPRRAHFWLHFLLQSCQPFKTACAQGDQCLVLVLEMNKVLLPAKLEVRGTDPVSTVTLSLLEPETQDIPSSWTFPVASICGVSASKRDERCCFLYALPPAQDVQLCFPSVGHCQWFCGLIQAWVTNPDSTAPAEEAEGAGEMLEFDYEYTETGERLVLGKGTYGVVYAGRDRHTRVRIAIKEIPERDSRFSQPLHEEIALHRRLRHKNIVRYLGSASQGGYLKIFMEEVPGGSLSSLLRSVWGPLKDNESTISFYTRQILQGLGYLHDNHIVHRDIKGDNVLINTFSGLLKISDFGTSKRLAGITPCTETFTGTLQYMAPEIIDQGPRGYGKAADIWSLGCTVIEMATGRPPFHELGSPQAAMFQVGMYKVHPPMPSSLSAEAQAFLLRTFEPDPRLRASAQTLLGDPFLQPGKRSRSPSSPRHAPRPSDAPSASPTPSANSTTQSQTFPCPQAPSQHPPSPPKRCLSYGGTSQLRVPEEPAAEEPASPEESSGLSLLHQESKRRAMLAAVLEQELPALAENLHQEQKQEQGARLGRNHVEELLRCLGAHIHTPNRRQLAQELRALQGWMNGEDKGSF

SEQ ID NO: 23503 - protein, 1280 aa, Homo sapiens
MAGPCPRSGAERAGSCWQDPLAVALSRGRQLAAPPGRGCARSRPLSVVYVLTREPQPGLEPREGTEAEPLPLRCLREACAQVPRPRPPPQLRSLPFGTLELGDTAALDAFYNADVVVLEVSSSLVQPSLFYHLGVRESFSMTNNVLLCSQADLPDLQALRDCVGSYTLIPYVVTATGRVLCGDAGLLRGLADGLVQAGVGTEALLTPLVGRLARLLEATPTDSCGYFRETIRRDIRQARERFSGPQLRQELARLQRRLDSVELLSPDIIMNLLLSYRDVQDYSAIIELVETLQALPTCDVAEQHNVCFHYTFALNRRNRPGDRAKALSVLLPLVQLEGSVAPDLYCMCGRIYKDMFFSSGFQDAGHREQAYHWYRKAFDVEPSLHSGINAAVLLIAAGQHFEDSKELRLIGMKLGCLLARKGCVEKMQYYWDVGFYLGAQILANDPTQVVLAAEQLYKLNAPIWYLVSVMETFLLYQHFRPTPEPPGGPPRRAHFWLHFLLQSCQPFKTACAQGDQCLVLVLEMNKVLLPAKLEVRGTDPVSTVTLSLLEPETQDIPSSWTFPVASICGVSASKRDERCCFLYALPPAQDVQLCFPSVGHCQWFCGLIQAWVTNPDSTAPAEEAEGAGEMLEFDYEYTETGERLVLGKGTYGVVYAGRDRHTRVRIAIKEIPERDSRFSQPLHEEIALHRRLRHKNIVRYLGSASQGGYLKIFMEEVPGGSLSSLLRSVWGPLKDNESTISFYTRQILQGLGYLHDNHIVHRDIKGDNVLINTFSGLLKISDFGTSKRLAGITPCTETFTGTLQYMAPEIIDQGPRGYGKAADIWSLGCTVIEMATGRPPFHELGSPQAAMFQVGMYKVHPPMPSSLSAEAQAFLLRTFEPDPRLRASAQTLLGDPFLQPGKRSRSPSSPRHAPRPSDAPSASPTPSANSTTQSQTFPCPQAPSQHPPSPPKRCLSYGGTSQLRVPEEPAAEEPASPEESSGLSLLHQESKRRAMLAAVLEQELPALAENLHQEQKQEQGARLGRNHVEELLRCLGAHIHTPNRRQLAQELRALQGRLRAQGLGPALLHRPLFAFPDAVKQILRKRQIRPHWMFVLDSLLSRAVRAALGVLGPEVEKEAVSPRSEELSNEGDSQQSPGQQSPLPVEPEQGPAPLMVQLSLLRAETDRLREILAGKEREYQALVQRALQRLNEEARTYVLAPEPPTALSTDQGLVQWLQELNVDSGTIQMLLNHSFTLHTLLTYATRDDLIYTRIRGGMVCRIWRAILAQRAGSTPVTSGP

SEQ ID NO: 23504 - protein, 115 aa, Homo sapiens
MAWIPLLLPLLTLCTGSEASYELTQPPSVSVSLGQMARITCSGEALPKKYAYWYQQKPGQFPVLVIYKDSERPSGIPERFSGSSSGTIVTLTISGVQAEDEADYYCLSADSSGTY

SEQ ID NO: 23505 - protein, 289 aa, Homo sapiens
MLGWCEAIARNPHRIPNNTRTPEISGDLADASQTSTLNEKSPGRSASRSSNISKASSPTTGTAPRSQSRLSVCPSTQDICRICHCEGDEESPLITPCRCTGTLRFVHQSCLHQWIKSSDTRCCELCKYDFIMETKLKPLRKWEKLQMTTSERRKIFCSVTFHVIAITCVVWSLYVLIDRTAEEIKQGNDNGVLEWPFWTKLVVVAIGFTGGLVFMYVQCKVYVQLWRRLKAYNRVIFVQNCPDTAKKLEKNFSCNVNTDIKDAVVVPVPQTGANSLPSAEGGPPEVVSV

SEQ ID NO: 23506 - protein, 272 aa, Homo sapiens
MTSSHVCCNFLNMWKKSKISTMYYLNQDAKLSNLFLQASSPTTGTAPRSQSRLSVCPSTQDICRICHCEGDEESPLITPCRCTGTLRFVHQSCLHQWIKSSDTRCCELCKYDFIMETKLKPLRKWEKLQMTTSERRKIFCSVTFHVIAITCVVWSLYVLIDRTAEEIKQGNDNGVLEWPFWTKLVVVAIGFTGGLVFMYVQCKVYVQLWRRLKAYNRVIFVQNCPDTAKKLEKNFSCNVNTDIKDAVVVPVPQTGANSLPSAEGGPPEVVSV

SEQ ID NO: 23507 - protein, 606 aa, Homo sapiens
MSTASAASSSSSSSAGEMIEAPSQVLNFEEIDYKEIEVEEVVGRGAFGVVCKAKWRAKDVAIKQIESESERKAFIVELRQLSRVNHPNIVKLYGACLNPVCLVMEYAEGGSLYNVLHGAEPLPYYTAAHAMSWCLQCSQGVAYLHSMQPKALIHRDLKPPNLLLVAGGTVLKICDFGTACDIQTHMTNNKGSAAWMAPEVFEGSNYSEKCDVFSWGIILWEVITRRKPFDEIGGPAFRIMWAVHNGTRPPLIKNLPKPIESLMTRCWSKDPSQRPSMEEIVKIMTHLMRYFPGADEPLQYPCQYSDEGQSNSATSTGSFMDIASTNTSNKSDTNMEQVPATNDTIKRLESKLLKNQAKQQSESGRLSLGASRGSSVESLPPTSEGKRMSADMSEIEARIAATTAYSKPKRGHRKTASFGNILDVPEIVISGNGQPRRRSIQDLTVTGTEPGQVSSRSSSPSVRMITTSGPTSEKPTRSHPWTPDDSTDTNGSDNSIPMAYLTLDHQLQPLAPCPNSKESMAVFEQHCKMAQEYMKVQTEIALLLQRKQELVAELDQDEKDQQNTSRLVQEHKKLLDENKSLSTYYQQCKKQLEVIRSQQQKRQGTS

SEQ ID NO: 23508 - protein, 579 aa, Homo sapiens
MSTASAASSSSSSSAGEMIEAPSQVLNFEEIDYKEIEVEEVVGRGAFGVVCKAKWRAKDVAIKQIESESERKAFIVELRQLSRVNHPNIVKLYGACLNPVCLVMEYAEGGSLYNVLHGAEPLPYYTAAHAMSWCLQCSQGVAYLHSMQPKALIHRDLKPPNLLLVAGGTVLKICDFGTACDIQTHMTNNKGSAAWMAPEVFEGSNYSEKCDVFSWGIILWEVITRRKPFDEIGGPAFRIMWAVHNGTRPPLIKNLPKPIESLMTRCWSKDPSQRPSMEEIVKIMTHLMRYFPGADEPLQYPCQYSDEGQSNSATSTGSFMDIASTNTSNKSDTNMEQVPATNDTIKRLESKLLKNQAKQQSESGRLSLGASRGSSVESLPPTSEGKRMSADMSEIEARIAATTGNGQPRRRSIQDLTVTGTEPGQVSSRSSSPSVRMITTSGPTSEKPTRSHPWTPDDSTDTNGSDNSIPMAYLTLDHQLQPLAPCPNSKESMAVFEQHCKMAQEYMKVQTEIALLLQRKQELVAELDQDEKDQQNTSRLVQEHKKLLDENKSLSTYYQQCKKQLEVIRSQQQKRQGTS

SEQ ID NO: 23509 - protein, 518 aa, Homo sapiens
MSTASAASSSSSSSAGEMIEAPSQVLNFEEIDYKEIEVEEVVGRGAFGVVCKAKWRAKDVAIKQIESESERKAFIVELRQLSRVNHPNIVKLYGACLNPVCLVMEYAEGGSLYNVLHGAEPLPYYTAAHAMSWCLQCSQGVAYLHSMQPKALIHRDLKPPNLLLVAGGTVLKICDFGTACDIQTHMTNNKGSAAWMAPEVFEGSNYSEKCDVFSWGIILWEVITRRKPFDEIGGPAFRIMWAVHNGTRPPLIKNLPKPIESLMTRCWSKDPSQRPSMEEIVKIMTHLMRYFPGADEPLQYPCQYSDEGQSNSATSTGSFMDIASTNTSNKSDTNMEQVPATNDTIKRLESKLLKNQAKQQSESGRLSLGASRGSSVESLPPTSEGKRMSADMSEIEARIAATTAYSKPKRGHRKTASFGNILDVPEIVISGNGQPRRRSIQDLTVTGTEPGQVSSRSSSPSVRMITTSGPTSEKPTRSHPWTPDDSTDTNGSDNSIPMAYLTLDHQLQARTSCRTGPG

SEQ ID NO: 23510 - protein, 491 aa, Homo sapiens
MSTASAASSSSSSSAGEMIEAPSQVLNFEEIDYKEIEVEEVVGRGAFGVVCKAKWRAKDVAIKQIESESERKAFIVELRQLSRVNHPNIVKLYGACLNPVCLVMEYAEGGSLYNVLHGAEPLPYYTAAHAMSWCLQCSQGVAYLHSMQPKALIHRDLKPPNLLLVAGGTVLKICDFGTACDIQTHMTNNKGSAAWMAPEVFEGSNYSEKCDVFSWGIILWEVITRRKPFDEIGGPAFRIMWAVHNGTRPPLIKNLPKPIESLMTRCWSKDPSQRPSMEEIVKIMTHLMRYFPGADEPLQYPCQYSDEGQSNSATSTGSFMDIASTNTSNKSDTNMEQVPATNDTIKRLESKLLKNQAKQQSESGRLSLGASRGSSVESLPPTSEGKRMSADMSEIEARIAATTGNGQPRRRSIQDLTVTGTEPGQVSSRSSSPSVRMITTSGPTSEKPTRSHPWTPDDSTDTNGSDNSIPMAYLTLDHQLQARTSCRTGPG

SEQ ID NO: 23511 - protein, 991 aa, Homo sapiens
MAESFFSDFGLLWYLKELRKEEFWKFKELLKQPLEKFELKPIPWAELKKASKEDVAKLLDKHYPGKQAWEVTLNLFLQINRKDLWTKAQEEMRNKLNPYRKHMKETFQLIWEKETCLHVPEHFYKETMKNEYKELNDAYTAAARRHTVVLEGPDGIGKTTLLRKVMLDWAEGNLWKDRFTFVFFLNVCEMNGIAETSLLELLSRDWPESSEKIEDIFSQPERILFIMDGFEQLKFNLQLKADLSDDWRQRQPMPIILSSLLQKKMLPESSLLIALGKLAMQKHYFMLRHPKLIKLLGFSESEKKSYFSYFFGEKSKALKVFNFVRDNGPLFILCHNPFTCWLVCTCVKQRLERGEDLEINSQNTTYLYASFLTTVFKAGSQSFPPKVNRARLKSLCALAAEGIWTYTFVFSHGDLRRNGLSESEGVMWVGMRLLQRRGDCFAFMHLCIQEFCAAMFYLLKRPKDDPNPAIGSITQLVRASVVQPQTLLTQVGIFMFGISTEEIVSMLETSFGFPLSKDLKQEITQCLESLSQCEADREAIAFQELFIGLFETQEKEFVTKVMNFFEEVFIYIGNIEHLVIASFCLKHCQHLTTLRMCVENIFPDDSGCISDYNEKLVYWRELCSMFITNKNFQILDMENTSLDDPSLAILCKALAQPVCKLRKLIFTSVYFGHDSELFKAVLHNPHLKLLSLYGTSLSQSDIRHLCETLKHPMCKIEELILGKCDISSEVCEDIASVLACNSKLKHLSLVENPLRDEGMTLLCEALKHSHCALERLMLMYCCLTSVSCDSISEVLLCSKSLSLLDLGSNALEDNGVASLCAALKHPGCSIRELWLMGCFLTSDSCKDIAAVLICNGKLKTLKLGHNEIGDTGVRQLCAALQHPHCKLECLGLQTCPITRACCDDIAAALIACKTLRSLNLDWIALDADAVVVLCEALSHPDCALQMLGLHKSGFDEETQKILMSVEEKIPHLTISHGPWIDEEYKIRGVLL

SEQ ID NO: 23512 - protein, 986 aa, Homo sapiens
MAESFFSDFGLLWYLKELRKEEFWKFKELLKQPLEKFELKPIPWAELKKASKEDVAKLLDKHYPGKQAWEVTLNLFLQINRKDLWTKAQEEMRNKLNPYRKHMKETFQLIWEKETCLHVPEHFYKETMKNEYKELNDAYTAAARRHTVVLEGPDGIGKTTLLRKVMLDWAEGNLWKDRFTFVFFLNVCEMNGIAETSLLELLSRDWPESSEKIEDIFSQPERILFIMDGFEQLKFNLQLKADLSDDWRQRQPMPIILSSLLQKKMLPESSLLIALGKLAMQKHYFMLRHPKLIKLLGFSESEKKSYFSYFFGEKSKALKVFNFVRDNGPLFILCHNPFTCWLVCTCVKQRLERGEDLEINSQNTTYLYASFLTTVFKAGSQSFPPKVNRARLKSLCALAAEGIWTYTFVFSHGDLRRNGLSESEGVMWVGMRLLQRRGDCFAFMHLCIQEFCAAMFYLLKRPKDDPNPAIGSITQLVRASVVQPQTLLTQVGIFMFGISTEEIVSMLETSFGFPLSKDLKQEITQCLESLSQCEADREAIAFQELFIGLFETQEKEFVTKVMNFFEEVFIYIGNIEHLVIASFCLKHCQHLTTLRMCVENIFPDDSGCISDYNEKLVYWRELCSMFITNKNFQILDMENTSLDDPSLAILCKALAQPVCKLRKLIFTSVYFGHDSELFKAVLHNPHLKLLSLYGTSLSQSDIRHLCETLKHPMCKIEELILGKCDISSEVCEDIASVLACNSKLKHLSLVENPLRDEGMTLLCEALKHSHCALERLMLMYCCLTSVSCDSISEVLLCSKSLSLLDLGSNALEDNGVASLCAALKHPGCSIRELWLMGCFLTSDSCKDIAAVLICNGKLKTLKLGHNEIGDTGVRQLCAALQHPHCKLECLGLQTCPITRACCDDIAAALIACKTLRSLNLDWIALDADAVVVLCEALSHPDCALQMLGNCQKSLGDTVAPGENHCSIKHLLLTLPINMQRQLRLQK
